United States Patent Application Publication US 2011/0183924 A1 - sequence listing, part 12

SEQ ID NO: 28555 - DNA, 5609 bp, Homo sapiens
cggcgaacagacgttctttctcctccatgcagttacacaaaaggagggctacggaaactaaaagtttcggggcctctggctcggtgtgtggagaaaagagaaaacctggagacgggatatgaagatcaatgatgcagactgatggtcttgatgaagctgggcatttataactagattcattaaggaatacaaagaaaatacttaaagggatcaataatggtgtcttctggttgcagaatgcgaagtctgtggtttatcattgtaatcagcttcttaccaaatacagaaggtttcagcagagcagctttaccatttgggctggtgaggcgagaattatcctgtgaaggttattctatagatctgcgatgcccgggcagtgatgtcatcatgattgagagcgctaactatggtcggacggatgacaagatttgtgatgctgacccatttcagatggagaatacagactgctacctccccgatgccttcaaaattatgactcaaaggtgcaacaatcgaacacagtgtatagtagttactgggtcagatgtgtttcctgatccatgtcctggaacatacaaataccttgaagtccaatatgaatgtgtcccttacatttttgtgtgtcctgggaccttgaaagcaattgtggactcaccatgtatatatgaagctgaacaaaaggcgggtgcttggtgcaaggaccctcttcaggctgcagataaaatttatttcatgccctggactccctatcgtaccgatactttaatagaatatgcttctttagaagatttccaaaatagtcgccaaacaacaacatataaacttccaaatcgagtagatggtactggatttgtggtgtatgatggtgctgtcttctttaacaaagaaagaacgaggaatattgtgaaatttgacttgaggactagaattaagagtggcgaggccataattaactatgccaactaccatgatacctcaccatacagatggggaggaaagactgatatcgacctagcagttgatgaaaatggtttatgggtcatttacgccactgaacagaacaatggaatgatagttattagccagctgaatccatacactcttcgatttgaagcaacgtgggagactgtatacgacaaacgtgccgcatcaaatgcttttatgatatgcggagtcctctatgtggttaggtcagtttatcaagacaatgaaagtgaaacaggcaagaactcaattgattacatttataatacccgattaaaccgaggagaatatgtagacgttcccttccccaaccagtatcagtatattgctgcagtggattacaatccaagagataaccaactttacgtgtggaacaataacttcattttacgatattctctggagtttggtccacctgatcctgcccaagtgcctaccacagctgtgacaataacttcttcagctgagctgttcaaaaccataatatcaaccacaagcactacttcacagaaaggccccatgagcacaactgtagctggatcacaggaaggaagcaaagggacaaaaccacctccagcagtttctacaaccaaaattccacctataacaaatatttttcccctgccagagagattctgtgaagcattagactccaaggggataaagtggcctcagacacaaaggggaatgatggttgaacgaccatgccctaagggaacaagaggaactgcctcatatctctgcatgatttccactggaacatggaaccctaagggccccgatcttagcaactgtacctcacactgggtgaatcagctggctcagaagatcagaagcggagaaaatgctgctagtcttgccaatgaactggctaaacataccaaagggccagtgtttgctggggatgtaagttcttcagtgagattgatggagcagttggtggacatccttgatgcacagctgcaggaactgaaacctagtgaaaaagattcagctggacggagttataacaaggcaattgttgacacagtggacaaccttctgagacctgaagctttggaatcatggaaacatatgaattcttctgaacaagcacatactgcaacaatgttactcgatacattggaagaaggagcttttgtcctagctgacaatcttttagaaccaacaagggtctcaatgcccacagaaaatattgtcctggaagttgccgtactcagtacagaaggacagatccaagactttaaatttcctctgggcatcaaaggagcaggcagctcaatccaactgtccgcaaataccgtcaaacagaacagcaggaatgggcttgcaaagttggtgttcatcatttaccggagcctgggacagttccttagtacagaaaatgcaaccattaaactgggtgctgattttattggtcgtaatagcaccattgcagtgaactctcacgtcatttcagtttcaatcaataaagagtccagccgagtatacctgactgatcctgtgctttttaccctgccacacattgatcctgacaattatttcaatgcaaactgctccttctggaactactcagagagaactatgatgggatattggtctacccagggctgcaagctggttgacactaataaaactcgaacaacgtgtgcatgcagccacctaaccaattttgcaattctcatggcccacagggaaattgcatataaagatggcgttcatgaattacttcttacagtcatcacctgggtgggaattgtcatttcccttgtttgcctggctatctgcatcttcaccttctgctttttccgtggcctacagagtgaccgaaatactattcacaagaacctttgtatcaaccttttcattgctgaatttattttcctaataggcattgataagacaaaatatgcgattgcatgcccaatatttgcaggacttctacactttttctttttggcagcttttgcttggatgtgcctagaaggtgtgcagctctacctaatgttagttgaagtttttgaaagtgaatattcaaggaaaaaatattactatgttgctggttacttgtttcctgccacagtggttggagtttcagctgctattgactataagagctatggaacagaaaaagcttgctggcttcatgttgataactactttatatggagcttcattggacctgttaccttcattattctgctaaatattatcttcttggtgatcacattgtgcaaaatggtgaagcattcaaacactttgaaaccagattctagcaggttggaaaacattaagtcttgggtgcttggcgctttcgctcttctgtgtcttcttggcctcacctggtcctttgggttgctttttattaatgaggagactattgtgatggcatatctcttcactatatttaatgctttccagggagtgttcattttcatctttcactgtgctctccaaaagaaagtacgaaaagaatatggcaagtgcttcagacactcatactgctgtggaggcctcccaactgagagtccccacagttcagtgaaggcatcaaccaccagaaccagtgctcgctattcctctggcacacaggacattcactgaacaatgccagggatacaagtgccatggatactctaccgctaaatggtaattttaacaacagctactcgctgcacaagggtgactataatgacagcgtgcaagttgtggactgtggactaagtctgaatgatactgcttttgagaaaatgatcatttcagaattagtgcacaacaacttacggggcagcagcaagactcacaacctcgagctcacgctaccagtcaaacctgtgattggaggtagcagcagtgaagatgatgctattgtggcagatgcttcatctttaatgcacagcgacaacccagggctggagctccatcacaaagaactcgaggcaccacttattcctcagcggactcactcccttctgtaccaaccccagaagaaagtgaagtccgagggaactgacagctatgtctcccaactgacagcagaggctgaagatcacctacagtcccccaacagagactctctttatacaagcatgcccaatcttagagactctccctatccggagagcagccctgacatggaagaagacctctctccctccaggaggagtgagaatgaggacatttactataaaagcatgccaaatcttggagctggccatcagcttcagatgtgctaccagatcagcaggggcaatagtgatggttatataatccccattaacaaagaagggtgtattccagaaggagatgttagagaaggacaaatgcagctggttacaagtctttaatcatacagctaaggaattccaagggccacatgcgagtattaataaataaagacaccattggcctgacgcagctccctcaaactctgcttgaagagatgactcttgacctgtggttctctggtgtaaaaaagatgactgaaccttgcagttctgtgaatttttataaaacatacaaaaactttgtatatacacagagtatactaaagtgaattatttgttacaaagaaaagagatgccagccaggtattttaagattctgctgctgtttagagaaattgtgaaacaagcaaaacaaaactttccagccattttactgcagcagtctgtgaactaaatttgtaaatatggctgcaccatttttgtaggcctgcattgtattatatacaagacgtaggctttaaaatcctgtgggacaaatttactgtaccttactattcctgacaagacttggaaaagcaggagagatattctgcatcagtttgcagttcactgcaaatcttttacattaaggcaaagattgaaaacatgcttaaccactagcaatcaagccacaggccttatttcatatgtttcctcaactgtacaatgaactattctcatgaaaaatggctaaagaaattatattttgttctattgctagggtaaaataaatacatttgtgtccaactgaaatataattgtcattaaaataattttaaagagtgaagaaaatattgtgaaaagctcttggttgcacatgttatgaaatgttttttcttacactttgtcatggtaagttctactcattttcacttcttttccactgtatacagtgttctgctttgacaaagttagtctttattacttacatttaaatttcttattgccaaaagaacgtgttttatggggagaaacaaactctttgaagccagttatgtcatgccttgcacaaaagtgatgaaatctagaaaagattgtgtgtcacccctgtttattcttgaacagagggcaaagagggcactgggcacttctcacaaactttctagtgaacaaaaggtgcctattcttttttaaaaaaataaaataaaacataaatattactcttccatattccttctgcctatatttagtaattaatttattttatgataaagttctaatgaaatgtaaattgtttcagcaaaattctgcttttttttcatccctttgtgtaaacctgttaataatgagcccatcactaatatccagtgtaaagtttaacacggtttgacagtaaataaatgtgaattttttcaagta

SEQ ID NO: 28556 - DNA, 6222 bp, Homo sapiens
cgtgtctgtttctctttctctctccctctcttgcgctgtccctcattcatgcactcttccatctttttgccattgtgccagctcaatttaaatgtatctgctctgtatctgttcaagtggagataatccatgcaaatcaggagccgtggctctcaatgcctggttcacagagaggactcagcttgaggaggtcactcgttcacagccgctcctcccattatatttttccccttattgcagaactgctgtatgtatacagtgactgaaaggactcaatttactgcaactgctgcctggctttacttacaacttttttttttttataaaggaacttacctccatctgtcttttcaaggttacagaccacttactctaaacttcacaaatggttctgaagagtatggagcctacgtagattcataagagcccaatgtttccaaaggacattaattttgatttctccaatgaaggcttgtggctgtccttatgctttacaaaacattaccaaatcagagccgaaaagaaaactttggaatttgaagagagcttgataactgtgttctatgtggatccagcattacaactgataagggtatttatggcacaatgaaaaattcatctttcccagaatgatatgaagatcaatgatgcagactgatggtcttgatgaagctgggcatttataactagattcattaaggaatacaaagaaaatacttaaagggatcaataatggtgtcttctggttgcagaatgcgaagtctgtggtttatcattgtaatcagcttcttaccaaatacagaaggtttcagcagagcagctttaccatttgggctggtgaggcgagaattatcctgtgaaggttattctatagatctgcgatgcccgggcagtgatgtcatcatgattgagagcgctaactatggtcggacggatgacaagatttgtgatgctgacccatttcagatggagaatacagactgctacctccccgatgccttcaaaattatgactcaaaggtgcaacaatcgaacacagtgtatagtagttactgggtcagatgtgtttcctgatccatgtcctggaacatacaaataccttgaagtccaatatgaatgtgtcccttacatttttgtgtgtcctgggaccttgaaagcaattgtggactcaccatgtatatatgaagctgaacaaaaggcgggtgcttggtgcaaggaccctcttcaggctgcagataaaatttatttcatgccctggactccctatcgtaccgatactttaatagaatatgcttctttagaagatttccaaaatagtcgccaaacaacaacatataaacttccaaatcgagtagatggtactggatttgtggtgtatgatggtgctgtcttctttaacaaagaaagaacgaggaatattgtgaaatttgacttgaggactagaattaagagtggcgaggccataattaactatgccaactaccatgatacctcaccatacagatggggaggaaagactgatatcgacctagcagttgatgaaaatggtttatgggtcatttacgccactgaacagaacaatggaatgatagttattagccagctgaatccatacactcttcgatttgaagcaacgtgggagactgtatacgacaaacgtgccgcatcaaatgcttttatgatatgcggagtcctctatgtggttaggtcagtttatcaagacaatgaaagtgaaacaggcaagaactcaattgattacatttataatacccgattaaaccgaggagaatatgtagacgttcccttccccaaccagtatcagtatattgctgcagtggattacaatccaagagataaccaactttacgtgtggaacaataacttcattttacgatattctctggagtttggtccacctgatcctgcccaagtgcctaccacagctgtgacaataacttcttcagctgagctgttcaaaaccataatatcaaccacaagcactacttcacagaaaggccccatgagcacaactgtagctggatcacaggaaggaagcaaagggacaaaaccacctccagcagtttctacaaccaaaattccacctataacaaatatttttcccctgccagagagattctgtgaagcattagactccaaggggataaagtggcctcagacacaaaggggaatgatggttgaacgaccatgccctaagggaacaagaggaactgcctcatatctctgcatgatttccactggaacatggaaccctaagggccccgatcttagcaactgtacctcacactgggtgaatcagctggctcagaagatcagaagcggagaaaatgctgctagtcttgccaatgaactggctaaacataccaaagggccagtgtttgctggggatgtaagttcttcagtgagattgatggagcagttggtggacatccttgatgcacagctgcaggaactgaaacctagtgaaaaagattcagctggacggagttataacaaggcaattgttgacacagtggacaaccttctgagacctgaagctttggaatcatggaaacatatgaattcttctgaacaagcacatactgcaacaatgttactcgatacattggaagaaggagcttttgtcctagctgacaatcttttagaaccaacaagggtctcaatgcccacagaaaatattgtcctggaagttgccgtactcagtacagaaggacagatccaagactttaaatttcctctgggcatcaaaggagcaggcagctcaatccaactgtccgcaaataccgtcaaacagaacagcaggaatgggcttgcaaagttggtgttcatcatttaccggagcctgggacagttccttagtacagaaaatgcaaccattaaactgggtgctgattttattggtcgtaatagcaccattgcagtgaactctcacgtcatttcagtttcaatcaataaagagtccagccgagtatacctgactgatcctgtgctttttaccctgccacacattgatcctgacaattatttcaatgcaaactgctccttctggaactactcagagagaactatgatgggatattggtctacccagggctgcaagctggttgacactaataaaactcgaacaacgtgtgcatgcagccacctaaccaattttgcaattctcatggcccacagggaaattgcatataaagatggcgttcatgaattacttcttacagtcatcacctgggtgggaattgtcatttcccttgtttgcctggctatctgcatcttcaccttctgctttttccgtggcctacagagtgaccgaaatactattcacaagaacctttgtatcaaccttttcattgctgaatttattttcctaataggcattgataagacaaaatatgcgattgcatgcccaatatttgcaggacttctacactttttctttttggcagcttttgcttggatgtgcctagaaggtgtgcagctctacctaatgttagttgaagtttttgaaagtgaatattcaaggaaaaaatattactatgttgctggttacttgtttcctgccacagtggttggagtttcagctgctattgactataagagctatggaacagaaaaagcttgctggcttcatgttgataactactttatatggagcttcattggacctgttaccttcattattctgctaaatattatcttcttggtgatcacattgtgcaaaatggtgaagcattcaaacactttgaaaccagattctagcaggttggaaaacattaagtcttgggtgcttggcgctttcgctcttctgtgtcttcttggcctcacctggtcctttgggttgctttttattaatgaggagactattgtgatggcatatctcttcactatatttaatgctttccagggagtgttcattttcatctttcactgtgctctccaaaagaaagtacgaaaagaatatggcaagtgcttcagacactcatactgctgtggaggcctcccaactgagagtccccacagttcagtgaaggcatcaaccaccagaaccagtgctcgctattcctctggcacacagagtcgtataagaagaatgtggaatgatactgtgagaaaacaatcagaatcttcttttatctcaggtgacatcaatagcacttcaacacttaatcaaggacattcactgaacaatgccagggatacaagtgccatggatactctaccgctaaatggtaattttaacaacagctactcgctgcacaagggtgactataatgacagcgtgcaagttgtggactgtggactaagtctgaatgatactgcttttgagaaaatgatcatttcagaattagtgcacaacaacttacggggcagcagcaagactcacaacctcgagctcacgctaccagtcaaacctgtgattggaggtagcagcagtgaagatgatgctattgtggcagatgcttcatctttaatgcacagcgacaacccagggctggagctccatcacaaagaactcgaggcaccacttattcctcagcggactcactcccttctgtaccaaccccagaagaaagtgaagtccgagggaactgacagctatgtctcccaactgacagcagaggctgaagatcacctacagtcccccaacagagactctctttatacaagcatgcccaatcttagagactctccctatccggagagcagccctgacatggaagaagacctctctccctccaggaggagtgagaatgaggacatttactataaaagcatgccaaatcttggagctggccatcagcttcagatgtgctaccagatcagcaggggcaatagtgatggttatataatccccattaacaaagaagggtgtattccagaaggagatgttagagaaggacaaatgcagctggttacaagtctttaatcatacagctaaggaattccaagggccacatgcgagtattaataaataaagacaccattggcctgacgcagctccctcaaactctgcttgaagagatgactcttgacctgtggttctctggtgtaaaaaagatgactgaaccttgcagttctgtgaatttttataaaacatacaaaaactttgtatatacacagagtatactaaagtgaattatttgttacaaagaaaagagatgccagccaggtattttaagattctgctgctgtttagagaaattgtgaaacaagcaaaacaaaactttccagccattttactgcagcagtctgtgaactaaatttgtaaatatggctgcaccatttttgtaggcctgcattgtattatatacaagacgtaggctttaaaatcctgtgggacaaatttactgtaccttactattcctgacaagacttggaaaagcaggagagatattctgcatcagtttgcagttcactgcaaatcttttacattaaggcaaagattgaaaacatgcttaaccactagcaatcaagccacaggccttatttcatatgtttcctcaactgtacaatgaactattctcatgaaaaatggctaaagaaattatattttgttctattgctagggtaaaataaatacatttgtgtccaactgaaatataattgtcattaaaataattttaaagagtgaagaaaatattgtgaaaagctcttggttgcacatgttatgaaatgttttttcttacactttgtcatggtaagttctactcattttcacttcttttccactgtatacagtgttctgctttgacaaagttagtctttattacttacatttaaatttcttattgccaaaagaacgtgttttatggggagaaacaaactctttgaagccagttatgtcatgccttgcacaaaagtgatgaaatctagaaaagattgtgtgtcacccctgtttattcttgaacagagggcaaagagggcactgggcacttctcacaaactttctagtgaacaaaaggtgcctattcttttttaaaaaaataaaataaaacataaatattactcttccatattccttctgcctatatttagtaattaatttattttatgataaagttctaatgaaatgtaaattgtttcagcaaaattctgcttttttttcatccctttgtgtaaacctgttaataatgagcccatcactaatatccagtgtaaagtttaacacggtttgacagtaaataaatgtgaattttttcaagta

SEQ ID NO: 28557 - DNA, 6390 bp, Homo sapiens
cgtgtctgtttctctttctctctccctctcttgcgctgtccctcattcatgcactcttccatctttttgccattgtgccagctcaatttaaatgtatctgctctgtatctgttcaagtggagataatccatgcaaatcaggagccgtggctctcaatgcctggttcacagagaggactcagcttgaggaggtcactcgttcacagccgctcctcccattatatttttccccttattgcagaactgctgtatgtatacagtgactgaaaggactcaatttactgcaactgctgcctggctttacttacaacttttttttttttataaaggaacttacctccatctgtcttttcaaggttacagaccacttactctaaacttcacaaatggttctgaagagtatggagcctacgtagattcataagagcccaatgtttccaaaggacattaattttgatttctccaatgaaggcttgtggctgtccttatgctttacaaaacattaccaaatcagagccgaaaagaaaactttggaatttgaagagagcttgataactgtgttctatgtggatccagcattacaactgataagggtatttatggcacaatgaaaaattcatctttcccagaatgatatgaagatcaatgatgcagactgatggtcttgatgaagctgggcatttataactagattcattaaggaatacaaagaaaatacttaaagggatcaataatggtgtcttctggttgcagaatgcgaagtctgtggtttatcattgtaatcagcttcttaccaaatacagaaggtttcagcagagcagctttaccatttgggctggtgaggcgagaattatcctgtgaaggttattctatagatctgcgatgcccgggcagtgatgtcatcatgattgagagcgctaactatggtcggacggatgacaagatttgtgatgctgacccatttcagatggagaatacagactgctacctccccgatgccttcaaaattatgactcaaaggtgcaacaatcgaacacagtgtatagtagttactgggtcagatgtgtttcctgatccatgtcctggaacatacaaataccttgaagtccaatatgaatgtgtcccttacatttttgtgtgtcctgggaccttgaaagcaattgtggactcaccatgtatatatgaagctgaacaaaaggcgggtgcttggtgcaaggaccctcttcaggctgcagataaaatttatttcatgccctggactccctatcgtaccgatactttaatagaatatgcttctttagaagatttccaaaatagtcgccaaacaacaacatataaacttccaaatcgagtagatggtactggatttgtggtgtatgatggtgctgtcttctttaacaaagaaagaacgaggaatattgtgaaatttgacttgaggactagaattaagagtggcgaggccataattaactatgccaactaccatgatacctcaccatacagatggggaggaaagactgatatcgacctagcagttgatgaaaatggtttatgggtcatttacgccactgaacagaacaatggaatgatagttattagccagctgaatccatacactcttcgatttgaagcaacgtgggagactgtatacgacaaacgtgccgcatcaaatgcttttatgatatgcggagtcctctatgtggttaggtcagtttatcaagacaatgaaagtgaaacaggcaagaactcaattgattacatttataatacccgattaaaccgaggagaatatgtagacgttcccttccccaaccagtatcagtatattgctgcagtggattacaatccaagagataaccaactttacgtgtggaacaataacttcattttacgatattctctggagtttggtccacctgatcctgcccaagtgcctaccacagctgtgacaataacttcttcagctgagctgttcaaaaccataatatcaaccacaagcactacttcacagaaaggccccatgagcacaactgtagctggatcacaggaaggaagcaaagggacaaaaccacctccagcagtttctacaaccaaaattccacctataacaaatatttttcccctgccagagagattctgtgaagcattagactccaaggggataaagtggcctcagacacaaaggggaatgatggttgaacgaccatgccctaagggaacaagaggaactgcctcatatctctgcatgatttccactggaacatggaaccctaagggccccgatcttagcaactgtacctcacactgggtgaatcagctggctcagaagatcagaagcggagaaaatgctgctagtcttgccaatgaactggctaaacataccaaagggccagtgtttgctggggatgtaagttcttcagtgagattgatggagcagttggtggacatccttgatgcacagctgcaggaactgaaacctagtgaaaaagattcagctggacggagttataacaagctccaaaaacgagagaagacatgcagggcttaccttaaggcaattgttgacacagtggacaaccttctgagacctgaagctttggaatcatggaaacatatgaattcttctgaacaagcacatactgcaacaatgttactcgatacattggaagaaggagcttttgtcctagctgacaatcttttagaaccaacaagggtctcaatgcccacagaaaatattgtcctggaagttgccgtactcagtacagaaggacagatccaagactttaaatttcctctgggcatcaaaggagcaggcagctcaatccaactgtccgcaaataccgtcaaacagaacagcaggaatgggcttgcaaagttggtgttcatcatttaccggagcctgggacagttccttagtacagaaaatgcaaccattaaactgggtgctgattttattggtcgtaatagcaccattgcagtgaactctcacgtcatttcagtttcaatcaataaagagtccagccgagtatacctgactgatcctgtgctttttaccctgccacacattgatcctgacaattatttcaatgcaaactgctccttctggaactactcagagagaactatgatgggatattggtctacccagggctgcaagctggttgacactaataaaactcgaacaacgtgtgcatgcagccacctaaccaattttgcaattctcatggcccacagggaaattgcatataaagatggcgttcatgaattacttcttacagtcatcacctgggtgggaattgtcatttcccttgtttgcctggctatctgcatcttcaccttctgctttttccgtggcctacagagtgaccgaaatactattcacaagaacctttgtatcaaccttttcattgctgaatttattttcctaataggcattgataagacaaaatatgcgattgcatgcccaatatttgcaggacttctacactttttctttttggcagcttttgcttggatgtgcctagaaggtgtgcagctctacctaatgttagttgaagtttttgaaagtgaatattcaaggaaaaaatattactatgttgctggttacttgtttcctgccacagtggttggagtttcagctgctattgactataagagctatggaacagaaaaagcttgctggcttcatgttgataactactttatatggagcttcattggacctgttaccttcattattctgctaaatattatcttcttggtgatcacattgtgcaaaatggtgaagcattcaaacactttgaaaccagattctagcaggttggaaaacattaagtcttgggtgcttggcgctttcgctcttctgtgtcttcttggcctcacctggtcctttgggttgctttttattaatgaggagactattgtgatggcatatctcttcactatatttaatgctttccagggagtgttcattttcatctttcactgtgctctccaaaagaaagtacgaaaagaatatggcaagtgcttcagacactcatactgctgtggaggcctcccaactgagagtccccacagttcagtgaaggcatcaaccaccagaaccagtgctcgctattcctctggcacacagagtcgtataagaagaatgtggaatgatactgtgagaaaacaatcagaatcttcttttatctcaggtgacatcaatagcacttcaacacttaatcaaggaatgactggcaattacctactaacaaaccctcttcttcgaccccacggcactaacaacccctataacacattgctcgctgaaacagttgtatgtaatgccccttcagctcctgtatttaactcaccaggacattcactgaacaatgccagggatacaagtgccatggatactctaccgctaaatggtaattttaacaacagctactcgctgcacaagggtgactataatgacagcgtgcaagttgtggactgtggactaagtctgaatgatactgcttttgagaaaatgatcatttcagaattagtgcacaacaacttacggggcagcagcaagactcacaacctcgagctcacgctaccagtcaaacctgtgattggaggtagcagcagtgaagatgatgctattgtggcagatgcttcatctttaatgcacagcgacaacccagggctggagctccatcacaaagaactcgaggcaccacttattcctcagcggactcactcccttctgtaccaaccccagaagaaagtgaagtccgagggaactgacagctatgtctcccaactgacagcagaggctgaagatcacctacagtcccccaacagagactctctttatacaagcatgcccaatcttagagactctccctatccggagagcagccctgacatggaagaagacctctctccctccaggaggagtgagaatgaggacatttactataaaagcatgccaaatcttggagctggccatcagcttcagatgtgctaccagatcagcaggggcaatagtgatggttatataatccccattaacaaagaagggtgtattccagaaggagatgttagagaaggacaaatgcagctggttacaagtctttaatcatacagctaaggaattccaagggccacatgcgagtattaataaataaagacaccattggcctgacgcagctccctcaaactctgcttgaagagatgactcttgacctgtggttctctggtgtaaaaaagatgactgaaccttgcagttctgtgaatttttataaaacatacaaaaactttgtatatacacagagtatactaaagtgaattatttgttacaaagaaaagagatgccagccaggtattttaagattctgctgctgtttagagaaattgtgaaacaagcaaaacaaaactttccagccattttactgcagcagtctgtgaactaaatttgtaaatatggctgcaccatttttgtaggcctgcattgtattatatacaagacgtaggctttaaaatcctgtgggacaaatttactgtaccttactattcctgacaagacttggaaaagcaggagagatattctgcatcagtttgcagttcactgcaaatcttttacattaaggcaaagattgaaaacatgcttaaccactagcaatcaagccacaggccttatttcatatgtttcctcaactgtacaatgaactattctcatgaaaaatggctaaagaaattatattttgttctattgctagggtaaaataaatacatttgtgtccaactgaaatataattgtcattaaaataattttaaagagtgaagaaaatattgtgaaaagctcttggttgcacatgttatgaaatgttttttcttacactttgtcatggtaagttctactcattttcacttcttttccactgtatacagtgttctgctttgacaaagttagtctttattacttacatttaaatttcttattgccaaaagaacgtgttttatggggagaaacaaactctttgaagccagttatgtcatgccttgcacaaaagtgatgaaatctagaaaagattgtgtgtcacccctgtttattcttgaacagagggcaaagagggcactgggcacttctcacaaactttctagtgaacaaaaggtgcctattcttttttaaaaaaataaaataaaacataaatattactcttccatattccttctgcctatatttagtaattaatttattttatgataaagttctaatgaaatgtaaattgtttcagcaaaattctgcttttttttcatccctttgtgtaaacctgttaataatgagcccatcactaatatccagtgtaaagtttaacacggtttgacagtaaataaatgtgaattttttcaagta

SEQ ID NO: 28558 - DNA, 5614 bp, Homo sapiens
cgtgtctgtttctctttctctctccctctcttgcgctgtccctcattcatgcactcttccatctttttgccattgtgccagctcaatttaaatgtatctgctctgtatctgttcaagtggagataatccatgcaaatcaggagccgtggctctcaatgcctggttcacagagaggactcagcttgaggaggtcactcgttcacagccgctcctcccattatatttttccccttattgcagaactgctgtatgtatacagtgactgaaaggactcaatttactgcaactgctgcctggctttacttacaacttttttttttttataaaggaacttacctccatctgtcttttcaaggttacagaccacttactctaaacttcacaaatggttctgaagagtatggagcctacgtagattcataagagcccaatgtttccaaaggacattaattttgatttctccaatgaaggcttgtggctgtccttatgctttacaaaacattaccaaatcagagccgaaaagaaaactttggaatttgaagagagcttgataactgtgttctatgtggatccagcattacaactgataagggtatttatggcacaatgaaaaattcatctttcccagaatgatatgaagatcaatgatgcagactgatggtcttgatgaagctgggcatttataactagattcattaaggaatacaaagaaaatacttaaagggatcaataatggtgtcttctggttgcagaatgcgaagtctgtggtttatcattgtaatcagcttcttaccaaatacagaaggtttcagcagagcagctttaccatttgggctggtgaggcgagaattatcctgtgaaggttattctatagatctgcgatgcccgggcagtgatgtcatcatgattgagagcgctaactatggtcggacggatgacaagatttgtgatgctgacccatttcagatggagaatacagactgctacctccccgatgccttcaaaattatgactcaaaggtgcaacaatcgaacacagtgtatagtagttactgggtcagatgtgtttcctgatccatgtcctggaacatacaaataccttgaagtccaatatgaatgtgtcccttacatttttgtgtgtcctgggaccttgaaagcaattgtggactcaccatgtatatatgaagctgaacaaaaggcgggtgcttggtgcaaggaccctcttcaggctgcagataaaatttatttcatgccctggactccctatcgtaccgatactttaatagaatatgcttctttagaagatttccaaaatagtcgccaaacaacaacatataaacttccaaatcgagtagatggtactggatttgtggtgtatgatggtgctgtcttctttaacaaagaaagaacgaggaatattgtgaaatttgacttgaggactagaattaagagtggcgaggccataattaactatgccaactaccatgatacctcaccatacagatggggaggaaagactgatatcgacctagcagttgatgaaaatggtttatgggtcatttacgccactgaacagaacaatggaatgatagttattagccagctgaatccatacactcttcgatttgaagcaacgtgggagactgtatacgacaaacgtgccgcatcaaatgcttttatgatatgcggagtcctctatgtggttaggtcagtttatcaagacaatgaaagtgaaacaggcaagaactcaattgattacatttataatacccgattaaaccgaggagaatatgtagacgttcccttccccaaccagtatcagtatattgctgcagtggattacaatccaagagataaccaactttacgtgtggaacaataacttcattttacgatattctctggagtttggtccacctgatcctgcccaagtgcctaccacagctgtgacaataacttcttcagctgagctgttcaaaaccataatatcaaccacaagcactacttcacagaaaggccccatgagcacaactgtagctggatcacaggaaggaagcaaagggacaaaaccacctccagcagtttctacaaccaaaattccacctataacaaatatttttcccctgccagagagattctgtgaagcattagactccaaggggataaagtggcctcagacacaaaggggaatgatggttgaacgaccatgccctaagggaacaagaggaactgcctcatatctctgcatgatttccactggaacatggaaccctaagggccccgatcttagcaactgtacctcacactgggtgaatcagctggctcagaagatcagaagcggagaaaatgctgctagtcttgccaatgaactggctaaacataccaaagggccagtgtttgctggggatgtaagttcttcagtgagattgatggagcagttggtggacatccttgatgcacagctgcaggaactgaaacctagtgaaaaagattcagctggacggagttataacaaggcaattgttgacacagtggacaaccttctgagacctgaagctttggaatcatggaaacatatgaattcttctgaacaagcacatactgcaacaatgttactcgatacattggaagaaggagcttttgtcctagctgacaatcttttagaaccaacaagggtctcaatgcccacagaaaatattgtcctggaagttgccgtactcagtacagaaggacagatccaagactttaaatttcctctgggcatcaaaggagcaggcagctcaatccaactgtccgcaaataccgtcaaacagaacagcaggaatgggcttgcaaagttggtgttcatcatttaccggagcctgggacagttccttagtacagaaaatgcaaccattaaactgggtgctgattttattggtcgtaatagcaccattgcagtgaactctcacgtcatttcagtttcaatcaataaagagtccagccgagtatacctgactgatcctgtgctttttaccctgccacacattgatcctgacaattatttcaatgcaaactgctccttctggaactactcagagagaactatgatgggatattggtctacccagggctgcaagctggttgacactaataaaactcgaacaacgtgtgcatgcagccacctaaccaattttgcaattctcatggcccacagggaaattgcatataaagatggcgttcatgaattacttcttacagtcatcacctgggtgggaattgtcatttcccttgtttgcctggctatctgcatcttcaccttctgctttttccgtggcctacagagtgaccgaaatactattcacaagaacctttgtatcaaccttttcattgctgaatttattttcctaataggcattgataagacaaaatatgcgattgcatgcccaatatttgcaggacttctacactttttctttttggcagcttttgcttggatgtgcctagaaggtgtgcagctctacctaatgttagttgaagtttttgaaagtgaatattcaaggaaaaaatattactatgttgctggttacttgtttcctgccacagtggttggagtttcagctgctattgactataagagctatggaacagaaaaagcttgctggcttcatgttgataactactttatatggagcttcattggacctgttaccttcattattctgctaaatattatcttcttggtgatcacattgtgcaaaatggtgaagcattcaaacactttgaaaccagattctagcaggttggaaaacattaagtcttgggtgcttggcgctttcgctcttctgtgtcttcttggcctcacctggtcctttgggttgctttttattaatgaggagactattgtgatggcatatctcttcactatatttaatgctttccagggagtgttcattttcatctttcactgtgctctccaaaagaaagtacgaaaagaatatggcaagtgcttcagacactcatactgctgtggaggcctcccaactgagagtccccacagttcagtgaaggcatcaaccaccagaaccagtgctcgctattcctctggcacacagagtcgtataagaagaatgtggaatgatactgtgagaaaacaatcagaatcttcttttatctcaggtgacatcaatagcacttcaacacttaatcaaggacattcactgaacaatgccagggatacaagtgccatggatactctaccgctaaatggtaattttaacaacagctactcgctgcacaagggtgactataatgacagcgtgcaagttgtggactgtggactaagtctgaatgatactgcttttgagaaaatgatcatttcagaattagtgcacaacaacttacggggcagcagcaagactcacaacctcgagctcacgctaccagtcaaacctgtgattggaggtagcagcagtgaagatgatgctattgtggcagatgcttcatctttaatgcacagcgacaacccagggctggagctccatcacaaagaactcgaggcaccacttattcctcagcggactcactcccttctgtaccaaccccagaagaaagtgaagtccgagggaactgacagctatgtctcccaactgacagcagaggctgaagatcacctacagtcccccaacagagactctctttatacaagcatgcccaatcttagagactctccctatccggagagcagccctgacatggaagaagacctctctccctccaggaggagtgagaatgaggacatttactataaaagcatgccaaatcttggagctggccatcagcttcagatgtgctaccagatcagcaggggcaatagtgatggttatataatccccattaacaaagaagggtgtattccagaaggagatgttagagaaggacaaatgcagctggttacaagtctttaatcatacagctaaggaattccaagggccacatgcgagtattaataaataaagacaccattggcctgacgcagctccctcaaactctgcttgaagagatgactcttgacctgtggttctctggtgtaaaaaagatgactgaaccttgcagttctgtgaatttttataaaacatacaaaaactttgtatatacacagagtatactaaagtgaattatttgttacaaagaaaagagatgccagccaggtattttaagattctgctgctgtttagagaaattgtgaaacaagcaaaacaaaactttccagccattttactgcagcagtctgtgaactaaatttgtaaatatggctgcaccatttttgtaggcctgcattgtattatatacaagacgtaggctttaaaatcctgtgggacaaatttactgtaccttactattcctgacaagacttggaaaagcaggagagatattctgcatcagtttgcagttcactgcaaatcttttacattaaggcaaagattgaaaacatgcttaaccactagcaatcaagccacaggccttatttcatatgtttcctcaactgtacaatgaactattctcatgaaaaatggctaaagaaattatattttgttctattgctagggtaaaataaatacatttgtgtccaactga

SEQ ID NO: 28559 - DNA, 3818 bp, Homo sapiens
gagtaaatcatcatgacagataaatattacaattgtcactcatcagctactgaaaatcactttggttctaaaagcggtcaaaactaatgatagttttctaatggatacaggcaattgttgacacagtggacaaccttctgagacctgaagctttggaatcatggaaacatatgaattcttctgaacaagcacatactgcaacaatgttactcgatacattggaagaaggagcttttgtcctagctgacaatcttttagaaccaacaagggtctcaatgcccacagaaaatattgtcctggaagttgccgtactcagtacagaaggacagatccaagactttaaatttcctctgggcatcaaaggagcaggcagctcaatccaactgtccgcaaataccgtcaaacagaacagcaggaatgggcttgcaaagttggtgttcatcatttaccggagcctgggacagttccttagtacagaaaatgcaaccattaaactgggtgctgattttattggtcgtaatagcaccattgcagtgaactctcacgtcatttcagtttcaatcaataaagagtccagccgagtatacctgactgatcctgtgctttttaccctgccacacattgatcctgacaattatttcaatgcaaactgctccttctggaactactcagagagaactatgatgggatattggtctacccagggctgcaagctggttgacactaataaaactcgaacaacgtgtgcatgcagccacctaaccaattttgcaattctcatggcccacagggaaattgcatataaagatggcgttcatgaattacttcttacagtcatcacctgggtgggaattgtcatttcccttgtttgcctggctatctgcatcttcaccttctgctttttccgtggcctacagagtgaccgaaatactattcacaagaacctttgtatcaaccttttcattgctgaatttattttcctaataggcattgataagacaaaatatgcgattgcatgcccaatatttgcaggacttctacactttttctttttggcagcttttgcttggatgtgcctagaaggtgtgcagctctacctaatgttagttgaagtttttgaaagtgaatattcaaggaaaaaatattactatgttgctggttacttgtttcctgccacagtggttggagtttcagctgctattgactataagagctatggaacagaaaaagcttgctggcttcatgttgataactactttatatggagcttcattggacctgttaccttcattattctgctaaatattatcttcttggtgatcacattgtgcaaaatggtgaagcattcaaacactttgaaaccagattctagcaggttggaaaacattaagtcttgggtgcttggcgctttcgctcttctgtgtcttcttggcctcacctggtcctttgggttgctttttattaatgaggagactattgtgatggcatatctcttcactatatttaatgctttccagggagtgttcattttcatctttcactgtgctctccaaaagaaagtacgaaaagaatatggcaagtgcttcagacactcatactgctgtggaggcctcccaactgagagtccccacagttcagtgaaggcatcaaccaccagaaccagtgctcgctattcctctggcacacagagtcgtataagaagaatgtggaatgatactgtgagaaaacaatcagaatcttcttttatctcaggtgacatcaatagcacttcaacacttaatcaaggacattcactgaacaatgccagggatacaagtgccatggatactctaccgctaaatggtaattttaacaacagctactcgctgcacaagggtgactataatgacagcgtgcaagttgtggactgtggactaagtctgaatgatactgcttttgagaaaatgatcatttcagaattagtgcacaacaacttacggggcagcagcaagactcacaacctcgagctcacgctaccagtcaaacctgtgattggaggtagcagcagtgaagatgatgctattgtggcagatgcttcatctttaatgcacagcgacaacccagggctggagctccatcacaaagaactcgaggcaccacttattcctcagcggactcactcccttctgtaccaaccccagaagaaagtgaagtccgagggaactgacagctatgtctcccaactgacagcagaggctgaagatcacctacagtcccccaacagagactctctttatacaagcatgcccaatcttagagactctccctatccggagagcagccctgacatggaagaagacctctctccctccaggaggagtgagaatgaggacatttactataaaagcatgccaaatcttggagctggccatcagcttcagatgtgctaccagatcagcaggggcaatagtgatggttatataatccccattaacaaagaagggtgtattccagaaggagatgttagagaaggacaaatgcagctggttacaagtctttaatcatacagctaaggaattccaagggccacatgcgagtattaataaataaagacaccattggcctgacgcagctccctcaaactctgcttgaagagatgactcttgacctgtggttctctggtgtaaaaaagatgactgaaccttgcagttctgtgaatttttataaaacatacaaaaactttgtatatacacagagtatactaaagtgaattatttgttacaaagaaaagagatgccagccaggtattttaagattctgctgctgtttagagaaattgtgaaacaagcaaaacaaaactttccagccattttactgcagcagtctgtgaactaaatttgtaaatatggctgcaccatttttgtaggcctgcattgtattatatacaagacgtaggctttaaaatcctgtgggacaaatttactgtaccttactattcctgacaagacttggaaaagcaggagagatattctgcatcagtttgcagttcactgcaaatcttttacattaaggcaaagattgaaaacatgcttaaccactagcaatcaagccacaggccttatttcatatgtttcctcaactgtacaatgaactattctcatgaaaaatggctaaagaaattatattttgttctattgctagggtaaaataaatacatttgtgtccaactgaaatataattgtcattaaaataattttaaagagtgaagaaaatattgtgaaaagctcttggttgcacatgttatgaaatgttttttcttacactttgtcatggtaagttctactcattttcacttcttttccactgtatacagtgttctgctttgacaaagttagtctttattacttacatttaaatttcttattgccaaaagaacgtgttttatggggagaaacaaactctttgaagccagttatgtcatgccttgcacaaaagtgatgaaatctagaaaagattgtgtgtcacccctgtttattcttgaacagagggcaaagagggcactgggcacttctcacaaactttctagtgaacaaaaggtgcctattcttttttaaaaaaataaaataaaacataaatattactcttccatattccttctgcctatatttagtaattaatttattttatgataaagttctaatgaaatgtaaattgtttcagcaaaattctgcttttttttcatccctttgtgtaaacctgttaataatgagcccatcactaatatccagtgtaaagtttaacacggtttgacagtaaataaatgtgaattttttcaagta

SEQ ID NO: 28560 - DNA, 6304 bp, Homo sapiens
cgtgtctgtttctctttctctctccctctcttgcgctgtccctcattcatgcactcttccatctttttgccattgtgccagctcaatttaaatgtatctgctctgtatctgttcaagtggagataatccatgcaaatcaggagccgtggctctcaatgcctggttcacagagaggactcagcttgaggaggtcactcgttcacagccgctcctcccattatatttttccccttattgcagaactgctgtatgtatacagtgactgaaaggactcaatttactgcaactgctgcctggctttacttacaacttttttttttttataaaggaacttacctccatctgtcttttcaaggttacagaccacttactctaaacttcacaaatggttctgaagagtatggagcctacgtagattcataagagcccaatgtttccaaaggacattaattttgatttctccaatgaaggcttgtggctgtccttatgctttacaaaacattaccaaatcagagccgaaaagaaaactttggaatttgaagagagcttgataactgtgttctatgtggatccagcattacaactgataagggtatttatggcacaatgaaaaattcatctttcccagaatgatatgaagatcaatgatgcagactgatggtcttgatgaagctgggcatttataactagattcattaaggaatacaaagaaaatacttaaagggatcaataatggtgtcttctggttgcagaatgcgaagtctgtggtttatcattgtaatcagcttcttaccaaatacagaaggtttcagcagagcagctttaccatttgggctggtgaggcgagaattatcctgtgaaggttattctatagatctgcgatgcccgggcagtgatgtcatcatgattgagagcgctaactatggtcggacggatgacaagatttgtgatgctgacccatttcagatggagaatacagactgctacctccccgatgccttcaaaattatgactcaaaggtgcaacaatcgaacacagtgtatagtagttactgggtcagatgtgtttcctgatccatgtcctggaacatacaaataccttgaagtccaatatgaatgtgtcccttacatttttgtgtgtcctgggaccttgaaagcaattgtggactcaccatgtatatatgaagctgaacaaaaggcgggtgcttggtgcaaggaccctcttcaggctgcagataaaatttatttcatgccctggactccctatcgtaccgatactttaatagaatatgcttctttagaagatttccaaaatagtcgccaaacaacaacatataaacttccaaatcgagtagatggtactggatttgtggtgtatgatggtgctgtcttctttaacaaagaaagaacgaggaatattgtgaaatttgacttgaggactagaattaagagtggcgaggccataattaactatgccaactaccatgatacctcaccatacagatggggaggaaagactgatatcgacctagcagttgatgaaaatggtttatgggtcatttacgccactgaacagaacaatggaatgatagttattagccagctgaatccatacactcttcgatttgaagcaacgtgggagactgtatacgacaaacgtgccgcatcaaatgcttttatgatatgcggagtcctctatgtggttaggtcagtttatcaagacaatgaaagtgaaacaggcaagaactcaattgattacatttataatacccgattaaaccgaggagaatatgtagacgttcccttccccaaccagtatcagtatattgctgcagtggattacaatccaagagataaccaactttacgtgtggaacaataacttcattttacgatattctctggagtttggtccacctgatcctgcccaagtgcctaccacagctgtgacaataacttcttcagctgagctgttcaaaaccataatatcaaccacaagcactacttcacagaaaggccccatgagcacaactgtagctggatcacaggaaggaagcaaagggacaaaaccacctccagcagtttctacaaccaaaattccacctataacaaatatttttcccctgccagagagattctgtgaagcattagactccaaggggataaagtggcctcagacacaaaggggaatgatggttgaacgaccatgccctaagggaacaagaggaactgcctcatatctctgcatgatttccactggaacatggaaccctaagggccccgatcttagcaactgtacctcacactgggtgaatcagctggctcagaagatcagaagcggagaaaatgctgctagtcttgccaatgaactggctaaacataccaaagggccagtgtttgctggggatgtaagttcttcagtgagattgatggagcagttggtggacatccttgatgcacagctgcaggaactgaaacctagtgaaaaagattcagctggacggagttataacaaggcaattgttgacacagtggacaaccttctgagacctgaagctttggaatcatggaaacatatgaattcttctgaacaagcacatactgcaacaatgttactcgatacattggaagaaggagcttttgtcctagctgacaatcttttagaaccaacaagggtctcaatgcccacagaaaatattgtcctggaagttgccgtactcagtacagaaggacagatccaagactttaaatttcctctgggcatcaaaggagcaggcagctcaatccaactgtccgcaaataccgtcaaacagaacagcaggaatgggcttgcaaagttggtgttcatcatttaccggagcctgggacagttccttagtacagaaaatgcaaccattaaactgggtgctgattttattggtcgtaatagcaccattgcagtgaactctcacgtcatttcagtttcaatcaataaagagtccagccgagtatacctgactgatcctgtgctttttaccctgccacacattgatcctgacaattatttcaatgcaaactgctccttctggaactactcagagagaactatgatgggatattggtctacccagggctgcaagctggttgacactaataaaactcgaacaacgtgtgcatgcagccacctaaccaattttgcaattctcatggcccacagggaaattgcatataaagatggcgttcatgaattacttcttacagtcatcacctgggtgggaattgtcatttcccttgtttgcctggctatctgcatcttcaccttctgctttttccgtggcctacagagtgaccgaaatactattcacaagaacctttgtatcaaccttttcattgctgaatttattttcctaataggcattgataagacaaaatatgcgattgcatgcccaatatttgcaggacttctacactttttctttttggcagcttttgcttggatgtgcctagaaggtgtgcagctctacctaatgttagttgaagtttttgaaagtgaatattcaaggaaaaaatattactatgttgctggttacttgtttcctgccacagtggttggagtttcagctgctattgactataagagctatggaacagaaaaagcttgctggcttcatgttgataactactttatatggagcttcattggacctgttaccttcattattctgctaaatattatcttcttggtgatcacattgtgcaaaatggtgaagcattcaaacactttgaaaccagattctagcaggttggaaaacattaagtcttgggtgcttggcgctttcgctcttctgtgtcttcttggcctcacctggtcctttgggttgctttttattaatgaggagactattgtgatggcatatctcttcactatatttaatgctttccagggagtgttcattttcatctttcactgtgctctccaaaagaaagtacgaaaagaatatggcaagtgcttcagacactcatactgctgtggaggcctcccaactgagagtccccacagttcagtgaaggcatcaaccaccagaaccagtgctcgctattcctctggcacacagagtcgtataagaagaatgtggaatgatactgtgagaaaacaatcagaatcttcttttatctcaggtgacatcaatagcacttcaacacttaatcaaggtggcataaatcttaatatattattacaggactgacatcacatggtctgagagcccatcttcaagatttatatcatttagaggacattcactgaacaatgccagggatacaagtgccatggatactctaccgctaaatggtaattttaacaacagctactcgctgcacaagggtgactataatgacagcgtgcaagttgtggactgtggactaagtctgaatgatactgcttttgagaaaatgatcatttcagaattagtgcacaacaacttacggggcagcagcaagactcacaacctcgagctcacgctaccagtcaaacctgtgattggaggtagcagcagtgaagatgatgctattgtggcagatgcttcatctttaatgcacagcgacaacccagggctggagctccatcacaaagaactcgaggcaccacttattcctcagcggactcactcccttctgtaccaaccccagaagaaagtgaagtccgagggaactgacagctatgtctcccaactgacagcagaggctgaagatcacctacagtcccccaacagagactctctttatacaagcatgcccaatcttagagactctccctatccggagagcagccctgacatggaagaagacctctctccctccaggaggagtgagaatgaggacatttactataaaagcatgccaaatcttggagctggccatcagcttcagatgtgctaccagatcagcaggggcaatagtgatggttatataatccccattaacaaagaagggtgtattccagaaggagatgttagagaaggacaaatgcagctggttacaagtctttaatcatacagctaaggaattccaagggccacatgcgagtattaataaataaagacaccattggcctgacgcagctccctcaaactctgcttgaagagatgactcttgacctgtggttctctggtgtaaaaaagatgactgaaccttgcagttctgtgaatttttataaaacatacaaaaactttgtatatacacagagtatactaaagtgaattatttgttacaaagaaaagagatgccagccaggtattttaagattctgctgctgtttagagaaattgtgaaacaagcaaaacaaaactttccagccattttactgcagcagtctgtgaactaaatttgtaaatatggctgcaccatttttgtaggcctgcattgtattatatacaagacgtaggctttaaaatcctgtgggacaaatttactgtaccttactattcctgacaagacttggaaaagcaggagagatattctgcatcagtttgcagttcactgcaaatcttttacattaaggcaaagattgaaaacatgcttaaccactagcaatcaagccacaggccttatttcatatgtttcctcaactgtacaatgaactattctcatgaaaaatggctaaagaaattatattttgttctattgctagggtaaaataaatacatttgtgtccaactgaaatataattgtcattaaaataattttaaagagtgaagaaaatattgtgaaaagctcttggttgcacatgttatgaaatgttttttcttacactttgtcatggtaagttctactcattttcacttcttttccactgtatacagtgttctgctttgacaaagttagtctttattacttacatttaaatttcttattgccaaaagaacgtgttttatggggagaaacaaactctttgaagccagttatgtcatgccttgcacaaaagtgatgaaatctagaaaagattgtgtgtcacccctgtttattcttgaacagagggcaaagagggcactgggcacttctcacaaactttctagtgaacaaaaggtgcctattcttttttaaaaaaataaaataaaacataaatattactcttccatattccttctgcctatatttagtaattaatttattttatgataaagttctaatgaaatgtaaattgtttcagcaaaattctgcttttttttcatccctttgtgtaaacctgttaataatgagcccatcactaatatccagtgtaaagtttaacacggtttgacagtaaataaatgtgaattttttcaagta

SEQ ID NO: 28561 - DNA, 6397 bp, Homo sapiens
cgtgtctgtttctctttctctctccctctcttgcgctgtccctcattcatgcactcttccatctttttgccattgtgccagctcaatttaaatgtatctgctctgtatctgttcaagtggagataatccatgcaaatcaggagccgtggctctcaatgcctggttcacagagaggactcagcttgaggaggtcactcgttcacagccgctcctcccattatatttttccccttattgcagaactgctgtatgtatacagtgactgaaaggactcaatttactgcaactgctgcctggctttacttacaacttttttttttttataaaggaacttacctccatctgtcttttcaaggttacagaccacttactctaaacttcacaaatggttctgaagagtatggagcctacgtagattcataagagcccaatgtttccaaaggacattaattttgatttctccaatgaaggcttgtggctgtccttatgctttacaaaacattaccaaatcagagccgaaaagaaaactttggaatttgaagagagcttgataactgtgttctatgtggatccagcattacaactgataagggtatttatggcacaatgaaaaattcatctttcccagaatgatatgaagatcaatgatgcagactgatggtcttgatgaagctgggcatttataactagattcattaaggaatacaaagaaaatacttaaagggatcaataatggtgtcttctggttgcagaatgcgaagtctgtggtttatcattgtaatcagcttcttaccaaatacagaaggtttcagcagagcagctttaccatttgggctggtgaggcgagaattatcctgtgaaggttattctatagatctgcgatgcccgggcagtgatgtcatcatgattgagagcgctaactatggtcggacggatgacaagatttgtgatgctgacccatttcagatggagaatacagactgctacctccccgatgccttcaaaattatgactcaaaggtgcaacaatcgaacacagtgtatagtagttactgggtcagatgtgtttcctgatccatgtcctggaacatacaaataccttgaagtccaatatgaatgtgtcccttacatttttgtgtgtcctgggaccttgaaagcaattgtggactcaccatgtatatatgaagctgaacaaaaggcgggtgcttggtgcaaggaccctcttcaggctgcagataaaatttatttcatgccctggactccctatcgtaccgatactttaatagaatatgcttctttagaagatttccaaaatagtcgccaaacaacaacatataaacttccaaatcgagtagatggtactggatttgtggtgtatgatggtgctgtcttctttaacaaagaaagaacgaggaatattgtgaaatttgacttgaggactagaattaagagtggcgaggccataattaactatgccaactaccatgatacctcaccatacagatggggaggaaagactgatatcgacctagcagttgatgaaaatggtttatgggtcatttacgccactgaacagaacaatggaatgatagttattagccagctgaatccatacactcttcgatttgaagcaacgtgggagactgtatacgacaaacgtgccgcatcaaatgcttttatgatatgcggagtcctctatgtggttaggtcagtttatcaagacaatgaaagtgaaacaggcaagaactcaattgattacatttataatacccgattaaaccgaggagaatatgtagacgttcccttccccaaccagtatcagtatattgctgcagtggattacaatccaagagataaccaactttacgtgtggaacaataacttcattttacgatattctctggagtttggtccacctgatcctgcccaagtgcctaccacagctgtgacaataacttcttcagctgagctgttcaaaaccataatatcaaccacaagcactacttcacagaaaggccccatgagcacaactgtagctggatcacaggaaggaagcaaagggacaaaaccacctccagcagtttctacaaccaaaattccacctataacaaatatttttcccctgccagagagattctgtgaagcattagactccaaggggataaagtggcctcagacacaaaggggaatgatggttgaacgaccatgccctaagggaacaagaggaactgcctcatatctctgcatgatttccactggaacatggaaccctaagggccccgatcttagcaactgtacctcacactgggtgaatcagctggctcagaagatcagaagcggagaaaatgctgctagtcttgccaatgaactggctaaacataccaaagggccagtgtttgctggggatgtaagttcttcagtgagattgatggagcagttggtggacatccttgatgcacagctgcaggaactgaaacctagtgaaaaagattcagctggacggagttataacaaggcaattgttgacacagtggacaaccttctgagacctgaagctttggaatcatggaaacatatgaattcttctgaacaagcacatactgcaacaatgttactcgatacattggaagaaggagcttttgtcctagctgacaatcttttagaaccaacaagggtctcaatgcccacagaaaatattgtcctggaagttgccgtactcagtacagaaggacagatccaagactttaaatttcctctgggcatcaaaggagcaggcagctcaatccaactgtccgcaaataccgtcaaacagaacagcaggaatgggcttgcaaagttggtgttcatcatttaccggagcctgggacagttccttagtacagaaaatgcaaccattaaactgggtgctgattttattggtcgtaatagcaccattgcagtgaactctcacgtcatttcagtttcaatcaataaagagtccagccgagtatacctgactgatcctgtgctttttaccctgccacacattgatcctgacaattatttcaatgcaaactgctccttctggaactactcagagagaactatgatgggatattggtctacccagggctgcaagctggttgacactaataaaactcgaacaacgtgtgcatgcagccacctaaccaattttgcaattctcatggcccacagggaaattgcatataaagatggcgttcatgaattacttcttacagtcatcacctgggtgggaattgtcatttcccttgtttgcctggctatctgcatcttcaccttctgctttttccgtggcctacagagtgaccgaaatactattcacaagaacctttgtatcaaccttttcattgctgaatttattttcctaataggcattgataagacaaaatatgcgattgcatgcccaatatttgcaggacttctacactttttctttttggcagcttttgcttggatgtgcctagaaggtgtgcagctctacctaatgttagttgaagtttttgaaagtgaatattcaaggaaaaaatattactatgttgctggttacttgtttcctgccacagtggttggagtttcagctgctattgactataagagctatggaacagaaaaagcttgctggcttcatgttgataactactttatatggagcttcattggacctgttaccttcattattctgctaaatattatcttcttggtgatcacattgtgcaaaatggtgaagcattcaaacactttgaaaccagattctagcaggttggaaaacattaagtcttgggtgcttggcgctttcgctcttctgtgtcttcttggcctcacctggtcctttgggttgctttttattaatgaggagactattgtgatggcatatctcttcactatatttaatgctttccagggagtgttcattttcatctttcactgtgctctccaaaagaaagtacgaaaagaatatggcaagtgcttcagacactcatactgctgtggaggcctcccaactgagagtccccacagttcagtgaaggcatcaaccaccagaaccagtgctcgctattcctctggcacacagagtcgtataagaagaatgtggaatgatactgtgagaaaacaatcagaatcttcttttatctcaggtgacatcaatagcacttcaacacttaatcaaggaatgactggcaattacctactaacaaaccctcttcttcgaccccacggcactaacaacccctataacacattgctcgctgaaacagttgtatgtaatgccccttcagctcctgtatttaactcaccagctactcttaggccagatagcctgagcagacagacatgatgtgagttgacattcactgaacaatgccagggatacaagtgccatggatactctaccgctaaatggtaattttaacaacagctactcgctgcacaagggtgactataatgacagcgtgcaagttgtggactgtggactaagtctgaatgatactgcttttgagaaaatgatcatttcagaattagtgcacaacaacttacggggcagcagcaagactcacaacctcgagctcacgctaccagtcaaacctgtgattggaggtagcagcagtgaagatgatgctattgtggcagatgcttcatctttaatgcacagcgacaacccagggctggagctccatcacaaagaactcgaggcaccacttattcctcagcggactcactcccttctgtaccaaccccagaagaaagtgaagtccgagggaactgacagctatgtctcccaactgacagcagaggctgaagatcacctacagtcccccaacagagactctctttatacaagcatgcccaatcttagagactctccctatccggagagcagccctgacatggaagaagacctctctccctccaggaggagtgagaatgaggacatttactataaaagcatgccaaatcttggagctggccatcagcttcagatgtgctaccagatcagcaggggcaatagtgatggttatataatccccattaacaaagaagggtgtattccagaaggagatgttagagaaggacaaatgcagctggttacaagtctttaatcatacagctaaggaattccaagggccacatgcgagtattaataaataaagacaccattggcctgacgcagctccctcaaactctgcttgaagagatgactcttgacctgtggttctctggtgtaaaaaagatgactgaaccttgcagttctgtgaatttttataaaacatacaaaaactttgtatatacacagagtatactaaagtgaattatttgttacaaagaaaagagatgccagccaggtattttaagattctgctgctgtttagagaaattgtgaaacaagcaaaacaaaactttccagccattttactgcagcagtctgtgaactaaatttgtaaatatggctgcaccatttttgtaggcctgcattgtattatatacaagacgtaggctttaaaatcctgtgggacaaatttactgtaccttactattcctgacaagacttggaaaagcaggagagatattctgcatcagtttgcagttcactgcaaatcttttacattaaggcaaagattgaaaacatgcttaaccactagcaatcaagccacaggccttatttcatatgtttcctcaactgtacaatgaactattctcatgaaaaatggctaaagaaattatattttgttctattgctagggtaaaataaatacatttgtgtccaactgaaatataattgtcattaaaataattttaaagagtgaagaaaatattgtgaaaagctcttggttgcacatgttatgaaatgttttttcttacactttgtcatggtaagttctactcattttcacttcttttccactgtatacagtgttctgctttgacaaagttagtctttattacttacatttaaatttcttattgccaaaagaacgtgttttatggggagaaacaaactctttgaagccagttatgtcatgccttgcacaaaagtgatgaaatctagaaaagattgtgtgtcacccctgtttattcttgaacagagggcaaagagggcactgggcacttctcacaaactttctagtgaacaaaaggtgcctattcttttttaaaaaaataaaataaaacataaatattactcttccatattccttctgcctatatttagtaattaatttattttatgataaagttctaatgaaatgtaaattgtttcagcaaaattctgcttttttttcatccctttgtgtaaacctgttaataatgagcccatcactaatatccagtgtaaagtttaacacggtttgacagtaaataaatgtgaattttttcaagta

SEQ ID NO: 28562 - DNA, 6275 bp, Homo sapiens
cgtgtctgtttctctttctctctccctctcttgcgctgtccctcattcatgcactcttccatctttttgccattgtgccagctcaatttaaatgtatctgctctgtatctgttcaagtggagataatccatgcaaatcaggagccgtggctctcaatgcctggttcacagagaggactcagcttgaggaggtcactcgttcacagccgctcctcccattatatttttccccttattgcagaactgctgtatgtatacagtgactgaaaggactcaatttactgcaactgctgcctggctttacttacaacttttttttttttataaaggaacttacctccatctgtcttttcaaggttacagaccacttactctaaacttcacaaatggttctgaagagtatggagcctacgtagattcataagagcccaatgtttccaaaggacattaattttgatttctccaatgaaggcttgtggctgtccttatgctttacaaaacattaccaaatcagagccgaaaagaaaactttggaatttgaagagagcttgataactgtgttctatgtggatccagcattacaactgataagggtatttatggcacaatgaaaaattcatctttcccagaatgatatgaagatcaatgatgcagactgatggtcttgatgaagctgggcatttataactagattcattaaggaatacaaagaaaatacttaaagggatcaataatggtgtcttctggttgcagaatgcgaagtctgtggtttatcattgtaatcagcttcttaccaaatacagaaggtttcagcagagcagctttaccatttgggctggtgaggcgagaattatcctgtgaaggttattctatagatctgcgatgcccgggcagtgatgtcatcatgattgagagcgctaactatggtcggacggatgacaagatttgtgatgctgacccatttcagatggagaatacagactgctacctccccgatgccttcaaaattatgactcaaaggtgcaacaatcgaacacagtgtatagtagttactgggtcagatgtgtttcctgatccatgtcctggaacatacaaataccttgaagtccaatatgaatgtgtcccttacatttttgtgtgtcctgggaccttgaaagcaattgtggactcaccatgtatatatgaagctgaacaaaaggcgggtgcttggtgcaaggaccctcttcaggctgcagataaaatttatttcatgccctggactccctatcgtaccgatactttaatagaatatgcttctttagaagatttccaaaatagtcgccaaacaacaacatataaacttccaaatcgagtagatggtactggatttgtggtgtatgatggtgctgtcttctttaacaaagaaagaacgaggaatattgtgaaatttgacttgaggactagaattaagagtggcgaggccataattaactatgccaactaccatgatacctcaccatacagatggggaggaaagactgatatcgacctagcagttgatgaaaatggtttatgggtcatttacgccactgaacagaacaatggaatgatagttattagccagctgaatccatacactcttcgatttgaagcaacgtgggagactgtatacgacaaacgtgccgcatcaaatgcttttatgatatgcggagtcctctatgtggttaggtcagtttatcaagacaatgaaagtgaaacaggcaagaactcaattgattacatttataatacccgattaaaccgaggagaatatgtagacgttcccttccccaaccagtatcagtatattgctgcagtggattacaatccaagagataaccaactttacgtgtggaacaataacttcattttacgatattctctggagtttggtccacctgatcctgcccaagtgcctaccacagctgtgacaataacttcttcagctgagctgttcaaaaccataatatcaaccacaagcactacttcacagaaaggccccatgagcacaactgtagctggatcacaggaaggaagcaaagggacaaaaccacctccagcagtttctacaaccaaaattccacctataacaaatatttttcccctgccagagagattctgtgaagcattagactccaaggggataaagtggcctcagacacaaaggggaatgatggttgaacgaccatgccctaagggaacaagaggaactgcctcatatctctgcatgatttccactggaacatggaaccctaagggccccgatcttagcaactgtacctcacactgggtgaatcagctggctcagaagatcagaagcggagaaaatgctgctagtcttgccaatgaactggctaaacataccaaagggccagtgtttgctggggatgtaagttcttcagtgagattgatggagcagttggtggacatccttgatgcacagctgcaggaactgaaacctagtgaaaaagattcagctggacggagttataacaaggcaattgttgacacagtggacaaccttctgagacctgaagctttggaatcatggaaacatatgaattcttctgaacaagcacatactgcaacaatgttactcgatacattggaagaaggagcttttgtcctagctgacaatcttttagaaccaacaagggtctcaatgcccacagaaaatattgtcctggaagttgccgtactcagtacagaaggacagatccaagactttaaatttcctctgggcatcaaaggagcaggcagctcaatccaactgtccgcaaataccgtcaaacagaacagcaggaatgggcttgcaaagttggtgttcatcatttaccggagcctgggacagttccttagtacagaaaatgcaaccattaaactgggtgctgattttattggtcgtaatagcaccattgcagtgaactctcacgtcatttcagtttcaatcaataaagagtccagccgagtatacctgactgatcctgtgctttttaccctgccacacattgatcctgacaattatttcaatgcaaactgctccttctggaactactcagagagaactatgatgggatattggtctacccagggctgcaagctggttgacactaataaaactcgaacaacgtgtgcatgcagccacctaaccaattttgcaattctcatggcccacagggaaattgcatataaagatggcgttcatgaattacttcttacagtcatcacctgggtgggaattgtcatttcccttgtttgcctggctatctgcatcttcaccttctgctttttccgtggcctacagagtgaccgaaatactattcacaagaacctttgtatcaaccttttcattgctgaatttattttcctaataggcattgataagacaaaatatgcgattgcatgcccaatatttgcaggacttctacactttttctttttggcagcttttgcttggatgtgcctagaaggtgtgcagctctacctaatgttagttgaagtttttgaaagtgaatattcaaggaaaaaatattactatgttgctggttacttgtttcctgccacagtggttggagtttcagctgctattgactataagagctatggaacagaaaaagcttgctggcttcatgttgataactactttatatggagcttcattggacctgttaccttcattattctgctaaatattatcttcttggtgatcacattgtgcaaaatggtgaagcattcaaacactttgaaaccagattctagcaggttggaaaacattaagtcttgggtgcttggcgctttcgctcttctgtgtcttcttggcctcacctggtcctttgggttgctttttattaatgaggagactattgtgatggcatatctcttcactatatttaatgctttccagggagtgttcattttcatctttcactgtgctctccaaaagaaagtacgaaaagaatatggcaagtgcttcagacactcatactgctgtggaggcctcccaactgagagtccccacagttcagtgaaggcatcaaccaccagaaccagtgctcgctattcctctggcacacagagtcgtataagaagaatgtggaatgatactgtgagaaaacaatcagaatcttcttttatctcaggtgacatcaatagcacttcaacacttaatcaaggactgacatcacatggtctgagagcccatcttcaagatttatatcatttagaggacattcactgaacaatgccagggatacaagtgccatggatactctaccgctaaatggtaattttaacaacagctactcgctgcacaagggtgactataatgacagcgtgcaagttgtggactgtggactaagtctgaatgatactgcttttgagaaaatgatcatttcagaattagtgcacaacaacttacggggcagcagcaagactcacaacctcgagctcacgctaccagtcaaacctgtgattggaggtagcagcagtgaagatgatgctattgtggcagatgcttcatctttaatgcacagcgacaacccagggctggagctccatcacaaagaactcgaggcaccacttattcctcagcggactcactcccttctgtaccaaccccagaagaaagtgaagtccgagggaactgacagctatgtctcccaactgacagcagaggctgaagatcacctacagtcccccaacagagactctctttatacaagcatgcccaatcttagagactctccctatccggagagcagccctgacatggaagaagacctctctccctccaggaggagtgagaatgaggacatttactataaaagcatgccaaatcttggagctggccatcagcttcagatgtgctaccagatcagcaggggcaatagtgatggttatataatccccattaacaaagaagggtgtattccagaaggagatgttagagaaggacaaatgcagctggttacaagtctttaatcatacagctaaggaattccaagggccacatgcgagtattaataaataaagacaccattggcctgacgcagctccctcaaactctgcttgaagagatgactcttgacctgtggttctctggtgtaaaaaagatgactgaaccttgcagttctgtgaatttttataaaacatacaaaaactttgtatatacacagagtatactaaagtgaattatttgttacaaagaaaagagatgccagccaggtattttaagattctgctgctgtttagagaaattgtgaaacaagcaaaacaaaactttccagccattttactgcagcagtctgtgaactaaatttgtaaatatggctgcaccatttttgtaggcctgcattgtattatatacaagacgtaggctttaaaatcctgtgggacaaatttactgtaccttactattcctgacaagacttggaaaagcaggagagatattctgcatcagtttgcagttcactgcaaatcttttacattaaggcaaagattgaaaacatgcttaaccactagcaatcaagccacaggccttatttcatatgtttcctcaactgtacaatgaactattctcatgaaaaatggctaaagaaattatattttgttctattgctagggtaaaataaatacatttgtgtccaactgaaatataattgtcattaaaataattttaaagagtgaagaaaatattgtgaaaagctcttggttgcacatgttatgaaatgttttttcttacactttgtcatggtaagttctactcattttcacttcttttccactgtatacagtgttctgctttgacaaagttagtctttattacttacatttaaatttcttattgccaaaagaacgtgttttatggggagaaacaaactctttgaagccagttatgtcatgccttgcacaaaagtgatgaaatctagaaaagattgtgtgtcacccctgtttattcttgaacagagggcaaagagggcactgggcacttctcacaaactttctagtgaacaaaaggtgcctattcttttttaaaaaaataaaataaaacataaatattactcttccatattccttctgcctatatttagtaattaatttattttatgataaagttctaatgaaatgtaaattgtttcagcaaaattctgcttttttttcatccctttgtgtaaacctgttaataatgagcccatcactaatatccagtgtaaagtttaacacggtttgacagtaaataaatgtgaattttttcaagta

SEQ ID NO: 28563 - DNA, 2756 bp, Homo sapiens
gtccacagtccacaacttgcacgctgtcattatagtcacccttgtgcacgcgagtagctgttgttaaaattaccatttagcggtagagtatccatggttacttgtttcctgccacagtggttggagtttcagctgctattgactataagagctatggaacagaaaaagcttgctggcttcatgttgataactactttatatggagcttcattggacctgttaccttcattattctgctaaatattatcttcttggtgatcacattgtgcaaaatggtgaagcattcaaacactttgaaaccagattctagcaggttggaaaacattaagtcttgggtgcttggcgctttcgctcttctgtgtcttcttggcctcacctggtcctttgggttgctttttattaatgaggagactattgtgatggcatatctcttcactatatttaatgctttccagggagtgttcattttcatctttcactgtgctctccaaaagaaagtacgaaaagaatatggcaagtgcttcagacactcatactgctgtggaggcctcccaactgagagtccccacagttcagtgaaggcatcaaccaccagaaccagtgctcgctattcctctggcacacagagtcgtataagaagaatgtggaatgatactgtgagaaaacaatcagaatcttcttttatctcaggtgacatcaatagcacttcaacacttaatcaaggacattcactgaacaatgccagggatacaagtgccatggatactctaccgctaaatggtaattttaacaacagctactcgctgcacaagggtgactataatgacagcgtgcaagttgtggactgtggactaagtctgaatgatactgcttttgagaaaatgatcatttcagaattagtgcacaacaacttacggggcagcagcaagactcacaacctcgagctcacgctaccagtcaaacctgtgattggaggtagcagcagtgaagatgatgctattgtggcagatgcttcatctttaatgcacagcgacaacccagggctggagctccatcacaaagaactcgaggcaccacttattcctcagcggactcactcccttctgtaccaaccccagaagaaagtgaagtccgagggaactgacagctatgtctcccaactgacagcagaggctgaagatcacctacagtcccccaacagagactctctttatacaagcatgcccaatcttagagactctccctatccggagagcagccctgacatggaagaagacctctctccctccaggaggagtgagaatgaggacatttactataaaagcatgccaaatcttggagctggccatcagcttcagatgtgctaccagatcagcaggggcaatagtgatggttatataatccccattaacaaagaagggtgtattccagaaggagatgttagagaaggacaaatgcagctggttacaagtctttaatcatacagctaaggaattccaagggccacatgcgagtattaataaataaagacaccattggcctgacgcagctccctcaaactctgcttgaagagatgactcttgacctgtggttctctggtgtaaaaaagatgactgaaccttgcagttctgtgaatttttataaaacatacaaaaactttgtatatacacagagtatactaaagtgaattatttgttacaaagaaaagagatgccagccaggtattttaagattctgctgctgtttagagaaattgtgaaacaagcaaaacaaaactttccagccattttactgcagcagtctgtgaactaaatttgtaaatatggctgcaccatttttgtaggcctgcattgtattatatacaagacgtaggctttaaaatcctgtgggacaaatttactgtaccttactattcctgacaagacttggaaaagcaggagagatattctgcatcagtttgcagttcactgcaaatcttttacattaaggcaaagattgaaaacatgcttaaccactagcaatcaagccacaggccttatttcatatgtttcctcaactgtacaatgaactattctcatgaaaaatggctaaagaaattatattttgttctattgctagggtaaaataaatacatttgtgtccaactgaaatataattgtcattaaaataattttaaagagtgaagaaaatattgtgaaaagctcttggttgcacatgttatgaaatgttttttcttacactttgtcatggtaagttctactcattttcacttcttttccactgtatacagtgttctgctttgacaaagttagtctttattacttacatttaaatttcttattgccaaaagaacgtgttttatggggagaaacaaactctttgaagccagttatgtcatgccttgcacaaaagtgatgaaatctagaaaagattgtgtgtcacccctgtttattcttgaacagagggcaaagagggcactgggcacttctcacaaactttctagtgaacaaaaggtgcctattcttttttaaaaaaataaaataaaacataaatattactcttccatattccttctgcctatatttagtaattaatttattttatgataaagttctaatgaaatgtaaattgtttcagcaaaattctgcttttttttcatccctttgtgtaaacctgttaataatgagcccatcactaatatccagtgtaaagtttaacacggtttgacagtaaataaatgtgaattttttcaagta

SEQ ID NO: 28564 - DNA, 2641 bp, Homo sapiens
gcgcggcccccacgccagacggccctccctcggggcgcgctcgcagacggagatatgaagatcaatgatgcagactgatggtcttgatgaagctgggcatttataactagattcattaaggaatacaaagaaaatacttaaagggatcaataatggtgtcttctggttgcagaatgcgaagtctgtggtttatcattgtaatcagcttcttaccaaatacagaaggtttcagcagagcagctttaccatttgggctggtgaggcgagaattatcctgtgaaggttattctatagatctgcgatgcccgggcagtgatgtcatcatgattgagagcgctaactatggtcggacggatgacaagatttgtgatgctgacccatttcagatggagaatacagactgctacctccccgatgccttcaaaattatgactcaaaggttgcaactatttacagttgggaatgcaggaaagcctggcacttttcaagtgttagctttcaaatacaactttgtcctgaacgacattaaaaagttttgtacaaaagaaatagagtttctgtggaaaggaacagagacagtaatgataactccccctcttctgtttcaggacattcactgaacaatgccagggatacaagtgccatggatactctaccgctaaatggtaattttaacaacagctactcgctgcacaagggtgactataatgacagcgtgcaagttgtggactgtggactaagtctgaatgatactgcttttgagaaaatgatcatttcagaattagtgcacaacaacttacggggcagcagcaagactcacaacctcgagctcacgctaccagtcaaacctgtgattggaggtagcagcagtgaagatgatgctattgtggcagatgcttcatctttaatgcacagcgacaacccagggctggagctccatcacaaagaactcgaggcaccacttattcctcagcggactcactcccttctgtaccaaccccagaagaaagtgaagtccgagggaactgacagctatgtctcccaactgacagcagaggctgaagatcacctacagtcccccaacagagactctctttatacaagcatgcccaatcttagagactctccctatccggagagcagccctgacatggaagaagacctctctccctccaggaggagtgagaatgaggacatttactataaaagcatgccaaatcttggagctggccatcagcttcagatgtgctaccagatcagcaggggcaatagtgatggttatataatccccattaacaaagaagggtgtattccagaaggagatgttagagaaggacaaatgcagctggttacaagtctttaatcatacagctaaggaattccaagggccacatgcgagtattaataaataaagacaccattggcctgacgcagctccctcaaactctgcttgaagagatgactcttgacctgtggttctctggtgtaaaaaagatgactgaaccttgcagttctgtgaatttttataaaacatacaaaaactttgtatatacacagagtatactaaagtgaattatttgttacaaagaaaagagatgccagccaggtattttaagattctgctgctgtttagagaaattgtgaaacaagcaaaacaaaactttccagccattttactgcagcagtctgtgaactaaatttgtaaatatggctgcaccatttttgtaggcctgcattgtattatatacaagacgtaggctttaaaatcctgtgggacaaatttactgtaccttactattcctgacaagacttggaaaagcaggagagatattctgcatcagtttgcagttcactgcaaatcttttacattaaggcaaagattgaaaacatgcttaaccactagcaatcaagccacaggccttatttcatatgtttcctcaactgtacaatgaactattctcatgaaaaatggctaaagaaattatattttgttctattgctagggtaaaataaatacatttgtgtccaactgaaatataattgtcattaaaataattttaaagagtgaagaaaatattgtgaaaagctcttggttgcacatgttatgaaatgttttttcttacactttgtcatggtaagttctactcattttcacttcttttccactgtatacagtgttctgctttgacaaagttagtctttattacttacatttaaatttcttattgccaaaagaacgtgttttatggggagaaacaaactctttgaagccagttatgtcatgccttgcacaaaagtgatgaaatctagaaaagattgtgtgtcacccctgtttattcttgaacagagggcaaagagggcactgggcacttctcacaaactttctagtgaacaaaaggtgcctattcttttttaaaaaaataaaataaaacataaatattactcttccatattccttctgcctatatttagtaattaatttattttatgataaagttctaatgaaatgtaaattgtttcagcaaaattctgcttttttttcatccctttgtgtaaacctgttaataatgagcccatcactaatatccagtgtaaagtttaacacggtttgacagtaaataaatgtgaattttttcaagta

SEQ ID NO: 28565 - DNA, 5283 bp, Homo sapiens
  misc_feature (5283)..(5283): n is a, c, g, or t
cgtgtctgtttctctttctctctccctctcttgcgctgtccctcattcatgcactcttccatctttttgccattgtgccagctcaatttaaatgtatctgctctgtatctgttcaagtggagataatccatgcaaatcaggagccgtggctctcaatgcctggttcacagagaggactcagcttgaggaggtcactcgttcacagccgctcctcccattatatttttccccttattgcagaactgctgtatgtatacagtgactgaaaggactcaatttactgcaactgctgcctggctttacttacaacttttttttttttataaaggaacttacctccatctgtcttttcaaggttacagaccacttactctaaacttcacaaatggttctgaagagtatggagcctacgtagattcataagagcccaatgtttccaaaggacattaattttgatttctccaatgaaggcttgtggctgtccttatgctttacaaaacattaccaaatcagagccgaaaagaaaactttggaatttgaagagagcttgataactgtgttctatgtggatccagcattacaactgataagggtatttatggcacaatgaaaaattcatctttcccagaatgatatgaagatcaatgatgcagactgatggtcttgatgaagctgggcatttataactagattcattaaggaatacaaagaaaatacttaaagggatcaataatggtgtcttctggttgcagaatgcgaagtctgtggtttatcattgtaatcagcttcttaccaaatacagaaggtttcagcagagcagctttaccatttgggctggtgaggcgagaattatcctgtgaaggttattctatagatctgcgatgcccgggcagtgatgtcatcatgattgagagcgctaactatggtcggacggatgacaagatttgtgatgctgacccatttcagatggagaatacagactgctacctccccgatgccttcaaaattatgactcaaaggtgcaacaatcgaacacagtgtatagtagttactgggtcagatgtgtttcctgatccatgtcctggaacatacaaataccttgaagtccaatatgaatgtgtcccttacatttttgtgtgtcctgggaccttgaaagcaattgtggactcaccatgtatatatgaagctgaacaaaaggcgggtgcttggtgcaaggaccctcttcaggctgcagataaaatttatttcatgccctggactccctatcgtaccgatactttaatagaatatgcttctttagaagatttccaaaatagtcgccaaacaacaacatataaacttccaaatcgagtagatggtactggatttgtggtgtatgatggtgctgtcttctttaacaaagaaagaacgaggaatattgtgaaatttgacttgaggactagaattaagagtggcgaggccataattaactatgccaactaccatgatacctcaccatacagatggggaggaaagactgatatcgacctagcagttgatgaaaatggtttatgggtcatttacgccactgaacagaacaatggaatgatagttattagccagctgaatccatacactcttcgatttgaagcaacgtgggagactgtatacgacaaacgtgccgcatcaaatgcttttatgatatgcggagtcctctatgtggttaggtcagtttatcaagacaatgaaagtgaaacaggcaagaactcaattgattacatttataatacccgattaaaccgaggagaatatgtagacgttcccttccccaaccagtatcagtatattgctgcagtggattacaatccaagagataaccaactttacgtgtggaacaataacttcattttacgatattctctggagtttggtccacctgatcctgcccaagtgcctaccacagctgtgacaataacttcttcagctgagctgttcaaaaccataatatcaaccacaagcactacttcacagaaaggccccatgagcacaactgtagctggatcacaggaaggaagcaaagggacaaaaccacctccagcagtttctacaaccaaaattccacctataacaaatatttttcccctgccagagagattctgtgaagcattagactccaaggggataaagtggcctcagacacaaaggggaatgatggttgaacgaccatgccctaagggaacaagaggaactgcctcatatctctgcatgatttccactggaacatggaaccctaagggccccgatcttagcaactgtacctcacactgggtgaatcagctggctcagaagatcagaagcggagaaaatgctgctagtcttgccaatgaactggctaaacataccaaagggccagtgtttgctggggatgtaagttcttcagtgagattgatggagcagttggtggacatccttgatgcacagctgcaggaactgaaacctagtgaaaaagattcagctggacggagttataacaaggcaattgttgacacagtggacaaccttctgagacctgaagctttggaatcatggaaacatatgaattcttctgaacaagcacatactgcaacaatgttactcgatacattggaagaaggagcttttgtcctagctgacaatcttttagaaccaacaagggtctcaatgcccacagaaaatattgtcctggaagttgccgtactcagtacagaaggacagatccaagactttaaatttcctctgggcatcaaaggagcaggcagctcaatccaactgtccgcaaataccgtcaaacagaacagcaggaatgggcttgcaaagttggtgttcatcatttaccggagcctgggacagttccttagtacagaaaatgcaaccattaaactgggtgctgattttattggtcgtaatagcaccattgcagtgaactctcacgtcatttcagtttcaatcaataaagagtccagccgagtatacctgactgatcctgtgctttttaccctgccacacattgatcctgacaattatttcaatgcaaactgctccttctggaactactcagagagaactatgatgggatattggtctacccagggctgcaagctggttgacactaataaaactcgaacaacgtgtgcatgcagccacctaaccaattttgcaattctcatggcccacagggaaattgcatataaagatggcgttcatgaattacttcttacagtcatcacctgggtgggaattgtcatttcccttgtttgcctggctatctgcatcttcaccttctgctttttccgtggcctacagagtgaccgaaatactattcacaagaacctttgtatcaaccttttcattgctgaatttattttcctaataggcattgataagacaaaatatgcgattgcatgcccaatatttgcaggacttctacactttttctttttggcagcttttgcttggatgtgcctagaaggtgtgcagctctacctaatgttagttgaagtttttgaaagtgaatattcaaggaaaaaatattactatgttgctggttacttgtttcctgccacagtggttggagtttcagctgctattgactataagagctatggaacagaaaaagcttgctggcttcatgttgataactactttatatggagcttcattggacctgttaccttcattattctgctaaatattatcttcttggtgatcacattgtgcaaaatggtgaagcattcaaacactttgaaaccagattctagcaggttggaaaacattaagtcttgggtgcttggcgctttcgctcttctgtgtcttcttggcctcacctggtcctttgggttgctttttattaatgaggagactattgtgatggcatatctcttcactatatttaatgctttccagggagtgttcattttcatctttcactgtgctctccaaaagaaagtacgaaaagaatatggcaagtgcttcagacactcatactgctgtggaggcctcccaactgagagtccccacagttcagtgaaggcatcaaccaccagaaccagtgctcgctattcctctggcacacagagtcgtataagaagaatgtggaatgatactgtgagaaaacaatcagaatcttcttttatctcaggtgacatcaatagcacttcaacacttaatcaaggtggcataaatcttaatatattattacaggactgacatcacatggtctgagagcccatcttcaagatttatatcatttagaggacattcactgaacaatgccagggatacaagtgccatggatactctaccgctaaatggtaattttaacaacagctactcgctgcacaagggtgactataatgacagcgtgcaagttgtggactgtggactaagtctgaatgatactgcttttgagaaaatgatcatttcagaattagtgcacaacaacttacggggcagcagcaagactcacaacctcgagctcacgctaccagtcaaacctgtgattggaggtagcagcagtgaagatgatgctattgtggcagatgcttcatctttaatgcacagctcttaaataaaatataaatgaacaaaaaaaaaaaaaaaaaaaaaaaaaaaaaaaaaacaaaaaaaaaaaaaaaaaaaaaaaaagagacaccacacaaaaaaaacaattcacccagagaggcgacaaccgaaagtcagcaatgcaaccaaaatgtagtataaacaagaggtcccccgaaagggagagccagatcataataaagagacagagacctagcgacacatatcaacaaccagcgcagcgggacacccaacggcgtcaggcatactagtgcagacacacacatatattaggagcatggaacaagaatgggacagacacacacaaacggaaacccgcgcaggaggaaaaacaacaagacccagcgctagatcacgggcaccagaacggaagcacaccgccgcgacaaaccccggcccacaagcggaaaagagcaaacagaataaagcagagcgaggaagacagtagaggaggcagagcggaaccaacaacgagacgagggagagcagcacgccgagaggacgcgagaggatagcaacgcagacggcaagagcgcgcaagacgcaagagaaaccaccagaggagggaccgaaggagcgcggcagcagacagaaagcagagcaaacgccagcaagagaggacaggcgagacgacgcagggcgagagtggcaagagaggcacgcaccgcagaccacccaaagagn

SEQ ID NO: 28566 - DNA, 2068 bp, Homo sapiens
cagtgaacctctacagaggaaacaaatgctagcaagacattcactgaacaatgccagggatacaagtgccatggatactctaccgctaaatggtaattttaacaacagctactcgctgcacaagggtgactataatgacagcgtgcaagttgtggactgtggactaagtctgaatgatactgcttttgagaaaatgatcatttcagaattagtgcacaacaacttacggggcagcagcaagactcacaacctcgagctcacgctaccagtcaaacctgtgattggaggtagcagcagtgaagatgatgctattgtggcagatgcttcatctttaatgcacagcgacaacccagggctggagctccatcacaaagaactcgaggcaccacttattcctcagcggactcactcccttctgtaccaaccccagaagaaagtgaagtccgagggaactgacagctatgtctcccaactgacagcagaggctgaagatcacctacagtcccccaacagagactctctttatacaagcatgcccaatcttagagactctccctatccggagagcagccctgacatggaagaagacctctctccctccaggaggagtgagaatgaggacatttactataaaagcatgccaaatcttggagctggccatcagcttcagatgtgctaccagatcagcaggggcaatagtgatggttatataatccccattaacaaagaagggtgtattccagaaggagatgttagagaaggacaaatgcagctggttacaagtctttaatcatacagctaaggaattccaagggccacatgcgagtattaataaataaagacaccattggcctgacgcagctccctcaaactctgcttgaagagatgactcttgacctgtggttctctggtgtaaaaaagatgactgaaccttgcagttctgtgaatttttataaaacatacaaaaactttgtatatacacagagtatactaaagtgaattatttgttacaaagaaaagagatgccagccaggtattttaagattctgctgctgtttagagaaattgtgaaacaagcaaaacaaaactttccagccattttactgcagcagtctgtgaactaaatttgtaaatatggctgcaccatttttgtaggcctgcattgtattatatacaagacgtaggctttaaaatcctgtgggacaaatttactgtaccttactattcctgacaagacttggaaaagcaggagagatattctgcatcagtttgcagttcactgcaaatcttttacattaaggcaaagattgaaaacatgcttaaccactagcaatcaagccacaggccttatttcatatgtttcctcaactgtacaatgaactattctcatgaaaaatggctaaagaaattatattttgttctattgctagggtaaaataaatacatttgtgtccaactgaaatataattgtcattaaaataattttaaagagtgaagaaaatattgtgaaaagctcttggttgcacatgttatgaaatgttttttcttacactttgtcatggtaagttctactcattttcacttcttttccactgtatacagtgttctgctttgacaaagttagtctttattacttacatttaaatttcttattgccaaaagaacgtgttttatggggagaaacaaactctttgaagccagttatgtcatgccttgcacaaaagtgatgaaatctagaaaagattgtgtgtcacccctgtttattcttgaacagagggcaaagagggcactgggcacttctcacaaactttctagtgaacaaaaggtgcctattcttttttaaaaaaataaaataaaacataaatattactcttccatattccttctgcctatatttagtaattaatttattttatgataaagttctaatgaaatgtaaattgtttcagcaaaattctgcttttttttcatccctttgtgtaaacctgttaataatgagcccatcactaatatccagtgtaaagtttaacacggtttgacagtaaataaatgtgaattttttcaagta

SEQ ID NO: 28567 - DNA, 2815 bp, Homo sapiens
cgtgtctgtttctctttctctctccctctcttgcgctgtccctcattcatgcactcttccatctttttgccattgtgccagctcaatttaaatgtatctgctctgtatctgttcaagtggagataatccatgcaaatcaggagccgtggctctcaatgcctggttcacagagaggactcagcttgaggaggtcactcgttcacagccgctcctcccattatatttttccccttattgcagaactgctgtatgtatacagtgactgaaaggactcaatttactgcaactgctgcctggctttacttacaacttttttttttttataaaggaacttacctccatctgtcttttcaaggttacagaccacttactctaaacttcacaaatggttctgaagagtatggagcctacgtagattcataagagcccaatgtttccaaaggacattaattttgatttctccaatgaaggcttgtggctgtccttatgctttacaaaacattaccaaatcagagccgaaaagaaaactttggaatttgaagagagcttgataactgtgttctatgtggatccagcattacaactgataagggtatttatggcacaatgaaaaattcatctttcccagaatgatatgaagatcaatgatgcagactgatggtcttgatgaagctgggcatttataactagattcattaaggaatacaaagaaaatacttaaagggatcaataatggtgtcttctggttgcagaatgcgaagtctgtggtttatcattgtaatcagcttcttaccaaatacagaaggtttcagcagagcagctttaccatttgggctggtgaggcgagaattatcctgtgaaggttattctatagatctgcgatgcccgggcagtgatgtcatcatgattgagagcgctaactatggtcggacggatgacaagatttgtgatgctgacccatttcagatggagaatacagactgctacctccccgatgccttcaaaattatgactcaaaggtgcaacaatcgaacacagtgtatagtagttactgggtcagatgtgtttcctgatccatgtcctggaacatacaaataccttgaagtccaatatgaatgtgtcccttacatttttgtgtgtcctgggaccttgaaagcaattgtggactcaccatgtatatatgaagctgaacaaaaggcgggtgcttggtgcaaggaccctcttcaggctgcagataaaatttatttcatgccctggactccctatcgtaccgatactttaatagaatatgcttctttagaagatttccaaaatagtcgccaaacaacaacatataaacttccaaatcgagtagatggtactggatttgtggtgtatgatggtgctgtcttctttaacaaagaaagaacgaggaatattgtgaaatttgacttgaggactagaattaagagtggcgaggccataattaactatgccaactaccatgatacctcaccatacagatggggaggaaagactgatatcgacctagcagttgatgaaaatggtttatgggtcatttacgccactgaacagaacaatggaatgatagttattagccagctgaatccatacactcttcgatttgaagcaacgtgggagactgtatacgacaaacgtgccgcatcaaatgcttttatgatatgcggagtcctctatgtggttaggtcagtttatcaagacaatgaaagtgaaacaggcaagaactcaattgattacatttataatacccgattaaaccgaggagaatatgtagacgttcccttccccaaccagtatcagtatattgctgcagtggattacaatccaagagataaccaactttacgtgtggaacaataacttcattttacgatattctctggagtttggtccacctgatcctgcccaagtgcctaccacagctgtgacaataacttcttcagctgagctgttcaaaaccataatatcaaccacaagcactacttcacagaaaggccccatgagcacaactgtagctggatcacaggaaggaagcaaagggacaaaaccacctccagcagtttctacaaccaaaattccacctataacaaatatttttcccctgccagagagattctgtgaagcattagactccaaggggataaagtggcctcagacacaaaggggaatgatggttgaacgaccatgccctaagggaacaagaggaactgcctcatatctctgcatgatttccactggaacatggaaccctaagggccccgatcttagcaactgtacctcacactgggtgaatcagctggctcagaagatcagaagcggagaaaatgctgctagtcttgccaatgaactggctaaacataccaaagggccagtgtttgctggggatgtaagttcttcagtgagattgatggagcagttggtggacatccttgatgcacagctgcaggaactgaaacctagtgaaaaagattcagctggacggagttataacaagctccaaaaacgagagaagacatgcagggcttaccttaaggtatctctcctgtgctgtcaccctgctttctcccttcttcagctacctgccacgctttatcatcttgctgcatgatccaatgtatttcagtctttgataattatataatgtgccccatatcagctgtacaaatgttggcttttcacaggtatattactctcagaataagcaaataatttacttttaatgatttctgctgtttttccattcatccaaaagtacacgaattttaatgaaatatcctcttaattggaaagtaatt

SEQ ID NO: 28568 - DNA, 326 bp, Homo sapiens
gaaacttacaaagtaaatggaagaagggtaacttaagtaataaaaaacaaagcaagcccaggcacccagcactttggaagaacaagaaaggcggacaccttgagctcaagagttcgagaccatcctaggcaagacagtggaatcccatctctaccaaaaatataaaaaaattagccaggcctggtggcgtgtctgtggtcccagctacttggaaggctgaggcgggaggatcacttgagcctgggaggcagaggttgcagtgagccataaccatgctgctgcactccagcctgggtgacagagtggccccatctccaaaaaaaaaa

SEQ ID NO: 28569 - DNA, 476 bp, Homo sapiens
gtcccgtttttcctcagaagggctactctttggaactcagtccatggtgagctgaagctggctcacactggctcatgagacctggctgcacatctctgggtcagcagcatgacattggtagcttgaaactgacaaatccttcaaattagcaccctccctttctcccactgaggaccaattattaaacatacaccagctcaccacctaattcaggttacctgattgcttcatgatggtagctctttgggctcaagaaaaggaacatttttgtataatagattatctgactttttcttattggtataggagcaatattctcgagttttatacattctaagcagaagtagaactcagtgttgtttttgttttgagaactagtgaggtagaacagtttattcaagttcattagccgttagaattccttctttatggaaaggatgttgaaaggtgaaccacataatagatcacagtcatgg

SEQ ID NO: 28570 - DNA, 351 bp, Homo sapiens
gatgctttggagtagattgaagtaaaatcagcaagtgttgtgctaactctaaatccactccaaagatcactttttgtagctagcttttaggtcagagactctgtatcttctttaggattattcagacaggacttatgtattctcctaggaaggagtgttcctttctagctcttcaaaaacaaaacacttgattgttcttggaattattattttttaattattttttatagagactgggtctctgttgcccaggccgctgtcaaactcctggtctcaagcagtcctccaaccttggcctcccaaagtgctgggattacacatgtgagccatcacatccagcctttccttgga

SEQ ID NO: 28571 - DNA, 375 bp, Homo sapiens
  misc_feature (326)..(326): n is a, c, g, or t
  misc_feature (338)..(338): n is a, c, g, or t
ctggtcagtgatacagaaacaaactcaattcaacttggattctccctgaatcctgaaaatgtccctgagttctgaaatggttttgatggaagctagaggtcaatgattatcaggaagaatcagaaaggctcaattggggtgctgcaaggcctgattacacagagttattaatcacgtttcattcttctccaatcatcatgttctgatctgccctccaaaaggagaaacaggaaaatgggagtgtctggcaaccttttcacatacctcacagggggaaggcaggctggcaataggaggtgggtgctgggagggcaggatggaacccntcactttgttanttaggagggagtttttaggggggaatttggggacatc

SEQ ID NO: 28572 - DNA, 522 bp, Homo sapiens
  misc_feature (1)..(2): n is a, c, g, or t
  misc_feature (7)..(7): n is a, c, g, or t
  misc_feature (10)..(10): n is a, c, g, or t
  misc_feature (13)..(13): n is a, c, g, or t
nnattcncgnccncgcagattctgtggttatactcactcctcatcccaaagaatgaaatttaccactctcctcttcttggcagctgtagcaggggccctggtctatgctgaagatgcctcctctgactcgacgggtgctgatcctgcccaggaagctgggacctctaagcctaatgaagagatctcaggtccagcagaaccagcttcacccccagagacaaccacaacagcccaggagacttcggcggcagcagttcaggggacagccaaggtcacctcaagcaggcaggaactaaaccccctgaaatccatagtggagaaaagtatcttactaacagaacaagcccttgcaaaagcaggaaaaggaatgcacggaggcgtgccaggtggaaaacaattcatcgaaaatggaagtgaatttgcacaaaaattactgaagaaattcagtctattaaaaccatgggcatgagaagctgaaaagaatgggatcattggacttaaagccttaaatacccttgtagc

SEQ ID NO: 28573 - DNA, 471 bp, Homo sapiens
atttttacagtacaaccatacctcagagatactgcaggtttagttccaataaagtgagtatcgctataaagcaagtaaaagtaagtgcaataaagtgagtatcgctataaagcaagtcacacaaatttttgtttcctagtaagcatgagttatgcttaaactatattgtagtctattaagcgtacaatagcatgtctacaaaaacaatgtataaaccttaatttaaaaatatttttactaaaaaatgctaatgatcatctctgctgtcagtgagttgtaatctttttgctggtggagggtcgtgccttaatgttgatggctgctgactaatcagggtagtggttgctgaaggttgggtggctgtgacaatttcttaaaatatgaaaacaacgaagtttgccatatcaatcaactcttcctttcacaaaaaaatttccctgtgacatgcagtgctatttcatagcattttac

SEQ ID NO: 28574 - DNA, 382 bp, Homo sapiens
gtggtgtctgtgatctgactttgagagacatctggctctgtttcagaagaactaaaaatgcaagtgctgtaaagctttaaagcagcccatgtttatctcaagttgaattatccaggcttgcttacaaagatgagagaaaagtggcctgtaaaatgacagagaaaaacatgggcaagagagggcttaataaaggggttaaccaattccataaagaagactggaatttattaaagaggcattgtagccactcggggatcaataattttgatttgatttttaagtacttgtagattttcttttaactagaggcattaatccgaaagcagcatgtttcattgaaaactgcatcactaaacccaataaaaagtcctagcagaaaaaa

SEQ ID NO: 28575 - DNA, 388 bp, Homo sapiens
tcactaggaaaatgcagattaaagtcacagtgaaattctactttgggaaacagttggacagttctttattctgttaaacataaaattagcatattagcagttttactacttggtatttactcaagagtaacgaaaatataagttgaggccgggcatggtggctcatgcctataatcccagcactttgggaggccaaggtgggtggatcactaggtcaggagtttgagaccagcctggccaatatggtgaaacctcatctctactaaaaatgtgaaaattagccaggcgtagtggcaggcgcctgtatcccagctacgtgggaggctgaggcaggagaatcgcttgaacctgggaggtggaggctgcagtgagccgaaatcatgccact

SEQ ID NO: 28576 - DNA, 440 bp, Homo sapiens
tcttccagaattctgttgtcgtcacaagaagtctgttgtgttgatttgaactgtgaatactatctgacattatattacctgtattttcaaagtaatttgcctttcaattccttgtacttgtgccaggcagcgttagttggtagtaagcccattcttttttctacaatgtttcactcttgcttcaaatataccaactattctgtaggccagagttcaaaacaaaacaaaacatacgaaaaaccaaataatactgactaaagatactaaaatgtcacttgtttcaaattttttctcatttaatatttactgcctaattttgaagaaatatctttccagtctttaataaaaatgttacacctgtaatcccagcactttgggattacacaggcggatcacttgagctcaggagtttgagaccagcctgagcaacatggtgaaac

SEQ ID NO: 28577 - DNA, 1050 bp, Homo sapiens
  misc_feature (957)..(957): n is a, c, g, or t
tgctgcctctccagccaagtggctggagtcgggaggctggaaagagactccgagaaagtaccagcggaaggcggccgccgctacggcgattcgcagggagtagcagacgaagacggtggccgccgcactagccaccacgtgtggaggataaacggtctacacggccattccggcgccgagtctagggaaagagttagcgacgacggggaaagaaaatgtgaagagagcgaccgccgctccagggtcgctgcaggaagcctaagtgcagacgccggcttctcccgcagtgacttgagaagggtcagtgaaaacctcggccactgccgcagcgtctctagggagagagttaggggagatagtggccacagtcacagctgctcttgggagagagttaggggagacagcaccttctgcagcagcgacgtgaattttagtgaagttggaggccaccaaactaccgactccaggggaacagccagagaagaccgaggcctccgcctcagtggtccttgggagggagtcagtgacattcgggacccgcgaactagtgacttcggggatagagtcagtgacgatcgcagtcgccgcttcagtggctcctgggagggagggagtgtcgaaggcggccacagcgttggtagttcttgggaggaagtaagtggagaccgcggctacgcagccagcgactcctctggtgtgagcggcagtgaagacgccagctaccgcttcagtggcttttgggagagagaaagtgaagacgaaggtttccgctgcagcttctgggagagagcaagagaggaccttgggccccgtcctagtgacgacggagaagagggccgctgccgctgcagtggctcgtgggtgagagcaagtgaagacgccagctaaccgcttcagtggcttttgggagagagaaagtgaagacgaaggttccgctgcagcttctgggagagagcnagagaggaccttgggccccgtcctagtgacgacggagaagagggccctgccgctgcagtggctcgtgggtgggagcatctggtgtaagccgaa

SEQ ID NO: 28578 - DNA, 1275 bp, Homo sapiens
tgctgcctctccagccaagtggctggagtcgggaggctggaaagagactccgagaaagtaccagcggaaggcggccgccgctacggcgattcgcagggagtagcagacgaagacggtggccgccgcactagccaccacgtgtggaggataaacggtctacacggccattccggcgccgagtctagggaaagagttagcgacgacggggaaagaaaatgtgaagagagcgaccgccgctccagggtcgctgcaggaagcctaagtgcagacgccggcttctcccgcagtgacttgagaagggtcagtgaaaacctcggccactgccgcagcgtctctagggagagagttaggggagatagtggccacagtcacagctgctcttgggagagagttaggggagacagcaccttctgcagcagcgacgtgaattttagtgaagttggaggccaccaaactaccgactccaggggaacagccagagaagaccgaggcctccgcctcagtggtccttgggagggagtcagtgacattcgggacccgcgaactagtgacttcggggatagagtcagtgacgatcgcagtcgccgcttcagtggctcctgggagggagggagtgtcgaaggcggccacagcgttggtagttcttgggaggaagtaagtggagaccgcggctacgcagccagcgactcctctggtgtgagcggcagtgaagacgccagctaccgcttcagtggcttttgggagagagaaagtgaagacgaaggtttccgctgcagcttctgggagagagcaagagaggaccttgggccccgtcctagtgacgacggagaagagggccgctgccgctgcagtggctcgtgggtgagagcaagtgaagaccgccgcagcatcaggggcctggactcaactcctccccagagtcggaggtgttgcgccatgcccggggtggccaattcaggcccctccacttcctctagggagactgcaaacccctgttccaggaagaaggtgcattttggcagcatacatgatgcagtacgagctggagatgtaaagcagctttcagaaatagtggtacgtggagccagcattaatgaacttgatgttctccataagtttacccctttacattgggcagcacattctggaagtttggagtgtcttcattggctgctctggcatggagctgatatcacacacgtaacaacgagaggttggacagcatctcacatagctgcaatcaggggtcaggatgcttgtgtacaggtaataata

SEQ ID NO: 28579 - DNA, 731 bp, Homo sapiens
gggccacaaagcaaagccctgtctctaaaaaacaaacaaacaaacctccaaaacttctttcccttccttggtctgccctaggccctctgagtatagataacccctcttagaagcagcatggcaaggcggtcaggagcccaaatgggaaaaagaattaactggagaccacgtagggggtgagtcctcttacacacaggccagttactcacacagacaaaaattagttactggcagggaggggtaaaggcctacttagcttgcattttcgtaccatttggtatgccatcacttgcgagtttgagtgtgagttctgtagctcatggctgcatataatcacgggcagatgacagcaagacttcccagactcactttccacatctgtaaaattgaggtggttatgagaaaacaaaacaaacaaaaagaaatgaaaatcctgaactccagagggtcaccaatactaaggcatatgctaagttagtgttttataaaataggattctatgtgtcattctataatagaatgacattatacaataacttaatcaagtactttttcatgcataaaaggtattttgtgaaagttcacagctccacagaaccctacttgtctggtcaagctgtaacttagccagtacctgattacagaagctccccaagggttccagtctgtccgttcttttttcttttcttttcttttcttttcttttttttttttttgagatggagtcttgc

SEQ ID NO: 28580 - DNA, 1436 bp, Homo sapiens
tatttgtagctattggaaataagattattttcttggtttattttctagattgtttgctcttggcatacagaaatgctgctgatttttatatgctgactttgcatcctgcaattttactaaacctcagttctaacagttttctggtagagtccttaggtttttctaaatttaagatactattgtctgcaaacaagggtaatctaaatttttccttccaatttggatgccttttcttttcttctcctgtttaattgctctggctaggacttccagtaccacgttgaagaaaggtggtgaaagtgggcttccttgccttcttccagatcttacaggaaaggcttttagattcccccctcatgatactagctgtgggtttatctgtctgtggcttttattgtgttgaggcatgttccttctacatccagttgagtttttatcatgaagggatgctgaattttactgaatacttttttggcatctatagaaatggacatatggttatgtccttcattcttttgatgtgatgtatcgcatttacagatctgaatatgtattaggtggttctcacattgctataaagaaatacctgagactgggcaatttatataaaaaaagagttcattggctcactattctgcaggctgtacagcaagcatgacagcatctgcttggcttctggtgaggcctcaggaaatgcataatcagggcagaaggcaacaggggaacacacatggccagagtaggagagagacagagagcagggaggtttaaacaatcagatctcatgagaactcactaactatatagtagcaaggggagatggggctaaaccattcatgagaactccactcctatgatccaatcacgttccaccaggcccctcctccaacactggggattacaattaaatgtaagatttgggcagggacacaaacacaaaccatatcagagtatgttgaaccatccttgcatccctgggatgaatcccacttgattacaatgaatgatcttttaaatatgtagttgaatttggtttaaggattttgcatctctgttcaaagatactggcctgtagttttcttttagggtttttatggttttaggtctaacatttaagtctttaatctttcttcatcttaatataaatgaaagctccgtggccgagcacggtggctcacacctgtaatcccagcactttgggaggccgaggcgggcagatcactaggtcaagagtttgagaccagcctggcccatatgatgaaaccccatctctactaaaaatacaaaaattagccaggcgtggtcacgggtgcttgtagtcccagcaacttgggaggctgaggcaggagaatcgcttgaaccagggaggcagaggttgcagtgagccgagatcacgccactgcactccagcctgggtagcagagtgagactgtctc

SEQ ID NO: 28581 - DNA, 2355 bp, Homo sapiens
gaggcaggctgggtccgcctggcagcctacgggaggaggcgggagccgggaaggaggggagcctaggcccggcgtggggaggccggcaggaagggcctcgagcccagtgcggacctttcttcagcctctgtgcgaccgagccgcgcgccaggctcctgtgcgaggaggacgcgctgactccctccgacctgggctccgatggagcagaaatagcgggacctggacttgtggcgcgcctggtgccacatctcgggctctgcgagcgtcctggcgcgggatcctgcctgttcccttcttttcgccaggtttgcatccaagagaggggaggacaggggcaaaaggatgcagggaggctgctgatttccactgaagagctaatttcctgtgagacattaacagtgatttaagaaaaagattcctgtaactgtaatgtcttacaataacagaatgcaggagagcacatatcaatgaagaaaagacaaaatgtacttatccatgaagctgaggttaagaaaccagtgtcttcaagagccagggacagcactgggtctgtgcagagttgagagatggtgatgacatgtggtttccagcattcctcacccagtccagggacactgtgggtgtgcccagcttaagtccagtaactggaaatacaagcccaagttctggagagtttgagctgcagagatatatatgggaacactttgaatcttgactcattggccataaccagcagagtggaaaatacaagaagagaaaaaaacattgaactgcgattttataacatcctttactaggcagagagaagaggaaacaccaggaaagaaaactgtattacgatgtgaaaacttaatgttgagaaattcaggcatcttggggttagtgaggagaagttttaggggcttagattcttctaaacacatgtacagaaatgcatatttcatctgatatcaaatggcatttatagtgctaatctttacctcaagacttcacatcttttggtgattgcatcttttaggtttatagcagctaagtttgcatgaaaacaccagggctgtttcatttcagtcaagaattaatgttcattgattgtgcttctgcatttcatgtaactattgtagaatttgttttagttttatgagggaataattgttccaacttctatataactcaggaatttactctcaaacaacactgtcaattagttacttatctctctggaaatgatctgggaacatggagaggaaagggaggaaggggcaaaatctgaccacttaaatctaagcatattagatcattttatgctagaaagtcctgaatgatgtgactttcgttcttgtaaaacacctctttccatagattcatggcccaaacagtatataaagagtggggaaggaactgcatttgcaaatagttcaaatcattgctccatcttaactacgcagttcacaaagtgtgaagaaatgtgatcatctcaaaaaagataatggggaaaaaatatgttttgttctgtgactttaaagtcttgcaatattttacataaatgataatgggtgctttaataagaactcttgatacttttgttattgtattcaatatatgcatataatacaacaggatgatattgttttggatttggaaatgtattctttcttatgcaatcttatgcagtcatactgcttgaatatcattacctgaatttatctttcttttttttgttgttgttttacactctacttatttggtgcctgtcagtcttttgtcgtcagtttatattctactaaactcaaaaagacaatctcataccttttgtaattgtaggcattctttactagatttttaaatacacttcaaaaattcaagtactttgatttcatgccatcaagtagctgaatctatccccccgtctctttttaaatttaagtgagtagttcaatttctgtcactttctactttgtgaattctaaatcttttaaaaccatcttgccatttttcgtgcacttacccttacagaaaactctgtgaaacactacttatctctacttttatgtttttaactccttttttatattactattccctctgctttctaaatgcacatattaatttgttctttttattctctgtagctcttctcagtgtatgaattcagtttcccatcagtctccatacaattaaaaaaaagttgagtattctgttattttaataagatatctagtgcccatattctaattctgccccttatttttaatataattttattgttgatttaaaatgacaacagtttcaattcccagaaagtgaaaggaaacaaaggaataatattataggcttaatttttatcagtgaacttgt

SEQ ID NO: 28582 - DNA, 2238 bp, Homo sapiens
gcactgcgggtgctctctggcccccaccccatcatcgcgcaacacacccccttcaacatgcgcggccaccctttcattgccctgcgccccgagcggtcccaccgcccggcaaaacactgagcaagccgctgctctcaccttgcttgacacacttgagccggagggggtccttgcagtgtttgatcacggccagcacgtccctgatggtgagccccgccacgggggtctcgttcacctccagcagcagctcctccgacaccaatttgctgccgctctcataggccaccttgccgggcttcacctcccccagtaatgtcttacaataacagaatgcaggagagcacatatcaatgaagaaaagacaaaatgtacttatccatgaagctgaggttaagaaaccagtgtcttcaagagccagggacagcactgggtctgtgcagagttgagagatggtgatgacatgtggtttccagcattcctcacccagtccagggacactgtgggtgtgcccagcttaagtccagtaactggaaatacaagcccaagttctggagagtttgagctgcagagatatatatgggaacactttgaatcttgactcattggccataaccagcagagtggaaaatacaagaagagaaaaaaacattgaactgcgattttataacatcctttactaggcagagagaagaggaaacaccaggaaagaaaactgtattacgatgtgaaaacttaatgttgagaaattcaggcatcttggggttagtgaggagaagttttaggggcttagattcttctaaacacatgtacagaaatgcatatttcatctgatatcaaatggcatttatagtgctaatctttacctcaagacttcacatcttttggtgattgcatcttttaggtttatagcagctaagtttgcatgaaaacaccagggctgtttcatttcagtcaagaattaatgttcattgattgtgcttctgcatttcatgtaactattgtagaatttgttttagttttatgagggaataattgttccaacttctatataactcaggaatttactctcaaacaacactgtcaattagttacttatctctctggaaatgatctgggaacatggagaggaaagggaggaaggggcaaaatctgaccacttaaatctaagcatattagatcattttatgctagaaagtcctgaatgatgtgactttcgttcttgtaaaacacctctttccatagattcatggcccaaacagtatataaagagtggggaaggaactgcatttgcaaatagttcaaatcattgctccatcttaactacgcagttcacaaagtgtgaagaaatgtgatcatctcaaaaaagataatggggaaaaaatatgttttgttctgtgactttaaagtcttgcaatattttacataaatgataatgggtgctttaataagaactcttgatacttttgttattgtattcaatatatgcatataatacaacaggatgatattgttttggatttggaaatgtattctttcttatgcaatcttatgcagtcatactgcttgaatatcattacctgaatttatctttcttttttttgttgttgttttacactctacttatttggtgcctgtcagtcttttgtcgtcagtttatattctactaaactcaaaaagacaatctcataccttttgtaattgtaggcattctttactagatttttaaatacacttcaaaaattcaagtactttgatttcatgccatcaagtagctgaatctatccccccgtctctttttaaatttaagtgagtagttcaatttctgtcactttctactttgtgaattctaaatcttttaaaaccatcttgccatttttcgtgcacttacccttacagaaaactctgtgaaacactacttatctctacttttatgtttttaactccttttttatattactattccctctgctttctaaatgcacatattaatttgttctttttattctctgtagctcttctcagtgtatgaattcagtttcccatcagtctccatacaattaaaaaaaagttgagtattctgttattttaataagatatctagtgcccatattctaattctgccccttatttttaatataattttattgttgatttaaaatgacaacagtttcaattcccagaaagtgaaaggaaacaaaggaataatattataggcttaatttttatcagtgaacttgt

SEQ ID NO: 28583 - DNA, 1089 bp, Homo sapiens
acaattttaagatcttaaaagtcttctatcaaatactgaattttagatgttaaggctagtagagctgtacaaaaaacaacagcttcttgtatgaatgttcctcagtttaaatatttagtgttctattatcagtatgtgggcattaaaaaaacaagtcatttgaaactgatagagataattaagaaattcttagattttgggtataggtgctgcaacttagaatttaagtgtcgtccaaaagagattagtattggtcataacatggactctaaagccaccatttaaatgaagcatgtaaaaaagaatattctagtacacaaaaattattaatggcctagaatgacctccttctcactcatatgatgcaaagaataaagtatataaaaatgtttgttacaatggctatccataaaaaagaaaaccctccaaaacagcaaaattgaataggtatccacagtcaactttatcctgaaaattgcctagaaatactggttgtgattacacagcatcctgagaccaatgaatctttagacagtaataatttcctactctaaagctattctctacttcctccttagtgacagagctccttgctgctcaaattttatgccagataaaatattcaccttctcggactccctggcaccaggcatggccatgtaatcctacagcacagctgatgaaagagaagacatcttgctgctatttgacaagcaagaagataaaagctttcctataaagatgatggagcaaaaaaatagaaggggcctagactccctaccttcacacttcctgctataaaagcattgctattataaggttaatctgcagaaacagacttctatgtcatatgcttaaatgcatcaaaattcatacaatatccattaaattggtaaaagtatccattttaaaggattaatctgagggacccacagacacttaacacaatcaaatctcagaaaaaaaatcagttatttcattgtgattttgaggctgatcttttatgatcttttagttatcaaactgttaaatacattttaactttcaaattttatgaataaaggagatgaatcctgttaaaaaatcagt

SEQ ID NO: 28584 - DNA, 483 bp, Homo sapiens
  misc_feature (25)..(27): n is a, c, g, or t
  misc_feature (43)..(44): n is a, c, g, or t
gaagttataatgtgtaaggagggannncaagcagagatcaacnntttactcacagacccctacagcacagctgatgaaagagaagacatcttgctgctatttgacaagcaagaagataaaagctttcctataaagatgatggagcaaaaaaatagaaggggcctagactccctaccttcacacttcctgctataaaagcattgctattataaggttaatctgcagaaacagacttctatgtcatatgcttaaatgcatcaaaattcatacaatatccattaaattggtaaaagtatccattttaaaggattaatctgagggacccacagacacttaacacaatcaaatctcagaaaaaaaatcagttatttcattgtgattttgaggctgatcttttatgatcttttagttatcaaactgttaaatacattttaactttcaaattttatgaataaaggagatgaatcctgttaaaaaatcagt

SEQ ID NO: 28585 - DNA, 2307 bp, Homo sapiens
gcactgcgggtgctctctggcccccaccccatcatcgcgcaacacacccccttcaacatgcgcggccaccctttcattgccctgcgccccgagcggtcccaccgcccggcaaaacactgagcaagccgctgctctcaccttgcttgacacacttgagccggagggggtccttgcagtgtttgatcacggccagcacgtccctgatggtgagccccgccacgggggtctcgttcacctccagcagcagctcctccgacaccaatttgctgccgctctcataggccaccttgccgggcttcacctcccccagcagaggaagcagtggtggtggcgtcggcggcggcggcggcggcagccggagcgagcagtagccgagctgtaatgtcttacaataacagaatgcaggagagcacatatcaatgaagaaaagacaaaatgtacttatccatgaagctgaggttaagaaaccagtgtcttcaagagccagggacagcactgggtctgtgcagagttgagagatggtgatgacatgtggtttccagcattcctcacccagtccagggacactgtgggtgtgcccagcttaagtccagtaactggaaatacaagcccaagttctggagagtttgagctgcagagatatatatgggaacactttgaatcttgactcattggccataaccagcagagtggaaaatacaagaagagaaaaaaacattgaactgcgattttataacatcctttactaggcagagagaagaggaaacaccaggaaagaaaactgtattacgatgtgaaaacttaatgttgagaaattcaggcatcttggggttagtgaggagaagttttaggggcttagattcttctaaacacatgtacagaaatgcatatttcatctgatatcaaatggcatttatagtgctaatctttacctcaagacttcacatcttttggtgattgcatcttttaggtttatagcagctaagtttgcatgaaaacaccagggctgtttcatttcagtcaagaattaatgttcattgattgtgcttctgcatttcatgtaactattgtagaatttgttttagttttatgagggaataattgttccaacttctatataactcaggaatttactctcaaacaacactgtcaattagttacttatctctctggaaatgatctgggaacatggagaggaaagggaggaaggggcaaaatctgaccacttaaatctaagcatattagatcattttatgctagaaagtcctgaatgatgtgactttcgttcttgtaaaacacctctttccatagattcatggcccaaacagtatataaagagtggggaaggaactgcatttgcaaatagttcaaatcattgctccatcttaactacgcagttcacaaagtgtgaagaaatgtgatcatctcaaaaaagataatggggaaaaaatatgttttgttctgtgactttaaagtcttgcaatattttacataaatgataatgggtgctttaataagaactcttgatacttttgttattgtattcaatatatgcatataatacaacaggatgatattgttttggatttggaaatgtattctttcttatgcaatcttatgcagtcatactgcttgaatatcattacctgaatttatctttcttttttttgttgttgttttacactctacttatttggtgcctgtcagtcttttgtcgtcagtttatattctactaaactcaaaaagacaatctcataccttttgtaattgtaggcattctttactagatttttaaatacacttcaaaaattcaagtactttgatttcatgccatcaagtagctgaatctatccccccgtctctttttaaatttaagtgagtagttcaatttctgtcactttctactttgtgaattctaaatcttttaaaaccatcttgccatttttcgtgcacttacccttacagaaaactctgtgaaacactacttatctctacttttatgtttttaactccttttttatattactattccctctgctttctaaatgcacatattaatttgttctttttattctctgtagctcttctcagtgtatgaattcagtttcccatcagtctccatacaattaaaaaaaagttgagtattctgttattttaataagatatctagtgcccatattctaattctgccccttatttttaatataattttattgttgatttaaaatgacaacagtttcaattcccagaaagtgaaaggaaacaaaggaataatattataggcttaatttttatcagtgaacttgt

SEQ ID NO: 28586 - DNA, 985 bp, Homo sapiens
gaggcaggctgggtccgcctggcagcctacgggaggaggcgggagccgggaaggaggggagcctaggcccggcgtggggaggccggcaggaagggcctcgagcccagtgcggacctttcttcagcctctgtgcgaccgagccgcgcgccaggctcctgtgcgaggaggacgcgctgactccctccgacctgggctccgatggagcagaaatagcgggacctggacttgtggcgcgcctggtgccacatctcgggctctgcgagcgtcctggcgcgggatcctgccgtttgcatccaagagaggggaggacaggggcaaaaggatgcagggaggctgctgatttccactgaagagctaatttcctgtgagacattaacagtgatttaagaaaaagattcctgtaactgtaatgtcttacaataacagaatgcaggagagcacatatcaatgaagaaaagacaaaatgtacttatccatgaagctgaggttaagaaaccagtgtcttcaagagccagggacagcactgggtctgtgcagagttgagagatggtgatgacatgcctacagcacagctgatgaaagagaagacatcttgctgctatttgacaagcaagaagataaaagctttcctataaagatgatggagcaaaaaaatagaaggggcctagactccctaccttcacacttcctgctataaaagcattgctattataaggttaatctgcagaaacagacttctatgtcatatgcttaaatgcatcaaaattcatacaatatccattaaattggtaaaagtatccattttaaaggattaatctgagggacccacagacacttaacacaatcaaatctcagaaaaaaaatcagttatttcattgtgattttgaggctgatcttttatgatcttttagttatcaaactgttaaatacattttaactttcaaattttatgaataaaggagatgaatcctgttaaaaaatcagt

SEQ ID NO: 28587 - DNA, 2335 bp, Homo sapiens
gaggcaggctgggtccgcctggcagcctacgggaggaggcgggagccgggaaggaggggagcctaggcccggcgtggggaggccggcaggaagggcctcgagcccagtgcggacctttcttcagcctctgtgcgaccgagccgcgcgccaggctcctgtgcgaggaggacgcgctgactccctccgacctgggctccgatggagcagaaatagcgggacctggacttgtggcgcgcctggtgccacatctcgggctctgcgagcgtcctggcgcgggatcctgccgtttgcatccaagagaggggaggacaggggcaaaaggatgcagggaggctgctgatttccactgaagagctaatttcctgtgagacattaacagtgatttaagaaaaagattcctgtaactgtaatgtcttacaataacagaatgcaggagagcacatatcaatgaagaaaagacaaaatgtacttatccatgaagctgaggttaagaaaccagtgtcttcaagagccagggacagcactgggtctgtgcagagttgagagatggtgatgacatgtggtttccagcattcctcacccagtccagggacactgtgggtgtgcccagcttaagtccagtaactggaaatacaagcccaagttctggagagtttgagctgcagagatatatatgggaacactttgaatcttgactcattggccataaccagcagagtggaaaatacaagaagagaaaaaaacattgaactgcgattttataacatcctttactaggcagagagaagaggaaacaccaggaaagaaaactgtattacgatgtgaaaacttaatgttgagaaattcaggcatcttggggttagtgaggagaagttttaggggcttagattcttctaaacacatgtacagaaatgcatatttcatctgatatcaaatggcatttatagtgctaatctttacctcaagacttcacatcttttggtgattgcatcttttaggtttatagcagctaagtttgcatgaaaacaccagggctgtttcatttcagtcaagaattaatgttcattgattgtgcttctgcatttcatgtaactattgtagaatttgttttagttttatgagggaataattgttccaacttctatataactcaggaatttactctcaaacaacactgtcaattagttacttatctctctggaaatgatctgggaacatggagaggaaagggaggaaggggcaaaatctgaccacttaaatctaagcatattagatcattttatgctagaaagtcctgaatgatgtgactttcgttcttgtaaaacacctctttccatagattcatggcccaaacagtatataaagagtggggaaggaactgcatttgcaaatagttcaaatcattgctccatcttaactacgcagttcacaaagtgtgaagaaatgtgatcatctcaaaaaagataatggggaaaaaatatgttttgttctgtgactttaaagtcttgcaatattttacataaatgataatgggtgctttaataagaactcttgatacttttgttattgtattcaatatatgcatataatacaacaggatgatattgttttggatttggaaatgtattctttcttatgcaatcttatgcagtcatactgcttgaatatcattacctgaatttatctttcttttttttgttgttgttttacactctacttatttggtgcctgtcagtcttttgtcgtcagtttatattctactaaactcaaaaagacaatctcataccttttgtaattgtaggcattctttactagatttttaaatacacttcaaaaattcaagtactttgatttcatgccatcaagtagctgaatctatccccccgtctctttttaaatttaagtgagtagttcaatttctgtcactttctactttgtgaattctaaatcttttaaaaccatcttgccatttttcgtgcacttacccttacagaaaactctgtgaaacactacttatctctacttttatgtttttaactccttttttatattactattccctctgctttctaaatgcacatattaatttgttctttttattctctgtagctcttctcagtgtatgaattcagtttcccatcagtctccatacaattaaaaaaaagttgagtattctgttattttaataagatatctagtgcccatattctaattctgccccttatttttaatataattttattgttgatttaaaatgacaacagtttcaattcccagaaagtgaaaggaaacaaaggaataatattataggcttaatttttatcagtgaacttgt

SEQ ID NO: 28588 - DNA, 957 bp, Homo sapiens
gcactgcgggtgctctctggcccccaccccatcatcgcgcaacacacccccttcaacatgcgcggccaccctttcattgccctgcgccccgagcggtcccaccgcccggcaaaacactgagcaagccgctgctctcaccttgcttgacacacttgagccggagggggtccttgcagtgtttgatcacggccagcacgtccctgatggtgagccccgccacgggggtctcgttcacctccagcagcagctcctccgacaccaatttgctgccgctctcataggccaccttgccgggcttcacctcccccagcagaggaagcagtggtggtggcgtcggcggcggcggcggcggcagccggagcgagcagtagccgagctgtaatgtcttacaataacagaatgcaggagagcacatatcaatgaagaaaagacaaaatgtacttatccatgaagctgaggttaagaaaccagtgtcttcaagagccagggacagcactgggtctgtgcagagttgagagatggtgatgacatgcctacagcacagctgatgaaagagaagacatcttgctgctatttgacaagcaagaagataaaagctttcctataaagatgatggagcaaaaaaatagaaggggcctagactccctaccttcacacttcctgctataaaagcattgctattataaggttaatctgcagaaacagacttctatgtcatatgcttaaatgcatcaaaattcatacaatatccattaaattggtaaaagtatccattttaaaggattaatctgagggacccacagacacttaacacaatcaaatctcagaaaaaaaatcagttatttcattgtgattttgaggctgatcttttatgatcttttagttatcaaactgttaaatacattttaactttcaaattttatgaataaaggagatgaatcctgttaaaaaatcagt

SEQ ID NO: 28589 - DNA, 1071 bp, Homo sapiens
gaggcaggctgggtccgcctggcagcctacgggaggaggcgggagccgggaaggaggggagcctaggcccggcgtggggaggccggcaggaagggcctcgagcccagtgcggacctttcttcagcctctgtgcgaccgagccgcgcgccaggctcctgtgcgaggaggacgcgctgactccctccgacctgggctccgatggagcagaaatagcgggacctggacttgtggcgcgcctggtgccacatctcgggctctgcgagcgtcctggcgcgggatcctgccgtttgcatccaagagaggggaggacaggggcaaaaggatgcagggaggctgctgatttccactgaagagctaatttcctgtgagacattaacagtgatttaagaaaaagattcctgtaactgtaatgtcttacaataacagaatgcaggagagcacatatcaatgaagaaaagacaaaatgtacttatccatgaagctgaggttaagaaaccagtgtcttcaagagccagggacagcactgggtctgtgcagagttgagagatggtgatgacatgtgacagagctccttgctgctcaaattttatgccagataaaatattcaccttctcggactccctggcaccaggcatggccatgtaatcctacagcacagctgatgaaagagaagacatcttgctgctatttgacaagcaagaagataaaagctttcctataaagatgatggagcaaaaaaatagaaggggcctagactccctaccttcacacttcctgctataaaagcattgctattataaggttaatctgcagaaacagacttctatgtcatatgcttaaatgcatcaaaattcatacaatatccattaaattggtaaaagtatccattttaaaggattaatctgagggacccacagacacttaacacaatcaaatctcagaaaaaaaatcagttatttcattgtgattttgaggctgatcttttatgatcttttagttatcaaactgttaaatacattttaactttcaaattttatgaataaaggagatgaatcctgttaaaaaatcagt

SEQ ID NO: 28590 - DNA, 428 bp, Homo sapiens
taggctggtcttgaactccttgcctcaagtgatcctccttccttggcctcccaaagtgctgagattataggcatgagcaactgtgcccagcctctaattaagtatcaggtttttttaaagctaatatttgttgagtcattatgttccatcaggcattgttctaagtgttttaccaatattaatttatttaatcttcactgtaactctgtaaagtagctactgttattataaatgagtaaactgaggcatagttaagtaacatgcttacaactgcaaagtagcagggacaagatttgaattcaaggccgggcacagtggctcaaacctgtaatcctagcgctttgggagactgaggcgggaggatcacttgagcacaagagtttgagactaacctgggcaaaacagtgagaccttgtctctaaaaagaa

SEQ ID NO: 28591 - DNA, 459 bp, Homo sapiens
caaatgaatgcacagcatgagatatttaaaatagtatcatatactttaggatcaaacaagcaaaaaatactctgatatagtatgtgctacataagcgtttttgttacgtgctaggcctctcaaaatggatttgtagaaaatgacacagaatcacagttcatgccctagtttacggtgctctttttgacccgtgttttggaagagtgatagttatcctactgtaaatagctttcctattacaaatagtagttaacatgtcgtgtataaatttctggttttccacaaatatctatgaccacaaatcgagaaagtaatgagttgtgaccaatagttaatatattttctaaatttaaatgtactaccgccacaaataactgcgttttggattattaaactatccacagtaatttaaagtgaatcatcctcttcatttatagctaaattctctaggccaaaaga

SEQ ID NO: 28592 - DNA, 285 bp, Homo sapiens
atgacatagttattattatccctgttttacagatgaggaaacaaagagagattacataatgtacccaaggtcaaagatttagtaagcatcagaaccaagacttgaacccccatttgtttgattctagaatctattagggttttcagtttaatcccaagtatttcaccttacataatatagtaagtagaaaaagaaattttttactattgctataactattattaaaaacaacccaaattttatgaacttcttgagcttttcattgctaatattagaccaaaaaaa

SEQ ID NO: 28593 - DNA, 459 bp, Homo sapiens
aagtggaaattctgtgtcaaagggaatgattgtgacgctattgatactgatatgtgctttaacatcaagatgcaaagtgtacatttctcccctcccacacttaacactagccatcattgatttctctgatattagtaaatatatttgttctaatgcacgttctttgacacaccttcatttatccttttctgtctttggactgaaaagttaaatctattgatcctttttctattttatgtaatataagcaatttctcccaggttgtcttgcttttcactatataaaagcatttcatcctcatgtaatcaaatgtatctgtacttttctttgtgattttgcctttaatgttattctcagaaagtccttcttaccccaagattttaaacatattcaccaaaatttctgttttgaatttattttcttcatttaaataaaatgtctgccctgaatttactttgt

SEQ ID NO: 28594 - DNA, 484 bp, Homo sapiens
ccaagaggaaccagggacagttcgggtaaaaatgggcttgggaagcaaacggactatcgtttaagggatgagcatacagataagtgatcccaaaagaacatacaaagctgatctcaagggcgaggaacctcgtagatgccagtggatcatcattactccaaatttcaaacccaagccccaagacttggggtttctatttgaacacattctgagcaggttattggcacagactcaagggtcaatcatggcagggggcagctaatcagatgtttgttcccaggcctctacaaccagtcatgggaagactgaggcttaagtgctgtattagtccgttctcataccgctataacgaaatgaatgaggctgggtcgtttataaagaaaagaggtttaattggctcatggttctgcaggctgtaaaggaagcatagcagcatctgcttctggggaggcctcagggaacttacaatcatggcagacggcaa

SEQ ID NO: 28595 - DNA, 465 bp, Homo sapiens
aacactctttatccaggagatgaatacatgggcatttattttactaatatctaaattataccatatttctatgctgccttctatctgtatgacacatcttacaatttaaaaaattaagtataggcagtaaacagacaggcccacaagaataagaacaaagaacaggtgaatattggccaggcgcaatggctcatgcctgtaatcccagcactttgggaggctgaggcgatcactcgagcccaggagtttgagatcagtctgggcaagatggtgggaccctgtctctactgaaaataaaaattaaaaaaaaaattagctgagtgtggtggtgtgtgcctgtggtaccagctacttgggaggctgaggtgggagagttgcttgagcctgagagttcggggctgcagtgagctgtggttgtgccactacattccagcctgcgtgacagagagagaccatgtctcaaaa

SEQ ID NO: 28596 - DNA, 848 bp, Homo sapiens
gacctctcacttgctatctccattgatggccaggaaggcagggaggttcttcgtgccatcccttctcttccccctaccttccaccagacacttcccgattccatgctgagcagcccatggcttccagcagccaaagctttaccccctccccccacccactctggactggactgacagatgctaggcctacttacgtttcctgcttgtgccttcccacacaggggacagcggtgtgggtccaagtgcaggtgatattgcccaggcaccagcacagagacacacagatgggcctgccggggagctcctgtgctcaggaaaacagagcccaaaagggtgggcactgagctgccagttaggactcagacacaaggtcagatacttcctcctgtggtgctgcagctggaaatttcggccatggctccagagcagtgtcagaaagggattggtaacaaacagaaaatgcagcctgtatgtgtgggtactttggggatgaacagccagttagaataaatgaaaatctcacatcactcgctagctttcaatcctttgacagttgcccatcgggtttaggatggaactaaatctcttgacgtggtttgcaagaccctgcatggcctggcccttgcctttccctttagcctcctcttcttccccagctgcactgcaccattcctctgtctgatcctcccaccggccatgtttcctcctggcccagagtgttcacagacactattccatcttccggattccgccattcacctggtgttctgggtaacgtcggtcatgagagcagggactttgcatgctcttccttggttatatccccagtgccaaaaagacagccttgc

SEQ ID NO: 28597 - DNA, 431 bp, Homo sapiens
attactaaattagcggccggtcggattggtaacaaacagaaaatgcagcctgtatgtgtgggtactttggggatgaacagccagttagaataaatgaaaatctcacatcactcgctagctttcaatcctttgacagttgcccatcgggtttaggatggaactaaatctcttgacgtggtttgcaagaccctgcatggcctggcccttgcctttccctttagcctcctcttcttccccagctgcactgcaccattcctctgtctgatcctcccaccggccatgtttcctcctggcccagagtgttcacagacactattccatcttccggattccgccattcacctggtgttctgggtaacgtcggtcatgagagcagggactttgcatgctcttccttggttatatccccagtgccaaaaagacagccttgc

SEQ ID NO: 28598 - DNA, 376 bp, Homo sapiens
atctgtcaaaccaccatatgggtctgtaatagtataaagttctctgaattttctgttcttgcaatttaagctttttcactagtacgcttactcccgaagctagactgccttcaagagagctgtgctgaggatatttcaaactgttttatacacacacacacagcctgagtgagatgaatgggttaggtcacttgaaaaacttttaagggaattagaatacaatctctggtatgggactttcattttatagcccaatgaggttattgctctagctctattacatctaacaccaaaaacctcagtgagcagacatggtttttacttcattaagtaggctttttaaaaatggactttctaccttctgagccaaaaaaaa

SEQ ID NO: 28599 - DNA, 462 bp, Homo sapiens
gcaataatagtatctacctcatagaagaaaccccaattaagtgtggtttaagccagtcaggattattttcctcccgtaacaagaaatctgtgagtgagtggttgttggcattgtttcagcgctgcacgaggccaacaggaacccatgccgttcctaacattctgctctgtcttcctcagtatgctgcctcttcagcctcatgcttagagcctctgacggcaagatggctgctgcagctccaaatagcatagtcatatcataccttatttttcctctaatatcagggaaaaggccctgctattcctcctgtgcaccctgctagcaaatttctttgtaggtctcattggctaaatctgggtcacattttaatctctagctgcaaaggatgctgagaaaaccagcagaagattatcttgattggctcaaatcatgaccgtcacctaggaccagtcacatttgcct

SEQ ID NO: 28600 - DNA, 506 bp, Homo sapiens
attaaacagcctaataatggtttggcaacttgcttttctctttcaagtctttaatcttttattcagaggatgctttgttttctgggaagcaccaggataatgtggcaatgctttaaaaaaaaaaaaaaaactggctttacttcagcaagctttcctgggagactctaatggcagagactgttgaaatagaaatgcctcatgaacactggccgccccatagtgtctcacttccctctttccagccagtgattaacagctcttaatgaattcagaggactgcatggctagattctggggttactggtgcaggctgatggagaaggggttgaactgcattaaataaacaaaacaaaatagtgctccagaaaaagcacggggccgggtgcaatggctcatgcctgcaatcccagcacattgggaggctgaggcagggagattgcttgagccaggagtttgagagtagcctagccaacataacgagaccccgtctctatataaaaaaaaaa

SEQ ID NO: 28601 - DNA, 363 bp, Homo sapiens
gactaatttcttctgccttcagttcactcttctgtaaatgggaaataaaaattcctacctcatcagggttaacttaataaaacaacccatatatggctgatagcacagtgcctggcacataataatctgtcaggaaacattagttttttatagtatttttttattactatcattgctactgcaatcaagatcatctttggtccatccagagcacgaactcacttaaggttgaaaggttcatacacggctgaatgtgtgtggctcacacctgtaaccctagcactttgggaggctgaggtgggaacattacttgagctcaggagttcaagaccagcctgggcaatatagtgagacctcatctct

SEQ ID NO: 28602 - DNA, 677 bp, Homo sapiens
acccaaaggctgacgttagctgcacctgtaacacaactttttcctcaaatgtatggagatttttttaggcttccacttctatacttgcctattctcactccctgttttaatttaacatacacatgcaatgctagataatagaattgctctctatcagctgaacaggggggagcctgtgcagtttctcacccttcttgttgcacatggataaatacatcgggttttatagagactcagctgtaaaaatcatgaaatgtgctgcctggttaaaatgactagactcttctggcttcttccttgatctatcctattgcagttggtttgcatcttgcctaaggtgcatattccaaactcttgatattttcctcctgatagtcatactggtagtctccctcgtgtggtgcaatctacagatgtttttattggtgtgcagccattcttcaaatatcaaatggtttctcttgggctggaattacaaaaactcaaagaaatgtgtgatttatgggctgggcgctgtggctcacatctgtaatcccagcattttgggaggacaaggcaggcagatcacaaggtccaggagtttgagatcagcctgggtcaatatggtgaaaccctgtctctactaaaaatacaaaaattagcagggcatggtggcgcgcacctgtagtcctgtaggg

SEQ ID NO: 28603 - DNA, 472 bp, Homo sapiens
tcttttttctagactaggatggcaaatacaagacactaatgctgctccccttcccttccaatactatgaaatcctctctaaaaatatcctcaaaatctttcttggtatagtgccctaggcagccattactaacgctgattggaattgactccgaaggtaaaacctatttggcacttttgctctaggcagtgttcaatttttttgtcagttttgtttagtttttggggtgttcctatgcctgagtgggattcttcttttggaaattggaaatagttgcatagtggtttttaacatgaattaaataggtgataattcacagagccccctttcccaacaaaataaacaaaaggtaggttagacggactattgggattaggatgttgttttaagctaggaggtggcagaccgcacaacctatgggccaaatccatcttggagctaagaatgatttttatatttttagatggtagca

SEQ ID NO: 28604 - DNA, 407 bp, Homo sapiens
atgatgactacagggccataccagggctttcaagaatgcagaagtgaggctgagccacagattccacggtggaaagcagctctattgaatttgtacacctcccattccaaatagctagcttaaaacacagcagctgccattttccttcaaaggagaaatacaggaaagacctaagggtccaaaactgggtaaaggcacttccaggaaaccagaaggagaagaggattgcttaagccgctgctggctcctctttccatcctggtaagcatttacaatcagagagggaatgaataaacgcagagggccaccaggcatggagtgcatccaacagccctggccactgggccccactgaggaaggatccagccccatactgcatggtgagacccttgcaagagcacagcttc

SEQ ID NO: 28605 - DNA, 422 bp, Homo sapiens
ctttcttgcttttatttttaaactttttaacctaaggggttggagatgggacaacttctctctcgtaggatgaaggacgcatgttaatcacagcctgccttttgcccgctcttgctccagaaaaaacaaaacaaggatctgttagctctttaaaagaagaaaaacacactaaaaaaatgcagcattgttgtgtagcctggtagggtattgctagaaaccaggctggctgttcttcctttacttcctcttctagctaattcttcaataaagtacttaagacagcccttaccagcttgacatctttatttcaaaaggagaggaggggttggctgttgttttcctctgagcctggccctacccttctcttggagggggagaaagagaaacccaaagcaaaggaaaaagagagagagagaaaaaaa

SEQ ID NO: 28606 - DNA, 351 bp, Homo sapiens
tgagacggagtatcgctcagtcacccaggctggagggcagtggcacgatctcagctcactgcaacctccgcctcccgggttcgagcaattctcctgcctcagcctcctgagtagctgagactacaggtgcctgccaccacgccgggctaatttttgtatttttagtagagatgggttttcaccatgttagtcaggctggtctcgaactcctaacctcaggtgatccgctaacctcagcctcccaaagtgctgagattacaggagacagcgttttaagaagcggcctatgtcagcgcgtgtatctttttgaatgggaaagcaaagcacactattcattctggacagccccca

SEQ ID NO: 28607 - DNA, 486 bp, Homo sapiens
tgagccattaataaacttaggattgttagtattctaaagacatttttataatttgaaagaaagtaaaacattctttttggcaatctaaactatgttacccacatttaaacaaaaacaattggaaaatacttataaatatgtatttatatgggaatactatcatggtaagtagatgaaacatatttcaaaaccaatagtgctagttctgtaactttgccgtgtctgggtcccaacaattattgcagttatttaagagtatatgtgaagattatgtcaatttaagtaaaactgagacctcttcattagtcggcgttatatatgttaacaaaaacattcttctcttccaacaaggggtaatagtggaggcttctaccctgctccaacctaactttatttctctctgtgttctctactattcattgattgaatggtcttggcagattatttaacttcagagctgcaatatctttatttatagaatattat

SEQ ID NO: 28608 - DNA, 251 bp, Homo sapiens
aactacccttgcaaaagatgcaacatgcagataactacaattaggttctaagaggtcttgtgaaaataaaatgattcctattttgttcagactttgatggaacagaaaacagaaaactatcaattcgttttttcaaggtgtaactttgttattcaaacagggcaaagatacacacacacccccccacaaaaccctagagactggtctcacttaagactagacgtatagaaatattatgtaaatctttagca

SEQ ID NO: 28609 - DNA, 603 bp, Homo sapiens
cgtcgggtgcctgattaaaatgcctactggaaatcagatgtccatgagttcaaggtcatggccttagacttggctgttgtaagggcaaatacaaattagaaataccagacttaaattatgaaacttgaagataaaaaaagacattttactctccttttaaaaaataatttaagaaaacttttatatgtaaatttattttgtgtctctattaaatgtatgtacatcatttaaataggtaaataggactttgtcagcctttttaacttagaaatgtctttctctaggacctggaaaccattgcattgaaatgtaaatggattacctttctgtcctacagtaggtaacttcataaaatattatgaagccaaggaaatcttattttgcttttgaatatagccaatttaaattttcattgaatatacccaatatacatataggcttctcaattacccggttaatttaagatgaactatatatgacaaattatgctgttaagtcttctacttaaagactaaatatggtgatttttatctctgcttttgtaatctcagcagattgcctatgatgggtatcacattgtggtttaattatgtaaaaaaaaaa

SEQ ID NO: 28610 - DNA, 418 bp, Homo sapiens
agttcagtgagaacctctgtactccatgggcattttctaggaaataatttcacctgccctgtgtaattctctggaagaatcacagtgagttggaaggaaacttaagacttggaaaaggattgagaggttagcccagaccacaccagggctctgaaggcccagctggggttagaacctgggacaccctccagcccactgtctcctgttccctggccatttactgccccactcccctttctactctcaggggccctggatctaatgaggggattcgtgcagtttgctgcactaatacattgcaagtggtgccaacctaaaggtattctgatggtggaatcagagcagtagcatcttattaggtcagaatctgtatctcctcttccaagatttttacatgatttagtgttttctgaattgg

SEQ ID NO: 28611 - DNA, 205 bp, Homo sapiens
tctcgtgtgtgtggcgcttagaagattctgaaattaacagactggactgaatattttcattttagtcctaaatttagattttcttagtactttgaaaatcttttcttgttagaagtatcctctacaccacttttttggtttgttttcctgatctttttttttaaaggaaagtgcatatatgtagttagggctcagatagcagtct

SEQ ID NO: 28612 - DNA, 502 bp, Homo sapiens
aaaagggtgtgtggaatcgatttaagtttaacctgacagtacatgtcttgaaggtcttttatgaacttgaaacacatcggctaggtcttcatcctcacctgcactggaattacctacttaagaaaaacaaactaatgatacacaaagaagcacttataaattacatatcttcatgccggaaacactatttggatgcgtgtggatgattctgaaaattgatatagtctgaaggatgtatatgtacatttatatatagacaaaatataacccaattgatattccattgaagctttgtattcatttcatcagattatcgtgtacctaaattatgtgtggaaatttatacttagtagattctcaaatattattggctaaactgcatttcacaggaaatgtatttctcaggagtgttttctcattgttttccttaaaaaacaatgctggcacccagcaaaataataaaattaaaaaataaaataaaatgcaaatactgcctaaggga

SEQ ID NO: 28613 - DNA, 701 bp, Homo sapiens
gctctagaggattcacggtatgagtggccatgtgaacaactgtgagtagaaacatggccagtgcagattaaagagctgaagacagaaattactgctaatgataggagtattacttcatttattccagtgacaatttgcattttgaatgacctactggacgtgcagtttagggaaaaggattgaaacacaactaatgtgaccgactacctaatgtaactgagtggcatgtaatggtacattcaccactattaggaatgaggaaagagaagcaaccctgaaggctaaagggtcagttttatacatgcctttatgtaagtaactatgttcatcacatggccaggaggcagccataaaatatagtagacctcaggggagctagcagtcagtgtaccaagtaagagtgtgtggccagagctaggcagagacaactggtgtcttgaagaaaagcagagcagccaatctctaggcttggtttctgaggactgtcccaggcctgttccagctccacaattatatcctcagaacaaaacctctttttgagttagcatgagtaatctctctgttccttgtgaaaaactgatagaaaaagcaaaataaaagaatctccctacaagtatctgtatctttggttcaattattccattcataagaatttagcctaaaaaaagaataaaaaatgaaacttctgtataaacagcaaa

SEQ ID NO: 28614 - DNA, 434 bp, Homo sapiens
gcctatgcatttcatgacgttacgcacctctgttaagtggaatcatgtagtagttgtctttttgagtctgattatttcacttagcagaaagaactcaaggcttaatcatgttgaagcacacatcagaatcacccttcttgttacagctgaatcccatttgtttgtacgcatagaccactttttgtttattcattcatggatggatggacactgggcttgtttccaacttttagctattgtgaataatgctgctatgaacaaagacatgcaaatatctgctggggcccctgctttccgttctttttggaatacaccagaagccgaattgctgcatcttgtggtaagtctatgattaattttttgagaaatgaccacagttgttgtgccatattacaaacccacaaacactacacaagcattccaattcctcctcg

SEQ ID NO: 28615 - DNA, 377 bp, Homo sapiens
atttataagttaaactttatcataggtatatatgtatagaaaaaacatagtgtatactgtatggggttcagtattagctgtggtttcaggcatcctctgtagaggtcttggaatatatcccttgtggataatggaggactacatatttgactggttggtggagttaacctaaggagaccttttcatgactctttaaacttttaggtttaaaggttgactcggaaaagaaaaacaatttatatcaataaatctaaggtaggcttatatgaatgctgcatacttttcatcactgcagtgttgtggaatgaaaagtaattgtatggattttatactatacaacattaaactcatagttatttggaatatgagcaaccagg

SEQ ID NO: 28616 - DNA, 605 bp, Homo sapiens
taaaaacatttgacgatgtatataatacatttgttttttcagagcatcttcttgcaagactttactattctttgtttctatatagtttggaaacgcaggcctaaagacattattgatcttctcaaatgcctcttgaatggagtatttaccgctgggtatagacagtgttaaaaataggcagaggccgggcgtggtggctcatgcttgtaatcccagcactttgggaggctgaggcggaaagatcacgaggtcaagaggttgagatcatcctggccaatgtggtaaaaccccatctctactaaaaatacaaaaattagctgggcgtggtggcacatgcctgtagtcccagttactcgggaggctgaggcaggagaatcgcttgaacctgggaggcggaggttgcagtgagccgatatcgtgccactgcactccagcctggtgacagagcaagtctccatctcaggggaaaaaaaaaaataggcagaggccaggcacagtggctcatacctataatctcagcactgtgggaggccaaggtgggaggatgacttgaaggcaggagtttgagacaagcctgggcaacatagcaggactccatctctatt

SEQ ID NO: 28617 - DNA, 264 bp, Homo sapiens
ggacgactgagtgaaaaaccttgcctctaaaatcaaaaaccaacttgagaatggtgacatgggcagagattttaaatgagtgatttatttttctccaacctgactgataggagcttttcttctaaggtataaggtatttactagagtgtgaagctatttatatgcaattatataatgcaaagaatataattttattagcttataattacaaaataaatacaacacattaggttgatcaaattaaatgttctgccttttttggcc

SEQ ID NO: 28618 - DNA, 387 bp, Homo sapiens
tgtgtgtgtgtaaagacagggtctcactttgtcacacaggctgatgtgttgtactgcagcctcaaacaactgggtaagtgatcctactacctcaaccttccaagtagctaggactacaggcaaactgagacaggagaaacacttgaacctgggaggcggaggttgcagtgagccaagatcgcgccactacactctaggttgggtgacagagtgagactccatctcaaaaacaaaaagaatatacaatgtagtgtaaatttctaacaaattctagaactgcaaaattcatctatatcaacaaaaagtagtgcagtggttacctgggcaagaggtaagttaagggttggagactcactgcaaaggggcacaggaaactgatagaaatgt

SEQ ID NO: 28619 - DNA, 538 bp, Homo sapiens
ctggggtcctggctttaagaaccagatgccaacactcccggacagtttatggcatccggatccctcaagggtgctcatctgcagttgagagtgttagtagcaattatttatctgtcctggagaggagttcctgaacataaatgtcctctgctggccctaaagctgggggcggaggctgtgtgttgtggggtgggggttggggggccgaatgttcccggtcctgttatctggtttagcagcatttgttgtggttttcgaggaaacggcatttggattacataaggattcaagtttttgctgtacttgtttatttaataccttggcaagagggagcccttaccctgaaaccagataaccgattttgggtttaaaacagccttagatgaagggccactcgaggggaagaaaatgagcaaagccacaaaaagcaaacaagggaatgtttatttttctctttttggatatttttgaagacctgcctaacctcttacacttcttgtcgcatacagctaataaatggcattaacaaagcgtttca

SEQ ID NO: 28620 - DNA, 396 bp, Homo sapiens
ataccagtacctatttttactcttacaaaatttcctgtaaaaaaatactacatttgaaattatttcattggttttagaactggcattgaaggtacccagtagactcttaagcctttactgcttgtctcactagaaacatttatttctgacctaccaagttttcttcacatcatcaaatttattcagcttctcagtgctgtaccgtatgatggcaagacatacttggtatttccatttttgttggtcattctttattgctttttactgctaggaaggtcttgccaggcttctatacagttacaaaaaccattaccaaactttatcaaggactttccaaatggagttttcaaatactattgaccacattgctctagttaatgtaaggtcagctctgac

SEQ ID NO: 28621 - DNA, 615 bp, Homo sapiens
gtgtggggcaatgacagcgaatactcatgaggggcaacaacttcagacaaaatctctgaagactcacccgtgtctccacacttcttccaccccttgctagctgtgtaaagttaaccactgtgactctcagtttcctcgtctgccaaacggagtaaataatagtgcctttctaggatggatgccaatgttgtttggattcaaacataaagcagatgcagagggtgtaacgcggtgcctgaatacatgaaagttaagcatgagctcttgggtttttgtttccccagatttcttctctcttggtggctctttaatgaatagtgacagtccatacccaggcagccatagccactgccactgccacagccaaagctcaggctatgtgatgaacctgttttctctgccttctgcccctgctcccagccatcccggcagaggtgcccacctcagggctcttaccggagcccctctcccaccgcttgaatgcagaggcgtttcttctgctgacagcctgaagacaggccatttttcttctcctcccatataatggcctttactctcctaccactccaccccctttcccagccttaatgactttaacatacacacagttattta

SEQ ID NO: 28622 - DNA, 445 bp, Homo sapiens
cctgatgtttgtataaaaaatatattatctcttacatataacatacaaaatctatgttaattgactttatattatcagtaaggcttctggtcagtagtaggctattagtagttgagttttgcgggagtcaaaaattatatacagatttttggttgcacaagggtttggcacccctaacccccgtgttgttcaaggttcaactgtagttaagaacagggctcttgaatcaaactcttaattcaagttcaggcccctgacatactgagtgactttggcaagttgcttttctaagtctcagtttccatatctgtaaaatgaggttaataacgttacttaatgaattgttagaattaatttaaatgctattcatacagttctgagctcagcacagtgagcatcgtgtaatgatagctaatgaatattgataataaagggtactatgatt

SEQ ID NO: 28623 - DNA, 1589 bp, Homo sapiens
aggcattaggaagccttctttagagttcaaaattttagaagcctaatttgctcttacttccttcaattatgtgccatgtgttttggtttgtatatgttttaaattgtatatttccttggaatatgcttgaaatatttaagaatacattttcaaaatgtataatactgtattgttttgttgatcagaataataagtctcagttaaatgtttgttattactgatagtcaaaatgctcaatagaaatgatgagaggcattggttccaattcattgtcaaatgaacgttttctaattttgttcacagattctttccctttcgattgttctgtatgttaagatagtggcttctgctctcactgttttcctatttatattactagcaggtaggagtgctaattagaaaaacttagatggtattgaaattacagttgacaacttatatttttatgagatggagaaaaaagattaagttgatataacaacaaagtggactttttttcttccttatcctgcacgaaatattgcccttgtttcctctactttcctcttggtgttttctctttttttcaaacagaaacaggccaattccattttcttgagcaagaaagcttagtgtgttacttcatcaaggccagctaatactgtgttaaaccgggctgaaaatgagaaaacttgggagatggaggaatggggaaatggcagtgggataggtagggaaggattactcttaattgttttaaaagccataggaaagtcttccttgtacgtggctgtaaatttataagaactattgtgtcacataaaccaacaagaatgaacctttgctgcttcagataatttgatttttccagcaaggaaattaataagttactgattcttcagcatagaaacaactgagaagaattaatgcaatgtttcttcactagaaaacccaacccttcatttcttttcattgctccaaaacccagttttcaactaatggttttctcattaaactaaatgtttagaaaagttgtttagagtttttctttttcttttacatagtcctcctgatccagtataagactatttagtaacgtgcatttgtatggtactatctaaagtaagttagattgatgtaagagatcgggtagctgcggaacaaaattagttatatcctaattaggtacagtgaatgacacaaaatcattttagcaatgcttcttaaccttttggggtcacaggcgttttgagactgatgaatcctagggacttatttacccaggaaaatgcgtatataacatacatatctccctaaagtttacaatattgtagtggttcatgggccccctggttaagagcccattctaaagtacaatagggcatcatcccttttcctgcaaagcccaaaagtatatttctagggcatgaaaataacttgagtctattttaaggaattgtttcactctagaggtagataggggacctggctagaatctgacattaaaatatactttttaaaaaatattatatttggggtgggggtcctggccaagaactcagtcatttttttgtgtaccaggttgcctaaatcatgtgcagatggtttta

SEQ ID NO: 28624 - DNA, 2531 bp, Homo sapiens
aggcattaggaagccttctttagagttcaaaattttagaagcctaatttgctcttacttccttcaattatgtgccatgtgttttggtttgtatatgttttaaattgtatatttccttggaatatgcttgaaatatttaagaatacattttcaaaatgtataatactgtattgttttgttgatcagaataataagtctcagttaaatgtttgttattactgatagtcaaaatgctcaatagaaatgatgagaggcattggttccaattcattgtcaaatgaacgttttctaattttgttcacagattctttccctttcgattgttctgtatgttaagatagtggcttctgctctcactgttttcctatttatattactagcaggtaggagtgctaattagaaaaacttagatggtattgaaattacagttgacaacttatatttttatgagatggagaaaaaagattaagttgatataacaacaaagtggactttttttcttccttatcctgcacgaaatattgcccttgtttcctctactttcctcttggtgttttctctttttttcaaacagaaacaggccaattccattttcttgagcaagaaagcttagtgtgttacttcatcaaggccagctaatactgtgttaaaccgggctgaaaatgagaaaacttgggagatggaggaatggggaaatggcagtgggataggtagggaaggattactcttaattgttttaaaagccataggaaagtcttccttgtacgtggctgtaaatttataagaactattgtgtcacataaaccaacaagaatgaacctttgctgcttcagataatttgatttttccagcaaggaaattaataagttactgattcttcagcatagaaacaactgagaagaattaatgcaatgtttcttcactagaaaacccaacccttcatttcttttcattgctccaaaacccagttttcaactaatggttttctcattaaactaaatgtttagaaaagttgtttagagtttttctttttcttttacatagtcctcctgatccagtataagactatttagtaacgtgcatttgtatggtactatctaaagtaagttagattgatgtaagagatcgggtagctgcggaacaaaattagttatatcctaattaggtacagtgaatgacacaaaatcattttagcaatgcttcttaaccttttggggtcacaggcgttttgagactgatgaatcctagggacttatttacccaggaaaatgcgtatataacatacatatctccctaaagtttacaatattgtagtggttcatgggccccctggttaagagcccattctaaagtacaatagggcatcatcccttttcctgcaaagcccaaaagtatatttctagggcatgaaaataacttgagtctattttaaggaattgtttcactctagaggtagataggggacctggctagaatctgacattaaaatatactttttaaaaaatattatatttggggtggggaaagtgattaaaaggtgaaaaaaaaacatagtattcagaagttttggaggttaatgtctttctctaagatttgccactttagaaattcaacagaaaagaggtaaaacagaaatggaatgtatctggaacatttttggcctccatagtgcagatatactatattaacaagtaatacatttatttacctgtcagatctccaggttttaagattttgagctttctagtattaggattcattaaatgttcaattcatttcatattctaaggaattaggttatttacttactaattcaggatgttaaaataacatccaagtcggacaaccaccaccaatgcacacagttaatgagatttctaaaatataataagtacaatgtaacaaacgtatagaattttgcatttgttgccaaaattagatgtttaatgacagcttatttaattcccatttgtgggacttctggaacatagaaaccattatcttacctggttatcccttgactaaatagcatatctgcaggaaaatatcttgtttgtagtgatatgccccaatagtgattgatttcactcttgaaatgagttatatcacttaatttgtataaatgttatgagtggagagacatgtacatgttaaaagcatgttgcattatatattcattttttaaactctataaatgttaagaataatataattgcagaaatatttttcttaaatacaatgtgtaacaaaattctccgtagcaactcacccactttgcagtttatgtgatccacacttttaaagaaattccataaatgtatattttgtattatgtattatttcctggtccaaagaaaatatgtgaattcagttctaactttaagaatgtactgtttgttttcaagttcattgaaaaattgcattcagcctgcgaatggttgcagattgtatgttagatgaaaagtagaaataatttctagtttggaaaactggtgccactaaataaacaggcaattacataaaaaaaatgta

SEQ ID NO: 28625 - DNA, 2594 bp, Homo sapiens
aggcattaggaagccttctttagagttcaaaattttagaagcctaatttgctcttacttccttcaattatgtgccatgtgttttggtttgtatatgttttaaattgtatatttccttggaatatgcttgaaatatttaagaatacattttcaaaatgtataatactgtattgttttgttgatcagaataataagtctcagttaaatgtttgttattactgatagtcaaaatgctcaatagaaatgatgagaggcattggttccaattcattgtcaaatgaacgttttctaattttgttcacagattctttccctttcgattgttctgtatgttaagatagtggcttctgctctcactgttttcctatttatattactagcaggtaggagtgctaattagaaaaacttagatggtattgaaattacagttgacaacttatatttttatgagatggagaaaaaagattaagttgatataacaacaaagtggactttttttcttccttatcctgcacgaaatattgcccttgtttcctctactttcctcttggtgttttctctttttttcaaacagaaacaggccaattccattttcttgagcaagaaagcttagtgtgttacttcatcaaggccagctaatactgtgttaaaccgggctgaaaatgagaaaacttgggagatggaggaatggggaaatggcagtgggataggtagggaaggattactcttaattgttttaaaagccataggaaagtcttccttgtacgtggctgtaaatttataagaactattgtgtcacataaaccaacaagaatgaacctttgctgcttcagataatttgatttttccagcaaggaaattaataagttactgattcttcagcatagaaacaactgagaagaattaatgcaatgtttcttcactagaaaacccaacccttcatttcttttcattgctccaaaacccagttttcaactaatggttttctcattaaactaaatgtttagaaaagttgtttagagtttttctttttcttttacatagtcctcctgatccagtataagactatttagtaacgtgcatttgtatggtactatctaaagtaagttagattgatgtaagagatcgggtagctgcggaacaaaattagttatatcctaattaggtacagtgaatgacacaaaatcattttagcaatgcttcttaaccttttggggtcacaggcgttttgagactgatgaatcctagggacttatttacccaggaaaatgcgtatataacatacatatctccctaaagtttacaatattgtagtggttcatgggccccctggttaagagcccattctaaagtacaatagggcatcatcccttttcctgcaaagcccaaaagtatatttctagggcatgaaaataacttgagtctattttaaggaattgtttcactctagaggtagataggggacctggctagaatctgacattaaaatatactttttaaaaaatattatatttggggtggggaaagtgattaaaaggtgaaaaaaaaacataagtgacttcgagagaggttatccggaggcgtttacattcgttctatatactacctaagaagtagtgtatgtccatcgtatgtgagcaatatttcctagagcatgcataatacgaaggtgagagatcacgaagactgagaatcgtactactcggaatcaattgtctccggccctccatagtgcagatatactatattaacaagtaatacatttatttacctgtcagatctccaggttttaagattttgagctttctagtattaggattcattaaatgttcaattcatttcatattctaaggaattaggttatttacttactaattcaggatgttaaaataacatccaagtcggacaaccaccaccaatgcacacagttaatgagatttctaaaatataataagtacaatgtaacaaacgtatagaattttgcatttgttgccaaaattagatgtttaatgacagcttatttaattcccatttgtgggacttctggaacatagaaaccattatcttacctggttatcccttgactaaatagcatatctgcaggaaaatatcttgtttgtagtgatatgccccaatagtgattgatttcactcttgaaatgagttatatcacttaatttgtataaatgttatgagtggagagacatgtacatgttaaaagcatgttgcattatatattcattttttaaactctataaatgttaagaataatataattgcagaaatatttttcttaaatacaatgtgtaacaaaattctccgtagcaactcacccactttgcagtttatgtgatccacacttttaaagaaattccataaatgtatattttgtattatgtattatttcctggtccaaagaaaatatgtgaattcagttctaactttaagaatgtactgtttgttttcaagttcattgaaaaattgcattcagcctgcgaatggttgcagattgtatgttagatgaaaagtagaaataatttctagtttggaaaactggtgccactaaataaacaggcaattacataaaaaaaatgta

SEQ ID NO: 28626 - DNA, 859 bp, Homo sapiens
ttaactagcccaatctattcctttaattcggcccatcccttcatttcccataagggatacttttagttaatttaatatctatagaaacaatgctaatgactggcttgctgttaataaatacatgggtaaatctctgttctgggctctcagctctgaaggctgtgagacccctgatttcccacttcacacctctatatttctgtgtgtgtgtctttagttcctctggcgctgctgggttaggatctacccgactgagctggtctcagcactgttatttgaaacaatgtaaataaacctatagggtttattatatatactaagtgaaataagccagacacagaaaaaaaaatgttgcatgatctcacttatagtgaaacttaaaaaaaaaacccaaatacatagaaatagagtagaatggtggttaccagagatgaggaaaatacagagacacaggtcaaaagatacagagttgcagttacaaagggtgagtatgtctagatatctaacatacagtatgaggactataatagtattgcactgtgtactgaaaacttgatgacagattttagatattcttaccacacagacaaaaagaaatgtaagtatgtgagatgaagcttatgttaattagattaagtgtatgtacataaaaacatcacattatacacatcaaatatatacaataaaaaagcacattgggagatacatgataaatttctatctgcagttgctatttgcatttttaaaggatatttttattttttaaatttttagctgacaactgtataattatggaatacaatgtgatgttctgatatatgtgtacactatggaatgattaaatcaaactaacatttca

SEQ ID NO: 28627 - DNA, 368 bp, Homo sapiens
ggattacaggtgtgagccaccaagcccggccaaccttactaattttttaaaaaatttgtaaagatggggtctcgttatgttgtccaggctaaatttgcacctttaaaaaatttattacaaaactttgttgttgttgtgtttgtagagacggtctcactgtgtggcccaggctgatttgaattcctggcctcaagtgatccttttgcttcagcacctccatggtgctgggattacaggtgtgagcagtggctgtattcagcttaatttgtagttatttgaagttacacaaattgagatttccaaatacagtaacatttttctatgtttgttagaattatcctttgtaaaaggcatcatttaggttattc

SEQ ID NO: 28628 - DNA, 2159 bp, Homo sapiens
cccactgagattgtgaaccagcctccatctacaccaagaacacccagcactgaaggagatgggaggggctgatgcccacctggagctctctgcttcctgcccacagtgctgacgagtacagagctaaatggagcagctactgcagaatccagtacagaatcggtccaggagggtgcggctgtggacaggccagcatccccagcaggttctgggaggcgcaccttgaaaggggaaggcagacatcctgagtgatgggcgcctgtggccctgagactgtggatgagggggctaggctccagctggcttctgaggggcctggaaaggcacacaagtaggtccttggctgaactggtgccccagcaggacctcgtgtccctgcactgctgcagatgcatcagccctccccatgttggtgccgctgtcacttcctactgggatccttcccctatccagccacatccaggctgtgggactacacggtgccctgttcccctgggcaggagaagaggtggtacctgcaatgcaccttcacagccaggcaagcattctggatttaccctgtgtaaagaagggtggtaccctctttcaggggtgtgatacagtgcattgatggagcagctggtgctgctgggaggccagcctggaagaggcagcagtggctcaagtttgcgtgcaggagccagagtgggacccacgggctcttgtgggtgtggtttagaactagatggtgctttggggacaagccatccaaaaaccccaggcccacatccaccctgatttgatatcccacttcctgacagatcagaggctgtgtctttaggcagtggaggtccaggagcagagcctggggctggttcacagctaaacccctccttagggcagcccagagtagggcctcagctggcaagtccacaagccctgctggggccctgcttgttggcctgacccctccctcaccaggcagccagccaaggtggttcctgcttcacccactcagtcatcagcctcaggctgcccaaaatgcctctgacaccagatttatatcttctgggcggcttctttaaatccagcccttcacccgccccctagagaagcagtgaaaccccttggctagtccagctggaagagctagaccgcaggagccgcgccgtcttcctaacctcgcctcggccttcgctccacagtggagagtgggagcctagctgtgcttgatgctgaatgcctgttttgagagtgtgagtgggatcatctacagtaaatacttgcaaagcatggcactgtggctctggggagctggtacgcctgtgctgtaaccatggtactcagtccttccaaagtgtttattaatcaagcacctgtcatgtgccattgagcccacgatggggaatgaggacagtccctgcccccatgaagcttgtgtcctgttgggaggacagacaggtggcccagcagttgcagcatggtgtgtgcacacgtttggctggtggaaccatgtttctaccactcatggtcaaaaaaagcccaccaaagtcctgggagttcacatctgtgtgatgatacggcaacattgtttgtaatggaaagactggacacccccagtgcccatcagtgggggagtcattaaataaactatggtatgtgcacaaaaaaaaaaaaaaaaaaaaaaaaaaaaaaaaaaaaaaaaaaaaaaaaaaaaaaaaaaaaaaaaaaaaaaaaaaaaaaaaaaaaaaaaaaaaaaaaaaaaaaaaaaaaaaaaaaaaaagagggggggggggaattatttttggggggggaatacttttttttgaaagaagaggggtgctccgctaatggaggggtgatattatattaaataaaagaagggcggggggggcgttcttaaaacaaaatagtttggttggggtgggagagaagaacagtgagttagtcttcgggtgattttgagggagggagaacaaccaccacttgggggggggagggaggtaacaatgtgatgggtgagcaaccataccaggcaagaagaaattagctcgagcgctagaggaagtataaataataatactgtggagagggatatggtatgagaaacacacaatcattgtgtgtcggcagagaagaatagttgcgttggcgatagatgattataagcactattgcgt

SEQ ID NO: 28629 - DNA, 1645 bp, Homo sapiens
cccactgagattgtgaaccagcctccatctacaccaagaacacccagcactgaaggagatgggaggggctgatgcccacctggagctctctgcttcctgcccacagtgctgacgagtacagagctaaatggagcagctactgcagaatccagtacagaatcggtccaggagggtgcggctgtggacaggccagcatccccagcaggttctgggaggcgcaccttgaaaggggaaggcagacatcctgagtgatgggcgcctgtggccctgagactgtggatgagggggctaggctccagctggcttctgaggggcctggaaaggcacacaagtaggtccttggctgaactggtgccccagcaggacctcgtgtccctgcactgctgcagatgcatcagccctccccatgttggtgccgctgtcacttcctactgggatccttcccctatccagccacatccaggctgtgggactacacggtgccctgttcccctgggcaggagaagaggtggtacctgcaatgcaccttcacagccaggcaagcattctggatttaccctgtgtaaagaagggtggtaccctctttcaggggtgtgatacagtgcattgatggagcagctggtgctgctgggaggccagcctggaagaggcagcagtggctcaagtttgcgtgcaggagccagagtgggacccacgggctcttgtgggtgtggtttagaactagatggtgctttggggacaagccatccaaaaaccccaggcccacatccaccctgatttgatatcccacttcctgacagatcagaggctgtgtctttaggcagtggaggtccaggagcagagcctggggctggttcacagctaaacccctccttagggcagcccagagtagggcctcagctggcaagtccacaagccctgctggggccctgcttgttggcctgacccctccctcaccaggcagccagccaaggtggttcctgcttcacccactcagtcatcagcctcaggctgcccaaaatgcctctgacaccagatttatatcttctgggcggcttctttaaatccagcccttcacccgccccctagagaagcagtgaaaccccttggctagtccagctggaagagctagaccgcaggagccgcgccgtcttcctaacctcgcctcggccttcgctccacagtggagagtgggagcctagctgtgcttgatgctgaatgcctgttttgagagtgtgagtgggatcatctacagtaaatacttgcaaagcatggcactgtggctctggggagctggtacgcctgtgctgtaaccatggtactcagtccttccaaagtgtttattaatcaagcacctgtcatgtgccattgagcccacgatggggaatgaggacagtccctgcccccatgaagcttgtgtcctgttgggaggacagacaggtggcccagcagttgcagcatggtgtgtgcacacgtttggctggtggaaccatgtttctaccactcatggtcaaaaaaagcccaccaaagtcctgggagttcacatctgtgtgatgatacggcaacattgtttgtaatggaaagactggacacccccagtgcccatcagtgggggagtcattaaataaactatggtatgtgcaca

SEQ ID NO: 28630 - DNA, 217 bp, Homo sapiens
gcggccgcctactactactactactgctcgaattcaagcttctaacgatgtacggggacatgacccaatcctgtatttatttctaccccctttttgaaagtatttataaaactagttgaggacagctgtatttttttgttgaactatttagtagaattgtgcctttttgtctgtatgtgaataaatgctgtacattttgcaatacaaaaaaaaagtc

SEQ ID NO: 28631 - DNA, 5781 bp, Homo sapiens
ctctcgttttggcaagggattaaagtgctcccccctgtggcagcagtgacccagaaatgagtttgattcacatagtccttcctccataacaagccaaacgccagaccgagagtgcctccgtgcgcgagtgcccggtgtgtgcgcgccggcgagagcaggggcccgcccggctccccgcccgccgcggcccgaactcatgcagctccgagcgagcgagcggcgcccagcccagcgcctcggccgaacccctccgcagcaggctgcctgctgtttcccggggagatcatgaaacgaggtcgccttcccagcagcagtgaggattctgacgacaatggcagcctgtcaactacttggtcccagaattcccgatcccagcataggagaagctcctgctccagacatgaagatcgaaagccttcagaggtgtttaggacagacctgatcactgccatgaagttgcatgactcctaccagctgaatccggatgagtactatgtgttggcagatccctggagacaggaatgggagaaaggggtccaggtgcctgtgagcccggggaccatccctcagcctgtggccagggttgtgtctgaagagaaatccctcatgttcatcaggcccaagaagtacatcgtgtcatcaggctctgagcctcccgagttgggctatgtggacatccggacgctggctgacagcgtgtgtcgctatgacctcaatgacatggatgctgcatggctggaactgaccaatgaagaatttaaggagatgggaatgcctgaactagatgaatacaccatggagagggtcctagaggaatttgagcagcgatgctacgacaatatgaatcatgccatagagactgaggaaggcctggggatcgaatatgatgaagatgttgtctgtgatgtctgccagtctcctgatggtgaggacggcaatgagatggtgttctgtgacaaatgcaacatctgtgtgcaccaggcctgttatggaatcctcaaggtaccagagggcagctggctgtgccggacatgtgccctgggggttcagccaaaatgtctgctgtgtccgaagaagggtggagctatgaagcccacccgtagcggaaccaagtgggtccacgttagctgtgctctgtggatccctgaggtgagcattggcagcccagagaagatggagcccatcaccaaggtgtcacacattcccagcagccggtgggcgctagtgtgcagcctctgcaatgagaagtttggggcctctatacagtgctctgtgaagaactgccgcacagccttccatgtgacctgtgcttttgaccggggcctggagatgaagaccatcttagcagagaatgatgaagtcaagttcaagtcctattgcccaaagcacagctcacataggaaacccgaggagagtcttggcaagggggctgcacaggagaatggggcccctgagtgttccccccggaatccgctggagccctttgccagccttgagcagaaccgggaggaggcccaccgggtgagtgtccgtaagcagaagctgcagcagttggaggatgagttctacaccttcgtcaacctgctggatgttgccagggctctgcggctgcctgaggaagtagtggatttcctgtaccagtactggaagttgaagaggaaggtcaacttcaacaagcccctgatcaccccaaagaaagatgaagaggacaatctagccaagcgggagcaggatgtcttatttaggaggctgcagctgttcacgcacctgcggcaggacctggagagggttcggaacctcacttacatggtgacccgcagggaaaagattaaacggtctgtgtgcaaagtccaggaacagatattcaatctttacactaagcttttggagcaagaaagagtttcaggtgtgccttcttcctgctcctcctcctcactggaaaacatgcttttgtttaacagtccttctgttggccctgatgctcccaagatagaggacttgaagtggcattctgcattcttcagaaaacaaatgggtacttccttggttcattcgctgaaaaagccccataagcgagatcctttgcagaatagccctggaagtgaaggcaaaaccctgctgaagcagccagacctgtgtggtagaagggaggggatggtggtcccagagagctttttgggtttagaaaagacctttgcagaagcacgtctcatatcagcacaacagaaaaatggtgtggtgatgccagaccatgggaaaagaagagacaatcgttttcattgtgatctcattaaaggagacttaaaggacaaatcttttaaacagagtcacaagcctctcaggtccacagatgtgtcccagaggcatctggacaacacaagagctgccacctcccctggagtggggcagtcagcacctggcacaaggaaggagatagtgcccaagtgcaatggctccctaatcaaagtaaactataatcagactgcagtcaaagtgcctacaacacctgccagcccagtgaaaaactggggaggattccggattccaaagaagggggaacggcagcagcagggagaggcccacgatggggcctgccaccagcactcagactacccatatttgggcttaggccgagttccagccaaggaaagggcaaaaagcaaattaaaatccgacaatgagaatgacgggtatgtccccgatgtggaaatgagtgactcagagagtgaggcatcagaaaagaaatgtatacacaccagcagcactatcagcagaaggacagacattatcaggagaagcatcttggcttcttgatgcaacagagatgatgcggaagccctttgggctcgtcattgggtttgctagaggagagctctgatgtgggggagaagcagaaacccattaatcctgagctacacaaacacatttacttgcaattcagattaatttttttccagagtcatttttaaatcatttttgtgagaagtttgtgttatttgcaacttgttgaggaaacagaagagtagattgtaaccataagacactgctaagactagaacccgaactgaacactaaaataaaaatgaaatgttttaaagaaggcaaggcttaaataagcctcatgaatttttatagccctctgcattcttcccaaagcacaaactcatggttacctgaatatagggaaccagatatggttcttgagaaaccctcatggtaccattcacagcccataaagtttattttctaggactgtggtagatcttgaaatcatatttatatttggccctcaaggctatttttgttgcattatagcatataggcagcagctctgaagcttcagtaacactaagaaatttatgtgtaaatatagcagtcagggaagagaattttaaaaaaggtcattattgaagaagctgaggggacagggtagagctgctgcaatatggagatttagggtaatatggcaaggtcctgctgcttgaagcctgtgagtgggttgtggatatgggactggtggagagtgagactgttaggaaagttgtatctatgaataagggcagttgaagtagaatttttaccagtccacttgaccttcttcttccctaaccactggctcttgagccagcttgggatttccctggccattgccaatacctggccatctggcttccaatagtacagtggctactcaagttcaagcgaagaacttccagactctggtgactgttacttcccagagccaaccactagtgcatatgttagggaatctgggcttccaacatgaatggattccttaagaaaaaggaaaaaaaaaaaaaaaagaaaaaaagaaaaaaaaaagaaaaaagaaaaaaagagaaaaaagcgaaataggttatattttaaaaacaatagaaaggcaataagttgcgataagctcttactattgaccaaggttatacaggaaagagactgaagtgtacccttgaataggttttctgtagtcagagttctaaactctaatttgtaacttggactttctaattgcaaatggcaataactattaagttatcagcaataataaatttagcattaaatttgagtacaatgttttgtttttgcactccccatagtgcgtatgtattaagacagtggatagtgtttaggtcctgttaattttctttggaattcaatgtggttgtgaatcaaacttaaggaaggaacgtttaaatagcaatgagatacagaattatgggcctttggaacaagcccgacttcccctaaattctccttagtttgttaataccagtattcagattcctgattcatttatacatctgtttccatatggcagggacattatgatacttaatgaataatgctttgaggagttctgcagttaactttcaagtcttccagatgattgtcaacaacaaaaaaggcttattgaatcccatcttgctatgcaagttttatcagatgatcaaatagtagatctgatacatccccattgtatgtacgacattttcaaaccaagtcttaacttttcaaggacattttagtagctaattcaggggagggggaagaatgatgcaggtttttagattgactgactatttttgagttatggggctcattttgaaagactgctgtccagatcagcttgttgctgcagataatagaaggttcttatgaatccaagttgtatattcacttgtaggataatttaaaaattagattttttttgcatatgagcaaaaaccttttgctggatacaggagaaggttggactttatctacagttatcttttgattacagcaacagctctgggtgagagtagaatttatagagggataatttgtcaagccatagaaagaaaatctaaattaatctagtaagtgtatgacctctcaccattttaagaggtatcagattcatttgcactattaggaatgctagttttgtgcaaaaataatgccttacctgttttttccccacatttaggttgaaaagctttcaaatgttccaagttatgctgaaccaaaaaaaacaaaacaaaaacaaaacaaaaaatattaaaaaaaaacccacacaaaaacaaaacacacaaaaataaaaagcccacactttttattcctgcttcgaaatgcaaatggatagagcacggtttctctgacagtataatgatagctttgtgagttagtttcatgtcatgctgggaactctctatgaggtggccataagcagcaaccagcccaaacacccacttgcgttctattagtatggaaccatttgcatttgttttttttaagctttatctttccttgtgcatcctgaccaagaaatatctttgattatgattaatgtattatgtcaaaatgtaggctagttaaacttttgtaaagttgcctggaatgtcatttgttaggttataaacacaagatctaaatgaagggttttatgtgttgtgtacaaatcttattttgaaatggacaaacttgtcattacatttgtaaccttgtacagaggatttttcactatgtgcctagcttggtgtccattcagctaaaattgaaaaaaaaaaaggtgcatgaagagttaaaaatcaaagtatatgtagagatgactattttatattacatgacccaatcctgtatttatttctaccccctttttgaaagtatttataaaactagttgaggacagctgtatttttttgttgaactatttagtagaattgtgcctttttgtctgtatgtgaataaatgctgtacattttgcaatacaaaaaaaaagtc

SEQ ID NO: 28632 - DNA, 5692 bp, Homo sapiens
gggctggtacggtccggaattccttgtgacttgcgcgagtgcccggtgtgtgcgcgccggcgagagcaggggcccgcccggctccccgcccgccgcggcccgaactcatgcagctccgagcgagcgagcggcgcccagcccagcgcctcggccgaacccctccgcagcaggctgcctgctgtttcccggggagatcatgaaacgaggtcgccttcccagcagcagtgaggattctgacgacaatggcagcctgtcaactacttggtcccagaattcccgatcccagcataggagaagctcctgctccagacatgaagatcgaaagccttcagaggtgtttaggacagacctgatcactgccatgaagttgcatgactcctaccagctgaatccggatgagtactatgtgttggcagatccctggagacaggaatgggagaaaggggtccaggtgcctgtgagcccggggaccatccctcagcctgtggccagggttgtgtctgaagagaaatccctcatgttcatcaggcccaagaagtacatcgtgtcatcaggctctgagcctcccgagttgggctatgtggacatccggacgctggctgacagcgtgtgtcgctatgacctcaatgacatggatgctgcatggctggaactgaccaatgaagaatttaaggagatgggaatgcctgaactagatgaatacaccatggagagggtcctagaggaatttgagcagcgatgctacgacaatatgaatcatgccatagagactgaggaaggcctggggatcgaatatgatgaagatgttgtctgtgatgtctgccagtctcctgatggtgaggacggcaatgagatggtgttctgtgacaaatgcaacatctgtgtgcaccaggcctgttatggaatcctcaaggtaccagagggcagctggctgtgccggacatgtgccctgggggttcagccaaaatgtctgctgtgtccgaagaagggtggagctatgaagcccacccgtagcggaaccaagtgggtccacgttagctgtgctctgtggatccctgaggtgagcattggcagcccagagaagatggagcccatcaccaaggtgtcacacattcccagcagccggtgggcgctagtgtgcagcctctgcaatgagaagtttggggcctctatacagtgctctgtgaagaactgccgcacagccttccatgtgacctgtgcttttgaccggggcctggagatgaagaccatcttagcagagaatgatgaagtcaagttcaagtcctattgcccaaagcacagctcacataggaaacccgaggagagtcttggcaagggggctgcacaggagaatggggcccctgagtgttccccccggaatccgctggagccctttgccagccttgagcagaaccgggaggaggcccaccgggtgagtgtccgtaagcagaagctgcagcagttggaggatgagttctacaccttcgtcaacctgctggatgttgccagggctctgcggctgcctgaggaagtagtggatttcctgtaccagtactggaagttgaagaggaaggtcaacttcaacaagcccctgatcaccccaaagaaagatgaagaggacaatctagccaagcgggagcaggatgtcttatttaggaggctgcagctgttcacgcacctgcggcaggacctggagagggttcggaacctcacttacatggtgacccgcagggaaaagattaaacggtctgtgtgcaaagtccaggaacagatattcaatctttacactaagcttttggagcaagaaagagtttcaggtgtgccttcttcctgctcctcctcctcactggaaaacatgcttttgtttaacagtccttctgttggccctgatgctcccaagatagaggacttgaagtggcattctgcattcttcagaaaacaaatgggtacttccttggttcattcgctgaaaaagccccataagcgagatcctttgcagaatagccctggaagtgaaggcaaaaccctgctgaagcagccagacctgtgtggtagaagggaggggatggtggtcccagagagctttttgggtttagaaaagacctttgcagaagcacgtctcatatcagcacaacagaaaaatggtgtggtgatgccagaccatgggaaaagaagagacaatcgttttcattgtgatctcattaaaggagacttaaaggacaaatcttttaaacagagtcacaagcctctcaggtccacagatgtgtcccagaggcatctggacaacacaagagctgccacctcccctggagtggggcagtcagcacctggcacaaggaaggagatagtgcccaagtgcaatggctccctaatcaaagtaaactataatcagactgcagtcaaagtgcctacaacacctgccagcccagtgaaaaactggggaggattccggattccaaagaagggggaacggcagcagcagggagaggcccacgatggggcctgccaccagcactcagactacccatatttgggcttaggccgagttccagccaaggaaagggcaaaaagcaaattaaaatccgacaatgagaatgacgggtatgtccccgatgtggaaatgagtgactcagagagtgaggcatcagaaaagaaatgtatacacaccagcagcactatcagcagaaggacagacattatcaggagaagcatcttggcttcttgatgcaacagagatgatgcggaagccctttgggctcgtcattgggtttgctagaggagagctctgatgtgggggagaagcagaaacccattaatcctgagctacacaaacacatttacttgcaattcagattaatttttttccagagtcatttttaaatcatttttgtgagaagtttgtgttatttgcaacttgttgaggaaacagaagagtagattgtaaccataagacactgctaagactagaacccgaactgaacactaaaataaaaatgaaatgttttaaagaaggcaaggcttaaataagcctcatgaatttttatagccctctgcattcttcccaaagcacaaactcatggttacctgaatatagggaaccagatatggttcttgagaaaccctcatggtaccattcacagcccataaagtttattttctaggactgtggtagatcttgaaatcatatttatatttggccctcaaggctatttttgttgcattatagcatataggcagcagctctgaagcttcagtaacactaagaaatttatgtgtaaatatagcagtcagggaagagaattttaaaaaaggtcattattgaagaagctgaggggacagggtagagctgctgcaatatggagatttagggtaatatggcaaggtcctgctgcttgaagcctgtgagtgggttgtggatatgggactggtggagagtgagactgttaggaaagttgtatctatgaataagggcagttgaagtagaatttttaccagtccacttgaccttcttcttccctaaccactggctcttgagccagcttgggatttccctggccattgccaatacctggccatctggcttccaatagtacagtggctactcaagttcaagcgaagaacttccagactctggtgactgttacttcccagagccaaccactagtgcatatgttagggaatctgggcttccaacatgaatggattccttaagaaaaaggaaaaaaaaaaaaaaaagaaaaaaagaaaaaaaaaagaaaaaagaaaaaaagagaaaaaagcgaaataggttatattttaaaaacaatagaaaggcaataagttgcgataagctcttactattgaccaaggttatacaggaaagagactgaagtgtacccttgaataggttttctgtagtcagagttctaaactctaatttgtaacttggactttctaattgcaaatggcaataactattaagttatcagcaataataaatttagcattaaatttgagtacaatgttttgtttttgcactccccatagtgcgtatgtattaagacagtggatagtgtttaggtcctgttaattttctttggaattcaatgtggttgtgaatcaaacttaaggaaggaacgtttaaatagcaatgagatacagaattatgggcctttggaacaagcccgacttcccctaaattctccttagtttgttaataccagtattcagattcctgattcatttatacatctgtttccatatggcagggacattatgatacttaatgaataatgctttgaggagttctgcagttaactttcaagtcttccagatgattgtcaacaacaaaaaaggcttattgaatcccatcttgctatgcaagttttatcagatgatcaaatagtagatctgatacatccccattgtatgtacgacattttcaaaccaagtcttaacttttcaaggacattttagtagctaattcaggggagggggaagaatgatgcaggtttttagattgactgactatttttgagttatggggctcattttgaaagactgctgtccagatcagcttgttgctgcagataatagaaggttcttatgaatccaagttgtatattcacttgtaggataatttaaaaattagattttttttgcatatgagcaaaaaccttttgctggatacaggagaaggttggactttatctacagttatcttttgattacagcaacagctctgggtgagagtagaatttatagagggataatttgtcaagccatagaaagaaaatctaaattaatctagtaagtgtatgacctctcaccattttaagaggtatcagattcatttgcactattaggaatgctagttttgtgcaaaaataatgccttacctgttttttccccacatttaggttgaaaagctttcaaatgttccaagttatgctgaaccaaaaaaaacaaaacaaaaacaaaacaaaaaatattaaaaaaaaacccacacaaaaacaaaacacacaaaaataaaaagcccacactttttattcctgcttcgaaatgcaaatggatagagcacggtttctctgacagtataatgatagctttgtgagttagtttcatgtcatgctgggaactctctatgaggtggccataagcagcaaccagcccaaacacccacttgcgttctattagtatggaaccatttgcatttgttttttttaagctttatctttccttgtgcatcctgaccaagaaatatctttgattatgattaatgtattatgtcaaaatgtaggctagttaaacttttgtaaagttgcctggaatgtcatttgttaggttataaacacaagatctaaatgaagggttttatgtgttgtgtacaaatcttattttgaaatggacaaacttgtcattacatttgtaaccttgtacagaggatttttcactatgtgcctagcttggtgtccattcagctaaaattgaaaaaaaaaaaggtgcatgaagagttaaaaatcaaagtatatgtagagatgactattttatattacatgacccaatcctgtatttatttctaccccctttttgaaagtatttataaaactagttgaggacagctgtatttttttgttgaactatttagtagaattgtgcctttttgtctgtatgtgaataaatgctgtacattttgcaatacaaaaaaaaagtc

SEQ ID NO: 28633 - DNA, 5799 bp, Homo sapiens
gccgagaggctcagccatatttgatggttttgttgctttgctcgggagttctcgggagtaatttaatgccgaaggtcgctgcctagtggaaataatataatacgtcattaatatggcgccaaaagattgggttctcgatctgtagcgaggagggagggaggcagccgctgagcgcagcgttactatcccaccagtaacttgggcattgccggggcgggggccggaggaggaggagaggatgatttttggatcctgagaattgatctatgttggatcagctgcctgctgtttcccggggagatcatgaaacgaggtcgccttcccagcagcagtgaggattctgacgacaatggcagcctgtcaactacttggtcccagaattcccgatcccagcataggagaagctcctgctccagacatgaagatcgaaagccttcagaggtgtttaggacagacctgatcactgccatgaagttgcatgactcctaccagctgaatccggatgagtactatgtgttggcagatccctggagacaggaatgggagaaaggggtccaggtgcctgtgagcccggggaccatccctcagcctgtggccagggttgtgtctgaagagaaatccctcatgttcatcaggcccaagaagtacatcgtgtcatcaggctctgagcctcccgagttgggctatgtggacatccggacgctggctgacagcgtgtgtcgctatgacctcaatgacatggatgctgcatggctggaactgaccaatgaagaatttaaggagatgggaatgcctgaactagatgaatacaccatggagagggtcctagaggaatttgagcagcgatgctacgacaatatgaatcatgccatagagactgaggaaggcctggggatcgaatatgatgaagatgttgtctgtgatgtctgccagtctcctgatggtgaggacggcaatgagatggtgttctgtgacaaatgcaacatctgtgtgcaccaggcctgttatggaatcctcaaggtaccagagggcagctggctgtgccggacatgtgccctgggggttcagccaaaatgtctgctgtgtccgaagaagggtggagctatgaagcccacccgtagcggaaccaagtgggtccacgttagctgtgctctgtggatccctgaggtgagcattggcagcccagagaagatggagcccatcaccaaggtgtcacacattcccagcagccggtgggcgctagtgtgcagcctctgcaatgagaagtttggggcctctatacagtgctctgtgaagaactgccgcacagccttccatgtgacctgtgcttttgaccggggcctggagatgaagaccatcttagcagagaatgatgaagtcaagttcaagtcctattgcccaaagcacagctcacataggaaacccgaggagagtcttggcaagggggctgcacaggagaatggggcccctgagtgttccccccggaatccgctggagccctttgccagccttgagcagaaccgggaggaggcccaccgggtgagtgtccgtaagcagaagctgcagcagttggaggatgagttctacaccttcgtcaacctgctggatgttgccagggctctgcggctgcctgaggaagtagtggatttcctgtaccagtactggaagttgaagaggaaggtcaacttcaacaagcccctgatcaccccaaagaaagatgaagaggacaatctagccaagcgggagcaggatgtcttatttaggaggctgcagctgttcacgcacctgcggcaggacctggagagggttcggaacctcacttacatggtgacccgcagggaaaagattaaacggtctgtgtgcaaagtccaggaacagatattcaatctttacactaagcttttggagcaagaaagagtttcaggtgtgccttcttcctgctcctcctcctcactggaaaacatgcttttgtttaacagtccttctgttggccctgatgctcccaagatagaggacttgaagtggcattctgcattcttcagaaaacaaatgggtacttccttggttcattcgctgaaaaagccccataagcgagatcctttgcagaatagccctggaagtgaaggcaaaaccctgctgaagcagccagacctgtgtggtagaagggaggggatggtggtcccagagagctttttgggtttagaaaagacctttgcagaagcacgtctcatatcagcacaacagaaaaatggtgtggtgatgccagaccatgggaaaagaagagacaatcgttttcattgtgatctcattaaaggagacttaaaggacaaatcttttaaacagagtcacaagcctctcaggtccacagatgtgtcccagaggcatctggacaacacaagagctgccacctcccctggagtggggcagtcagcacctggcacaaggaaggagatagtgcccaagtgcaatggctccctaatcaaagtaaactataatcagactgcagtcaaagtgcctacaacacctgccagcccagtgaaaaactggggaggattccggattccaaagaagggggaacggcagcagcagggagaggcccacgatggggcctgccaccagcactcagactacccatatttgggcttaggccgagttccagccaaggaaagggcaaaaagcaaattaaaatccgacaatgagaatgacgggtatgtccccgatgtggaaatgagtgactcagagagtgaggcatcagaaaagaaatgtatacacaccagcagcactatcagcagaaggacagacattatcaggagaagcatcttggcttcttgatgcaacagagatgatgcggaagccctttgggctcgtcattgggtttgctagaggagagctctgatgtgggggagaagcagaaacccattaatcctgagctacacaaacacatttacttgcaattcagattaatttttttccagagtcatttttaaatcatttttgtgagaagtttgtgttatttgcaacttgttgaggaaacagaagagtagattgtaaccataagacactgctaagactagaacccgaactgaacactaaaataaaaatgaaatgttttaaagaaggcaaggcttaaataagcctcatgaatttttatagccctctgcattcttcccaaagcacaaactcatggttacctgaatatagggaaccagatatggttcttgagaaaccctcatggtaccattcacagcccataaagtttattttctaggactgtggtagatcttgaaatcatatttatatttggccctcaaggctatttttgttgcattatagcatataggcagcagctctgaagcttcagtaacactaagaaatttatgtgtaaatatagcagtcagggaagagaattttaaaaaaggtcattattgaagaagctgaggggacagggtagagctgctgcaatatggagatttagggtaatatggcaaggtcctgctgcttgaagcctgtgagtgggttgtggatatgggactggtggagagtgagactgttaggaaagttgtatctatgaataagggcagttgaagtagaatttttaccagtccacttgaccttcttcttccctaaccactggctcttgagccagcttgggatttccctggccattgccaatacctggccatctggcttccaatagtacagtggctactcaagttcaagcgaagaacttccagactctggtgactgttacttcccagagccaaccactagtgcatatgttagggaatctgggcttccaacatgaatggattccttaagaaaaaggaaaaaaaaaaaaaaaagaaaaaaagaaaaaaaaaagaaaaaagaaaaaaagagaaaaaagcgaaataggttatattttaaaaacaatagaaaggcaataagttgcgataagctcttactattgaccaaggttatacaggaaagagactgaagtgtacccttgaataggttttctgtagtcagagttctaaactctaatttgtaacttggactttctaattgcaaatggcaataactattaagttatcagcaataataaatttagcattaaatttgagtacaatgttttgtttttgcactccccatagtgcgtatgtattaagacagtggatagtgtttaggtcctgttaattttctttggaattcaatgtggttgtgaatcaaacttaaggaaggaacgtttaaatagcaatgagatacagaattatgggcctttggaacaagcccgacttcccctaaattctccttagtttgttaataccagtattcagattcctgattcatttatacatctgtttccatatggcagggacattatgatacttaatgaataatgctttgaggagttctgcagttaactttcaagtcttccagatgattgtcaacaacaaaaaaggcttattgaatcccatcttgctatgcaagttttatcagatgatcaaatagtagatctgatacatccccattgtatgtacgacattttcaaaccaagtcttaacttttcaaggacattttagtagctaattcaggggagggggaagaatgatgcaggtttttagattgactgactatttttgagttatggggctcattttgaaagactgctgtccagatcagcttgttgctgcagataatagaaggttcttatgaatccaagttgtatattcacttgtaggataatttaaaaattagattttttttgcatatgagcaaaaaccttttgctggatacaggagaaggttggactttatctacagttatcttttgattacagcaacagctctgggtgagagtagaatttatagagggataatttgtcaagccatagaaagaaaatctaaattaatctagtaagtgtatgacctctcaccattttaagaggtatcagattcatttgcactattaggaatgctagttttgtgcaaaaataatgccttacctgttttttccccacatttaggttgaaaagctttcaaatgttccaagttatgctgaaccaaaaaaaacaaaacaaaaacaaaacaaaaaatattaaaaaaaaacccacacaaaaacaaaacacacaaaaataaaaagcccacactttttattcctgcttcgaaatgcaaatggatagagcacggtttctctgacagtataatgatagctttgtgagttagtttcatgtcatgctgggaactctctatgaggtggccataagcagcaaccagcccaaacacccacttgcgttctattagtatggaaccatttgcatttgttttttttaagctttatctttccttgtgcatcctgaccaagaaatatctttgattatgattaatgtattatgtcaaaatgtaggctagttaaacttttgtaaagttgcctggaatgtcatttgttaggttataaacacaagatctaaatgaagggttttatgtgttgtgtacaaatcttattttgaaatggacaaacttgtcattacatttgtaaccttgtacagaggatttttcactatgtgcctagcttggtgtccattcagctaaaattgaaaaaaaaaaaggtgcatgaagagttaaaaatcaaagtatatgtagagatgactattttatattacatgacccaatcctgtatttatttctaccccctttttgaaagtatttataaaactagttgaggacagctgtatttttttgttgaactatttagtagaattgtgcctttttgtctgtatgtgaataaatgctgtacattttgcaatacaaaaaaaaagtc

SEQ ID NO: 28634 - DNA, 5649 bp, Homo sapiens
cagtcagctaaagattcctggagtagttatagtaataatgtcacaggaatatagaaagaaacctggcatctttgggagacctactgatatgtgacttctccacccctccccctccttttttaacctggctgcctgctgtttcccggggagatcatgaaacgaggtcgccttcccagcagcagtgaggattctgacgacaatggcagcctgtcaactacttggtcccagaattcccgatcccagcataggagaagctcctgctccagacatgaagatcgaaagccttcagaggtgtttaggacagacctgatcactgccatgaagttgcatgactcctaccagctgaatccggatgagtactatgtgttggcagatccctggagacaggaatgggagaaaggggtccaggtgcctgtgagcccggggaccatccctcagcctgtggccagggttgtgtctgaagagaaatccctcatgttcatcaggcccaagaagtacatcgtgtcatcaggctctgagcctcccgagttgggctatgtggacatccggacgctggctgacagcgtgtgtcgctatgacctcaatgacatggatgctgcatggctggaactgaccaatgaagaatttaaggagatgggaatgcctgaactagatgaatacaccatggagagggtcctagaggaatttgagcagcgatgctacgacaatatgaatcatgccatagagactgaggaaggcctggggatcgaatatgatgaagatgttgtctgtgatgtctgccagtctcctgatggtgaggacggcaatgagatggtgttctgtgacaaatgcaacatctgtgtgcaccaggcctgttatggaatcctcaaggtaccagagggcagctggctgtgccggacatgtgccctgggggttcagccaaaatgtctgctgtgtccgaagaagggtggagctatgaagcccacccgtagcggaaccaagtgggtccacgttagctgtgctctgtggatccctgaggtgagcattggcagcccagagaagatggagcccatcaccaaggtgtcacacattcccagcagccggtgggcgctagtgtgcagcctctgcaatgagaagtttggggcctctatacagtgctctgtgaagaactgccgcacagccttccatgtgacctgtgcttttgaccggggcctggagatgaagaccatcttagcagagaatgatgaagtcaagttcaagtcctattgcccaaagcacagctcacataggaaacccgaggagagtcttggcaagggggctgcacaggagaatggggcccctgagtgttccccccggaatccgctggagccctttgccagccttgagcagaaccgggaggaggcccaccgggtgagtgtccgtaagcagaagctgcagcagttggaggatgagttctacaccttcgtcaacctgctggatgttgccagggctctgcggctgcctgaggaagtagtggatttcctgtaccagtactggaagttgaagaggaaggtcaacttcaacaagcccctgatcaccccaaagaaagatgaagaggacaatctagccaagcgggagcaggatgtcttatttaggaggctgcagctgttcacgcacctgcggcaggacctggagagggttcggaacctcacttacatggtgacccgcagggaaaagattaaacggtctgtgtgcaaagtccaggaacagatattcaatctttacactaagcttttggagcaagaaagagtttcaggtgtgccttcttcctgctcctcctcctcactggaaaacatgcttttgtttaacagtccttctgttggccctgatgctcccaagatagaggacttgaagtggcattctgcattcttcagaaaacaaatgggtacttccttggttcattcgctgaaaaagccccataagcgagatcctttgcagaatagccctggaagtgaaggcaaaaccctgctgaagcagccagacctgtgtggtagaagggaggggatggtggtcccagagagctttttgggtttagaaaagacctttgcagaagcacgtctcatatcagcacaacagaaaaatggtgtggtgatgccagaccatgggaaaagaagagacaatcgttttcattgtgatctcattaaaggagacttaaaggacaaatcttttaaacagagtcacaagcctctcaggtccacagatgtgtcccagaggcatctggacaacacaagagctgccacctcccctggagtggggcagtcagcacctggcacaaggaaggagatagtgcccaagtgcaatggctccctaatcaaagtaaactataatcagactgcagtcaaagtgcctacaacacctgccagcccagtgaaaaactggggaggattccggattccaaagaagggggaacggcagcagcagggagaggcccacgatggggcctgccaccagcactcagactacccatatttgggcttaggccgagttccagccaaggaaagggcaaaaagcaaattaaaatccgacaatgagaatgacgggtatgtccccgatgtggaaatgagtgactcagagagtgaggcatcagaaaagaaatgtatacacaccagcagcactatcagcagaaggacagacattatcaggagaagcatcttggcttcttgatgcaacagagatgatgcggaagccctttgggctcgtcattgggtttgctagaggagagctctgatgtgggggagaagcagaaacccattaatcctgagctacacaaacacatttacttgcaattcagattaatttttttccagagtcatttttaaatcatttttgtgagaagtttgtgttatttgcaacttgttgaggaaacagaagagtagattgtaaccataagacactgctaagactagaacccgaactgaacactaaaataaaaatgaaatgttttaaagaaggcaaggcttaaataagcctcatgaatttttatagccctctgcattcttcccaaagcacaaactcatggttacctgaatatagggaaccagatatggttcttgagaaaccctcatggtaccattcacagcccataaagtttattttctaggactgtggtagatcttgaaatcatatttatatttggccctcaaggctatttttgttgcattatagcatataggcagcagctctgaagcttcagtaacactaagaaatttatgtgtaaatatagcagtcagggaagagaattttaaaaaaggtcattattgaagaagctgaggggacagggtagagctgctgcaatatggagatttagggtaatatggcaaggtcctgctgcttgaagcctgtgagtgggttgtggatatgggactggtggagagtgagactgttaggaaagttgtatctatgaataagggcagttgaagtagaatttttaccagtccacttgaccttcttcttccctaaccactggctcttgagccagcttgggatttccctggccattgccaatacctggccatctggcttccaatagtacagtggctactcaagttcaagcgaagaacttccagactctggtgactgttacttcccagagccaaccactagtgcatatgttagggaatctgggcttccaacatgaatggattccttaagaaaaaggaaaaaaaaaaaaaaaagaaaaaaagaaaaaaaaaagaaaaaagaaaaaaagagaaaaaagcgaaataggttatattttaaaaacaatagaaaggcaataagttgcgataagctcttactattgaccaaggttatacaggaaagagactgaagtgtacccttgaataggttttctgtagtcagagttctaaactctaatttgtaacttggactttctaattgcaaatggcaataactattaagttatcagcaataataaatttagcattaaatttgagtacaatgttttgtttttgcactccccatagtgcgtatgtattaagacagtggatagtgtttaggtcctgttaattttctttggaattcaatgtggttgtgaatcaaacttaaggaaggaacgtttaaatagcaatgagatacagaattatgggcctttggaacaagcccgacttcccctaaattctccttagtttgttaataccagtattcagattcctgattcatttatacatctgtttccatatggcagggacattatgatacttaatgaataatgctttgaggagttctgcagttaactttcaagtcttccagatgattgtcaacaacaaaaaaggcttattgaatcccatcttgctatgcaagttttatcagatgatcaaatagtagatctgatacatccccattgtatgtacgacattttcaaaccaagtcttaacttttcaaggacattttagtagctaattcaggggagggggaagaatgatgcaggtttttagattgactgactatttttgagttatggggctcattttgaaagactgctgtccagatcagcttgttgctgcagataatagaaggttcttatgaatccaagttgtatattcacttgtaggataatttaaaaattagattttttttgcatatgagcaaaaaccttttgctggatacaggagaaggttggactttatctacagttatcttttgattacagcaacagctctgggtgagagtagaatttatagagggataatttgtcaagccatagaaagaaaatctaaattaatctagtaagtgtatgacctctcaccattttaagaggtatcagattcatttgcactattaggaatgctagttttgtgcaaaaataatgccttacctgttttttccccacatttaggttgaaaagctttcaaatgttccaagttatgctgaaccaaaaaaaacaaaacaaaaacaaaacaaaaaatattaaaaaaaaacccacacaaaaacaaaacacacaaaaataaaaagcccacactttttattcctgcttcgaaatgcaaatggatagagcacggtttctctgacagtataatgatagctttgtgagttagtttcatgtcatgctgggaactctctatgaggtggccataagcagcaaccagcccaaacacccacttgcgttctattagtatggaaccatttgcatttgttttttttaagctttatctttccttgtgcatcctgaccaagaaatatctttgattatgattaatgtattatgtcaaaatgtaggctagttaaacttttgtaaagttgcctggaatgtcatttgttaggttataaacacaagatctaaatgaagggttttatgtgttgtgtacaaatcttattttgaaatggacaaacttgtcattacatttgtaaccttgtacagaggatttttcactatgtgcctagcttggtgtccattcagctaaaattgaaaaaaaaaaaggtgcatgaagagttaaaaatcaaagtatatgtagagatgactattttatattacatgacccaatcctgtatttatttctaccccctttttgaaagtatttataaaactagttgaggacagctgtatttttttgttgaactatttagtagaattgtgcctttttgtctgtatgtgaataaatgctgtacattttgcaatacaaaaaaaaagtc

SEQ ID NO: 28635 - DNA, 140 bp, Homo sapiens
aaagtaatggatcttttagtttctgacattcatgttcagcctttgacgacctgagccaccctgtcttgctgttttccgacctttaggtgagcattggcagcccagagaagatggagcccatcaccaaggtgtcacacatt

SEQ ID NO: 28636 - DNA, 683 bp, Homo sapiens
gaattatttcacacatttcctttattcattcacatgtttacatgtacttgtcctcgtaatagccctgtgagggtacagacacatagagaaacttacaagccccgagccctgctttttgggtcctctcagtctcgtacgggaggcagaagactggaccgtggaggagcgcggcgcaggtgctgctctgtaaccaggtagagggagcagaggcagccatcagccacctgatgagttctgcatggagtccgctctgaaaatcagatcagttattttgtttggaggaggtctagttttatgaaaaattatgtgagcttcagctgttttagaaaatgtggcatattgagtctgcagattgaatggagattctcaaggcaggtcatctcttcactataaaaaccaaatttgtacaaacttggtggtgtaagtgttgtgttgttgggtggggagttcacatcaattgggccacactaagggtgtagaattttattcttttggatttgcttctgctgtaatttttctttatttgtggttttatgtttataggtgtgccttcttcctgctcctcctcctcactggaaaacatgcttttgtttaacagtccttctgttggccctgatgctcccaagatagaggacttgaagtggcattctgcattcttcagaaaacaaatgggtacttccttg

SEQ ID NO: 28637 - DNA, 3643 bp, Homo sapiens
ctctcgttttggcaagggattaaagtgctcccccctgtggcagcagtgacccagaaatgagtttgattcacatagtccttcctccataacaagccaaacgccagaccgagagtgcctccgtgcgcgagtgcccggtgtgtgcgcgccggcgagagcaggggcccgcccggctccccgcccgccgcggcccgaactcatgcagctccgagcgagcgagcggcgcccagcccagcgcctcggccgaacccctccgcagcaggctgcctgctgtttcccggggagatcatgaaacgaggtcgccttcccagcagcagtgaggattctgacgacaatggcagcctgtcaactacttggtcccagaattcccgatcccagcataggagaagctcctgctccagacatgaagatcgaaagccttcagaggtgtttaggacagacctgatcactgccatgaagttgcatgactcctaccagctgaatccggatgagtactatgtgttggcagatccctggagacaggaatgggagaaaggggtccaggtgcctgtgagcccggggaccatccctcagcctgtggccagggttgtgtctgaagagaaatccctcatgttcatcaggcccaagaagtacatcgtgtcatcaggctctgagcctcccgagttgggctatgtggacatccggacgctggctgacagcgtgtgtcgctatgacctcaatgacatggatgctgcatggctggaactgaccaatgaagaatttaaggagatgggaatgcctgaactagatgaatacaccatggagagggtcctagaggaatttgagcagcgatgctacgacaatatgaatcatgccatagagactgaggaaggcctggggatcgaatatgatgaagatgttgtctgtgatgtctgccagtctcctgatggtgaggacggcaatgagatggtgttctgtgacaaatgcaacatctgtgtgcaccaggcctgttatggaatcctcaaggtaccagagggcagctggctgtgccggacatgtgccctgggggttcagccaaaatgtctgctgtgtccgaagaagggtggagctatgaagcccacccgtagcggaaccaagtgggtccacgttagctgtgctctgtggatccctgaggtgagcattggcagcccagagaagatggagcccatcaccaaggtgtcacacattcccagcagccggtgggcgctagtgtgcagcctctgcaatgagaagtttggggcctctatacagtgctctgtgaagaactgccgcacagccttccatgtgacctgtgcttttgaccggggcctggagatgaagaccatcttagcagagaatgatgaagtcaagttcaagtcctattgcccaaagcacagctcacataggaaacccgaggagagtcttggcaagggggctgcacaggagaatggggcccctgagtgttccccccggaatccgctggagccctttgccagccttgagcagaaccgggaggaggcccaccgggtgagtgtccgtaagcagaagctgcagcagttggaggatgagttctacaccttcgtcaacctgctggatgttgccagggctctgcggctgcctgaggaagtagtggatttcctgtaccagtactggaagttgaagaggaaggtcaacttcaacaagcccctgatcaccccaaagaaagatgaagaggacaatctagccaagcgggagcaggatgtcttatttaggaggctgcagctgttcacgcacctgcggcaggacctggagagggtaatgattgacactgacaccttatagtgacttagagaagaagatgcaaagaggcgaacgctcgcccagagcaagaaatgatagccagtcatatactctcagacccttgtacacaccacagcatgaggttgtgttggttaaaaatatttatgggctggtaaactcattgtacatatgtgcaaaactgctactgagtggggagcttctttgtggttttttttttttaaaaacactttcccattaatctttactgttttgtaagatcaaatggggtgtgtcttccccacccccattccttcattctagagctagagtgaatgagccccaagaaaatgacccaaggagttgactcaggatggtttacagactgatttagaaaaccagaacggatttcatttctaatggagggggccagagatgggaaaatttcttgttcagtccggggaaacacacctaggtgctggtgatgggcttatgaaggaagctaagcacggctgctcactggcccccactttgtttcttgggtaattcacaggggaattcccagtactgtcatggagcagagcaggcagtgggtgctgatgtgtgtgcatgagctgtatgtacacatgcatatatctgttacagaagatactcctggcagtgaggtgctaagtcatcactgaggctgtgtgtgtgtgtgtgtgtgcgcgtgcccgtgtccatccatgtctctgttgtgtgtctgtgtgcgggtatgggtgggattcctggtggacaggggtgtcagatctgtctgaggagccccagtcatgctcagcacgctacagatgtgttgtttgtcacactgagattgctgaatgtcgtggctgttggctgccgagcctcagctgctggcatttccttctgctgtttgctgcttttgtgcctcccccactttccatcacctctggagtcccgtctggacgtcccttcctgctacaggaataatgaggcgtgggctgcctcccgctagggcctcctgctccctgtaggtagtttctggctgaggcttgctaattggggatgcttcttagagcatcttccacatcaactcccctggctgctggctaccgattaaattcattagtgtgaaagaggtgggagtgaggttttctggcctgaagcagtctgcactgaaaggtacccaagtggcctgaaacagtgtagggaaagacctgggaaacactggaccaaaaaagcctgatctcatggagacctgcatggccctgttagagatggcgtagaagtgaaagtcttaaagggagcattagagatccttttaatacacgactgagtgccagcttatttgtgatgccccttcccagaccaggttaggattcctgggaaggccgcggattccggccctggaagaggcaggatcctggagcagttttgtgaggcttttgtgctcccatacgccccctggtggtgagtgtaaagaagactttgcctctcacaactacatgtatgtgtggcatttttgttagagatgagaaaaggattgagaaggataaactggaatcctggtaagaagcctttatgccagcccgacacctgctgtaattggggtgcatgagctatggagtcagatagttgttgggagggggaggacaagaagtctattgtttggactgtgtttgtctcacaatcaccacaaaataaaagtgtagaaaatgcttgtggtgtactaactcttttctgtacttaagttactcagattaacatgcacttctaattctaaacattttttttggagtcatcactgtcgctgtttaagtagaacaatgccaacgatgtatgagaaacagggaataaatcaggatttgtgtgtgta

SEQ ID NO: 28638 - DNA, 5600 bp, Homo sapiens
acggcacccgccagtgggggtgcctcaacttccgcgggcgtttaaatagcagcctctctcccctcccaccggtaataggctgcctgctgtttcccggggagatcatgaaacgaggtcgccttcccagcagcagtgaggattctgacgacaatggcagcctgtcaactacttggtcccagaattcccgatcccagcataggagaagctcctgctccagacatgaagatcgaaagccttcagaggtgtttaggacagacctgatcactgccatgaagttgcatgactcctaccagctgaatccggatgagtactatgtgttggcagatccctggagacaggaatgggagaaaggggtccaggtgcctgtgagcccggggaccatccctcagcctgtggccagggttgtgtctgaagagaaatccctcatgttcatcaggcccaagaagtacatcgtgtcatcaggctctgagcctcccgagttgggctatgtggacatccggacgctggctgacagcgtgtgtcgctatgacctcaatgacatggatgctgcatggctggaactgaccaatgaagaatttaaggagatgggaatgcctgaactagatgaatacaccatggagagggtcctagaggaatttgagcagcgatgctacgacaatatgaatcatgccatagagactgaggaaggcctggggatcgaatatgatgaagatgttgtctgtgatgtctgccagtctcctgatggtgaggacggcaatgagatggtgttctgtgacaaatgcaacatctgtgtgcaccaggcctgttatggaatcctcaaggtaccagagggcagctggctgtgccggacatgtgccctgggggttcagccaaaatgtctgctgtgtccgaagaagggtggagctatgaagcccacccgtagcggaaccaagtgggtccacgttagctgtgctctgtggatccctgaggtgagcattggcagcccagagaagatggagcccatcaccaaggtgtcacacattcccagcagccggtgggcgctagtgtgcagcctctgcaatgagaagtttggggcctctatacagtgctctgtgaagaactgccgcacagccttccatgtgacctgtgcttttgaccggggcctggagatgaagaccatcttagcagagaatgatgaagtcaagttcaagtcctattgcccaaagcacagctcacataggaaacccgaggagagtcttggcaagggggctgcacaggagaatggggcccctgagtgttccccccggaatccgctggagccctttgccagccttgagcagaaccgggaggaggcccaccgggtgagtgtccgtaagcagaagctgcagcagttggaggatgagttctacaccttcgtcaacctgctggatgttgccagggctctgcggctgcctgaggaagtagtggatttcctgtaccagtactggaagttgaagaggaaggtcaacttcaacaagcccctgatcaccccaaagaaagatgaagaggacaatctagccaagcgggagcaggatgtcttatttaggaggctgcagctgttcacgcacctgcggcaggacctggagagggttcggaacctcacttacatggtgacccgcagggaaaagattaaacggtctgtgtgcaaagtccaggaacagatattcaatctttacactaagcttttggagcaagaaagagtttcaggtgtgccttcttcctgctcctcctcctcactggaaaacatgcttttgtttaacagtccttctgttggccctgatgctcccaagatagaggacttgaagtggcattctgcattcttcagaaaacaaatgggtacttccttggttcattcgctgaaaaagccccataagcgagatcctttgcagaatagccctggaagtgaaggcaaaaccctgctgaagcagccagacctgtgtggtagaagggaggggatggtggtcccagagagctttttgggtttagaaaagacctttgcagaagcacgtctcatatcagcacaacagaaaaatggtgtggtgatgccagaccatgggaaaagaagagacaatcgttttcattgtgatctcattaaaggagacttaaaggacaaatcttttaaacagagtcacaagcctctcaggtccacagatgtgtcccagaggcatctggacaacacaagagctgccacctcccctggagtggggcagtcagcacctggcacaaggaaggagatagtgcccaagtgcaatggctccctaatcaaagtaaactataatcagactgcagtcaaagtgcctacaacacctgccagcccagtgaaaaactggggaggattccggattccaaagaagggggaacggcagcagcagggagaggcccacgatggggcctgccaccagcactcagactacccatatttgggcttaggccgagttccagccaaggaaagggcaaaaagcaaattaaaatccgacaatgagaatgacgggtatgtccccgatgtggaaatgagtgactcagagagtgaggcatcagaaaagaaatgtatacacaccagcagcactatcagcagaaggacagacattatcaggagaagcatcttggcttcttgatgcaacagagatgatgcggaagccctttgggctcgtcattgggtttgctagaggagagctctgatgtgggggagaagcagaaacccattaatcctgagctacacaaacacatttacttgcaattcagattaatttttttccagagtcatttttaaatcatttttgtgagaagtttgtgttatttgcaacttgttgaggaaacagaagagtagattgtaaccataagacactgctaagactagaacccgaactgaacactaaaataaaaatgaaatgttttaaagaaggcaaggcttaaataagcctcatgaatttttatagccctctgcattcttcccaaagcacaaactcatggttacctgaatatagggaaccagatatggttcttgagaaaccctcatggtaccattcacagcccataaagtttattttctaggactgtggtagatcttgaaatcatatttatatttggccctcaaggctatttttgttgcattatagcatataggcagcagctctgaagcttcagtaacactaagaaatttatgtgtaaatatagcagtcagggaagagaattttaaaaaaggtcattattgaagaagctgaggggacagggtagagctgctgcaatatggagatttagggtaatatggcaaggtcctgctgcttgaagcctgtgagtgggttgtggatatgggactggtggagagtgagactgttaggaaagttgtatctatgaataagggcagttgaagtagaatttttaccagtccacttgaccttcttcttccctaaccactggctcttgagccagcttgggatttccctggccattgccaatacctggccatctggcttccaatagtacagtggctactcaagttcaagcgaagaacttccagactctggtgactgttacttcccagagccaaccactagtgcatatgttagggaatctgggcttccaacatgaatggattccttaagaaaaaggaaaaaaaaaaaaaaaagaaaaaaagaaaaaaaaaagaaaaaagaaaaaaagagaaaaaagcgaaataggttatattttaaaaacaatagaaaggcaataagttgcgataagctcttactattgaccaaggttatacaggaaagagactgaagtgtacccttgaataggttttctgtagtcagagttctaaactctaatttgtaacttggactttctaattgcaaatggcaataactattaagttatcagcaataataaatttagcattaaatttgagtacaatgttttgtttttgcactccccatagtgcgtatgtattaagacagtggatagtgtttaggtcctgttaattttctttggaattcaatgtggttgtgaatcaaacttaaggaaggaacgtttaaatagcaatgagatacagaattatgggcctttggaacaagcccgacttcccctaaattctccttagtttgttaataccagtattcagattcctgattcatttatacatctgtttccatatggcagggacattatgatacttaatgaataatgctttgaggagttctgcagttaactttcaagtcttccagatgattgtcaacaacaaaaaaggcttattgaatcccatcttgctatgcaagttttatcagatgatcaaatagtagatctgatacatccccattgtatgtacgacattttcaaaccaagtcttaacttttcaaggacattttagtagctaattcaggggagggggaagaatgatgcaggtttttagattgactgactatttttgagttatggggctcattttgaaagactgctgtccagatcagcttgttgctgcagataatagaaggttcttatgaatccaagttgtatattcacttgtaggataatttaaaaattagattttttttgcatatgagcaaaaaccttttgctggatacaggagaaggttggactttatctacagttatcttttgattacagcaacagctctgggtgagagtagaatttatagagggataatttgtcaagccatagaaagaaaatctaaattaatctagtaagtgtatgacctctcaccattttaagaggtatcagattcatttgcactattaggaatgctagttttgtgcaaaaataatgccttacctgttttttccccacatttaggttgaaaagctttcaaatgttccaagttatgctgaaccaaaaaaaacaaaacaaaaacaaaacaaaaaatattaaaaaaaaacccacacaaaaacaaaacacacaaaaataaaaagcccacactttttattcctgcttcgaaatgcaaatggatagagcacggtttctctgacagtataatgatagctttgtgagttagtttcatgtcatgctgggaactctctatgaggtggccataagcagcaaccagcccaaacacccacttgcgttctattagtatggaaccatttgcatttgttttttttaagctttatctttccttgtgcatcctgaccaagaaatatctttgattatgattaatgtattatgtcaaaatgtaggctagttaaacttttgtaaagttgcctggaatgtcatttgttaggttataaacacaagatctaaatgaagggttttatgtgttgtgtacaaatcttattttgaaatggacaaacttgtcattacatttgtaaccttgtacagaggatttttcactatgtgcctagcttggtgtccattcagctaaaattgaaaaaaaaaaaggtgcatgaagagttaaaaatcaaagtatatgtagagatgactattttatattacatgacccaatcctgtatttatttctaccccctttttgaaagtatttataaaactagttgaggacagctgtatttttttgttgaactatttagtagaattgtgcctttttgtctgtatgtgaataaatgctgtacattttgcaatacaaaaaaaaagtc

SEQ ID NO: 28639 - DNA, 5728 bp, Homo sapiens
ctctcgttttggcaagggattaaagtgctcccccctgtggcagcagtgacccagaaatgagtttgattcacatagtccttcctccataacaagccaaacgccagaccgagagtgcctccgtgcgcgagtgcccggtgtgtgcgcgccggcgagagcaggggcccgcccggctccccgcccgccgcggcccgaactcatgcagctccgagcgagcgagcggcgcccagcccagcgcctcggccgaacccctccgcagcaggctgcctgctgtttcccggggagatcatgaaacgaggtcgccttcccagcagcagtgaggattctgacgacaatggcagcctgtcaactacttggtcccagaattcccgatcccagcataggagaagctcctgctccagacatgaagatcgaaagccttcagaggtgtttaggacagacctgatcactgccatgaagttgcatgactcctaccagctgaatccggatgagtactatgtgttggcagatccctggagacaggaatgggagaaaggggtccaggtgcctgtgagcccggggaccatccctcagcctgtggccagggttgtgtctgaagagaaatccctcatgttcatcaggcccaagaagtacatcgtgtcatcaggctctgagcctcccgagttgggctatgtggacatccggacgctggctgacagcgtgtgtcgctatgacctcaatgacatggatgctgcatggctggaactgaccaatgaagaatttaaggagatgggaatgcctgaactagatgaatacaccatggagagggtcctagaggaatttgagcagcgatgctacgacaatatgaatcatgccatagagactgaggaaggcctggggatcgaatatgatgaagatgttgtctgtgatgtctgccagtctcctgatggtgaggacggcaatgagatggtgttctgtgacaaatgcaacatctgtgtgcaccaggcctgttatggaatcctcaaggtaccagagggcagctggctgtgccggacatgtgccctgggggttcagccaaaatgtctgctgtgtccgaagaagggtggagctatgaagcccacccgtagcggaaccaagtgggtccacgttagctgtgctctgtggatccctgaggtgagcattggcagcccagagaagatggagcccatcaccaaggtgtcacacattcccagcagccggtgggcgctagtgtgcagcctctgcaatgagaagtttggggcctctatacagtgctctgtgaagaactgccgcacagccttccatgtgacctgtgcttttgaccggggcctggagatgaagaccatcttagcagagaatgatgaagtcaagttcaagtcctattgcccaaagcacagctcacataggaaacccgaggagagtcttggcaagggggctgcacaggagaatggggcccctgagtgttccccccggaatccgctggagccctttgccagccttgagcagaaccgggaggaggcccaccgggtgagtgtccgtaagcagaagctgcagcagttggaggatgagttctacaccttcgtcaacctgctggatgttgccagggctctgcggctgcctgaggaagtagtggatttcctgtaccagtactggaagttgaagaggaaggtcaacttcaacaagcccctgatcaccccaaagaaagatgaagaggacaatctagccaagcgggagcaggatgtcttatttaggaggctgcagctgttcacgcacctgcggcaggacctggagagggttcggaacctcacttacatggtgacccgcagggaaaagattaaacggtctgtgtgcaaagtccaggaacagatattcaatctttacactaagcttttggagcaagaaagagtttcaggtgtgccttcttcctgctcctcctcctcactggaaaacatgcttttgtttaacagtccttctgttggccctgatgctcccaagatagaggacttgaagtggcattctgcattcttcagaaaacaaatgggtacttccttggttcattcgctgaaaaagccccataagcgagatcctttgcagaatagccctggaagtgaaggcaaaaccctgctgaagcagccagacctgtgtggtagaagggaggggatggtggtcccagagagctttttgggtttagaaaagacctttgcagaagcacgtctcatatcagcacaacagaaaaatggtgtggtgatgccagaccatgggaaaagaagagacaatcgttttcattgtgatctcattaaaggagacttaaaggacaaatcttttaaacagagtcacaagcctctcaggtccacagatgtgtcccagaggcatctggacaacacaagagctgccacctcccctggagtggggcagtcagcacctggcacaaggaaggagatagtgcccaagtgcaatggctccctaatcaaagtaaactataatcagactgcagtcaaagtgcctacaacacctgccagcccagtgaaaaactggggaggattccggattccaaagaagggggaacggcagcagcagggagaggcccacgatggggcctgccaccagcactcagactacccatatttgggcttaggccgagttccagccaaggaaagggcaaaaagcaaattaaaatccgacaatgagaatgacgggtatgtccccgatgtggaaatgagtgactcagagagtgaggcatcagaaaagaaatgtatacacaccagcagcactatcagcagaaggacagacattatcaggagaagcatcttggcttcttgatgcaacagagatgatgcggaagccctttgggctcgtcattgggtttgctagaggagagctctgatgtgggggagaagcagaaacccattaatcctgagctacacaaacacatttacttgcaattcagattaatttttttccagagtcatttttaaatcatttttgtgagaagtttgtgttatttgcaacttgttgaggaaacagaagagtagattgtaaccataagacactgctaagactagaacccgaactgaacactaaaataaaaatgaaatgttttaaagaaggcaaggcttaaataagcctcatgaatttttatagccctctgcattcttcccaaagcacaaactcatggttacctgaatatagggaaccagatatggttcttgagaaaccctcatggtaccattcacagcccataaagtttattttctaggactgtggtagatcttgaaatcatatttatatttggccctcaaggctatttttgttgcattatagcatataggcagcagctctgaagcttcagtaacactaagaaatttatgtgtaaatatagcagtcagggaagagaattttaaaaaaggtcattattgaagaagctgaggggacagggtagagctgctgcaatatggagatttagggtaatatggcaaggtcctgctgcttgaagcctgtgagtgggttgtggatatgggactggtggagagtgagactgttaggaaagttgtatctatgaataagggcagttgaagtagaatttttaccagtccacttgaccttcttcttccctaaccactggctcttgagccagcttgggatttccctggccattgccaatacctggccatctggcttccaatagtacagtggctactcaagttcaagcgaagaacttccagactctggtgactgttacttcccagagccaaccactagtgcatatgttagggaatctgggcttccaacatgaatggattccttaagaaaaaggaaaaaaaaaaaaaaaagaaaaaaagaaaaaaaaaagaaaaaagaaaaaaagagaaaaaagcgaaataggttatattttaaaaacaatagaaaggcaataagttgcgataagctcttactattgaccaaggttatacaggaaagagactgaagtgtacccttgaataggttttctgtagtcagagttctaaactctaatttgtaacttggactttctaattgcaaatggcaataactattaagttatcagcaataataaatttagcattaaatttgagtacaatgttttgtttttgcactccccatagtgcgtatgtattaagacagtggatagtgtttaggtcctgttaattttctttggaattcaatgtggttgtgaatcaaacttaaggaaggaacgtttaaatagcaatgagatacagaattatgggcctttggaacaagcccgacttcccctaaattctccttagtttgttaataccagtattcagattcctgattcatttatacatctgtttccatatggcagggacattatgatacttaatgaataatgctttgaggagttctgcagttaactttcaagtcttccagatgattgtcaacaacaaaatagatctgatacatccccattgtatgtacgacattttcaaaccaagtcttaacttttcaaggacattttagtagctaattcaggggagggggaagaatgatgcaggtttttagattgactgactatttttgagttatggggctcattttgaaagactgctgtccagatcagcttgttgctgcagataatagaaggttcttatgaatccaagttgtatattcacttgtaggataatttaaaaattagattttttttgcatatgagcaaaaaccttttgctggatacaggagaaggttggactttatctacagttatcttttgattacagcaacagctctgggtgagagtagaatttatagagggataatttgtcaagccatagaaagaaaatctaaattaatctagtaagtgtatgacctctcaccattttaagaggtatcagattcatttgcactattaggaatgctagttttgtgcaaaaataatgccttacctgttttttccccacatttaggttgaaaagctttcaaatgttccaagttatgctgaaccaaaaaaaacaaaacaaaaacaaaacaaaaaatattaaaaaaaaacccacacaaaaacaaaacacacaaaaataaaaagcccacactttttattcctgcttcgaaatgcaaatggatagagcacggtttctctgacagtataatgatagctttgtgagttagtttcatgtcatgctgggaactctctatgaggtggccataagcagcaaccagcccaaacacccacttgcgttctattagtatggaaccatttgcatttgttttttttaagctttatctttccttgtgcatcctgaccaagaaatatctttgattatgattaatgtattatgtcaaaatgtaggctagttaaacttttgtaaagttgcctggaatgtcatttgttaggttataaacacaagatctaaatgaagggttttatgtgttgtgtacaaatcttattttgaaatggacaaacttgtcattacatttgtaaccttgtacagaggatttttcactatgtgcctagcttggtgtccattcagctaaaattgaaaaaaaaaaaggtgcatgaagagttaaaaatcaaagtatatgtagagatgactattttatattacatgacccaatcctgtatttatttctaccccctttttgaaagtatttataaaactagttgaggacagctgtatttttttgttgaactatttagtagaattgtgcctttttgtctgtatgtgaataaatgctgtacattttgcaatacaaaaaaaaagtc

SEQ ID NO: 28640 - DNA, 481 bp, Homo sapiens
tcattcttgaagtcagtgagaccaagaacccactaattctggacacactaggatctatgtgtttccttaaagtcttagtttgattatgtcaagtttagcacaagtggctccattttggtttggtctgggctgttggggcctagtgcatgaattcagtccaaaacaatggcctcccataattttgtttaaaaatttcccattgcatctgccattactgaggcttgagtaggcggttttcccctcacagtgtaaacaaagccaccaggaagttcaaactgggtggagcccactgcaactaggcaaagctgctgtagccagactgcctctctagattcctccactctgggcaaggcatctctgaaagaaaggcagcagccccagtcaggggcttatagataaaactatctgtaataacacctggggaaacaggtggctatggagtcagcttcagcggacttaaacattcctgcctgccagatct

SEQ ID NO: 28641 - DNA, 555 bp, Homo sapiens
catggtgatacgcgcctgtaatcccagctactcaggaggctgaggcccgagaattgcttgaacccaggaagtggaggttacagccagcggagatcccagcattgcactccagcctgggtgacagagtgagactgtctcgaaaataactttttccctagatttcacaggatcttctgagtagatgattatgttatctgcatgtaaagcctgttttacatcttctttctaagctacatgccttttgtttcttttccttgcctaagtgcattggctagaacctcctgtgcaatgtgaatagaagtggtgagagtagatattcttgtctcgttccctatcttggggtgaaagcactctatcttcaccattaagtacgatgttaacagtaggtttatcttagatgccttttataaggtggaggaagttcccttcaatatctagtttgctgagagtttttatcaagaatggacattgggttttatcaaatgcttttccggtatttactgagataatcatggttttttttttttttaattttttactctgttaatatggtga

SEQ ID NO: 28642 - DNA, 756 bp, Homo sapiens
ggataacagcagtcctcatttcctttggacactggggtcagtggggagagagtttgctccgaagcacaaacagctccaatccatgctggaagagaccccaggccacaatagcccttgacacagagctctatgcagggctgtgctgcccaagacgcttgtcgtgtgctgatgaaaagggctggggagaagcaaggggcaggggaggggcagaactccacaagagggcaaaacctgctgtcagcaatgctctcgtggctgttcaagggaagtgagatacttgtactatgcatttcatttttaggactagaattctgtcttcctgcccaacttcaatataagtgtggactaaaatgcgagaaaggtgtcctgtggtctatgcaaattagaaaggacatgcagagttttccaactaggaagactgaatctgtggccccaagagaaccatctctgaagactgggtatgtggtcttttccacacatggaccacctacggatgcaatctgtaatgcatgtgcatgagaagtctgttattaagtagagtgtgaaaacatggttatggtaataggaacagcttttaaaatgcttttgtatttgggcctttcatacaaaaaagccataataccattttcatgtaatgctatacttctatactattttcatgtaatactatacttctatactattttcatgtaatactatacttctatactattttcatgtaatactatacttctatattaaagttttacccactca

SEQ ID NO: 28643 - DNA, 847 bp, Homo sapiens
ggataacagcagtcctcatttcctttggacactggggtcagtggggagagagtttgctccgaagcacaaacagctccaatccatgctggaagagaccccaggccacaatagcccttgacacagagctctatgcagggctgtgctgcccaagacgcttgtcgtgtgctgatgaaaagggctggggagaagcaaggggcaggggaggggcagaactccacaagagggcaaaacctgctgtcagcaatgctctcgtggctgttcaagggaagtgagatacttgtactatgcatttcatttttaggactagaattctgtcttcctgcccaacttcaatataagtgtggactaaaatgcgagaaaggtgtcctgtggtctatgcaaattagaaaggacatgcagagttttccaactaggaagactgaatctgtggccccaagagaaccatctctgaagactgggtatgtggtcttttccacacatggaccacctacggatgcaatctgtaatgcatgtgcatgagaagtctgttattaagtagagtgtgaaaacatggttatggtaataggaacagcttttaaaatgcttttgtatttgggcctttcatacaaaaaagccataataccattttcatgtaatgctatacttctatactattttcatgtaatactatacttctatactattttcatgtaatactatacttctatactattttcatgtaatactatacttctatattaaagttttacccactcaaaaaaagaaaaagaaaagaaaaaacgaaagaagaacaaacacagagaaagaaagaaaagaaaagagaagaccaaaaggggggggaaaaaag

SEQ ID NO: 28644 - DNA, 207 bp, Homo sapiens
ataaattgaggcttaatctaaggaaactggatgcattaatgttgtcatcatacttgataaactaagttgataaatttataaaatacaagaattctaaaaatgtttcacatgcctagaaagtagggaaatattccaaacagtgttcagtaatacaattttaaacaaaataatagaatctcttaattttaaaattgatgtataatttgc

SEQ ID NO: 28645 - DNA, 247 bp, Homo sapiens
gctactatgcacacctttacgcacataaactagtaaatctagaagagatggttaaattcctggaaaaatacaaccctcctagcttaagtcaggagaaattagataccctgaacagacctctaacaagcagcgagattgaaagggcaatttaaaaatttccaacaaaaaaagtccaggactagacagactcacaacagaattctaccagacattcaaagaagaattggtatcaatccttttgacacta

SEQ ID NO: 28646 - DNA, 314 bp, Homo sapiens
tgttttggaagtagagaaccagcctcactgagatgtgtctgccaggcagaagagcaaaccctctcgccttggttgggagactcttccttccctcccagccccccagtgttgtccctgtctgcgttccctctctgtctacaccccccgtgataacaggtgaactccagggcatacttgtttattgaattaattaattaaaaatggaagctggaccaggcgtggtggctcatgcctgtaatcccagcattttgggaggctgaggcaggtggatcacaaggtcaagagttcgagaccagcctggccaacatggtgaa

SEQ ID NO: 28647 - DNA, 348 bp, Homo sapiens
aaggtgtgcacttttactgaactggtctcaagtcagtgtacaggtatgccctggatgcctccacacttccacccactcccagggagaccaaaagccttcatacatctcaaggtagggacaaaaatggggaccatgatagctgattattcaaaataaaacaaaaagtattaaggtgaagatttttttaaatgttgcattacataatttacatgaaagcaatcctgtaacctcccctttgtggactcaggagagaactgggccgttctcctgagagaagtggggtggcttttgggagggcaagggacttcctgtaacaatgcatctcacaatatgtggaatgactattta

SEQ ID NO: 28648 - DNA, 383 bp, Homo sapiens
tatactactaattcgcggcgctcgacttttttttttttgaaacggagtctctctctgtcgcccaagctggagtgcaatggcgcgatcggctgactgcaagctctgccttccagggtcacgccattctcctgcctcaacctcccgagtagctgggactacaggggcctgccaccacgcccgggtaattttttgtatttttagtaaaaataggggttcactatgttagccaggatgccaggatgggctcgatctcctgacctcgagatccacccacataaactatctttataaaagccaggggcttgattcctaaatgtttttaaacctaaacatttatgaatttatccatgacaagatcactggttgtagtaagggttcttttg

SEQ ID NO: 28649 - DNA, 204 bp, Homo sapiens
ccaagagtgatcagaaagtaaacagaaaactccccctgccccaaatatggaccagtagagaggtagaaaggatgccagagataatcatacttgtttagaggtatcgtaattttatttgtggtgtggtttcttgttttgttttgttaatgtgggatgggcctgtaaggtggcctaagacactaccaatttatgagtttggctaag

SEQ ID NO: 28650 - DNA, 1074 bp, Homo sapiens
  misc_feature (701)..(701): n is a, c, g, or t
atgaattgggtaaataagagtgtcccacaggagttcattctgttagttttctcagatcaaccatggctagagattccaccctttgtgatgtttctgttttcctatatcttgacaatctttggcaatctgacaataattcttgtgtcacatgtggatttcaaactccacacccctatgtacttttttcttagcaatctctcactcctggacctttgctataccacaagtacagttccacaaatgctggtaaacatatgcaacaccaggaaagtaatcagttatggtggctgtgtggcccagcttttcattttcctggccttgggttccacagaatgtcttctcctggccgtcatgtgctttgataggtttgtagctatttgtcggcctctccattactcaattatcatgcaccagaggctctgcttccagttggcagctgcatcctggattagtggctttagcaattcagtattacagtccacctggacacttaagatgccactgtgtggtcacaaagaagtggatcacttcttctgtgaagtccctgctctgctcaagttgtcctgtgttgacacaacagcaaatgaggctgaactattcttcatcagtgtgctattccttctaatacccgtgacactcatccttatatcgtatgcttttattgtccaagcagtgttgagaatccagtctgctgaaggtcnacgaaaggcatttgggacatgtggctcccatctaattgtggtgtcacttttttatggtacagctatctccatgtacctgcaaccaccttcacccagctccaaagaccggggaaagatggtttctctcttctgtggaatcattgcacccatgctgaatccccttatatatacacttaggaacaaagaggtaaaggaagcctttaaaaggttggttgcaaagagtcttcttaatcaagaaataagaaatatgcaaatgataagctttgctaaagacacagtgcttacttaccttactaacttctccgcaagttgtcctatttttgtcattactatagaaaactattgtaatctccctcaaagaaaatttccttga

SEQ ID NO: 28651 - DNA, 360 bp, Homo sapiens
aacaggtgtgagccactgcacccagcctcttcttggtattttaaaatgttgttacttttactagaatgtttatgagcttcagaatctaaggtcacacgttcgtttctgtttatccagtttaagaaacagttttgctattttgtaaaacaaattgggaacccttccatcatatttgtaatctgtaataaaataacatggaattggaatagtaattttcttggaaatatgaaaaaaatagtaaaatagagaaaataattttaagtgttagtatttttatttctttattatttttagtttatcatcctgcaaaattaaaagttatatccctggatcttgttaagtcgaaattaaactgtaata

SEQ ID NO: 28652 - DNA, 506 bp, Homo sapiens
agaataagaataaagttggagaactgacactacctgacttcagtacttgacttcaatactttaaggctacagtaatcatgacagtgtagtattggtgaaggaataagtaaatagatccatagaatagaatagagaccctagaagtagatccacacaaatattgtcaatagatctttgacaaagtagcaaaggcaaaccaatggaaaaagtcttctcaacaagtggtgccagaacaactggacatccacttgaataaaaatgaatttagacatagaccttacatttttccaataagttttttcataatacttttcccctaagaccaggaataaggcaaagttgatcactttcaccattcttcttcagtatatttctggaagctaccacagtaagggaagaaaggtaaatataagcatatagattggaaagaaagaaatgaaactgtccctgtttgctgatgacatgacagtctacgcagaaaaattaaaaggaatctacaaaaaaaa

SEQ ID NO: 28653 - DNA, 235 bp, Homo sapiens
ttatggatagtctcttctaaattgagaaaaagggattttccctcctgatactgagaagctataaatattttcatttacctttactcccacctttttaattttagaatgaaaacagcccctctcatccctcccaaaattagtttttcccagtgcccatgatttctcttgggtgggaagactaagatgagtcttaactttcatcctgaatcaagtcactgcagtgatgacccagtat

SEQ ID NO: 28654 - DNA, 386 bp, Homo sapiens
tgtttttaccacaatttattcatccattcccttactgatggtctgttttaacattaatatactcttacaacctaggaatctcctgggaatctatccctaaggaataaaaagcgccagcacttaagattatatgtttactaatgtatattgtattttttggtaaggaccaaaaaaacaaacaaaaaaaagaccatcagtaagggaatggatgaataaattgtggtaaaaacataccatggctgaatggtatttccttgaaaagaatgtgtgggaacaaactccaaacttctctaggtcaaatgaggaaagcaagaggggagagagagagtgtatgtgtgtgtgtagcagtttttataaaataaagataaacccttataaaaaaaagt

SEQ ID NO: 28655 - DNA, 1327 bp, Homo sapiens
aacagaagacagtgttgaagttttccctgcttctggttgctgaagattttctagactgcttctggttgctgaagattttctagaagcactatttacacaaatatgcaaatgtgaaataaccgatctataacgtgaaggaggcagacatgagctgtactactcagtatgcaccacagaataagagtttgccgtgtaaagacaatatccccattcgtcatgctcttattttcccgtgggatatttgcatacaaatgcatgtctgttaccaaaatattgtgtaacacagacagaaaccacctgtttttgtctttccttgtttcccttaatatttcatgaattgtctagcaaaaatggtaggatgcttctgtagttcacaaatgttacatttcagagactttagaggaaaaattattttaaataactgtcaactgtttcattgctttttaaatttttcacgtgcataaccccctttagaagtaaatttttacactattttgttgtttaaaggaggcatttctacttccttgagttttgctgttgccaacctaaaacatttccctttggaacatgagttataagttattacttttcctttacatgtttacacttttataaaaatcagatttttcagtggtctctccagatattaacaagaattgttgtgtaactcaaagatttgcttttatagacttgatttcaaattcttaagttcagcctttccctatcaatcacaaatcatgtattggaaattataaatggcaaccaaaaactggcttttaaaaaatatttttggatatcattgatgtgctgtcacactatatattgagtgactttctgaacaaatttatccagaacatccatagcccaataagcttttgtctaagttgtcatcttacttactcacaaaggaggggaaaacgttattttcatagctgcttttagaaatgtagattgtaacagcctccttggacaacattgtgagtctgttttaacattaatatactcttacaacctaggaatctcctgggaatctatccctaaggaataaaaagcgccagcacttaagattatatgtttactaatgtatattgtattttttggtaaggaccaaaaaaacaaacaaaaaaaagaccatcagtaagggaatggatgaataaattgtggtaaaaacataccatggctgaatggtatttccttgaaaagaatgtgtgggaacaaactccaaacttctctaggtcaaatgaggaaagcaagaggggagagagagagtgtatgtgtgtgtgtagcagtttttataaaataaagataaacccttataaaaaaaagt

SEQ ID NO: 28656 - DNA, 688 bp, Homo sapiens
aactttaccaagtaaaaccaagccatactctttttgagccaattaagaaaattgccatttttttttaaatgtagcatttcagggtaaagacccatgaaatgacttagtggattctagactactgaaagaaaacccacctcaaagattttgttgaaagttttagtgttgtcctgaaatgcaagagggaaggtgattggtagtgagttaaaagaaaaagagaggaaaagagagtagttttgtcttcaagtaaaatgtctggttgtgccagacatttcacaagtgtgaaaggagataggagaagctcaacttgagggcgtgtagtaagttgtagaaggctcgaggggacgtggacttatttgccttggtttgcaatacctgcaaataatgagtttgaaaagaaacaatgaaatgtgttaaaaatttgaccatattagataaattttggtggatttagtcataagatggaaaaagactggtgaatcttttattacaaaatgtttctgttaaaatgggatcatcatctttgaaaggggggaggaggagtaaaagcccgattataatggtgatcaattcaagtcagtgttgactattctgtgaaatatatttggccagtggaaatgataatcagaaaagactgtaaatagatccatccaaatgatttctctgtacaaatgaatgatactattaa

SEQ ID NO: 28657 - DNA, 907 bp, Homo sapiens
agagttgacaactcttactactcttactactgttaactcatctcagctactattctggaggaacacaaagcactcggctttggtgctaacccactgggagttggccttatcttgaacagttgcaaaactcatccacagttcatcatctgctgaagagtggcttgcagatgatgaactgggaaactccataggtttccctctgaaatgttcttgcccggtatttcactcgtttgtctctcctcatgacactaagctccatgagagtaaggcctgtcctgtcttgtgtatcacaggattctcagcacttaggacaagacctggctctgatgcttcctaaatatttgttaagtgaatccgttttagtttaaaaaaacaataaaacttggtttgttgataagctatgaactcctttacccaaaccctgtcattaacatggaagatgcacaagatcatttattgtctactctagctaattggcctaggagataattcacataacaattgatttttatatactcatagccctgaaatttcctggctataaagacaaatcccttgctctatgtgtgtggtggcctggccatgccagttctcttaagtaaacagtcactctgtcgttatccacccaattctcaaaatcaagccccatgtaaatagtcatctccataaatcctgtcaagaaaattaatttttagggtacagtcattggttttattgtagtcctcctaatcctgtgtgacatagatcctttggaaagttggtgctaccagttgggaagtgccccagcaggccccgtggttgtctggctttgttgactgtctgaatgcaacacgttgacaatgggttagctgctttggttttagggttattctccttatgcctcatgcaaatgaaaagtggcaaaaaa

SEQ ID NO: 28658 - DNA, 319 bp, Homo sapiens
aaataatttttttaaaaaagaaaaagacaatagtattacccatgggacaaaatttgtactattagcaagaatcattttgtgtctcatttagaaacaatttgacttttgttccagtgtttaaactttgacaaaaatggttttgaatagatctttataacctgatgccataaatacaagattctctgataccttcatttaatatatcaatattgggcctaaaacagtattctgtaaagcttaaattggtattaactatgatcatcttgatgtctatgatagataataaacaaggtcatacataccttactaaacaaaacaa

SEQ ID NO: 28659 - DNA, 399 bp, Homo sapiens
ttagcttcccaagcttatgagtcttcccttttcttcccttttaaaaaagagaatgaactatctgttgatcctcagagtattttgtgaggtaattggacacatcttctgcacctggggtcaggtctgtcatatcagtgtaaaaaaaaatttttttccctcaaatcagtagactgaaattttatacctgtttatttggaggcttatagatggtgtgaaatagttcatctaataataaaattgggtactattaaaagcctttaatgtcttagtgattatcttggttttatttacctccagtgttaggaaggaattgtggtagggttttcaatttggggtagaatggctaggcaagttgacatttgtttatggtacaaagaaaatagatcatttgacctaaaa

SEQ ID NO: 28660 - DNA, 1461 bp, Homo sapiens
aaaaaaatattgtattgtttttaccctgatttgattatcagtattttaggttaatttgtaagagaaaaatcaagtaatgctgtaaaagctcatgtaaatcacagaaaagaactgttttaatgacttttgtttgcttttaataacatcaaggtattagaatttattaattgccatttttatgaaagtattaataaaattgtttgctacaatgatatttctgaagccacagtttgttaaatatatttgtctttccattatttttcagaaaaatataaagcagtaaccaaactgatcatttcacccagatttgagggtaagatatagctttagcctactgtttatattcaacttaactgctaaatctctgttaaaaaaaaacgctttctttagaaacatattttcaatctgtgttccttcccactggcagcccctttggagaagagtctgacagtgccaagatcaacatgctttgattcttgcccattcttttgaatcagttggattctgacataacttcagataagcaaatactaatattcagtcttaactatctgctcaaatacttttagaaacccttcagtacctctgtattccattgccagtttgcctggttacaggttagttacccacttatggagtgaattgtgatttgtatttggttcttttaaagatgaccaaaattatcaatccatgactttacccaaattattactgttgtggaaaatgaactaattgcattacggttaacttgagggcagaaatgaatgtaactgactatattgaccaatacagtgggtttaaggttcatatatttatggtaagaaaagtaaacacagaaacagagagagagagagaatataaattaagattgttgttgctttacacgtatacataggtatgctgaaggtgtgaacagtatagatagcatatgcaagtacttttagactaaatgccttatgcatctgaggagatacaccgtaggattgtgttattttatttatttatgagtactgagcacagagctttgggttccagccacttctgttatgtagacaagtggcatcaaatcaaggtttggcatcatttctagtgctcatcccattagtcactgtggtcagatgggctgaactaaaataaaatatcctgtttgtggcttcacttacctagaataactggtgacatatatcaagttcacctgataattgttaactctcaatttcagatttcctaaggatctattctttgttaatttaaaagctaatgggaactcaaatgaattttaataacttactttgtacaaaactgcccttaatctaatttggaattttattttgttttatttatttatttatttatttatttaatgtctttttagtttctactggttgataggattgtgttttaaaagggaaaatcgaggaagggaaattgtgttgtttatcttataggaaatgatggttt

SEQ ID NO: 28661 - DNA, 416 bp, Homo sapiens
actcccatcctcggttatccaaagattaggccaacagaactacatttgtaggagtcaaacagagaacaatggagataaaaatatctttttttgataaagctgttattactgataaagaccaggcttcaggtctgtggcccaaatgggcttcactcctgttagacaaactcattgagccacagatgctggaagctctaagttgccctggccctcccaatacccccaccacagggatttgcttctataaaattgatagcgtggaagagcagagcagaacagactctctgcacacaggtgcagctcaaagagaacaagaattaaggaagcatcacctaggtcatgtggcgccactcccagctcccaaactcaccaatcagagaagacactcctaggagagaggcgtgagcaactggatg

SEQ ID NO: 28662 - DNA, 982 bp, Homo sapiens
ttttaaggtcacgctgttttttgaataatagctcacaaccctcatgctgtgactcccaggctagtgttgtgtccctgaagcaacatatgcacaaacttaaatggctaaatgcaagaaatgtcaataaatgaagcagccatgggtaataagctggtgggattgttgagaactggacatttctgtcctttctaaagaagaaagtgatttgatgaactgcctggatggggtttctgctcatatgcacaatgtcagctaagaaagagctgatttgctggtgaaacatatactgactctgaagcagacaaagtttaaagaaaaaagtgggtgggagaaagtgagtcatacttggtaacattatctgaaacagtaaagaaacaggacattgcaaagtgaatccctatgcctcaatacaatgatagatttttagtttatttgttcgtgaaccatgatggaaggaagagaaggttatagaaccaagaaaatcttttgccactgttgggatgatgcctccaacaagtatatataaaatagtaagagctgttcttacaaagaaaaatattctaattggtgatgatgcctatggttgttggatggtactttttcttcccttcacatattattatggatgcattttcttagatgaatcttacctctttgggagagattttatagaattttcctattaaactagtgaaacatagaatagtactactggcctttctcctgaatgggcctttacacagtggatggcacatgctgtatgtgggaagaaaaagcaaattttctctgcagagcggttgatgcgaacaccacatctctcctgttaaaatggaatgttaggatttcataagtgtgctgcggcagtgtgttcacctttgctgcactgatgtttgttatgttgcctttccttgttcctaaatgcaaacatacatctcagtagtgttaagatggtaaatcttattaggtatattttaccacaatt

SEQ ID NO: 28663 - DNA, 350 bp, Homo sapiens
tcgacgggaggccacggcgtcggggatggggagaaagctcctcggaggataaatattagctctgcattcttgggttgggtttagtttggttttgaaagagtgttcatagaaatgaattatgaaaatcaacagaagtaatttcttaggcgtccagtggctttcttcccctttgtatgctaagatgattacctgtcacagggaaaatgtaagctgcaggttaaaatccaggaaaggcagtggggggatgggaatgacaccccatccagcccagaggcttcactccagccctcatctgcccacggacgtgtcattggcgtccggtgctacccagtgccagctgactctgccca

SEQ ID NO: 28664 - DNA, 446 bp, Homo sapiens
tggaattggagtttcactcttgttgcccaggctggagtgcaatggcccaatctcggctcaccgcaacctccgccttccaggttcaagcaattctcctgtctcagcctcccaggtagctggcattacaggcatacaccaccacgcccagctcattttgtatttttagtagagacggggtttctccacgttgaggctggtctcgaactcctgatctcaggtgatctgcccgcctcggcctcccaaagtgctgggattacaggcgtgagcctctgcaaccggccacttaggctactttaagacagatttatatcccttgcaattgagagaattttgaccaccataattagggactaatgaataagtgagtctggttagcgtttgggaggattcaaggggagaaatatgatgtgtcgtccattgtagggtagttaattactgacactgtc

SEQ ID NO: 28665 - DNA, 423 bp, Homo sapiens
tatctcagaaaaacaaaaacaaaacaaaaaacccgaacccggaaacattaaaaatagacttgtgctaagcgagtgaagtgtgatttctatacactatcaggaaatggccttcatgagaagtcctgaaaatgacctactgcccgaatcacagacacactagatgatagtgagagtccaaaggtaacttccacagacacagctaagtgattatacgactcttacaagctatgaaaagtttaagggtaaaagctttctatcttcattgtttctgaatcttaatgcccagcggaaatgccacacgggtgaactgtgcttgtgtggaacaaggctgcgaccccctaccacaccctcggctggctgttcccaggatgctgctcaccccaaccccacctccatttctgcccttctctgcttgctcagtgc

SEQ ID NO: 28666 - DNA, 247 bp, Homo sapiens
gcaattctgattaccaaagcagatgaattatacaaatctattaactgtagcataaatttgtaactaactttatgcaaatactcatactttatcaattatacttaagtacaaacattcaggtgctaattgtattttgtagttctataaatctctacagatcaaagataggagacaataaatgaacattcttaaaatgcctagtctccatgaaagaaaaagcaaaatagaaatgccaactattgctttt

SEQ ID NO: 28667 - DNA, 712 bp, Homo sapiens
aatagaatgtatatataagtatataataaggaattagctcatgcagttacagaggctgacaaattccaatatctgcagttggcaagctggagactcaggagaactgacggtgtagtctaacggctagcaggcccaagaaccaggaaaagctgattaaagttcaaaggcgggaaaaaaaaacccaatgtcccaacttgaaggcatttaggcaggaggaattccctcttatttatgagactgtcagcctttttgttctatttaggctatcaattgttttgatgaggcccacaacattagaaagggcagtgtgctttgctcagtctatcaatttcaacgttaaactcatccagtataatgtttgatcaactatctgggtatgccatggttcagtcaacttgacacataaagttaaccaatcgtcaaaaccccctacttttggtttcttgataaataaaataatatttatcttctgttttagtggaataaaggtatggaaaacgctttgatcagtttctgtcttttgttgatctggaattgcagtatcattgtgattaaagaaactaaaatacagtgtaattaggggatcacatccaaattttgcaaaccctttggtaatgtttagaatatatttgattaattcattttcaattcaacaaacacctgttaaatactaactatatgtcagctaggtacatgttatatgtcaatgaaa

SEQ ID NO: 28668 - DNA, 379 bp, Homo sapiens
cagagtaagataatgtctcaaaaaaaaaaaaaaaaagtagaattcccaagcagataacaatttaaatgttattaacagggcaacaaattatcaggtttatctttggtttatatggtttggtttgggtctatcattttattattgtaattatactagctttttttttgttcttctgcattttaacaaattatttgaatattattttagaattaaaatattttactattgcctttttagccattcttctttgcattatttatttagtggttactctagggattacaatacatgtctttaacttttcacagcccacttcatggaccacttcatgaaaaatgtagaagcttgcacaataaggcaactatataggctcatatcc

SEQ ID NO: 28669 - DNA, 918 bp, Homo sapiens
ttcttccaagccagctcgtcatattgggcccggatgtctgccatgattttggcaaggtcctgagatttggggcctctacctccacggtcaactcagagctggcaatctgggcttgtaggccttttacttcctcttcgtggttcttcttcatgaagagcagctcctccttgagggcctcgatctctgtctccagctgcagccgagtgacattggtgtcatcaatttccttgcaaagcccatggatgttgttctccacagactggcacatggccagctctgtctcatacttgactctaaagtcatcagcagcaagacaggcactgtcgatctgcagaacggtgcgggcattgtccacagtatttgcagagatctgagccctcaggtcctcgatggtcttgaagtaatggctccagtctctgacctgggatcccttcttctccagatgctcccggattttgctctccagcttctggttctcagtctccaggctcctcactctgcccaggtaggaggccaggcggtcgttcaggctttgcatggtctccttcttgttctggatgcctcccattcctgccagacccccggccatccccgtggccaggccccagaccccatgccaccctggaagctggtggagcaggacacggagatccaggaaccagaacccccagcacctgcatagacgcttgcctcactgctgaacagccaggggccgtagctgggcgcctggacagagcctagggactgatagttggtggaaaaggtggagccagtggtgaagctcatgctctccggcgggagagtgagaggacaggactcgggctttgccaacgaccaagatgacaatactctctcaattgatctacaagttaaatggaatccttattaaaatcccagctggcttaaattaagaaagaa

SEQ ID NO: 28670 - DNA, 370 bp, Homo sapiens
agatgtccccatgaagggggctgtctccttctgtcatccttggggcccaggaaagtctaagtcatgactctggctggctgaggttcagatctcagatctgccaaggctgggaaagtcacccctctgagcctcagtttccccatctgtactgtggaaggcacaaagttgcctaccccatggagatgctgtaacaatacagaagcaaaagtacctgatttggtccgggcatggtggtccatgcctataatcccagcgacttgcgaggctgaggcacaagaatcacttgagtccgggaggcggaggttgcagtgagctgagatcttgccactgtactccagcctgggagacagagtgagactccgtctttttt

SEQ ID NO: 28671 - DNA, 427 bp, Homo sapiens
  misc_feature (6)..(6): n is a, c, g, or t
agctcngtacctgccaaagcgtagtacccaactttctggtcagtcaccttctacaccttttagtttcccagcttgcttgtccaaggactcccacaccaccacttattttttagccagtcaaatttagcagtgggagggttctatgacacccccactctttaatctctttgggtactacgctttggcatgccaaagcgtagtacccaacacgacagttttttgacctgagtggtatcagaaataggctttactataaccaggtaaatacctgaacaaaggaaccctcatcaggaaggcactgtcactcttggcagcagcaatcccacaggaaaggagttcccctggcagagacagagagacagctactcatctgacaaaactctctcagtctgtcctttgccttgggtactacgctttggcagttagt

SEQ ID NO: 28672 - DNA, 381 bp, Homo sapiens
ctagtagagacgggggtttcaccatgttggtcaggctggtcttgaactcctgacctcgtgatccacccgcctcggcctcccaaagtgctgggattacaggcatgagccaccgcgccccgcctgacctacagaaatttcaaacggcaaccatggacacccaacacgacagttttttgacctgagtggtatcagaaataggctttactataaccaggtaaatacctgaacaaaggaaccctcatcaggaaggcactgtcactcttggcagcagcaatcccacaggaaaggagttcccctggcagagacagagagacagctactcatctgacaaaactctctcagtctgtcctttgccttgggtactacgctttggcagttagt

SEQ ID NO: 28673 - DNA, 2004 bp, Homo sapiens
cgcccttcccccaccaccagcggcgagtgggtgacagagcccccgtctccgcgcgtcttcgccgccctgcgccgtgacccgctgtggcactgggccacgagtggaggctgcgcccctccagttctgccttcatagttctctgcctttgcccaaaactgcagaaaatgaacaaatcccagggatcagtttcattcacggatgtgactgtggactttacccaggaggaatgggaacaactggacccctctcagaggatcctatacatggatgtgatgctggagaattatagcaacttactttcagtggaagtgtggaaggctgatgaccagatggagagagaccacagaaacccagacgagcaggcgaggcaatttttaattcttaagaaccaaaccccaattgaggaaagaggcgatctctttggaaaagcacttaatctgaacacagactttgtttctttaagacaagtaccttataaatatgacttatatgaaaaaactttgaaatataattcagacttgcttaatagtaatagaagctatgcaggaaagcagactgatgagtgtaatgaatttggaaaagcacttctctacctgaagcaagagaaaacccacagtggagtagaatattctgaatacaataaaagtggaaaagccctcagccataaagcagccatttttaaacatcagaaaataaaaaacttggttcaacctttcatttgtacttactgtgacaaggctttctcctttaagtcactcctcattagtcataagagaatacatactggagaaaagccatatgaatgcaatgtatgtaagaaaaccttctcccataaggccaacctcatcaaacatcagagaattcacactggggagaaacctttcgagtgtccggaatgtggaaaagctttcacccaccagtcaaacctcattgtacaccagagagcacatatggagaagaagccctatgagtgcagtgaatgtggaaagacatttgcccaaaagtttgaactcaccacacaccagagaattcatacaggagagcgaccctatgagtgtaacgaatgtgcaaaaaccttctttaagaagtcaaaccttatcatacatcagaagattcacacgggggagaaacgctatgagtgcagtgaatgtggaaaatcctttatccagaaactcacagctcatcatacacatgagaactcatacaggagagaaaccctatgaatgtactgagtgcggcaaaactttcagccagaggtcaactcttagattacacttgcgaatccacacaggagagaaaccatatgagtgttccgaatgtgggaaggcctttagcaggaagtcccgactcagtgtccatcagagagttcacatcggggagaaaccctgaaactccagccaggtcttactgtggaaaactcctgccagaactcttcaagcgggtgaaaaacctcatgacagtattgagggaacatgggaattcatactgagatgcaatctctcaactcaaaaatgtattaaaaataggatcccatgagaacattatactggaagttacatgtgatacccagctaaagaatacatatcagaatatatccagttgtaaatagccatacccagttgtactacaatgagctttttaaaatcttgaatgaattgagtattctagacagcagcataagaaatatacaaacagtatcctatgaatttagtggttttatgtggatatgccacaaaacacaagtggtatgctttagatctgcacatgtgaatttagcataatcactgggaatttgaaattcttgtcctctgtgataattaggacataacaagattttccatactaaacatcacatgtgtttttcagtatctctgcaatccagtatgcattccaaatgaaatgtgtaacatttaaagtagcatggaacctacgtctttccctactgcttgctggcatatatcagttggtatgaacattgttcttgagctgcctcttaggaaacag

SEQ ID NO: 28674 - DNA, 466 bp, Homo sapiens
tattgaattatttcactagcagcatcacaatattagtttcacagaatctcaaaaattaatatatttgaatataggtttaacatttcaaagatttttcaaaattctctcttcagctattttttaaaaatagtttttcaaataacttacaaaatgatatacatgtgaaaaactaggtgaaggtgctgggtgtggtggctcacacctggaatcccagcatttgggaggctgaggcgggcggatcacctgaggttgggagttcaagaccagcctggccaacaaggagaaaccccgtttctactaaaaatacaaaaattagccaggtgtgatggtggtgcatgcctgtaatcccagctacttgggaggctgaggcaggagaatcacttgaacccaggaagcggaggttgcggtgagctgagatcgcgccattgcacttgagcctggccaacaagactgaaactccatctaa

SEQ ID NO: 28675 - DNA, 298 bp, Homo sapiens
aatgtttttatttttagtagagacggggtttcaccatgtttgtcaggctgcttttgaactcctgacctcaagtgatccacttgcctcggcctcccaaagtgctgagattacaggtttgagccaccacgcccggccataaacatttttctttttggacaaaaataacattattatagacattttagaaaatacaaaaaaaaagaaaagcaaaattaaaacatattcctgagtgaacattttggtttatagtttttgagagttttccgtgtggataaaactcggtggaaaacaaaaacct

SEQ ID NO: 28676 - DNA, 995 bp, Homo sapiens
cccatgcctcaattggtttcttttagggagctacaaatttacgtgttcactggtgattgatcttttcatccagcacaatggacagaagtctaaggaacgtccttgtggtttcctttgggttcctgcttctctttacagcctatggaggtctgcagagcctgcagagcagcctgtacagcgaggagggcctgggtgtcacagcgctcagcaccctctatggaggcatgctcctgtcctccatgttcctcccaccgctcctcatcgagaggctgggctgcaaggggaccatcatcctctccatgtgtggctacgtggccttctccgtgggcaacttcttcgccagctggtacactttgatccccacctccatactgctgggactcggggccgccccgctgtggtctgcacagtgcacatacctcacgatcacgggaaacacacatgcagagaaggcgggaaagcgtggcaaagacatggtgaaccagtattttggcatcttcttcctcatattccagtcatccggtgtgtggggcaacttgatctcatcgctggtatttggccagactcccagccaagagacccttccagaagagcagctcacgtcctgtggggccagtgactgcctgatggccaccacaaccaccaacagcacccagaggccctcccagcagctggtctacaccctcctgggcatctacactggtacgagctccatcggcccagggcagggtccctagcaaagcagagccaagcctccttcctgggctgacaaagactgtctctcccaatgtaaaagtaatctctcttcttctgaaatatccttgcaaaatgtattggtctggattatatgcaggcggtgttcttatgaatcaaatgcagtacacccgtgctgtctaacagaggatcctggggtgatgagattgttatacatctccagagcccaacacagcagccattaagcactgtggttgtttacatcttaactgattaaagtt

SEQ ID NO: 28677 - DNA, 483 bp, Homo sapiens
ttgcattggcaagaggtgatcatactgctctcctactcctgccctttcctcctactccagctgaaaatacttggtgcaaatgtccttttataggagactttgaccccagggtatagaaaaggaaaggaaaaggtcacatatatatatgtcttgtctataactgaaacctaataccagcacaaaagcctaaaaggaccgatttttagagggcgttggcaggaaactctttgctctgctatcatctgttttaagctacttttatacatgatttattttttcagcttctactctgctactattcaactgcaaatgcaatttgttatattgtacacttcaacaccttgaacagcatcctaattattattgaaatgtattacgagttcgtaaagaaaacagcattttgtttcttcagtcatctacttaggatgaaagtgttatttagaaaacaataaatgggaaaaatgatacattaaaaaaaaaaaa

SEQ ID NO: 28678 - DNA, 759 bp, Homo sapiens
aactatatcagaggtcatcaagctacagcccatgggccaggtattcatttacatagtctatggctccttacctctataactgaagagtttaatatacagccataaaggttaaacatttactatctagccctttacagaaaaacttggccaacccctgactacatcaaatctttgccctctagtttttgttgagtgcagccaacattgagaacgtttactttggagcaatctccaattaaccaaagtgatacaaacacagtgatttgggaatgccttcaattacaatgcaatacttaaattttaatactcttgtaggagaaaaagcaactgtataaatgaatgtagagtgaatttctgcaatatttcaaacctgtatcagagaattacactgtgggaaaactaccattgtaataagtgtagcaaaatcttcttagatatctgaaaagtcatactggatggaatccagtgtccaatcttttggcatccctgggccacattggaagaattgtcttgggccacatataaaatacgtgaacactaatgatagctatcagttattgtggctcaagaaaattcttcttctggtgtagcccagggaagccaaaagattggacacctctgctttagagggagatgtaactatcaatgaattattatgttcattttttcccttagccagagaaaggccaaaagacattcccgtcagggtattaagaaatacattggtgaggagtttaccaccatccttggacaactctg

SEQ ID NO: 28679 - DNA, 646 bp, Homo sapiens
cctctcccaagattatacagctaccagttcaattcagcaaggcatatgtaaggctattaatattcaggacagaaaatttccactatgccacgttgctttagcaacataaaaaaagatggcaagcagggctaaattgactcagacttgaaagcaaaccaaataatcagaaaaccagcaggaatccgtgctggcatgatgtagtagtacagcctccttcatgggaagtgaggtagaatcacttgtgatgaagaagccaggatctgtagtcagattggtccaattcaccactgcttttgagaaatggaaactggataaattatttcgtagccttgggattcttatgtggaaaatagtggtaggagctattttaaatagtagggtcattataaagattacagcacataatctatgcaaaacacttagccctgcatttgacatataattagtactcaaataaatggtactaaaagcataacgatacattttatatttgttgatattgtcactaataaatatttcattctgtgcattctagttgttgacgagtcagttgacgtagcaaggtcataattgtggaaggtaatttcagtatttgtgagcatttgtattgacatgcttgtgtgcttattgcattagggaaaaagaa

SEQ ID NO: 28680 - DNA, 539 bp, Homo sapiens
tactaaacgtataagcaggacaaaattctggtataaaagtgacacactttggttgttggaaatgaacacaaattttagacttatgtgggattaaaggtaaaaatcttaccagtcatactttagataatttttagaagtcaaaggtggggtggatatttacttcttagtttaaacacagcattttaaaaatattttaacaagcaagcgtaactttttttttttaagatagaagaagcaggaaggatcacttaagcccaagagttccaggctgcagtgccacatcgtgcctgtcagtagccacttcagcctgggcaacatagcaagaccctcatgtctaaaattaaaaataaaatttaaaaaaaagaactacttctagttggttaataatcatgatagtttacactgtataatactttgagatacccaagtacaaagctttacatttgcctaaaaattccatttttgtctggtgttccatttttacttccaaaatcctaggaattaaagcacttattttccctacctccttccaactgaaa

SEQ ID NO: 28681 - DNA, 356 bp, Homo sapiens
tactaaacgtataagcaggacaaaattctggtataaaagtgacacactttggttgttggaaatgaacacaaattttagacttatgtgggattaaaggtaaaaatcttaccagtcatactttagataatttttagaagtcaaaggtggggtggatatttacttcttagtttaaacacagcattttaaaaatattttaacaagcaagcgtaactttttttttttaagatagaagaagcaggaaggatcacttaagcccaagagttccaggctgcagtgccacatcgtgcctgtcagtagccacttcagcctgggcaacatagcaagaccctcatgtctaaaattaaaaataaaattta

SEQ ID NO: 28682 - DNA, 381 bp, Homo sapiens
aaaactgttcacttgaattcctccagaagtaaaaggtatcttttagagtaaacgacgattgtcagaaacaaaaagaatgctagcgaaagactttgtccatatgtctattctagcactaccatgctacattgtaatttctgtttatgagtctattgaggtcaattaactgggcactctgtgaggtctagaatgatatttaatgtacttttatctccctgttggctattagagtgcctgaaacatagtagatcctcatattcaggaatgaaaggaaggtagttcatagggagaggaatagcaagataagcaaatataaattcggacacctatttgactagaattgaaagactgtagaggtcaaagagttgccaatcttatggg

SEQ ID NO: 28683 - DNA, 1006 bp, Homo sapiens
ggccagggggcggggctgggggctcggcccgccttgccctgaggcgctgggtgccttccagttggctgcgaccagcggtgacttacaagttggctgctgtcgcctgcgcatcggcgggccgggaggctgagcagtactgttgagagcggtgtgaggtgcttggtagcgcgccgtagctgcttccacgtccttgcttcacctcaggtaaagagagaagtaatggaaggcctgtctgatgttgcttcttttgcaactaaacttaaaaacactctcatccagtaccatagcattgaagaagataagtggcgagttgctaagaaaacgaaagatgtaactgtttggagaaaaccctcagaagaatttaatggatatctctacaaagcccaaggtgttatagatgaccttgtctatagtataatagaccatatacgcccagggccttgtcgtttggattgggacagcttgatgacttctttggatattctggagaactttgaagagaattgctgtgtgatgcgttacactactgctggtcagctttggaatataatttccccaagagaatttgttgatttctcctatactgtgggctataaagaagggcttttatcttgtggtaataatctcaacatgttatgctttttttcagtatggtttaaatatttgtgttttcttggctggatgtctctttccttgtgagatatattttcaactctgactctgtaatcactaacattttttgcaagtgctaaactctagggagtaaaatagcaatatcaaaagagttttgaaacccttctgataagtttttgttcccagttacacagtatcctctaggtcagaggtagccaatgtggatcacatgactgcctctaagaaagggttctagtaaatggatttccttctaagccactctcagaaaacagtttcttggtcatacacagagaagtactagatttggtgtgtcttagaatattcttccttccttgagctgtgttgtattttt

SEQ ID NO: 28684 - DNA, 879 bp, Homo sapiens
ggccagggggcggggctgggggctcggcccgccttgccctgaggcgctgggtgccttccagttggctgcgaccagcggtgacttacaagttggctgctgtcgcctgcgcatcggcgggccgggaggctgagcagtactgttgagagcggtgtgaggtgcttggtagcgcgccgtagctgcttccacgtccttgcttcacctcaggtaaagagagaagtaatggaaggcctgtctgatgttgcttcttttgcaactaaacttaaaaacactctcatccagtaccatagcattgaagaagataagtggcgagttgctaagaaaacgaaagatgtaactgtttggagaaaaccctcagaagaatttaatggatatctaattgctgtgtgatgcgttacactactgctggtcagctttggaatataatttccccaagagaatttgttgatttctcctatactgtgggctataaagaagggcttttatcttgtggtaataatctcaacatgttatgctttttttcagtatggtttaaatatttgtgttttcttggctggatgtctctttccttgtgagatatattttcaactctgactctgtaatcactaacattttttgcaagtgctaaactctagggagtaaaatagcaatatcaaaagagttttgaaacccttctgataagtttttgttcccagttacacagtatcctctaggtcagaggtagccaatgtggatcacatgactgcctctaagaaagggttctagtaaatggatttccttctaagccactctcagaaaacagtttcttggtcatacacagagaagtactagatttggtgtgtcttagaatattcttccttccttgagctgtgttgtattttt

SEQ ID NO: 28685 - DNA, 908 bp, Homo sapiens
ggccagggggcggggctgggggctcggcccgccttgccctgaggcgctgggtgccttccagttggctgcgaccagcggtgacttacaagttggctgctgtcgcctgcgcatcggcgggccgggaggctgagcagtactgttgagagcggtgtgaggtgcttggtagcgcgccgtagctgcttccacgtccttgcttcacctcaggtaaagagagaagtaatggaaggcctgtctgatgttgcttcttttgcaactaaacttaaaaacactctcatccagtaccatagcattgaagaagataagtggcgagttgctaagaaaacgaaagatgtaactgtttggagaaaaccctcagaagaatttaatggatatctagtcttaaagggatatgtgatcaaaagagaattgctgtgtgatgcgttacactactgctggtcagctttggaatataatttccccaagagaatttgttgatttctcctatactgtgggctataaagaagggcttttatcttgtggtaataatctcaacatgttatgctttttttcagtatggtttaaatatttgtgttttcttggctggatgtctctttccttgtgagatatattttcaactctgactctgtaatcactaacattttttgcaagtgctaaactctagggagtaaaatagcaatatcaaaagagttttgaaacccttctgataagtttttgttcccagttacacagtatcctctaggtcagaggtagccaatgtggatcacatgactgcctctaagaaagggttctagtaaatggatttccttctaagccactctcagaaaacagtttcttggtcatacacagagaagtactagatttggtgtgtcttagaatattcttccttccttgagctgtgttgtattttt

SEQ ID NO: 28686 - DNA, 445 bp, Homo sapiens
ggccagggggcggggctgggggctcggcccgccttgccctgaggcgctgggtgccttccagttggctgcgaccagcggtgacttacaagttggctgctgtcgcctgcgcatcggcgggccgggaggctgagcagtactgttgagagcggtgtgaggtgcttggtagcgcgccgtagctgcttccacgtccttgcttcacctcaggtaaagaaagatgtaactgtttggagaaaaccctcagaagaatttaatggatatctaattgctgtgtgatgcgttacactactgctggtcagctttggaatataatttccccaagagaatttgttgatttctcctatactgtgggctataaagaagggcttttatcttgtggaataagtcttgactgggatgaaaagagaccagaatttgttcgaggatataaccatccctgtggttggtt

SEQ ID NO: 28687 - DNA, 691 bp, Homo sapiens
cggaccttatattcttcttattggtttggagaaaacctcagaagaattaatggatatctctacaaagcccaaggtgttatagatgaccttgtctatagtataatagaccatatacgcccagggccttgtcgtttggattgggacagcttgatgacttctttggatattctggagaactttgaagagaattgctgtgtgatgcgttacactactgctggtcagctttggaatataatttccccaagagaatttgttgatttctcctatactgtgggctataaagaagggcttttatcttgtggtaataatctcaacatgttatgctttttttcagtatggtttaaatatttgtgttttcttggctggatgtctctttccttgtgagatatattttcaactctgactctgtaatcactaacattttttgcaagtgctaaactctagggagtaaaatagcaatatcaaaagagttttgaaacccttctgataagtttttgttcccagttacacagtatcctctaggtcagaggtagccaatgtggatcacatgactgcctctaagaaagggttctagtaaatggatttccttctaagccactctcagaaaacagtttcttggtcatacacagagaagtactagatttggtgtgtcttagaatattcttccttccttgagctgtgttgtattttt

SEQ ID NO: 28688 - DNA, 902 bp, Homo sapiens
ccaaatccctgtgacacaaattttctatataacaaacctgcacatgtatccctgagcctaaaacaaaaattttttaaaaagaagaaatctaactactttaaaatgttttataaagccttgcaatggctgattcctgcctatttttctacatcataccatgttattttctttcctcacacacgccacattcctggtacactagccacatttcagttcctcaaacccactctttttcttgaccttgaggcttttaattcgatgtttcttaacagtattctgccaggaagtattccttctgtactatttactgggaaaactccccttccttcaagggactgctgtcctcttaaatgtgggtttcctcaataggaccttccatggcccattcctcatgatcttccccacccctggcccactttggcaacatcccggattctaggatacttaaattgcattattgtcaggtcattaataaatacagggaccacaagggccctcaagatgtatgttcccttattaggaaccccaaaacaacaaacccaacagatattttaactatgaaagtccagtacagatttcaaaataattttgaataatcaaatttaatataaagagttatagtttcacaaagactatatgctatattttatcaccttaagtttctgtgagaaataggctttgttaatatgacgaaactctaaaattaatggattaaaagacacaatttctgtgaaaccccatctctacccaaaatcctcaaattagccaggcatggtggctcatgcatgtagtcctagttacttggggggctgaggcaggaggattgcttgagcccaggaggcggatattgcagtgagccgagattgcaccattgcactccaacctgggtgacacagtgagac

SEQ ID NO: 28689 - DNA, 519 bp, Homo sapiens
ctgatcatcagcccagaggtaaaccccggcatctttgggcttctcaccagttttggtttcctttccatctactgggctattccttcattttctacttcatcatcttcttaactcctcctactggatggggtgattatatggctttagtgcttagccattttccctattcatccagaagccctggcatcagtctggatgatttgatgtatcaaagctaatttccttattctctgctgtgatcctatcactgtggtttaaaataaagagcactggaccaagagttctagtcctgactttgcctttcttatccctatgatctcttcatgggctgggtatcaagtttactcatatgtaaaatgaagagactttattctcctcccccaccacagggattttgtgaaatctgcatgaaaacaccatagaagaggctgggtgcggtggctcacgcctgtaatcccagcactttgggaggccgaggcaggcggatcatgagaccaggagttcgagaccagcctggcc

SEQ ID NO: 28690 - DNA, 442 bp, Homo sapiens
ctcacagagtcgacattctgatggagggtgctaggagaagagagggaaagacaataaacatgtaaacaaataaacatggcatatcaaacgtcagattatgacttccacttctggctgtgaaaagccatcttgtagctgattaaccatcccacctaaaacactacatctgaaacataaagaaaacactggggagcagccaacttaggcaggcgggacttgatgggttacagtgctccagacagaaaacccagggaggaagctccacgattaccctggtttttccccgagcacattttccaaactgcagcatgcatgaaaagacttgaagctgaaagtggcagtcttagcaagtaaagggacaacagccagtgtgtagagctatcaaagtatcttgaacttgagggacaaaaccttagaaagtgaggaatcacaaacaaacaac

SEQ ID NO: 28691 - DNA, 360 bp, Homo sapiens
tccacctcctgggttcaagcaattctcctgcctcagcctcctgagcagctgggattacaggtgtgcaccaccacactggctaattttgtatttttagtagagatgggttttcatcatgttgttgttggtcaggctggtcttgaactcctgacctcaggacatctacccacctcggcctcccaacgtgctgggattacaggcataagccaccacacccaaccagaataatagatttcaaactgacagctctttatacttttcaaagcactcttactattcttttcgatttgatcctcttaaggcaaaaatgattaccttttttacaaatgaacaaactaagactcagagaggctaggtggc

SEQ ID NO: 28692 - DNA, 338 bp, Homo sapiens
ctatgtcacgctactgcactccagcctcggcaacagagcgagaccctgtctcctaagagggggtgaggagggagaaaaacaaaaacaaaaacacactgatacgtaaaatggaaaatgcctcccatctcttccagctccgccagtcacttctctttagaagtctttggtaactgctccagatttagaggtagctcaccccttccttgcaaaccagctccactcacaagaagaatcccgaattccatggaggcttcctggccagcctggaattccaggtaccttatgggattctggagcagtcctcagtacagggcaagatttttaaagtagatcaggca

SEQ ID NO: 28693 - DNA, 412 bp, Homo sapiens
gaatgtaaaacagttctcttgctaaaacctttggcctcctccagtgactgctctctaaatactccattttctgagagtgagaatagttaatgctcaaagatgctaaacaacagctgcagtctgcatcttctctctagagttgctgctcagcattgaatccagcctctaggctggaactcaagtaacctcgctgctttgaaaggtagctctggggaatattaaaaagtcaccaaacctcctgggactcatatgcagagacactttgtatatggaagcaaacaggatgaaaaaggctgcacagagcatgccatgcttctgacacattgtgggctccaatgtatggtctctgactgctatggtttcatctgagaggaaagcaaagaagagaaataaatgtttgttgagtgaatga

SEQ ID NO: 28694 - DNA, 349 bp, Homo sapiens
  misc_feature (187)..(187): n is a, c, g, or t
  misc_feature (189)..(189): n is a, c, g, or t
gaaattcctactgatattaatctaaaaattaaaaaagaaataggtagcaagaagagtagaagtatcaaaacagttggctttttttgcttttgttttttgagaaggaattttccttgttccctcccatgcctagctggattgcagagttaagtttatgattatgaaataaaaactaaataacaaaaananaaaaaaaaaaaaaaagaaaaatgcacagattttgatagaattaggaaagcactttgaccacatatatgttaaacttgatgataatgagatagagttcagctgtgtttaaagaacaaactatggagattacaataattcaaccagtgggaaatgggggaaa

SEQ ID NO: 28695 - DNA, 1578 bp, Homo sapiens
cagtgcacatcatggatcctggttgcctgtactatggtgtccaacctgtggggactccaggagcccccgacagaagagagagcagaggtgtttgtcagggcagggctgaacacaggctcagcagacaggatctggaggcacgggaggatgctggctatgccagccttgagctacctggagactccaccctcttatcgcccaccctggaaacagaggagaccagtgatgacctcatttcaccctatgccagcttctccttcacggcagaccgcctcacgcccctgctcagtggctggctagacaagctctcccctcagggaaactatgtcttccagagacgctttgtgcagttcaatgggaggagtctgatgtactttggcagtgacaaggaccccttccctaagggtgtgatacctttgactgccattgagatgacccgcagcagcaaggacaacaagttccaggtcatcaccggccagagggtgttcgtgttccgcacagagagcgaggctcagcgggacatgtggtgctccacgctgcagtcctgtctgaaggagcagcgcctcctgggccacccccggcccccccaaccaccccgacccctccgcacgggcatgctggagctgcgtggacacaaggccaaggtgtttgctgccttgagccctggagagctggcactgtacaagagtgagcaggccttctctctgggcatcgggatctgcttcatcgaactgcagggctgcagcgtccgggagaccaagagtcgaagctttgacctgctcacaccccatcgctgcttcagcttcacagccgagtctgggggtgctcggcagagctgggcggccgctctgcaggaagcagtaaccgagaccctgtctgactacgaggtggctgagaagatctggtctaatcgggccaaccggcagtgtgcggactgtgggtcctcccgcccagattgggctgctgtcaatttgggggtggtcatctgcaagcagtgtgcaggtcagcaccgggccctgggttctgggatctccaaggtgcagagcctgaagctggacacgagtgtctggagtaatgagatagtacagttattcattgtcctgggaaatgatcgtgccaaccgcttctgggcagggaccctacccccaggtgagggactacatccagatgcgacccctggcccccggggagagttcatctcccgaaagtaccgtctgggtctcttccggaagccccaccctcagtacccagatcatagccagcttctccaggcactgtgtgcagctgtggcaagacccaacctgctgaagaacatgacccagctcctctgtgttgaggcctttgaaggcgaggagccctggttccccccagcccctgatggcagctgccctggcctcttgccctcagacccctcccctggtgtgtacaatgaggtggtggtgcgtgctacttacagcggcttcctgtactgcagtcccgtcagcaacaaagctggaccctcaccccctcgcaggggccgggatgctcccccgcgcctttggtgtgtgctgggagcagctctggaaatgtttgcatcgg

SEQ ID NO: 28696 - DNA, 403 bp, Homo sapiens
ttacatgggatcatatatgggcaaagggcttggcacagaataaatatctggtaaactggaactatgacagtgggggcagaggtctgctgctccctgactatctccctctgccttagctcccccgcgcctttggtgtgtgctgggagcagctctggaaatgtttgcatcggaaaacagccctgaacccctcagcctcatacagccccaggatattgtatgtctgggtgtgagccccccacccactgacccaggtgacaggtaatagcccttctgtgaccactgagcttcccccttttctcttcccaacctccagcctgacagccctctcattggtcccatcctcctccctgacctcatcttctctccaggttccccttttcctttgagctcatcctcgctgggg

SEQ ID NO: 28697 - DNA, 602 bp, Homo sapiens
gtatttgcaatcttggcggggagggtgggattgctgcagagaagtcggcacgtgttaaagctaaaattttcctttgttgcagttttattaaccatagcctatgccatagtgccacctgttgagtgctaccgatgggcattctggctggaagaaccacttgtccatagtgttaatagtgctctctattaatggtgttagattttaaaggtctcacaatgattgaagctcttcagagggtgagtgctccttatctgacatgcttgggaccagaagtgttttggatttgggagtttttttgaattttcaaatatctgcacgtacttactggttgagcaaccctaaactgaaaaatctgaaatccaaaatgctccaacgagatgacctttgagtgccaggtcggtgctcaaaagggttctgattttggagcccttcagattttggatttttggattaggaatggtcaacctgaatagccatactgtaactctaattgctttatttatttatttatttatttactgagacagagtctcgctctattaccaggctggagtgcagtggtgtgatctcggctcactgcaacctccaactcccgagttcaa

SEQ ID NO: 28698 - DNA, 414 bp, Homo sapiens
atttatgaaaatataaatctattttgactatgacttatacatgacaattgttgccatcaagtaggcaactgatgccctttacagtgtttagaacaaaactagtcctttatacaattttcatgaaaatgttaggtttctgtttgatcagcaggtgctgttgagatgaaagccatgtgtaaattttcagaaggccaaaagtgtcaattcagaaaaggaaagtgataagagaaaatgcaatcagttttcctgttttcaatttgtgcgggatttgaagagctgttttgttaaactgctacatctgctccaatatgaatattgaactacttccactaaaaataacaacctataatttggaagctactgcagtcttttgttaatgtgagtgggttatttaaaaacaaaaaaacaaaaaaa

SEQ ID NO: 28699 - DNA, 362 bp, Homo sapiens
ggaaaataaaacacagaaaaaaaaatcatcttattataagaacatactcagagctcaattactaaattacacttaaaattttctgctttaaatacgtgtcaaactatcaaacaaggcagagtggtttccagaaaatacaaaggcaaagtagacttctgtaaaaataactaaactattaatttataatgtatgatataataataaaatgaattttaagtaactgaagtatttactacctaataaaaattaggatatccaactatgaactaagttgcttaaaataatgtatgtgaataaattataagacaaattataaattaataacttctgttaatttactctgtgaacagatatatgagtac

SEQ ID NO: 28700 - DNA, 112 bp, Homo sapiens
taggccctggtggcccacttcagcgcccaggttttttgcctgctctggctggaggggcccctttctctttcttctgggcctttaatttgatgagtatacagtgtcacttcta

SEQ ID NO: 28701 - DNA, 353 bp, Homo sapiens
ctgtgtgtcacttctgctcatactccagaagtcagtcacatggccaccataattgccacagaagctggggaagttgaacagcacagaaagggaaatgggtttgataaataatttgccagtctttgccacataacctaaaaaataaagtatcaaggaaacaatacaatatatgtcccctgggaatttttgctgatgatgtgaaaacccctttgtcatcagagaattctcttattctcttttcctgttgcctctcccttttgttttatttctttctcctttttttttttttcagacaggatctagctctctcacccagactggaatgtggagtgcagtggcaccatcataactca

SEQ ID NO: 28702 - DNA, 445 bp, Homo sapiens
ggttcacacctgtaaccccagctactcaggatgctgagccggaagattgctagagcccagaggtttgaggctgcagtgagctatgactgcaccactgcactccagcctgggtgacagagtaagtaagaccttgtctctttaaaaaaaaaaaaaaaaaattgaactgagtgtcacagcctcaactttgccaccaatatttatagtgccttttaggagccagactctgggccaggactgggatgctacaaagaggaatgactctggctgggttaagggatggtatgggggagcaggaggcagggaaggaggaacacaatgagtggatgctgcctcccatgggctaaagaagccggggagggagtgctggccccagcctatcaagggagggacatttccggagggctccctggaggaggaggatacctgggctaagaaggttccacca

SEQ ID NO: 28703 - DNA, 794 bp, Homo sapiens
tcgcagcaaggtgaccaacagtgtgcaagtaataacccacgtgaaggaaaagctgcacttcatggacatggagaacgcgtgcaaaaagacacagctggcagaaatcgaggcccaggccgccctaggaagagacatcctgaccaagacgaagcaagcccgagaggggctgcggacggacaacatcagactgaatcagaagtgcggccttctaggcaaggactcacttcttcgggacttggaagaaaaggtggacaagaccgaactgcttcaccggcgcctggaatccctgaagcgccaccacgctagcctcactttgtcctgcagaggcgtgaggcagaagatcagggaggccaaagcctttctcccttcttgaccagatcgatgagaagagtctgcaaaacacttcatcctcaggacgtgctgtcctgctttattttaccttcgttgctattaaaaaggcctgtgtcatttgggacgggactctattttgtatttatctcaaaacgttttagcttccaaatcagtgctgagcccaaacctgggttaggagttttatctgggattgagcaaaaataggtccagaaaagcaaacaaagggtgatttaatgtaactgacttctcatgaaaaactgtcaaaagtctcaagtctgagcaattctataatttcagtgatgtaatactaaagagtactgttcctctttcatatgtaggagggtttaaaagttcagcgaatgggcaaggtacaaaaaaaccctgtgcattaagctaattattaaattctttggatttattaa

SEQ ID NO: 28704 - DNA, 284 bp, Homo sapiens
gccagggttcttctttttaaatgcatgctggctctacacagtgttgctttgaactaaaactgctctaaaattctctctaaaaaaaaaaaaaaaaagcatgctgtgtaagcatgcttaaagcatgatatagggagtcttgaatatcttctttttttcaaaagtatcctaagtcgaggccaaggtggaaggatcccttgaggccaggagttcaagacaaacctaggcaacatagcaagaccctgtctacaaaactaaaaattaaaaaattattcaagtgtggtggt

SEQ ID NO: 28705 - DNA, 6122 bp, Homo sapiens
cggaggcccgggcaggccggctgagctaactccccagagccaaagtggaaggcgcgccccgagcgccttctccccaggaccccggtgtccctccccgcgccccgagcccgcgctctccttcccccgccctcagagcgctccccgcccctctgtctccccgcagcccgctagacgagccgatggcgcggccccggagagcccgggagccgctgctcgtggcgctgctgccgctggcgtggctggcgcaggcgggcctggcgcgcgcggcgggctctgtgcgcctggcgggcggcctgacgctgggcggcctgttcccggtgcacgcgcggggcgcggcgggccgggcgtgcgggccgctgaagaaggagcagggcgtgcaccggctggaggccatgctgtacgcgctggaccgcgtcaacgccgaccccgagctgctgcccggcgtgcgcctgggcgcgcggctgctggacacctgctcgcgggacacctacgcgctggagcaggcgctgagcttcgtgcaggcgctgatccgcggccgcggcgacggcgacgaggtgggcgtgcgctgcccgggaggcgtccctccgctgcgccccgcgccccccgagcgcgtcgtggccgtcgtgggcgcctcggccagctccgtctccatcatggtcgccaacgtgctgcgcctgtttgcgataccccagatcagctatgcctccacagccccggagctcagcgactccacacgctatgacttcttctcccgggtggtgccacccgactcctaccaggcgcaggccatggtggacatcgtgagggcactgggatggaactatgtgtccacgctggcctccgagggcaactatggcgaaagtggggttgaggccttcgttcagatctcccgagaggctgggggggtctgtattgcccagtctatcaagattcccagggaaccaaagccaggagagttcagcaaggtgatcaggagactcatggagacgcccaacgcccggggcatcatcatctttgccaatgaggatgacatcaggcgggtcctggaggcagctcgccaggccaacctgaccggccacttcctgtgggtcggctcagacagctggggagccaagacctcacccatcttgagcctggaggacgtggccgttggggccatcaccatcctgcccaaaagggcctccatcgacggatttgaccagtacttcatgactcgatccctggagaacaaccgcaggaacatctggttcgccgagttctgggaagagaattttaactgcaaactgaccagctcaggtacccagtcagatgattccacccgcaaatgcacaggcgaggaacgcatcggccgggactccacctacgagcaggagggcaaggtgcagtttgtgattgatgcggtgtatgccattgcccacgccctccacagcatgcaccaggcgctctgccctgggcacacaggcctgtgcccggcgatggaacccaccgatgggcggatgcttctgcagtacattcgagctgtccgcttcaacggcagcgcaggaacccctgtgatgttcaacgagaacggggatgcgcccgggcggtacgacatcttccagtaccaggcgaccaatggcagtgccagcagtggcgggtaccaggcagtgggccagtgggcagagaccctcagactggatgtggaggccctgcagtggtctggcgacccccacgaggtgccctcgtctctgtgcagcctgccctgcgggccgggggagcggaagaagatggtgaagggcgtcccctgctgttggcactgcgaggcctgtgacgggtaccgcttccaggtggacgagttcacatgcgaggcctgtcctggggacatgaggcccacgcccaaccacacgggctgccgccccacacctgtggtgcgcctgagctggtcctccccctgggcagccccgccgctcctcctggccgtgctgggcatcgtggccactaccacggtggtggccaccttcgtgcggtacaacaacacgcccatcgtccgggcctcgggccgagagctcagctacgtcctcctcaccggcatcttcctcatctacgccatcaccttcctcatggtggctgagcctggggccgcggtctgtgccgcccgcaggctcttcctgggcctgggcacgaccctcagctactctgccctgctcaccaagaccaaccgtatctaccgcatctttgagcagggcaagcgctcggtcacaccccctcccttcatcagccccacctcacagctggtcatcaccttcagcctcacctccctgcaggtggtggggatgatagcatggctgggggcccggcccccacacagcgtgattgactatgaggaacagcggacagtggaccccgagcaggccagaggggtgctcaagtgcgacatgtcggatctgtctctcatcggctgcctgggctacagcctcctgctcatggtcacgtgcacagtgtacgccatcaaggcccgtggcgtgcccgagaccttcaacgaggccaagcccatcggcttcaccatgtacaccacctgcatcatctggctggcattcgtgcccatcttctttggcactgcccagtcagctgaaaagatctacatccagacaaccacgctaaccgtgtccttgagcctgagtgcctcggtgtccctcggcatgctctacgtacccaaaacctacgtcatcctcttccatccagagcagaatgtgcagaagcgaaagcggagcctcaaggccacctccacggtggcagccccacccaagggcgaggatgcagaggcccacaagtagcagggcaggtgggaacgggactgcttgctgcctctcctttcttcctcttgcctcgaggtggaagctgtatagagcccgggtccacggtgaacagtcagtggcagggagtttgccaagaccatgctccgcgtcggtggggctggccttgagaaggaactggacccagctctaccccgattccagcatgtgagcttcatgcttcctcaccacagaccagactcgcttcccatggtgggaaacagccaccgagaaggttctagctctagaaagggactaaacttattctctcatccgaagtccaaagaggatgatgaagccctgggctttgcctggtttgcgggagatttcctcccctcagtcaacccccataacctggggattgggcagtgtggaagaacgtgtagaccccagaatgaaacatggggttggagtggaggaggagctgtctcagcaagaggagacctggggctgtgcatctggatggaggcactcaggcctgggtaggattcctctggcacggagggagagaccctgggtgagacccctgtgagcatgggaagggcctgcagtgggcgcgggagtgagctgaggaactggggtgcgcccccatgagattcccaatgccatgggctttcccccatccccccgggattgggcaaggtcagacttagagtacagctgttttcctcccctctgtgtactcccttaaatcaccccaaccttggccaggcatggtggctcacacctgtaatcccagcactttgggaggccgaggcaggtggatcacctgaggtccggagttcgagaccagcctggccaatgtggtgaaaccctgtctctactaaaaatacaaaaattagccaggtgtgatggtgggtgcctgtaatcccagttacttgggaggctgaggcaggagaatcgcttgaacctgggaggtggaggttgcagtgagctgtgattgtgccactgtactccagcctgggtgacagagcgagactctgtctcaaaaaaacaaaacaaaaaaacaccaaaaaaacccccaaacctgaagaaattcagatacacgtgtgtaatgttagtgatgtgagaacaaggagcaggggtgcatttgtgttgtgttcgggttggggatgggtttaggagctccaggttgggagcagtgacagagagtcatggccgtggtgagggtgaatcccaagtggatggctcaggacgggtatggaaacccttcattcctcataggtactgggaagtccatttgcaagctgagcgccaggcctggggaggaagaggcttgggctgcagatgcacgcacatttgtttttcactgatagtttttacaaaaagcttggtttaagttatggaattttatgtccctgggagtagaatttacatttgttaaattgaccactgtttaagatcagtatacattctctagtctgtgatgtctggagctagttttgagggtgaaccacactttatccaacatacaaactttcccatgcagcttctctggtgcgcagttggttttgaccgtgggactaggtgcttctgcaggttttaagtaattaacttaaaagcttctcctctgagaaacatttctgttgcgctactgactctccttctccacatttgttgtgttcctagggcttctctatagtgcacattaggacgtttcatttgttgctgaatgctttccagaattatttattccatagggtttctctcctgtgcagctctctcatgggtaatggggcgtgttttcttgccaaaggcggttccaccctcgtgattgtatagggctcttctcctgtatgaactctgagatcagtgagctctgatctccaagggaaagttttcctgcatttgctgttttctcatgtctctcccagtgtgaattctctggcttctagctgaaaacttttccacagttttacattcatgtggttttctccactgtgaactctgtgattcagaatcagaagcagttcttagtagaggcatttctacactgattgcactgaggatatctccccagtgtgaagtttctggcatagagtcctggcttcccgcagacgactttcacactctgccatgttcatgcctgtgggcctctctggcaggaactctgatgcaccgcgaggcccatgtactcctgtggctttctcacattcggtctacttgcagggtatctccacagcatgcaccattctgggtacagggggacatcctctgttactgaagatgttgtcatatttagtaccttcacaaggtttctctccttccagaattttctgatgtacacaaataactgacttccacaagagggcttttccacactcggtgtgtgcatacagtttctgcctgtgatcatttctttatgttattattttattttttcgagatagggtcttgctcaatttcttaggctggagtgcagtggcacgatcatagctcactgaagtttcgacctgggctcaagcaatcctcccgcttcagcctcctgagtagctggtgcgcacgaccatacccagctaatgttttattttttgtagagacgaggtctcactatgttgcccaggctggtctcgaacttctgagctcgagcgatcctcctgcctccacctcccaaagtgttcggattacaaacgtgagccatcgcacctagcctctttgatcatttctgtggtgttcagtgggggttgacagctccctaaagattttcctgtttttttgcatgcatgggtttgaattctttgaggtccaatttatttggacccctgaataaagttttgtgggttttcttctatgtgtggaattatataggcattcttccagtgtggtttctcttatgtcgagtgagagctgacctgcaccgaagtttgtcccatttgttgcccttgaattatctgtatgaattatatgttccagtgaaaatggagttctgggttggaggcttattccatgtttacacaattaaaattgcagtgttcctctctgggatgagagctctaaagcagagtaagattacgttctgatgtaagctttaaccacctatttataaggtctcacctgtggtccactgtgttgagacttctacagaagagcttctgtatagtaaccattttcttaggctgtctcacttgtgtgaatcttctgacacatttattatagctttgtcccatttcttatcctttttgctctttagaaatttccctttaatttattacattcattgcttactgtaaagagtccaggtaactgactttaattcaagttacttcctgttcaataaatttaacttttccc

SEQ ID NO: 28706 - DNA, 1658 bp, Homo sapiens
ttcctctcccaggcccgagccatggcaacagcgtgacgtgggggtaccgagatctgcgggagcagcggtcccggcttcagttctagcctacccggcagcctggacgggagcaaggcgagaggtgctgccgcctcccgtcgcccctgcgctcagaggtcccgaaccagcccagccgctgcctcttgccgctccgcctttggagtgaggagggcgcagcccgcgtcagaacttagagggccaggcagggtcgcgcgcatggcctgggcgggctcgcggcgggtcccagctgggacgcgcgcggcagccgagcgctgctgccggctctcgctcagcccgggcgcgcaaccggccccgcccccaggccctctgccaccgccgcgaccaatgaggtttctgacctcctgcagcctcctcttgcctcgggctgcccagatcttggcggctgaggctggcttaccttcgagccgttccttcatgggatttgctgctcccttcaccaacaagcgaaaggcttactcggagcgtagaatcatggggtactcaatgcaggagatgtatgaggtggtgtccaacgtccaggagtatcgtgagtttgtgccctggtgtaagaagtctctggtggtatccagccgtaagggtcatttgaaagcccagctggaggttggctttccacctgtcatggaacgttacacctctgcagtttccatggtcaaacctcacatggtcaaggctgtttgtactgatggcaagctcttcaaccacttagagactatttggcgattcagccctggtattcctgcctatcctcgaacctgcactgtggacttttcgatttcctttgaatttcgttctctgctgcactcccagctggccaccatgttttttgatgaggttgtcaaacagaatgttgctgcctttgagcgtcgggcagccaccaagtttggtccagaaacagccatcccccgtgaactgatgttccatgaggtgcaccagacttgaggcaagggattgctccctgacctcccttctaccccacttccctacacaattctcttatttatttggtttggctcctgttccaatttgaaaggagtctgtgttcataatactgtttctcctctcaatttcccagaaattgggttctatgctggctggaaatgttgggggaaagagaaggcaaaggatgtggaaatgagatgtgcttaggaaagggtcaggcccatcgtaggagcaccatatgcctgcagccttttcactacgaattagaataaggactatgtggttgtctctggaccttatcaagacaccttagtgtctgaccaggggacgatagtaacttttctaaggattgaataaattgagcttttcttctggcacagaggtactgagtggtaagtaacttttaccctgcctgagattcctcaggagaaaaggcaacctgcctccagcctgaaatacataaagcctcattttaagactgtaagtccatgctgcctggctactagagagcaaggggctttcttaccaccagtgctgaggagaaaagtactgaacggaaacggagttgtctttgtactcttgagttgtaccttattcttccacttggcctgagtttttataaaatttcaataaattgtgacagtgtgaaaaaaaaaaaa

SEQ ID NO: 28707 - DNA, 1419 bp, Homo sapiens
ggggtcgctgcgaaccccggggttccgcggtggaggggtgctatactgggatgcaggcgcggcggggactggcagcaatcatgccctgggagctaacgtagagctttggataatgcttttgcaagttgtacgagaagggaagttctcggggtttctgacctcctgcagcctcctcttgcctcgggctgcccagatcttggcggctgaggctggcttaccttcgagccgttccttcatgggatttgctgctcccttcaccaacaagcgaaaggcttactcggagcgtagaatcatggggtactcaatgcaggagatgtatgaggtggtgtccaacgtccaggagtatcgtgagtttgtgccctggtgtaagaagtctctggtggtatccagccgtaagggtcatttgaaagcccagctggaggttggctttccacctgtcatggaacgttacacctctgcagtttccatggtcaaacctcacatggtcaaggctgtttgtactgatggcaagctcttcaaccacttagagactatttggcgattcagccctggtattcctgcctatcctcgaacctgcactgtggacttttcgatttcctttgaatttcgttctctgctgcactcccagctggccaccatgttttttgatgaggttgtcaaacagaatgttgctgcctttgagcgtcgggcagccaccaagtttggtccagaaacagccatcccccgtgaactgatgttccatgaggtgcaccagacttgaggcaagggattgctccctgacctcccttctaccccacttccctacacaattctcttatttatttggtttggctcctgttccaatttgaaaggagtctgtgttcataatactgtttctcctctcaatttcccagaaattgggttctatgctggctggaaatgttgggggaaagagaaggcaaaggatgtggaaatgagatgtgcttaggaaagggtcaggcccatcgtaggagcaccatatgcctgcagccttttcactacgaattagaataaggactatgtggttgtctctggaccttatcaagacaccttagtgtctgaccaggggacgatagtaacttttctaaggattgaataaattgagcttttcttctggcacagaggtactgagtggtaagtaacttttaccctgcctgagattcctcaggagaaaaggcaacctgcctccagcctgaaatacataaagcctcattttaagactgtaagtccatgctgcctggctactagagagcaaggggctttcttaccaccagtgctgaggagaaaagtactgaacggaaacggagttgtctttgtactcttgagttgtaccttattcttccacttggcctgagtttttataaaatttcaataaattgtgacagtgtgaaaaaaaaaaaa

SEQ ID NO: 28708 - DNA, 1526 bp, Homo sapiens
ttcctctcccaggcccgagccatggcaacagcgtgacgtgggggtaccgagatctgcgggagcagcggtcccggcttcagttctagcctacccggcagcctggacgggagcaaggcgagaggtgctgccgcctcccgtcgcccctgcgctcagaggtcccgaaccagcccagccgctgcctcttgccgctccgcctttggagtgaggagggcgcagcccgcgtcagaacttagagggccaggcagggtcgcgcgcatggcctgggcgggctcgcggcgggtcccagctgggacgcgcgcggcagccgagcgctgctgccggctctcgctcagcccgggcgcgcaaccggccccgcccccaggccctctgccaccgccgcgaccaatgaggtttctgacctcctgcagcctcctcttgcctcgggctgcccagatcttggcggctgaggctggcttaccttcgagccgttccttcatgggatttgctgctcccttcaccaacaagcgaaaggcttactcggagcgtagaatcatggggtactcaatgcaggagatgtatgaggtggtgtccaacgtccaggagtatcgtgagtttgtgccctggtgtaagaagtctctggtggtatccagccgtaagggtcatttgaaagcccagctggaggttggctttccacctgtcatggaacgttacacctctgcagtttccatggtcaaacctcacatggtcaaggctgtttgtactgatggcaagctcttcaaccacttagagactatttggcgattcagccctggtattcctgcctatcctcgaacctgcactgtggacttttcgatttcctttgaatttcgttctctgctgcactcccagctggccaccatgttttttgatgaggttgtcaaacagaatgttgctgcctttgagcgtcgggcagccaccaagtttggtccagaaacagccatcccccgtgaactgatgttccatgaggtgcaccagacttgagaaattgggttctatgctggctggaaatgttgggggaaagagaaggcaaaggatgtggaaatgagatgtgcttaggaaagggtcaggcccatcgtaggagcaccatatgcctgcagccttttcactacgaattagaataaggactatgtggttgtctctggaccttatcaagacaccttagtgtctgaccaggggacgatagtaacttttctaaggattgaataaattgagcttttcttctggcacagaggtactgagtggtaagtaacttttaccctgcctgagattcctcaggagaaaaggcaacctgcctccagcctgaaatacataaagcctcattttaagactgtaagtccatgctgcctggctactagagagcaaggggctttcttaccaccagtgctgaggagaaaagtactgaacggaaacggagttgtctttgtactcttgagttgtaccttattcttccacttggcctgagtttttataaaatttcaataaattgtgacagtgtgaaaaaaaaaaaa

SEQ ID NO: 28709 - DNA, 1609 bp, Homo sapiens
ctttttagtatattttgagcataatagctaaattatcgagcacttgctacatgctagcagcttgacttagatgttttacatagatatttctcatttaattctcacaacaaacctataaatcaggtgagaaaatggagacacaggtaatttacctaaggccacattgttaaaaaattgttaagagctgggatctgatccttgtgtgatcaccagtaaaactgacagcctctgttctccctagatggtccctcttaaaatcaaaataaacaatgaatgcaaaagcattctgtaaactgcaaaatataaggtaacagtatcataaggatttacacgtttgcttttgggaagttattcatccaggcttatttgggatctgtagttcctgaaggtgcgtggttagtgggcaaaggtatgaattaggggcctatagcaaggaggaacctgacccagctggcagctccttggcctgtgattcttcttctcctaggtactcaatgcaggagatgtatgaggtggtgtccaacgtccaggagtatcgtgagtttgtgccctggtgtaagaagtctctggtggtatccagccgtaagggtcatttgaaagcccagctggaggttggctttccacctgtcatggaacgttacacctctgcagtttccatggtcaaacctcacatggtcaaggctgtttgtactgatggcaagctcttcaaccacttagagactatttggcgattcagccctggtattcctgcctatcctcgaacctgcactgtggacttttcgatttcctttgaatttcgttctctgctgcactcccagctggccaccatgttttttgatgaggttgtcaaacagaatgttgctgcctttgagcgtcgggcagccaccaagtttggtccagaaacagccatcccccgtgaactgatgttccatgaggtgcaccagacttgaggcaagggattgctccctgacctcccttctaccccacttccctacacaattctcttatttatttggtttggctcctgttccaatttgaaaggagtctgtgttcataatactgtttctcctctcaatttcccagaaattgggttctatgctggctggaaatgttgggggaaagagaaggcaaaggatgtggaaatgagatgtgcttaggaaagggtcaggcccatcgtaggagcaccatatgcctgcagccttttcactacgaattagaataaggactatgtggttgtctctggaccttatcaagacaccttagtgtctgaccaggggacgatagtaacttttctaaggattgaataaattgagcttttcttctggcacagaggtactgagtggtaagtaacttttaccctgcctgagattcctcaggagaaaaggcaacctgcctccagcctgaaatacataaagcctcattttaagactgtaagtccatgctgcctggctactagagagcaaggggctttcttaccaccagtgctgaggagaaaagtactgaacggaaacggagttgtctttgtactcttgagttgtaccttattcttccacttggcctgagtttttataaaatttcaataaattgtgacagtgtgaaaaaaaaaaaa

SEQ ID NO: 28710 - DNA, 1866 bp, Homo sapiens
ttcctctcccaggcccgagccatggcaacagcgtgacgtgggggtaccgagatctgcgggagcagcggtcccggcttcagttctagcctacccggcagcctggacgggagcaaggcgagaggtgctgccgcctcccgtcgcccctgcgctcagaggtcccgaaccagcccagccgctgcctcttgccgctccgcctttggagtgaggagggcgcagcccgcgtcagaacttagagggccaggcagggtcgcgcgcatggcctgggcgggctcgcggcgggtcccagctgggacgcgcgcggcagccgagcgctgctgccggctctcgctcagcccgggcgcgcaaccggccccgcccccaggccctctgccaccgccgcgaccaatgaggtttctgacctcctgcagcctcctcttgcctcgggctgcccagatcttggcggctgaggctggcttaccttcgagccgttccttcatgggatttgctgctcccttcaccaacaagcgaaaggcttactcggagcgtagaatcatggggtactcaatgcaggagatgtatgaggtggtgtccaacgtccaggagtatcgtgagtttgtgccctggtgtaagaagtctctggtggtatccagccgtaagggtcatttgaaagcccagctggaggttggctttccacctgtcatggaacgttacacctctgcagtttccatggtcaaacctcacatggtcaaggtgaggcctgtatgggagggattgacaagattttttgtttttagcagtttcatatgaaagtgctattttggccttccttgtaagtactttatgtccatgtgtcaagtatttccctcatatcagaaaagaaggaaaatggctttcaattcctttatattgtatcctatacttagtaatgttatttaactacctgattaccctattctaggctgtttgtactgatggcaagctcttcaaccacttagagactatttggcgattcagccctggtattcctgcctatcctcgaacctgcactgtggacttttcgatttcctttgaatttcgttctctgctgcactcccagctggccaccatgttttttgatgaggttgtcaaacagaatgttgctgcctttgagcgtcgggcagccaccaagtttggtccagaaacagccatcccccgtgaactgatgttccatgaggtgcaccagacttgaggcaagggattgctccctgacctcccttctaccccacttccctacacaattctcttatttatttggtttggctcctgttccaatttgaaaggagtctgtgttcataatactgtttctcctctcaatttcccagaaattgggttctatgctggctggaaatgttgggggaaagagaaggcaaaggatgtggaaatgagatgtgcttaggaaagggtcaggcccatcgtaggagcaccatatgcctgcagccttttcactacgaattagaataaggactatgtggttgtctctggaccttatcaagacaccttagtgtctgaccaggggacgatagtaacttttctaaggattgaataaattgagcttttcttctggcacagaggtactgagtggtaagtaacttttaccctgcctgagattcctcaggagaaaaggcaacctgcctccagcctgaaatacataaagcctcattttaagactgtaagtccatgctgcctggctactagagagcaaggggctttcttaccaccagtgctgaggagaaaagtactgaacggaaacggagttgtctttgtactcttgagttgtaccttattcttccacttggcctgagtttttataaaatttcaataaattgtgacagtgtgaaaaaaaaaaaa

SEQ ID NO: 28711 - DNA, 1817 bp, Homo sapiens
ctttttagtatattttgagcataatagctaaattatcgagcacttgctacatgctagcagcttgacttagatgttttacatagatatttctcatttaattctcacaacaaacctataaatcaggtgagaaaatggagacacaggtaatttacctaaggccacattgttaaaaaattgttaagagctgggatctgatccttgtgtgatcaccagtaaaactgacagcctctgttctccctagatggtccctcttaaaatcaaaataaacaatgaatgcaaaagcattctgtaaactgcaaaatataaggtaacagtatcataaggatttacacgtttgcttttgggaagttattcatccaggcttatttgggatctgtagttcctgaaggtgcgtggttagtgggcaaaggtatgaattaggggcctatagcaaggaggaacctgacccagctggcagctccttggcctgtgattcttcttctcctaggtactcaatgcaggagatgtatgaggtggtgtccaacgtccaggagtatcgtgagtttgtgccctggtgtaagaagtctctggtggtatccagccgtaagggtcatttgaaagcccagctggaggttggctttccacctgtcatggaacgttacacctctgcagtttccatggtcaaacctcacatggtcaaggtgaggcctgtatgggagggattgacaagattttttgtttttagcagtttcatatgaaagtgctattttggccttccttgtaagtactttatgtccatgtgtcaagtatttccctcatatcagaaaagaaggaaaatggctttcaattcctttatattgtatcctatacttagtaatgttatttaactacctgattaccctattctaggctgtttgtactgatggcaagctcttcaaccacttagagactatttggcgattcagccctggtattcctgcctatcctcgaacctgcactgtggacttttcgatttcctttgaatttcgttctctgctgcactcccagctggccaccatgttttttgatgaggttgtcaaacagaatgttgctgcctttgagcgtcgggcagccaccaagtttggtccagaaacagccatcccccgtgaactgatgttccatgaggtgcaccagacttgaggcaagggattgctccctgacctcccttctaccccacttccctacacaattctcttatttatttggtttggctcctgttccaatttgaaaggagtctgtgttcataatactgtttctcctctcaatttcccagaaattgggttctatgctggctggaaatgttgggggaaagagaaggcaaaggatgtggaaatgagatgtgcttaggaaagggtcaggcccatcgtaggagcaccatatgcctgcagccttttcactacgaattagaataaggactatgtggttgtctctggaccttatcaagacaccttagtgtctgaccaggggacgatagtaacttttctaaggattgaataaattgagcttttcttctggcacagaggtactgagtggtaagtaacttttaccctgcctgagattcctcaggagaaaaggcaacctgcctccagcctgaaatacataaagcctcattttaagactgtaagtccatgctgcctggctactagagagcaaggggctttcttaccaccagtgctgaggagaaaagtactgaacggaaacggagttgtctttgtactcttgagttgtaccttattcttccacttggcctgagtttttataaaatttcaataaattgtgacagtgtgaaaaaaaaaaaa

SEQ ID NO: 28712 - DNA, 1515 bp, Homo sapiens
ttcctctcccaggcccgagccatggcaacagcgtgacgtgggggtaccgagatctgcgggagcagcggtcccggcttcagttctagcctacccggcagcctggacgggagcaaggcgagaggtgctgccgcctcccgtcgcccctgcgctcagaggtcccgaaccagcccagccgctgcctcttgccgctccgcctttggagtgaggagggcgcagcccgcgtcagaacttagagggccaggcagggtcgcgcgcatggcctgggcgggctcgcggcgggtcccagctgggacgcgcgcggcagccgagcgctgctgccggctctcgctcagcccgggcgcgcaaccggccccgcccccaggccctctgccaccgccgcgaccaatgaggtttctgacctcctgcagcctcctcttgcctcgggctgcccagatcttggcggctgaggctggcttaccttcgagccgttccttcatgggatttgctgctcccttcaccaacaagcgaaaggcttactcggagcgtagaatcatggggtactcaatgcaggagatgtatgaggtggtgtccaacgtccaggagtatcgctgtttgtactgatggcaagctcttcaaccacttagagactatttggcgattcagccctggtattcctgcctatcctcgaacctgcactgtggacttttcgatttcctttgaatttcgttctctgctgcactcccagctggccaccatgttttttgatgaggttgtcaaacagaatgttgctgcctttgagcgtcgggcagccaccaagtttggtccagaaacagccatcccccgtgaactgatgttccatgaggtgcaccagacttgaggcaagggattgctccctgacctcccttctaccccacttccctacacaattctcttatttatttggtttggctcctgttccaatttgaaaggagtctgtgttcataatactgtttctcctctcaatttcccagaaattgggttctatgctggctggaaatgttgggggaaagagaaggcaaaggatgtggaaatgagatgtgcttaggaaagggtcaggcccatcgtaggagcaccatatgcctgcagccttttcactacgaattagaataaggactatgtggttgtctctggaccttatcaagacaccttagtgtctgaccaggggacgatagtaacttttctaaggattgaataaattgagcttttcttctggcacagaggtactgagtggtaagtaacttttaccctgcctgagattcctcaggagaaaaggcaacctgcctccagcctgaaatacataaagcctcattttaagactgtaagtccatgctgcctggctactagagagcaaggggctttcttaccaccagtgctgaggagaaaagtactgaacggaaacggagttgtctttgtactcttgagttgtaccttattcttccacttggcctgagtttttataaaatttcaataaattgtgacagtgtgaaaaaaaaaaaa

SEQ ID NO: 28713 - DNA, 228 bp, Homo sapiens
atctactttctacttctgtggatttgcctattctggacatttcatataaatgggattatacaatatgtggccatttccttactccagtgcagtttttcccatttgcctcctttgtactgttattgtcaagtatattacatttctgtatgttatgcgtccaataatacaattccatacttattgtcctatgcagttgcttttgaaaacaggagaaaatatatgcattta

SEQ ID NO: 28714 - DNA, 432 bp, Homo sapiens
gattgccctttcattagcccggaacttggcacagtgtttggtaggagacgggcacatagtagtagctgaatgaataactacatagcattgagttaaagagtccatgcttaggagagttagggaagctgctacaatacagagatgtttgggcagagtgctatctcaaagactgggtgagccagcagtgaattcataaaagtcacagggttattacctaaccaatatgcaaatatatcccaggctaagtgaggaaatcatggctaacttttactgatcacacattatcctctagagacacacctttctcagctccttacatttatttcatttaatcttcacgacgactcaaggaaataggttattctgtttatttcataagtgaggaaatagaggcatagagaggtttattacctaatcccagcttacccagca

SEQ ID NO: 28715 - DNA, 527 bp, Homo sapiens
cagtgagcctagacagtgccattgcactccagcctgggtgacagagtaaggctctgtctaaaaaaaaaaaaacagaataagcctgagcaaaacaaaaacaaaaggaaatttattataaggatatgtgtatccagaagccaagccacgattacagctgggctgaagatttcccactggaaatcccgtgagaattcaggcagtattttctgtctatctattacgccattgcctcattcttctctctctctctgtctctttctgtcactgaagatcagagccttctacctactctgccttgtagaacatttaagcccacagttcccaagtttaaatgtttttggttcagtcacatatataactctttttttttttttttatactttacgttctagggtacatgtgcacaacatgcaggtttgttacataggtatacatgtgccatgttggtttgctgcaccatcaactcgtcatttacagtaggtattcctcctaatgctatccctcccccagcccccgaccccagacag

SEQ ID NO: 28716 - DNA, 460 bp, Homo sapiens
ggaagttttaaaatatcctcttgccttggctgcaccttataccaattaagtcagaatagatggaagtggtaccaacacatggcaatttttttctaatttttcagatgatatccaaatatagccatggttgagagccagtgttctaaatgccttgctccttaccattagtgcttgtatagtctttccatcatccccagtggtgactcagtctctacccaaacacacctagcattagctttgactgtcgatcaagttcttaggtcaattccaaatctgtcacttttctcttcagaataatctctttatttcttttaattgcttctcttatgacatgattttaaatctcctcattatcccagtagcattcttctaactagactagttgtcaatatggtatcttggaaagaatctggattttggagtcatagtacctttcatttacacttcatatctgctgtgt

SEQ ID NO: 28717 - DNA, 1216 bp, Homo sapiens
ctggcggctcttgggactggcggggctgcgcgcggggttagggtgggggtacgggaaggctcaacccaggacctgcgtaccttgctttgggggcgcactaagcacctgccgggagcagggggcgcaccgggaactcgcagatttcgccagttgggcgcactggggatctgtggactgcgtccgggggatgggctagggggacatgcgcacgctttgggccttacagaatgtgatcgcgcgagggggagggcgaagcgtggcgggagggcgaggcgaaggaaggagggcgtgagaaaggcgacggcggcggcgcggaggagggttatctatacatttaaaaaccagccgcctgcgccgcgcctgcggagacctgggagagtccggccgcacgcgcgggacacgagcgtcccacgctccctggcgcgtacggcctgccaccactaggcctcctatccccgggctccagacgacctaggacgcgtgccctggggagttgcctggcggcgccgtgccagaagcccccttggggcgccacagttttccccgtcgcctccggttcctctgcctgcaccttcctgcggcgcgccgggacctggagcgggcgggtggatgcaggcgcgatggacggcggcacactgcccaggtccgcgccccctgcgccccccgtccctgtcggctgcgctgcccggcggagacccgcgtccccggaactgttgcgctgcagccggcggcggcgaccggccaccgcagagaccggaggcggcgcagcggccgtagcgcggcgcaatgagcgcgagcgcaaccgcgtgaagctggtgaacttgggcttccaggcgctgcggcagcacgtgccgcacggcggcgccagcaagaagctgagcaaggtggagacgctgcgctcagccgtggagtacatccgcgcgctgcagcgcctgctggccgagcacgacgccgtgcgcaacgcgctggcgggagggctgaggccgcaggccgtgcggccgtctgcgccccgcgggccgccagggaccaccccggtcgccgcctcgccctcccgcgcttcttcgtccccgggccgcgggggcagctcggagcccggctccccgcgttccgcctactcgtcggacgacagcggctgcgaaggcgcgctgagtcctgcggagcgcgagctactcgacttctccagctggttagggggctactgagcgccctcgaccta

SEQ ID NO: 28718 - DNA, 421 bp, Homo sapiens
tatccttttcactttcttgataatgtcctttgcacaaaagttttaaattttgatgaggtcaaatgtatctgtttttttttcttccgttgcttatgcttttggtgtcatatctaagaattattatcaaattagggctgagtgtggtggttcacgcctatctctaatcccaacactttggaaggctgaggcgggaggatcgcttgagcccaggattttgagaccagcctgggcaacatagtgagatcttgtctttataaaaaataacaaaattagctgggtgtgatggcttacttgggaagctgaggtggaaggatcacttgagcccaggagggcttcagtaagccatgattacaccactgcactccagaacctgggcaacagagtgagaccctgtctcctaccccacccccgaccaaaaaaa

SEQ ID NO: 28719 - DNA, 219 bp, Homo sapiens
gtactgctgtggatgtttattaactcctccccaggtcttcgctttattttgtattactttagggtttccccatagtgtgttgcctgtttttgagacagggtctttctttgtcacccaggctggagtgcagtggtgcgatcttggctcactgcagcctcaacctcttgggctaaagtgatcctcctgcctcagcttcccgaggagctaggaccacaggca

SEQ ID NO: 28720 - DNA, 393 bp, Homo sapiens
catctaacattcactatctatgtgagctctctgtgggttacatttaaatctcaccactttatgaggtagatactattagtatcttcactttatagatgtggaaatgggacacgggttaaataactcggctaaggttacaccactagcatcaagaagagctagaagttgggtggtctgcctccagaacctggtatgtagcccctatgctgtgatgtgtgctaccatgtaaaccctccacgaatttacaaaatggttacaaaggccgggtgcagtggctcatgcctgtaatcccatcactctgggaggccgaggtgggtagatcacctgaggtcaggagtttgagaccagcctggccaacatggtgaaaccctgtgcctaccaaaaatccaaaaa

SEQ ID NO: 28721 - DNA, 2545 bp, Homo sapiens
ggcgggtggcgcgcgatcttcgcgtcgctctgggcgggcggccgcggcgccgcgctggtgggtgggatcgtggcggagcgccaggcgcccaaagaggggcgagaaagcgccatggcggcggcggcggctgtgtccggtgctcacgccgcggcgaggtgaggggaccgcctcttctccacaactgaggaggccacagctgccggcccacccgccttccacgcgggccgcggctccggcatggccgggatcattaagaagcagatcctgaaacacctgtcccggttcactaagaatctttccccagacaaaatcaacctgagcaccctgaaaggggagggtcagctgaccaacctggagctggatgaagaggttctacagaatgtactggagctgcccacctggttagccatcactcgggtctactgcaacagggcctccatccggatccagtggacaaagttgaagacacaccctatttgcttgtgtctggataaggtagaggtggagatgaagacatgtgaggatcctcggccccccaatggacagtctcccattgcccttgcttcaggacagagtgaatatggctttgccgaaaaggtggtggaagggatgttcatcattgtcaattctatcaccatcaagattcactccaaggccttccacgcttcttttgaattgtggcagctccagggctatagtgtcaaccccaactggcagcagagtgaccttcgccttacccgcatcactgacccctgccgaggagaggttttaacatttaaggaaataacttggcaaacactccgaattgaggcagatgctacagacaatggtgatcaggacccagtcaccactccattgaggcttattacgaaccaaggcaggatccaaatagccctcaaaagaagaaccaaagattgcaatgtgatatcctccaagctgatgttcctgttggatgacctgctctgggtgctgactgactcacagctcaaggctatgatgaagtatgcagagtcactgagtgaagccatggagaagtcagcccatcaaagaaagagcctggcccctgaacctgtgcagatcactccaccagcccccagtgcccagcagtcctgggcccaggcatttggtggcagccagggcaacagcaacagcagcagcagccgcctcagccagtactttgagaaatttgatgtgaaagagtcctcctaccatctgctcatctcccgcctggacctgcacatttgtgatgatagccagtcccgagagccaggtgtctctgccaacagactcatgggtggtgccatgcagcttaccttccgcaagatggcgtttgactattaccctttccattgggcaggtgatagctgcaaacattgggtacgccactgtgaggccatggagacccgaggccagtgggcccagaagctggtgatggaatttcagagcaaaatggagaagtggcatgaagagacgggtctgaaaccaccctggcaccttggagtagactctctctttcggagaaaagcagattctctttccagtcctcgaaagaaccctcttgagagaagcccctctcagggcagacagcctgcctttcagcctccagcatggaaccgcttacgctctagctgcatggtggtacgggtggatgacctggacatccaccaggtttccaccgctggacagccaagtaaaaagccatctacactcctttcctgcagtcggaaacttcacaacctccctacccaggtctctgccattcatattgagttcacagagtattacttcccagataatcaggagcttccagttccttgtcctaatctctacattcagttaaatggtctgacatttactatggatcctgtcagtttgctctggggaaacctcttttgcctggatttataccgcagcttggagcagttcaaagctatctacaagctggaagattcaagtcagaaagatgaacacttggacatccgactagatgcattctggttgaaggtgagctttccactggaaaagagagagcgggcagagttgcatcgtccccaggcccttgtcttctctgcgtcaggcatgattgccaccaatacacgtcatgctccacattgtagttgttcagacctccagagtctcttccggggttttgctgctgctgagttctttcattccaattatgatcactttcctaaggttccaggtggctttagccttctgcacatgctttttttgcatcatgcctttcagatggattcctgcctgcccccgctaaccggctttttgcccaaatgggccattatcgaagaattcacaaaaaacaatagcctcatcatccccaccatcatagccaccatcaccctccttaacctctacttctacctacgcctaatctactccacctcaatcacactactccccatatctaacaacgtaaaaataaaatgacagtttgaacatacaaaacccaccccattcctccccacactcatcgcccttaccacgctactcctacctatctccccttttatactaataatcttat

SEQ ID NO: 28722 - DNA, 652 bp, Homo sapiens
atcgtggcggagcgccaggcgcccaaagaggggcgagaaagcgccatggcggcggcggcggctgtgtccggtgctcacgccgcggcgaggtgaggggaccgcctcttctccacaactgaggaggccacagctgccggcccacccgccttccacgcgggccgcggctccggcatggccgggatcattaagaagcagatcctgaaacacctgtcccggtgagagcgccagcgccggcccccggcggtcctgggcccttcctaaccctctccgacctcctccctgacgccgcgctccgggcccagtctgcctctctccagcccggagcccggactccgtggcagcccctgcctaactcgagcccggacagcttccccccgcgcccgccggcgcccaccgttgtcgccgctctgtgcttcccccgcgctgggccctcctgtcctggcgccggtgccgctagtctctccccactctaacaaccccctggactttttctttcccctcaaggcccttctggcctgctgtccccacctcccacacctccaagcaggtcaccccgtgctcccttgaccgtctttccgaggcccccacgaagcccactcttgcctgcccgaaccagctgtcttctctctgctttctctggccttcgggcccc

SEQ ID NO: 28723 - DNA, 202 bp, Homo sapiens
tgcccttcagtgtaattgatttctgatgtgcttggccaacaaccatttaagcttttagaatcttcaagttattcttaaagaatcttaagcaaatctttaagcttttagaagaggaagaaaggacagggagatgagccttgaggtcactgcagcaataggcaggcatcaggtaatgagtcaccaggacagtaggaatggcagt

SEQ ID NO: 28724 - DNA, 741 bp, Homo sapiens
acttcagatagggattcatttgttgatattttctttcttctctcccctgctaacataaacacttttctgaagcatatagttatgatatcagcctttaaggtttattgtcccacaatggctgtggagttaaaaaaaaaaattcagtgagtttggatataagattattatttaatgaataatcataacataggaaaacatatcaaaacatagggaaaaccaacataaatagtcttcaaaagacactagttcttggtatattcacataaccacctttgtgaatgcagcacattaatacatctgtcatatagcactttaaaatggccaactttttaagtgcttttatactgtattctctccacaatgatgtgactttccaaaattttccactgaaaaagatgtaaccttgcaatgtggtttagtatggaacttactttgcactgtatctggcggttgaattttgcttttattgtactgtggacttgtgactaaggcaaataaaacttaagctcacttaatttaaatatctcaaaataacatttaggaaaaggtgcagtttttctttgcttcagaatgggtttttatcacaaaggaatgagtgagacatttatttgtgctgggacttctgcacagtcattgaatgctgtgagtgaatgttagtgaaaattcttgtcaagggaaacaagtttctttcaggatattctaccaaatactactgaaagggagaatgcagagcaaaacacc

SEQ ID NO: 28725 - DNA, 368 bp, Homo sapiens
ccttttatctttagatttaagtttttaggctatgactaggcctagctccaggcattgtcctttgttctggactttgcatctggtacataattaaaacggcttacctccaaggtttttcactaaaaataagagttactaaaagttaacattgtaataaatgtatataattgaaattactaaatacaagagaaaaaattctccatcgaaagtgtataagggaagtaggacatgtttttggtttaagaaaagttatcagaaggcatgaaaatgtggtttttgttaaaaggaaagtaattttgcctagtttaaaggttttttttttttaaattaaaggaataaaaaaaggacagataaaactacacaaatat

SEQ ID NO: 28726 - DNA, 565 bp, Homo sapiens
caaacaatcagcagtacttattttttagtcctgtgctcctgaaactacccttgaatatctctaacccctgatccactggggaggctgatttgagaggccagaagaacttgcctggcaattatgagtggatggaggaactgcctatccctgtcccattgtcttgtccacaggtcagcctcacaaagggaaagagccctggatgggaatacagtggaagctcattctcttagtgacctggggacattggctcgagatgaagcctggcaggagtggcaactccaggtttggatgcctaagaagagaggttttgagccaataaatgactatggggtgcttggaagccagtgagccctcacttctggtggaggagaggatgagcctgtggctgcggacacacctcatgtgaccctgatctcccctttgtgattgtgtgactctggctcagggactgtgtcttcctgtacctcagttttctgtcaatcagataagctaaatggcaaatggacagtggcttttcatgctatctgtgaataaatgttaaatgattcacagtcacctgacctaa

SEQ ID NO: 28727 - DNA, 968 bp, Homo sapiens
caaacaatcagcagtacttattttttagtcctgtgctcctgaaactacccttgaatatctctaacccctgatccactggggaggctgatttgagaggccagaagaacttgcctggcaattatgagtggatggaggaactgcctatccctgtcccattgtcttgtccacaggtcagcctcacaaagggaaagagccctggatgggaatacagtggaagctcattctcttagtgacctggggacattggctcgagatgaagcctggcaggagtggcaactccaggtgatttctgcacctttcctatttcctgggaggtgggccaggccacagtgttagtgggaagggaacagaacagccagcctagtcagagggagtttctggggaaggcctaggggtgggggaagaagctgtgcaggacagggcttgccagtcagaatgaagtgggaggaagatgagggacacagagaagcagaggcagatacaccatggcagtgagcagtgagggagacactgtcttcagaaactccagggaccaggtgcccccagttccatagtccaggaccaaggagccctcgagaacctccggtggccttaaagagcttcagaattacatgaggtggggtggctttaggggcaagaggtagtggggggatgaaacatggatgtccagcctctgaaggacaagggacaggtgtggctagaacctcctaggattctgcatccaagatccaatctctaaagaggttttggatcattcatttcttcattccattccttcatttgtcatgtgagagctcctgagtgtgtgtctctctcgctgggcctgtggtggtgtagagtgtgagtggggaaagaaaacaaggtcctctccttgatcctctcatgacagtgacaaggacactttgggaaacacaggatttcaggttcagtgatggtggttaagatctgaggaggaggcctggacattt

SEQ ID NO: 28728 - DNA, 640 bp, Homo sapiens
tgtggctagaaactcctaggattctgcatgcaaattcagtctctaaagaggttttggatcattcatttcattccattccttcatttgttatgtgagagctcctgagtgtgtgtctgtctcgctgggcctgtgctggtgtagggtgtgagtggggaaagaaaaggtcctctccttgatcctctcatgacagtgacatggacactttgggaaacacaggatttcaggttcagtgatgggggctaagatctgagggggaggcctggacatgttttttccactgactctgatggttgaggcaggtgatttagttctggagtacagactaatcagttgaccattttctctcactcctctgaggtttggatgcctaagaagagaggttttgagccaataaatgactatggggtgcttggaagccagtgagccctcacttctggtggaggagaggatgagcctgtggctgcggacacacctcatgtgaccctgatctcccctttgtgattgtgtgactctggctcagggactgtgtcttcctgtacctcagttttctgtcaatcagataagctaaatggcaaatggacagtggcttttcatgctatctgtgaataaatgttaaatgattcacagtcacctgacctaa

SEQ ID NO: 28729 - DNA, 96 bp, Homo sapiens
agtgatgggaggccggccccaggcttggggtgtgggtggtttcaattggaaaacttttataataaaaaattggaagaaagaatgtaattccctcta

SEQ ID NO: 28730 - DNA, 853 bp, Homo sapiens
ctgtctcaaaaaaaaaaaaaaaaaaaaaaaaattctcacagagggggatgggacttaagaaaaaggtttgttttctttaatgctcacagattctatttttaaatgacattttctgttttaattttttgaatgataatttttttttaatttcatcatcttcctgctattccttgtacatctgtttattgaggatgtgctgtgcatggtgttggttggatgctccacaatgtgtatatgcaggtacacggaacatgagctcctctctgaaagaggctatcatctagagcagagcagtttcctgtggagcttgtgaaaatacacatgcaagccccactgtgggagttactgacttattaggtctaaagggggtattaggcatctgttttttttttaaaagctctcggtattccagataccgcatccctcattgtagagcccacctagtccagaataggccccaacacaaaaacaaaaattccatggcaggccgcaggtagggagtaactgaaaggaacagtaattgcaaagtagattaaggaaggtttcctttagcattttgactggtcttcatgatgagtttcattttatcagagatttgaaagttgaacacttaagaagaagtgtatgggctaaagaaagctatggaaatatataatgtatttgtgggataataaaggagttttaattctgtataagcagaattttacagggcaagtagattcttgcttgggcaagctctggaaataaaactttaacagaaagtagcacattcattttggtactctttgtgttagaaaagcatgcttcattgttatatttgagggattttttaaacaccccccccccccaccaa

SEQ ID NO: 28731 - DNA, 201 bp, Homo sapiens
ggtgctctctgcgtagtagccagtaatgttggagcggccattcgtaaatggtaccaaagttccaaatgaagcatcattgctgaaatacatatttttttcaagtacaccatcacctaattcacatacagcatacgcacacatctggaaaatctgcattttcttcattggttgtatttaataaattgcctaaagtaccatttt

SEQ ID NO: 28732 - DNA, 536 bp, Homo sapiens
atagcttcagatcttaaagtcttagttcttcaaatgttcagaattcagcagggaagccagcaggtcctgggcttttctttgatgggggactttatggcttcaatgtcattatttgttattggtctggttttctgtttctagatgcttcaatcttggcaggttgtgtatgttcaggaaattgtccatttcttctaggctttccaatttgttgatatacagttgttcataatagtctaatgattctttgtattttggtaatctgttatgtcttttttctgatttgacttatttggattttctaaggaaaagtttcaattctgtcttttcaaaaagtcaactatttcatagatctgtgttttttagcttcaatttaatttattgctgctatttatctggggtaagatgatctcattgtagtgttttatttctttctttgattagtgatgttgaacatttcttttatattcctattggacatttgcatatcttttgagatgttcatgtcctttgcccactttttaatggattgtttttcc

SEQ ID NO: 28733 - DNA, 105 bp, Homo sapiens
caagctagaggcaaaaccaggaccctcactcccagcccactttaattcttccttcacaagcctgcctgtgactgcccaggtctgttctctgcttctaccaagggg

SEQ ID NO: 28734 - DNA, 493 bp, Homo sapiens
tagaaggaaggcttttcaatattgtcaccaaaaagaaatgataaatgcatgaggtgatggatacactacctgatttgatcattatactacatatacatgaatcagaacatcaaattgtacctcataaatatctacaattacatgtcagtttttgtttatgtttttgtttttttttaatttatgaaaacaaatgagaatgggaaatcaatgatgtatgtggtggagggccagggctgaggctgagggaaaatacagtgcataacatctttgtcttactgttttctttgggataaccgggggacttcttttcttttcttcttgggtattttattttctttttcttcttcttctttttttttttttaacaaagtctcactctattgctctggcaggagtgcagtggtgcagtctcggctcactgcaacttccgcctcctgggttcaagcgattctcctgcctcagtctcctgagtagctgggattacaagtgtgca

SEQ ID NO: 28735 - DNA, 381 bp, Homo sapiens
atgcctgaaccctctaagtctgctccagcccctaaaaagggttctaagaaggctatcactaaggcgcagaagaaggatggtaagaagcgtaagcgcagccgcaaggagagctattctatctatgtgtacaaggttctgaagcaggtccaccccgacaccggcatctcatccaaggccatggggatcatgaattccttcgtcaacgacatcttcgagcgcatcgcgggcgaggcttctcgcctggctcactacaataagcgctcgaccatcacctccagggagattcagacggctgtgcgcctgctgctgcctggggagctggctaagcatgctgtgtccgagggcactaaggcagttaccaagtacactagctctaaataa

SEQ ID NO: 28736 - DNA, 1579 bp, Homo sapiens
ctctaataattctgattcagtagatctgggatgtatcccaggaacatgcatttttagaaagcaactcaagcaagcctgatgcaggtggttcacccttgctccttttctgtgaaccacaaggataccagccataattccctgcatctgatgcccatcagcttagcttttattatcagaccatctgcccttaatttctagcttcttgggctgaccagatgattggttgtatgaaagggtgagatgggagtggtgagttgagccgccattgcatcttctagtcatcaaggttgtctactaattggcacacattttctcttagagatgtggttggttgtcaaaaggctgtctactctagagagtattctccaggaaggagaagcttccagttgtctaattagtaaagttatctaatctactaccatggagaatagatgtggttttgcccccaccacaagctgtaaaagccccaagctgggagggacgttgcggttgaggctattcagtctaatctcccgtgcatagtcctttcaacaacattcctgggagacagtcaggggcacacacattccagaacagttacatatcgtgtatttgaagaaggctcacacagccctggaaaccatgccactggccattccccatctgactcaggttacagatcccctcccttttcccactgaccactcactctcctctggccagatttgtttctgtttctctgaaagagcagttcccacaactgcatgaggcttttgatattggccggtgggtgaagagtacagagggatgttactatacttaatttgattcttcctctccccagcagccacatctgtccttggcttccattgagctttataatcagttgaaacttctgtgtcttctgacttgaacttctgtttggacagatctttctcaattgctgcaaatatgcacatgcatttgcatatgcatacacatacacacacatacgtgaagagcgttgtttctatccatgttacatctccttggaaattttagctaaaatttcccaattctgtgcactttgatttacctataaatctgatgaatttacccataaccaggtcagttataaaaatgtttagcatgtttccaaagacaagggtaagactatttttttaaaataagaaaaacattgtgctatataattgcaattactacattctatatgtaaaccgcttgctaaaactcttttaaaaagtgtttaaaattttcatttttgaaatgtgggccaactattccctttggaaacatgttgatgctgtctttttttcatgatccacagagagtaaagtggtgattggatttggtctctacttaaacatttaaaaaaataagtgtatcatagccaaacatgatctagttaccctctttattctaattgttccctcaaatcttatatgggctgtgtgactgctggctccttacatctaatctaaataaagaacaagaagggcattgcaacattgtggaaaaccctgtaacatgttttctcagctttcaggtatactagttccctgtccaacagtattaacattctgaaatccaatattgcttt

SEQ ID NO: 28737 - DNA, 433 bp, Homo sapiens
gaaatcttttgttctccaccatcctcttccttcctggctgatagatatctgaactgatagtgcaaatttacagtaagtataaaatattcagttcttcctgaactaaatgaaataattggacagaaatccaatttcttaatagaacttctgattataagccaaaattcaggaaacagctgctatcctgtaagaatgagaaaataagaagataaacaacccctactggtagattttttaaaagatactataattttaaaagaatagaaatcagattaattatttcccttgaaaaaagtaactgaagaaacatacagaaaaattagtttcaaatggacagaaaaactattttagaaaatttgtaaattattttaccaaattagagaatgtgcatttatgaatctaggatgagctaagattggtaagtaatatgtga

SEQ ID NO: 28738 - DNA, 1943 bp, Homo sapiens
ttcccatacaccagttaggttaagggacatctttagcttttaaaaaagtacagttcgaaatataaagtaaaagcagttaagtcttttccaagtacaaagtgaattggttccaattgctagagaatttacaaatatatattcacctgaggccagaaaaagctcctttggcctaggcctctctcctttatcaagctctctccatcacgagtgtgcacatgtgcgcgcacacacacacacacacacacacacacagaacttaacagcagtgatgtgtgttgtaatatgcaactttgtaagttacatatcactccccaataccaccttctcagtcacggagtagagatcttacttcacaagaagtgagactcagagaggtgaagtgacctgtgcaaggtcacctattacagtgccagagttggaactaaaggaacttcagtctgtgaacttcagtgtctttccagtagcatatttgcagcagaagagtcaagaatgttgtgagctgcaactctcactagaaccaaatgaccttattgggagatgttagtccagccttaaaaacaagctcttcacctccatgaatggcaagtgtctgccctcttcaggccaaatcgagaattacatctataactgagcaaatcctcagaacccaagtcagaccttggattattgcttttcagtaagttctggtcctggctgtgtctctaactcttgctgtgggaccctcagggaagctacccacccccttcaccccacctgaatgagatgatttctgaagtcctcagcagccctgattctaagcctcataaggaagagtaggtgttaatggcatcctagggcaatggtaggcgcctgatgcagatctgctgtgagccatgtgctggcatcacaggggtggtttattaatttcatttatcatctggacagccccttcttataacgtacatccttgcctcttctgaggctctaagatccccaaggtggctcctgtatccagaaaccccttggccttccctcccagttaagcaagatctctcttcaactcagggatgctgagagattgaaagtgaactacacacaggaacagccaagataggagttatttctatagcaccatgcttggctgatgttctttacacggagtgggcaggatttttaaaacagcgtttgtgccttttagcctgggctcctcctaaaagcagactctgggacaaggatttgtgtgcaagtagctggcttgaaaggtgattccaggaagcactgaggtggcatggagaagcaaggctgagaagaagggaatgcaaagaacagccaccaaggtgcacggccagggcctctgtcaagctgtgaggaacatgctgcagagttgtcccctggggctgaggaagctgtgagagagagccactccactcccatcctttgtaggtagagggccaccgccaggctcttagctacttggaactagggccagcttgaggaatatgggtgaggcacccatggcctctgctacattgtttttaatccagtctcaaaaacaaaatggtcctatcacagaaactctgcaaaaatacatgaaagagtaaagaaaaacatgtaaacattttacaattactctatccaaagataaatactgttaaaatgtcagtatgttcttacacaagtttttccatgcatatatgtgtagatttatatacattaagattgtattatacatagaaaataaatttctggacagttatataacctgcccttttcaaaatatatctaggaaatctttctatgttattgtgttgtcttctataacatgattttcatgactttactattatagtctctaaaaaggatggttcataatttttactggacatttcagtggtttgcaaagttcgactattacaatatatgttgaaatgagcatccttggatataaatcttttttgtacatc

SEQ ID NO: 28739 - DNA, 1912 bp, Homo sapiens
ttcccatacaccagttaggttaagggacatctttagcttttaaaaaagtacagttcgaaatataaagtaaaagcagttaagtcttttccaagtacaaagtgaattggttccaattgctagagaatttacaaatatatattcacctgaggccagaaaaagctcctttggcctaggcctctctcctttatcaagctctctccatcacgagtgtgcacatgtgcgcgcacacacacacacacacacacacacacagaacttaacagcagtgatgtgtgttgtaatatgcaactttgtaagttacatatcactccccaataccaccttctcagtcacggagtagagatcttacttcacaagaagtgagactcagagaggtgaagtgacctgtgcaaggtcacctattacagtgccagagttggaactaaaggaacttcagtctgtgaacttcagtgtctttccagtagcatatttgcagcagaagagtcaagaatgttgtgagctgcaactctcactagaaccaaatgaccttattgggagatgttagtccagccttaaaaacaagctcttcacctccatgaatggcaagtgtctgccctcttcaggccaaatcgagaattacatctataactgagcaaatcctcagaacccaagtcagaccttggattattgcttttcagtaagttctggtcctggctgtgtctctaactcttgctgtgggaccctcagggaagctacccacccccttcaccccacctgaatgagatgatttctgaagtcctcagcagccctgattctaagcctcataaggaagagtaggtgttaatggcatcctagggcaatggtaggcgcctgatgcagatctgctgtgagccatgtgctggcatcacaggggtggtttattaatttcatttatcatctggacagccccttcttataacgtacatccttgcctcttctgaggctctaagatccccaaggtggctcctgtatccagaaaccccttggccttccctcccagttaagcaagatctctcttcaactcagggatgctgagagattgaaagtgaactacacacaggaacagccaagataggagttatttctatagcaccatgcttggctgatgttctttacacggagtgggcaggatttttaaaacagcgtttgtgccttttagcctgggctcctcctaaaagcagactctgggacaaggatttgtgtgcaagtagctggcttgaaaggtgattccaggaagcactgaggtggcatggagaagcaaggctgagaagaagggaatgcaaagaacagccaccaaggtgcacggccagggcctctgtcaagctgtgaggaacatgctgcagagttgtcccctggggctgaggaagctgtgagagagagccactccactcccatcctttgtaggtagagggccaccgccaggctcttagctacttggaactagggccagcttgaggaatatgggtgaggcacccatggcctctgctacattgtttttaatccagtctcaaaaacaaaatggtcctatcacagaaactctgcaaaaatacatgaaagagtaaagaaaaacatgtaaacattttacaattactctatccaaagataaatactgttaaaatgtcagtatgttcttacacaagtttttccatgcatatatgtgtagatttatatacattaagattgtattatacatagaaaataaatttctggacagttatataacctgcccttttcaaaatatatctaggaaatctttctatgttattgtgttgtcttctataacatgattttcatgactttactattatagtctctaaaaaggatggttcataatttttactggacatttcagtggtttgcaaagttcgactattacaatatatgttgaaatgag

SEQ ID NO: 28740 - DNA, 339 bp, Homo sapiens
tctccaaacttgacatccacctatccaaatcctgctagtatcgagccaaacacttcctgttttgccctactaactgtactctcttttagttgtaaaagggcttaccactttgtaactctttgtgagcactgtctagatagctggttttacatatacagggtctgagagtcttatgaaaggtatggacacactcttcagagagaaaaatgtgtgtttttgtatatactcaggacagtctccttccacacctttctggatgtcttccatgtgtatgggccccagatgggtagcgtcagcctttggagaagcttatcagtaaagaatgattattagagcaca

SEQ ID NO: 28741 - DNA, 1877 bp, Homo sapiens
tcccataataccagcagtaagcctggcaacatgttcaacagatttagtacccaagaggaaatcaacagcgatagtagagaatgagtcagatgtagtgggataaatactagcctaggaagaaggagccccggagtctaatatgagctttattactaaattgctatgtgacgctaggcaagtcacttaacctctccatggctgtttcctcatctgtaaaataagtgtattggactagatgatccttagggtctttccaaaagtctaacattctatggcattataggttgccttgcaaattcagcctgctatagtgatggcaaatatcacgtttaagcctgagtctcttatgttgcagttaaataaaagaactatgtaagatgatttttaaaattcaagcaaatgggccgggtgcggtggctcatacctgtaatcccagcactttgggaggccaaggcaggcggatcacctgaggtcaggagttcgagaccagcctgaccaacatagagaaaccccatctctactaaaaatacaaaattagccgggtgtggtggcgggcgcctgtaatcccagctacttgggaggctgaggtgggagaatcgcttgaacccaggaggcggaggttgtggtgagctgagatcatgccattgcactccagcctcggcaacaagagtgaaacttcgtctccaaaaaaaaaaactcaagcaaatgaagttcataataataggggatgttgataaaacttgtggcagccttccaattcatttacagttgtttcgttttgtttttgttttaatgtccattttctgttgactgttcccagttttcattttccatacagtctgtatgtaaagtctggttttcattaagctgtggccagtatttgccactacaacagaaacacactgtcacacttgctagaatataactgtacttgggcttctcctttcctgtgaagtagtgctgggctttctagagtttaattctcaagtggcacaagatagcagagcccatgcattttaatggctgagactgctaagagtgaacctaaacacttacaagttgcagagagaaatgaaaaagtaattacatgctattagcattgagaaatgttgacaaattaatttgttggggaaccaaagatagcatttctgatgacaactcccacagtgattggccagttgtatgatgagtacactgctggaaagagggtaaactgggagttagtggatggtcccaatgccctgcctacagcagagtgccaaccagccctgagtgcaaaattcaagttcaatgtgtgtgcttgtgtgtggtgtgctttatggacccgcaaataccatattcattattgatgataagatcttcacagaatcctgtagctactaatgcattgagtttttaatctcagtacatcagccaggaggagccagatcacagggtagtgatgtctactgggattatactcataacatctacacaaaacaagttgagaaggatccacgttttcattgtttatcagaattgtatctcatttggctgagcattacttttgtcagaatgtgttatctgtaaaccatgtgtagtgaaattcttctgtaactttggattaaaggtatttatggtctttttgtttgtttgatttttaagtaagttatttcttttgtagacctgctgatggtatggttccatccttctgacctcagcatccaatctttttaaggatttttgttttcaatattgttattttaaattgtggttgaagcaatagaaaattgaaatatggattgtgcatgactgtgtcttgagtgtaaaaatattgcagtttgaaacttggacctaaagtattgcaaataaaaatgacaaacatcaatgaaaaaaaa

SEQ ID NO: 28742 - DNA, 1251 bp, Homo sapiens
atgtcatctccctaagccctcatctccagcctcggcaacaagagtgaaacttcgtctccaaaaaaaaaaactcaagcaaatgaagttcataataataggggatgttgataaaacttgtggcagccttccaattcatttacagttgtttcgttttgtttttgttttaatgtccattttctgttgactgttcccagttttcattttccatacagtctgtatgtaaagtctggttttcattaagctgtggccagtatttgccactacaacagaaacacactgtcacacttgctagaatataactgtacttgggcttctcctttcctgtgaagtagtgctgggctttctagagtttaattctcaagtggcacaagatagcagagcccatgcattttaatggctgagactgctaagagtgaacctaaacacttacaagttgcagagagaaatgaaaaagtaattacatgctattagcattgagaaatgttgacaaattaatttgttggggaaccaaagatagcatttctgatgacaactcccacagtgattggccagttgtatgatgagtacactgctggaaagagggtaaactgggagttagtggatggtcccaatgccctgcctacagcagagtgccaaccagccctgagtgcaaaattcaagttcaatgtgtgtgcttgtgtgtggtgtgctttatggacccgcaaataccatattcattattgatgataagatcttcacagaatcctgtagctactaatgcattgagtttttaatctcagtacatcagccaggaggagccagatcacagggtagtgatgtctactgggattatactcataacatctacacaaaacaagttgagaaggatccacgttttcattgtttatcagaattgtatctcatttggctgagcattacttttgtcagaatgtgttatctgtaaaccatgtgtagtgaaattcttctgtaactttggattaaaggtatttatggtctttttgtttgtttgatttttaagtaagttatttcttttgtagacctgctgatggtatggttccatccttctgacctcagcatccaatctttttaaggatttttgttttcaatattgttattttaaattgtggttgaagcaatagaaaattgaaatatggattgtgcatgactgtgtcttgagtgtaaaaatattgcagtttgaaacttggacctaaagtattgcaaataaaaatgacaaacatcaatgaaaaaaaa

SEQ ID NO: 28743 - DNA, 562 bp, Homo sapiens
  misc_feature (12)..(12): n is a, c, g, or t
  misc_feature (43)..(43): n is a, c, g, or t
  misc_feature (55)..(55): n is a, c, g, or t
  misc_feature (71)..(71): n is a, c, g, or t
caagaaagcttntggacaagcttactggacttttaaccgggtngaagagaagctncttgaggtgggcagtntgaccttaccaggaggaggccgcccggcacacataccaggcactcaactcgctgctagtggctgagctcccacagtttaaccagctggtcatgcagtggctgggccagatcctgtgcacattcgtgaccctccagagggaccttgcaaagcaagtgctgcagagggcagagggaagcatggcccagctgccccaccaccacgtcccagagcctgccttcaggaagctggtggaggacgcactgggccggacgagtaaccagcttcgctcctttcaagagacctttgagaaagtgcagccacctcccaccacacaaccgctccttccagggtctgaacgccaggtgcaggctctcctgagcaggtatggccctgggaagctgtaccaggtgacaagcaacatcagtgggactgggactctggacctgactctgcctcggggccaaatcgtggccatccttcaaaacaaggacaccaaaggcaacagcggccg

SEQ ID NO: 28744 - DNA, 451 bp, Homo sapiens
gcaagagatcctgcacagggtcaaggtctcaggacagagtatcactcagaactccttgggttgaaaataatataaacccaaagcaagccagggatctcattgtcccctcttgcccagctctgttgacagtgtctgtccccacttagctgccccaccaccacgtcccagagcctgccttcaggaagctggtggaggacgcactgggccggacgagtaaccagcttcgctcctttcaagagacctttgagaaagtgcagccacctcccaccacacaaccgctccttccagggtctgaacgccaggtgcaggctctcctgagcaggtatggccctgggaagctgtaccaggtgacaagcaacatcagtgggactgggactctggacctgactctgcctcggggccaaatcgtggccatccttcaaaacaaggacaccaaaggcaacagcggccg

SEQ ID NO: 28745 - DNA, 406 bp, Homo sapiens
cagtaactgagagatttcagaacttgaattggaattttagagaatcccagaaattagaagtttcttccaaaacgccgtaggctgctaagagccagccatctgctagtgagggccctgttgccctgatcagggtgggcccttcagtggcagagttaggatcaggcccagtactcctggctgtcaaaatgtgagcaaatgttggtgccagctttgacaggtttattcaagcacttgtgtctgtctgtgctcctcctctcccagccgctccttccagggtctgaacgccaggtgcaggctctcctgagcaggtatggccctgggaagctgtaccaggtgacaagcaacatcagtgggactgggactctggacctgactctgcctcggggccaaatcgtggccatccttc

SEQ ID NO: 28746 - DNA, 424 bp, Homo sapiens
gtgattcccctgcctcagcctcccaagtaggtgggcttacacacacgtgccaccacaccgggctgattttgtatttttagtagagatggagtttcaccatgttggtcaggttggtcttgaactcctgaccccaagtgatccactcacctaggcctcccaaagtgctgggattataggcataagccaccacgcctggccataatcccctacctttaactattgtaggtcagcaaaattttactgaaatctatcaaacataattcagtgattgtgaatgaccaattctataatatgcaacattattccactcttacatccccaatcattggactttacaggtatttttagcctgaatacacaatgtgctacttattatagaaatagatctctcatctttctctttcccacagtaatttagctatcc

SEQ ID NO: 28747 - DNA, 435 bp, Homo sapiens
tctccttatcatgctactttttttctccaaattcctgagtgtatggaacatactttaaatagcagtttcaatatttttgctactaattccatcatctctgtcatttctggatctaattctactgattgatacttttttctttttgctttctgtttgtttgtttttatcacctgacattgagtatgtactattgattgatttttctactgtttgcagatcatattttcctcctcctattcatttcaagtaattttttgtggcatgctaaacgttgcaaattttacattattgaatgtcgcattttattgaattcctttaaagagcattagattttattctggcatgcagttaaattacttaggattggttttatttttatttttatttttaagaggcagggtctcactctgttacccaggctggagtgcagtggca

SEQ ID NO: 28748 - DNA, 390 bp, Homo sapiens
tcctaatctgaggtggctctctgtaagcccctgaacaatgtcagggtgggggctgattgccaggaagaccaaaccatgattagaagcttaggtctttcagccccactccccatgctccagagagacgagaggagctggagactgagttagtaatccgtcaagcccacgtgatgaagcagccataaaaatccctaaaaggcaaaatgggagaacttctgggtcagtgaacgtgtcatgtgttggaaaggtggcacgaccgaagtccatggggacagaagctcccgtgctcacgccctctggagcttgccctacatgcaagatcttcatctggctgttcatgtgtttattctatcaagtcctttgtcataaactggtaaatgtgagtaagtc

SEQ ID NO: 28749 - DNA, 351 bp, Homo sapiens
cggaaggccttttctacttaaccagagcacagaacatgtacaggagagcatcacaaggctgaatggaaaaccagttcttgtggtcattgatgactaaaataataaatgtctttagaaaaagcgacactaagaaatgcatgttttgtgttaaaaattctgctctagagctttataaataattttaaagcttctggtgctcagtgttctcctttgaggaatacgggtttatgtggttcatctcccttagtccccactgcagctaggggaaaagtgggatgctctcatcccatctcaccactgaacatggagccactgcttgggctaaatccgtcttttacaaattttttcccc

SEQ ID NO: 28750 - DNA, 726 bp, Homo sapiens
tttggggttctaaactgggaagtttctagaagaaactgaggagactgttgctgtaggctgatcccaaaggattgacacaaatggaagaaattctactttagcaggaaattgaatggattaaatgtagagtacggagactccttgatacttttactttcatgatttattccaccttttttggtctgatgaattgttacttatggtaaatgcctgcactactgtataaagtgtcctatcgtagttgttccaaagaaaaaaaactcatttgaactccaaagatagacattattctctgtcttttttaaaattcatttaaaaaaatattagaagccacaaaaccaataaataggtaacaattattctatgtacattaactgatagtccatgtgggcttctataacaaaataccattagttgggtaacttacaaacaacatatttatttctgtaggctgggaaggccaagatcaaggcagatttgttttctggtgagggtctgcttcctggttcatagatggcaccttctagctgagtccttacatggtggaagggaaactgtggtttcttcagcttcttacaagggcactaatcccattcataagggctccaccctcatgacctaatcacattccaacatctccacctcctatgctatcacattaaggattaggtttcaatatatgtattttaagggaagataaatacctgggccttaacaactgatgaa

SEQ ID NO: 28751 - DNA, 416 bp, Homo sapiens
gagtctagttgaaagaagaggaaccaaagaaggaggagggtaaggggtttggtagcaagaaaacaccagaaaggattagagctttagtcgtattcccagcaacagaatgctacagtgtaaaataatgttagtgttctatctccaatatgtatatacatagtttacacctaaaatttcctctgttagatttaatgtgctagaacagcaagtacagtacagaaatacaatggaacaaagagatgttgccagaggacaaaaatgtgccgaagagccagggctctctcagcattgtgtccttgaatggtaacagaaaggagttaaagttttctcaaggacaaagaagaaatgcaacacctctcttcattgcaactcattttgtcaaagcttaagaaaataaagtctgattactgcaagac

SEQ ID NO: 28752 - DNA, 345 bp, Homo sapiens
ttttttttttgagacgagtctcactgtcacccaggctggagtgcagtggcacaatctcagctcactgcaacctctgtcacctgggctcaagcaatcctcccgcctcagcttcctgagcagctgggaccacagggacacaccagcatgcccagataattttttgtacttttggtagagtcagtgttttgccatgttgcccaggctcgtcttgaacacctgggtcttgagctcatgtgatctgcctgcctcagtctcccaaaatgctgggattacaggtgtgtgccactgtgcctggccaagatggtcactttcggacctctcaaaccccaaaccagagggccaacc

SEQ ID NO: 28753 - DNA, 713 bp, Homo sapiens
gtatctcaccatggagaaattaacccaaaacataaacgcaaggagctgctgtccatgacacgcacagcgatgcgtttagtgggaatgtggactcatatctgcagcttgctttaaatgcaccccaaaatcaatggattggtggacggagaaacaacagaccatttacagcacctaggtgtgggtgcataatgtttctgcatgtttgaaaacgctcataataaaatgttggtaaagaaaagaaatggctaaaagtaacctaaaacggactcggatccattgcttgatttgtggagatgccctctgcaaccttagaaaggcgcctttctccactgcctccggacagctctgccccagcctgcgtgcctgagctccagggcagtccagtccatgcacatgttgatgctctgattcattctggcccccagcagtccccatgtcacatgtgggtttataaggcagaagctcagaggctccccttcgcctagctggtgttagggtttccagcaggaaggtattggtggtggtttttgttttaccagggagacatttttccttctggtggtcctcgttcctgtaactcttgcaactttgtgtgatagtttaggatgatcagtaagtgaagctcacccctcctcccatccccttttcatgggaactgttcagattcagtgggtttttagttggctttagccatggaagaagtaaatacaggc

SEQ ID NO: 28754 - DNA, 451 bp, Homo sapiens
gatggtcttgaactcctgacctcaagtgatccacccacctcggcttcccaaagtgctgggattataggcgtgaggcaccgtgccttgccgataaatggattttaagctgagtctttgagggaagagtaggacctgcactgaaacaaaaagacaatttgtggggttggggagaggaaccagatgtaaacaatggaaaggttttggtgtcactttgagaaggattttttggaagggttttgcaatgtccattctgtatcttgggttaacactagtaagtcaaatggagaataatttgagtgtcactcattcctacagatagaaaaattttaaagtagcttgggccgggattttccttttatcatgtgccattgtgtacgtgtctgctacttcatttagttccttttttaaaaatggaatttttatcacttctgtgcaaaggttaaattttttt

SEQ ID NO: 28755 - DNA, 454 bp, Homo sapiens
ccaggccacacgcgtgctttgcccctactgcttgggttcatcctcacgacccacccttagcgaggaagagcggtcatctacccacttcacagatgcggcaactgaagacccgagacggggagagagctgctacaggctcgagtgaggagatgtggtgggccccatgggagaatctggcttccacccgtgaatccgagcctcggccacggtcgccactcgcccttacccacttccacgctgtagtgcgaccagccacccgcgtggcattcgccacgacccagctgggttcacagacaggagctgcctcctcccactgcaggcgggtgacccaaggcccccactgccctatacctgcccagatcgcggggcactcgggctccgcagctctctggccgcgctcggggtccggggagccgggctgcggctggggggcctggaggatgagggcgaagac

SEQ ID NO: 28756 - DNA, 909 bp, Homo sapiens
gtttttaacatctggatttaggctaaaaagctgcttcctggcctcagggcgcaaggccacaacagctaaatatacctgtttatttccctcaagaggccaacttggcatctcctcagacccagccgcctgccactttcatactcagtctctggcctctctggaatcatagccccaccagacctgggacagctctgcctcaggaggccagcagtccctgccacctctctctctgtccttccgtcagctgtaggcctggccccacttaacctcacagacatctggggtagagttgccagatttagtaaataaaagtacagggctcccagttaaatttgaatttcaggtaaacaatgagcatttttttttttagtacattatgtctcatgcaacatttgagactgacttatgctgaaatagtacttgctgtttatctgacattcaactgtaactgggcatcctgtattttatctggcaaccctgatctggaagaataaagcagagctcgaggaagaggacagcctctcatcctgctcaggtaatagagaagccgaggctggatccaaaggcagccatggtccctatagtagaaagagcataaacttaggagttgagccaggttagaacctcagcttggcagctcaaaactgaggaccctggggcaagtgccttctcggttctctcatctgtcgagtgtgagaaatcagacctgccttgcagagctattgagaggattcattgacaggaggcccctaaagtttgtttagtatgtgcccaggtgtgatgacagtgcttcttgtgatttcacctggttctctacccaccagtcctccagacatgctggagggcagggctatcagttcatgatatagggcaatgccttgatcctctgccagcctccttataagccca

SEQ ID NO: 28757 - DNA, 223 bp, Homo sapiens
ttgctttgcaggcctcccctccctggctggctctggtctgggccctgcacacgttggggaggcccaaagacaacccagaggagcctggcataaccagcagggctcagcatggatgggactggggtaaaatcagggcttctgagcatgactccaagagtgtgaggtccccagagaaagtggcttagggaggtagtgggatgtggagagtgaaacactcttcaga

SEQ ID NO: 28758 - DNA, 1108 bp, Homo sapiens
agtgagatttgaggagtccctgttgttctgcaacatccctagattgaatgatctgttgcagatggtggataccaagttcaaatttaaagatttctttgtaagcagtaaagtgactttcacttatttaacttagaactggaaaaagtaacttttttccagattacattttctgtatatttgtaaaatgcaaaagcaatatatatttgttgtgagaaaattagaatatacagataaaataaaatttaaaaaaacacccaaagataaccagaagaaaatttttgctatgtaacctttttcttctggtctttgcaaatcctgccgtagaaactttttaacttcaggagtgtccttcctttgctctattaggacattacagaaaccaatactatgaaaagctgacagcagtatctggattaactttttaaaaacaatgaaagcattttacagaaattacatttcagatcgtgctggaactgtgttcagaagatatcctcagagggaatctggcctgagcaccatcatgtttaattgcctcctcctgtcttgcattttcctcccagcccccttcctaccccttagcagagggccaggtgagggtgcttggggcccatgggggctgggagtgtagacttcagttacacccccagcccccaggggaaagcattagccttgaatcctcaatcccaggccctctactaaccactctcaacctatggtatttatcttttgattattctgtgcatctataaaaatgggattatattgtacagaatgctttgtaagctttctctccccacataagaatgccctgtaagcattttgttaaatatttttaatgactttagagtccaactttatactcctctttatgcattttggttttctaatttaatggtagtgtaaacgtttttggaataaacattcctgtggctaaatctttgcatacttcttgtattattactttaagatgtttctaagaagtagaatgactgaatcaaagagtgaacattttaaaatatcttaaaatatacatttggtaaataatgtatacactgtagaaaaactggaaaatagatgagcagacagaataaaatgtaaattacctgta

SEQ ID NO: 28759 - DNA, 1040 bp, Homo sapiens
  misc_feature (628)..(628): n is a, c, g, or t
agtgagatttgaggagtccctgttgttctgcaacatccctagattgaatgatctgttgcagatggtggataccaagttcaaatttaaagatttctttgtaagcagtaaagtgactttcacttatttaacttagaactggaaaaagtaacttttttccagattacattttctgtatatttgtaaaatgcaaaagcaatatatatttgttgtgagaaaattagaatatacagataaaataaaatttaaaaaaacacccaaagataaccagaagaaaatttttgctatgtaacctttttcttctggtctttgcaaatcctgccgtagaaactttttaacttcaggagtgtccttcctttgctctattaggacattacagaaaccaatactatgaaaagctgacagcagtatctggattaactttttaaaaacaatgaaagcattttacagaaattacatttcagatcgtgctggaactgtgttcagaagatatcctcagagggaatctggcctgagcaccatcatgtttaattgcctcctcctgtcttgcattttcctcccagcccccttcctaccccttagcagagggccaggtgagggtgcttggggcccatgggggctgggagtaaanaatttaaatgcggcaacaactcccaaaaaattgatggggcgtgcacagtcaaaacccccaaaaatgactccttgtaaaatgtgtttgtgcttatttaaattaaaccacaaggcccttccctgaacaccctggctacttacacacacttacattgaaatccgggtgcacacagattagaggggtgggactttttcgttcttaaaattatgtccaaagggttttcttttcttattttccagggagttgggttttcttggaaaagtcttttcttgggagaaacaggcggtttttctccacccagtgttgatacatttcggacccgccggaaaaccaatttttgtgggcgatacaaaacaggctgggtttacttttaaaatattaacggtataaccgctttactttaacaggtccg

SEQ ID NO: 28760 - DNA, 375 bp, Homo sapiens
ctgaaatcagagatgggctctaccactgctttaatatgcgactttagtaacccactgattctgttgtagaattcttggacttgaagtactgttagttatcatttttcagtccagatagtattgcatcaaacaaaattatgaaatatatacaaatttgagacattatgagcagaggcattgatgaccacatgctatatcttaaaattttactgatagttgattttagcaagtcttatgaaacactaagaacaatgtctggtgcctagcaaattctcagtaaatttcagctagtattattacagttagtattactttactatgctccctggataaaatttttataattaaatggttaatgactttccattgaggtct

SEQ ID NO: 28761 - DNA, 210 bp, Homo sapiens
acctttccttgtgtttactttcctctttaattcttgctttcttttccaagtcttatcaatatatgctacccacatatttgtgtctctgtagcggtgtggaatatagaaaggcaggagctcagaagtctctgaaatcagttcatgggttaaaacccatgaactttggtaagtacattgacctccttaactctcagtttcctcatctgttaa

SEQ ID NO: 28762 - DNA, 403 bp, Homo sapiens
ttttttcttttgagatggagtcttgctctgttgcccaggctggagtgcagtggtgtgatctcggctcactgcaacctccgcctcccgggttcaagcaattcttctgcctcagcctcccgagtagacctgggactacaggcgcgtgtcaccacacccggctaatttttttctatttttaatagagacgggggttcactgtgttagccaggatggtctccatctcctgacctcatgatccgccccccgtggcttcccaaagtgctgggtaagggctttttttaaaagtgatgtcaaggaaataactgtcatgaataaaagaaatgtcagacataaatactcttgatgccctatgattatttctgtggccatagggattaggtgctctgattagtgatttatataa

SEQ ID NO: 28763 - DNA, 206 bp, Homo sapiens
actacattatgtagaattttgtaggtcattatttgtactttggattttattctaagaagtttctggagagttttaaaacatggaagcaacaggacctcatttatgtatttaaaaaggtcactccagctgctgagggaagaatggagttacgggagggcaggagtagaaacagaagaccactcttccaggaaagccatgactggtac

SEQ ID NO: 28764 - DNA, 516 bp, Homo sapiens
gcatatacaaaaatgtatatgtgtttatggtggctgtatgataagattaaaagcgacttgtttgaagaaatttcaaaagttacaaaattggctggacatggtggctcatgcctcccagcactttgggaggctgaggcaggtggatcacttgaggccagagtttgagaccagcctggtcaacgtggtgaaaccctgtctctactaaaaatacaaaaattagccaggagtggtggtgcatgcctgtggtcccagctactggggactaaggcatgaaaatcacttgaatacgggatgctgaagctgcagtgagctgagattgtgccactgcacttcagtctgggtgatgaaaggagatatctcacaaaaattacaaaaataaaaaagttacaaaatgtccgcatttcatggattatcagcactttgcaccttatttaattgctaaataattctttaaaaatacctgatttctgtgtgagtgtttgtgtgtgtgtttttatcaaatttaaatggcactta

SEQ ID NO: 28765 - DNA, 477 bp, Homo sapiens
tggacatctgaaaaactaatcattttgagcagaacaatgcattaacaccccttctttttaatttgtatgggaatgacttgaagacttctctatgtgagatagaacaatgtctcccccatgcccagttttgagaatagaaaaacgacacttctttgtaatagctagtatggtagagtggtctcaaaagagtatttaatttgtgtaagattggatggttcaagacaaagctaaaaaataaaactgttacagggccttgggtatttaaatggcttatatttgccagaagctactggcttgaaaataagtattctctgagtggctttaatttctgtttttctctgtatggcctcagtggataaagagagacagttaccgagatctcagatagaacattgggcctgattgattaactttgctaagagctacagcagacattagactattttatgaaggaaaacttggccctcccagtggttt

SEQ ID NO: 28766 - DNA, 859 bp, Homo sapiens
ggggccgcagaaccagtctcctcctttcccctgctcagacaaagggcacgggaagggctttgctggggcaaaggggggtggggggttctctgtcccacgacagatgggtcgcggttaagactttaattgctgacttttgggccggatcagattccttttcctacctgccacttcccagcagcgaaaaatccccctcctgctgcactcctccgccaccgggctaggttgaaaggaaaaagccaagaagcgcgaagagcccggctctggaaggctttggagagtccagctgacttgtacacaattcgcggcctctggagccttacctgccttcttgactgaatgccaccagttcgttttacgcttgtggcctgaggtgtgtccctccagactgagaggctatgactcagggttggactttatggaaaaaaagaagtttataaaacaagtaacccagtttctccaacctttactgtggagcaacagcgtcaagcaacaaaacccagcaaagttttgcttgtcacttacaagggtgttactgaaatctggaaggcgaacaattagaagatagcccaaacatgctctattgctctacactgaaatacttgcctccaataatagaaaaaacctgttttcgtgcaattgattgattagcgttctgcagcagtccctggacaattttaaagacattttgtgtttgtggccaaaattagaaacaagcagacacacacacaaaacaaccatattcaagacacggttcgactgtttccttgacactacccacgaagtttaaagcattttttatgttattttcaaactttcttaagtgatcccatgaaataaaagtcgataatagaaatta

SEQ ID NO: 28767 - DNA, 723 bp, Homo sapiens
atgtccaaaccttcagaccacatcaagcggcccatgaacgccttcatggtatggtcccggggccagcggcgcaagatggcccaggaaaaccccaagatgcacaactcggagatcagcaaacgcctaggtgccgaatggaagcttctgtccgaggcagagaagcggccatacatcgatgaagccaagcggctacgcgcccagcacatgaaggagcaccctgactacaagtaccgacctcggcgcaagcccaagaacctgctcaagaaggacaggtatgtcttccccttgccctacctgggcgacacggacccgctcaaggcggctggcctgcccgtgggggcctccgacggcctcctgagcgcgcccgagaaagcccgggccttcttgccgccggcctcggcgccctactccctgctggaccccgcgcagtttagctcgagcgccatccagaagatgggcgaagtgccccacaccttggctaccggcgctctgccctacgcgtccaccctgggctaccagaacggcgccttcggcagcctcagctgccccagccagcacacgcacacgcacccgtcccccaccaaccctggctacgtggtgccctgtaactgtaccgcctggtctgcctccaccctgcagccccccgtcgcctacatcctcttcccaggcatgaccaagactggcatagacccttattcgtcagcccacgctacggccatgtaa

SEQ ID NO: 28768 - DNA, 1401 bp, Homo sapiens
atgaataactcaacaaactcctctaacaatagcctggctcttacaagtccttataagacatttgaagtggtgtttattgtcctggtggctggatccctcagtttggtgaccattatcgggaacatcctagtcatggtttccattaaagtcaaccgccacctccagaccgtcaacaattactttttattcagcttggcctgtgctgaccttatcataggtgttttctccatgaacttgtacaccctctacactgtgattggttactggcctttgggacctgtggtgtgtgacctttggctagccctggactatgtggtcagcaatgcctcagttatgaatctgctcatcatcagctttgacaggtacttctgtgtcacaaaacctctgacctacccagtcaagcggaccacaaaaatggcaggtatgatgattgcagctgcctgggtcctctctttcatcctctgggctccagccattctcttctggcagttcattgtaggggtgagaactgtggaggatggggagtgctacattcagtttttttccaatgctgctgtcacctttggtacggctattgcagccttctatttgccagtgatcatcatgactgtgctatattggcacatatcccgagccagcaagagcaggataaagaaggacaagaaggagcctgttgccaaccaagaccccgtttctccaagtctggtacaaggaaggatagtgaagccaaacaataacaacatgcccagcagtgacgatggcctggagcacaacaaaatccagaatggcaaagcccccagggatcctgtgactgaaaactgtgttcagggagaggagaaggagagctccaatgactccacctcagtcagtgctgttgcctctaatatgagagatgatgaaataacccaggatgaaaacacagtttccacttccctgggccattccaaagatgagaactctaagcaaacatgcatcagaattggcaccaagaccccaaaaagtgactcatgtaccccaactaataccaccgtggaggtagtggggtcttcaggtcagaatggagatgaaaagcagaatattgtagcccgcaagattgtgaagatgactaagcagcctgcaaaaaagaagcctcctccttcccgggaaaagaaagtcaccaggacaatcttggctattctgttggctttcatcatcacttgggccccatacaatgtcatggtgctcattaacaccttttgtgcaccttgcatccccaacactgtgtggacaattggttactggctttgttacatcaacagcactatcaaccctgcctgctatgcactttgcaatgccaccttcaagaagacctttaaacaccttctcatgtgtcattataagaacataggcgctacaaggtaa

SEQ ID NO: 28769 - DNA, 1400 bp, Homo sapiens
  misc_feature (1390)..(1390): n is a, c, g, or t
  misc_feature (1399)..(1399): n is a, c, g, or t
atgaataactcaacaaactcctctaacaatagcctggctcttacaagtccttataagacatttgaagtggtgtttattgtcctggtggctggatccctcagtttggtgaccattatcgggaacatcctagtcatggtttccattaaagtcaaccgccacctccagaccgtcaacaattactttttattcagcttggcctgtgctgaccttatcataggtgttttctccatgaacttgtacaccctctacactgtgattggttactggcctttgggacctgtggtgtgtgacctttggctagccctggactatgtggtcagcaatgcctcagttatgaatctgctcatcatcagctttgacaggtacttctgtgtcacaaaacctctgacctacccagtcaagcggaccacaaaaatggcaggtatgatgattgcagctgcctgggtcctctctttcatcctctgggctccagccattctcttctggcagttcattgtaggggtgagaactgtggaggatggggagtgctacattcagtttttttccaatgctgctgtcacctttggtacggctattgcagccttctatttgccagtgatcatcatgactgtgctatattggcacatatcccgagccagcaagagcaggataaagaaggacaagaaggagcctgttgccaaccaagaccccgtttctccaagtctggtacaaggaaggatagtgaagccaaacaataacaacatgcccagcagtgacgatggcctggagcacaacaaaatccagaatggcaaagcccccagggatcctgtgactgaaaactgtgttcagggagaggagaaggagagctccaatgactccacctcagtcagtgctgttgcctctaatatgagagatgatgaaataacccaggatgaaaacacagtttccacttccctgggccattccaaagatgagaactctaagcaaacatgcatcagaattggcaccaagaccccaaaaagtgactcatgtaccccaactaataccaccgtggaggtagtggggtcttcaggtcagaatggagatgaaaagcagaatattgtagcccgcaagattgtgaagatgactaagcagcctgcaaaaaagaagcctcctccttcccgggaaaagaaagtcaccaggacaatcttggctattctgttggctttcatcatcacttgggccccatacaatgtcatggtgctcattaacaccttttgtgcaccttgcatccccaacactgtgtggacaattggttactggctttgttacatcaacagcactatcaaccctgcctgctatgcactttgcaatgccaccttcaagaagacctttaaacaccttctcatgtgaccccgtgcctttctttganccttggaang

SEQ ID NO: 28770 - DNA, 417 bp, Homo sapiens
gaaaagtctcatacctattactttgtagtagttgttattactaaagtgttataatgtgtctgcaactatatttcatgtttatattagtcttgtgaaaagtaatccttctgtctgtttgtagacacagaaacgtaaaatggatggcgcacctgatggtcgaggaagaaaaaagaagctgaaactatgaatatgtttttgtttcataatcactaactttaaaccagtagttctttaatttacgggtcttcataagatgtactgtacaatgctcaattgttatgtcatttaaagacatcaggttcatctgtttactgagctagaaacatagtatgtagtttcacttttttaaatgcaacagctgtgctgaaatttttttatcattaacacttgaagtaataaaataggcttcatttatta

SEQ ID NO: 28771 - DNA, 331 bp, Homo sapiens
ctcaacgcttgatacttcctcgaccaaagccttcaacacagaaacgtaaaatggatggcgcacctgatggtcgaggaagaaaaaagaagctgaaactatgaatatgtttttgtttcataatcactaactttaaaccagtagttctttaatttacgggtcttcataagatgtactgtacaatgctcaattgttatgtcatttaaagacatcaggttcatctgtttactgagctagaaacatagtatgtagtttcacttttttaaatgcaacagctgtgctgaaatttttttatcattaacacttgaagtaataaaataggcttcatttatta

SEQ ID NO: 28772 - DNA, 450 bp, Homo sapiens
ctagaggactccttcgacggtgtctggaaagaggtgcaagaagactgcagagatgaatgaaaagctctccaagatgggcgaaagttcacttagaaactttacaatggatacagagtcaagtgtttataacttcgaaggagaagactatagagaaaaacaaaagattgcattcacagagtggattgaaccacctaaacgagaaagaaaagccaactatgccgttgatgcatatttcagggaagctcttcgtgttagtgaacctaaagcacccaaggctcctcgacctccaaaacaacccaatgttcaggatttccagttctttcctccacgtttatttgaattactggaaaaagaaattctgttttacagaaaaactattgggtacaaggtacctcgaaatcctgagctgcctaacgcagcacagaacaccgtcgaaggggtaccgagctc

SEQ ID NO: 28773 - DNA, 155 bp, Homo sapiens
tgtccaaacgctgatacccaaggctcctcgacctccaaaacaacccaatgttcaggatttccagttctttcctccacgtttatttgaattactggaaaaagaaattctgttttacagaaaaactattgggtacaaggcattggcaattatctgcc

SEQ ID NO: 28774 - DNA, 2666 bp, Homo sapiens
ggacgcgtgggtcgacccacgcgtccgtgctgatgtagtaattttgtatgattctgattggaatccccaagtagatcttcaggctatggaccgagcacatagaattgggcagactaagacagtcagagtgttccgctttataactgataacactgtagaagaaagaatagtagaacgtgctgagatgaaactcagactggattcaatagtcattcaacaagggaggcttgtggatcagaatctgaacaaaattgggaaagatgaaatgcttcaaatgattagacatggagcaacacatgtgtttgcttcaaaggaaagtgagatcactgatgaagatatcgatggtattttggaaagaggtgcaaagaagactgcagagatgaatgaaaagctctccaagatgggcgaaagttcacttagaaactttacaatggatacagagtcaagtgtttataacttcgaaggagaagactatagagaaaaacaaaagattgcattcacagagtggattgaaccacctaaacgagaaagaaaagccaactatgccgttgatgcatatttcagggaagctcttcgtgttagtgaacctaaagcacccaaggctcctcgacctccaaaacaacccaatgttcaggatttccagttctttcctccacgtttatttgaattactggaaaaagaaattctgttttacagaaaaactattgggtacaaggtacctcgaaatcctgagctgcctaacgcagcacaggcacaaaaagaagaacagcttaaaattgatgaagctgaatcccttaatgatgaagagttagaggaaaaagagaagcttctaacacagggatttaccaattggaataagagagattttaaccagtttatcaaagctaatgagaagtggggtcgtgatgatattgaaaatatagcaagagaagtagaaggcaaaactccagaagaagtcattgaatattcagctgtgttttgggaaaggtgcaacgagctccaggacatagagaagattatggctcagattgaaaggggagaggcgagaattcaaagaagaataagcatcaagaaagcacttgacacaaagattggacggtacaaagcaccttttcatcagctgagaatatcatatggtactaacaaaggaaaaaactatactgaagaagaagatcgttttctgatttgtatgcttcacaaacttggatttgacaaagaaaatgtttatgatgaattgcgacagtgtattcgcaactctcctcagttcagatttgactggtttcttaagtccagaactgcaatggagctccagaggagatgtaataccttaattactttgattgaaagagaaaacatggaactagaagaaaaggagaaggcagagaaaaagaaacgaggaccaaagccttcaacacagaaacgtaaaatggatggcgcacctgatggtcgaggaagaaaaaagaagctgaaactatgaatatgtttttgtttcataatcactaactttaaaccagtagttctttaatttacgggtcttcataagatgtactgtacaatgctcaattgttatgtcatttaaagacatcaggttcatctgtttactgagctagaaacatagtatgtagtttcacttttttaaatgcaacagctgtgctgaaatttttttatcattaacacttgaagtaataaaataggcttcatttattactaagtgtttcatttgatttatttttctattgtagttccatttgtgaagattgtgactttttgtttattagctataatttctacacttgtaaggcttacaaacaagttaaaaagaaaattgcaaataacatttgtccctttcagtcttcacctagttgtgtaattattttaattcactttgcctttgcagaaatttgggtattttctttgtagtgctattgagtctcatctggaaagattatataaattgcattctccttgcttatgtgggtagaatgggagaagaaggcaagacaaagtatacttaaattctatgcatatttctgttatgctttctgttttttttagttgattctgaaatgaatatgccctattcttttgaaagaatggccttttagttgtatagccaaagacatttagtattttccggttccttaaggtattactgtaccattttgtaaaaggaatattattattattatttttaattatttggtaaatattttgtcatatgaccttctgaagcagccacaacttagataatgtcagaactaaggtgatttttttttttttaattttgaaagcccagccaaaatgaggtgtgaatttgtcatactgttacattgaaattggtaacaaaatatatcccctcccatttggacttttagggtaaatgaaaattttattgtattttaaagtagtttctaagtgttagcaagactgactataattccagtttctgttttctatggacagacctgataaactggagaccctaaagcaggaatacccaaattatagtgtcaggattttagctgtaccagaggcctttatgtgctacacataatttgtataaaattttatatgtgcagattgggtacataaacagttctccatttttctaagggaatgcaataaatgtagcatcgtgaataaatataacttttataatccgtaaa

SEQ ID NO: 28775 - DNA, 4684 bp, Homo sapiens
ctaacaacaaaaaaccgtgagacttcacttggggtaaccataacgtcgtcaaggctgtggcgtcacgcctctaagcggatacggcagaagttttggggccagacacaagacttccaagtttgaatgggcagcgcaaaacccagacaagttttccggtagtgccgccaacccctgtcaggcacagaagacacagcgagaaccgtgagccgttacgaaagcctaaaacactgagctcgcgtcctgccaagcagcaggcgcacaaacctacacctccgagcgctccctggaggtcccgcccactcttctctcccgagccggctagagatctggaagagggcgggccaagggtgaggagggcagtatgcgcatgcgcgctcaggacccagtcagtgagccaataaggaatctcgcgagtgttgaaagtcggtggcgtaggtcgtcgtcctggatgctggcgagatagatgttatcttccagaggaagaggaggaggcggcgaagcgttttcccagcctcagtctctctttcgttttccttttcccttcccccaaccctccgcccttctctaaatcagccggccttccttgacctcagtgacccgtctggccccgcccaccctcgtcgacgtgattcccgccgtgaggtaagcgccggtggaacctagagccccgcggaagagcagaacgtttgggagtgtgcagctcctgggcccggctcaggcccgtcgcggaggcgcggcgcaggggagcgctcgggtgggagtctcgctcctccaccagtttattgcgacgtagcatccaggcctaggcctccccgtccatccccgccggactcgggcctctggcagcagcgggtgacgcagacggaacatcatgtcgtccgcggccgagcctccgccacccccgcctcccgagagcgcgccttccaagcccgcagcctcgatcgccagcggcgggagcaacagcagcaacaaaggcggccccgaaggcgtcgcggcgcaggcggttgcgtctgcggccagcgctggtcccgcagacgccgagatggaggaaatatttgatgatgcgtcacctggaaagcaaaaggaaatccaagaaccagatcctacctatgaagaaaaaatgcaaactgaccgggcaaatagattcgagtatttattaaagcagacagaactttttgcacatttcattcaacctgctgctcagaagactccaacttcacctttgaagatgaaaccagggcgcccacgaataaaaaaagatgagaagcagaacttactatccgttggcgattaccgacaccgtagaacagagcaagaggaggatgaagagctattaacagaaagctccaaagcaaccaatgtttgcactcgatttgaagactctccatcgtatgtaaaatggggtaaactgagagattatcaggtccgaggattaaactggctcatttctttgtatgagaatggcatcaatggtatccttgcagatgaaatgggcctaggaaagactcttcaaacaatttctcttcttgggtacatgaaacattatagaaacattcctgggcctcatatggttttggttcctaagtctacattacacaactggatgagtgaattcaagagatgggtaccaacacttagatctgtttgtttgataggagataaagaacaaagagctgcttttgtcagagacgttttattaccgggagaatgggatgtatgtgtaacatcttatgaaatgcttattaaagagaagtctgtgttcaaaaaatttaattggagatacttagtaatagatgaagctcacaggatcaaaaatgaaaaatctaagttgtcagaaatagtgagggaattcaagactacaaatagactattattaactggaacacctcttcagaacaacttgcatgagctgtggtcacttcttaactttctgttgccagatgtgtttaattcagcagatgactttgattcctggtttgatacaaacaactgccttggggatcaaaaactagttgagaggcttcatatggttttgcgtccattcctccttcgtcgaattaaggctgatgttgaaaagagtttgcctccaaagaaggaagtaaaaatctatgtgggcctcagcaaaatgcaaagggaatggtatactcggatattaatgaaggatatagatatactcaactcagcaggcaagatggacaaaatgaggttattgaacatcctaatgcagttgagaaaatgttgtaatcatccatatctctttgatggagcagaacctggtccaccttatacaacagatatgcatctagtaaccaacagtggcaaaatggtggttttagacaagctgctccctaagttaaaagaacaaggttcacgagtactaatcttcagtcaaatgacaagggtattggacattttggaagattattgcatgtggagaaattatgagtactgcaggttggatggtcagacaccccatgatgagagacaagactccatcaatgcatacaatgaaccaaacagcacaaagtttgttttcatgttaagcacgcgtgctggtggtcttggcatcaatcttgcgactgctgatgtagtaattttgtatgattctgattggaatccccaagtagatcttcaggctatggaccgagcacatagaattgggcagactaagacagtcagagtgttccgctttataactgataacactgtagaagaaagaatagtagaacgtgctgagatgaaactcagactggattcaatagtcattcaacaagggaggcttgtggatcagaatctgaacaaaattgggaaagatgaaatgcttcaaatgattagacatggagcaacacatgtgtttgcttcaaaggaaagtgagatcactgatgaagatatcgatggtattttggaaagaggtgcaaagaagactgcagagatgaatgaaaagctctccaagatgggcgaaagttcacttagaaactttacaatggatacagagtcaagtgtttataacttcgaaggagaagactatagagaaaaacaaaagattgcattcacagagtggattgaaccacctaaacgagaaagaaaagccaactatgccgttgatgcatatttcagggaagctcttcgtgttagtgaacctaaagcacccaaggctcctcgacctccaaaacaacccaatgttcaggatttccagttctttcctccacgtttatttgaattactggaaaaagaaattctgttttacagaaaaactattgggtacaaggtacctcgaaatcctgagctgcctaacgcagcacaggcacaaaaagaagaacagcttaaaattgatgaagctgaatcccttaatgatgaagagttagaggaaaaagagaagcttctaacacagggatttaccaattggaataagagagattttaaccagtttatcaaagctaatgagaagtggggtcgtgatgatattgaaaatatagcaagagaagtagaaggcaaaactccagaagaagtcattgaatattcagctgtgttttgggaaaggtgcaacgagctccaggacatagagaagattatggctcagattgaaaggggagaggcgagaattcaaagaagaataagcatcaagaaagcacttgacacaaagattggacggtacaaagcaccttttcatcagctgagaatatcatatggtactaacaaaggaaaaaactatactgaagaagaagatcgttttctgatttgtatgcttcacaaacttggatttgacaaagaaaatgtttatgatgaattgcgacagtgtattcgcaactctcctcagttcagatttgactggtttcttaagtccagaactgcaatggagctccagaggagatgtaataccttaattactttgattgaaagagaaaacatggaactagaagaaaaggagaaggcagagaaaaagaaacgaggaccaaagccttcaacacagaaacgtaaaatggatggcgcacctgatggtcgaggaagaaaaaagaagctgaaactatgaatatgtttttgtttcataatcactaactttaaaccagtagttctttaatttacgggtcttcataagatgtactgtacaatgctcaattgttatgtcatttaaagacatcaggttcatctgtttactgagctagaaacatagtatgtagtttcacttttttaaatgcaacagctgtgctgaaatttttttatcattaacacttgaagtaataaaataggcttcatttattaaaaaaaaaaaaaaaaaaaaaaaaaaaaaaaaaaaaaaaaaaaaaaaaaaaaaaaaaaaaaaaaaaaagagaacgagcaaaacaaaaaaaaaaaaaaaaaaaagaaaagaaaaaaaaaaaaaaaaaaaaaacacagagaaaggagaaaaaaaaaaaaaaaaaaataaataaaaagacgaacatgggagacagagagaaacgaaaagaaaagaaaatcgacaagaagagaaaaaggaggagcagcagaacaccgagagagagagacaaaaagaagaaaacaagacagaaaaaaaaagaacaggataaagaaagcgacaagtaaatgagtagaataaagaagcaaaaagaggatggaaggaagaaggaaaaagagataaaataaggaataatgacaacaatcttaagaaaaaagaggtgaaagtaac

SEQ ID NO: 28776 - DNA, 3216 bp, Homo sapiens
ctaacaacaaaaaaccgtgagacttcacttggggtaaccataacgtcgtcaaggctgtggcgtcacgcctctaagcggatacggcagaagttttggggccagacacaagacttccaagtttgaatgggcagcgcaaaacccagacaagttttccggtagtgccgccaacccctgtcaggcacagaagacacagcgagaaccgtgagccgttacgaaagcctaaaacactgagctcgcgtcctgccaagcagcaggcgcacaaacctacacctccgagcgctccctggaggtcccgcccactcttctctcccgagccggctagagatctggaagagggcgggccaagggtgaggagggcagtatgcgcatgcgcgctcaggacccagtcagtgagccaataaggaatctcgcgagtgttgaaagtcggtggcgtaggtcgtcgtcctggatgctggcgagatagatgttatcttccagaggaagaggaggaggcggcgaagcgttttcccagcctcagtctctctttcgttttccttttcccttcccccaaccctccgcccttctctaaatcagccggccttccttgacctcagtgacccgtctggccccgcccaccctcgtcgacgtgattcccgccgtgaggtaagcgccggtggaacctagagccccgcggaagagcagaacgtttgggagtgtgcagctcctgggcccggctcaggcccgtcgcggaggcgcggcgcaggggagcgctcgggtgggagtctcgctcctccaccagtttattgcgacgtagcatccaggcctaggcctccccgtccatccccgccggactcgggcctctggcagcagcgggtgacgcagacggaacatcatgtcgtccgcggccgagcctccgccacccccgcctcccgagagcgcgccttccaagcccgcagcctcgatcgccagcggcgggagcaacagcagcaacaaaggcggccccgaaggcgtcgcggcgcaggcggttgcgtctgcggccagcgctggtcccgcagacgccgagatggaggaaatatttgatgatgcgtcacctggaaagcaaaaggaaatccaagaaccagatcctacctatgaagaaaaaatgcaaactgaccgggcaaatagattcgagtatttattaaagcagacagaactttttgcacatttcattcaacctgctgctcagaagactccaacttcacctttgaagatgaaaccagggcgcccacgaataaaaaaagatgagaagcagaacttactatccgttggcgattaccgacaccgtagaacagagcaagaggaggatgaagagctattaacagaaagctccaaagcaaccaatgtttgcactcgatttgaagactctccatcgtatgtaaaatggggtaaactgagagattatcaggtccgaggattaaactggctcatttctttgtatgagaatggcatcaatggtatccttgcagatgaaatgggcctaggaaagactcttcaaacaatttctcttcttgggtacatgaaacattatagaaacattcctgggcctcatatggttttggttcctaagtctacattacacaactggatgagtgaattcaagagatgggtaccaacacttagatctgtttgtttgataggagataaagaacaaagagctgcttttgtcagagacgttttattaccgggagaatgggatgtatgtgtaacatcttatgaaatgcttattaaagagaagtctgtgttcaaaaaatttaattggagatacttagtaatagatgaagctcacaggatcaaaaatgaaaaatctaagttgtcagaaatagtgagggaattcaagactacaaatagactattattaactggaacacctcttcagaacaacttgcatgagctgtggtcacttcttaactttctgttgccagatgtgtttaattcagcagatgactttgattcctggtttgatacaaacaactgccttggggatcaaaaactagttgagaggcttcatatggttttgcgtccattcctccttcgtcgaattaaggctgatgttgaaaagagtttgcctccaaagaaggaagtaaaaatctatgtgggcctcagcaaaatgcaaagggaatggtatactcggatattaatgaaggatatagatatactcaactcagcaggcaagatggacaaaatgaggttattgaacatcctaatgcagttgagaaaatgttgtaatcatccatatctctttgatggagcagaacctggtccaccttatacaacagatatgcatctagtaaccaacagtggcaaaatggtggttttagacaagctgctccctaagttaaaagaacaaggttcacgagtactaatcttcagtcaaatgacaagggtattggacattttggaagattattgcatgtggagaaattatgagtactgcaggttggatggtcagacaccccatgatgagagacaagactccatcaatgcatacaatgaaccaaacagcacaaagtttgttttcatgttaagcacgcgtgctggtggtcttggcatcaatcttgcgactgctgatgtagtaattttgtatgattctgattggaatccccaagtagatcttcaggctatggaccgagcacatagaattgggcagactaagacagtcagagtgttccgctttataactgataacactgtagaagaaagaatagtagaacgtgctgagatgaaactcagactggattcaatagtcattcaacaagggaggcttgtggatcagaatctgaacaaaattgggaaagatgaaatgcttcaaatgattagacatggagcaacacatgtgtttgcttcaaaggaaagtgagatcactgatgaagatatcgatggtattttggaaagaggtgcaaagaagactgcagagatgaatgaaaagctctccaagatgggcgaaagttcacttagaaactttacaatggatacagagtcaagtgtttataacttcgaaggagaagactatagagaaaaacaaaagattgcattcacagagtggattgaaccacctaaacgagaaagaaaagccaactatgccgttgatgcatatttcagggaagctcttcgtgttagtgaacctaaagcacccaaggttctctacttcaaaacaaaacggtgagggtttcaggtttttcttcccgttatttgttctgg

SEQ ID NO: 28777 - DNA, 2946 bp, Homo sapiens
ctaacaacaaaaaaccgtgagacttcacttggggtaaccataacgtcgtcaaggctgtggcgtcacgcctctaagcggatacggcagaagttttggggccagacacaagacttccaagtttgaatgggcagcgcaaaacccagacaagttttccggtagtgccgccaacccctgtcaggcacagaagacacagcgagaaccgtgagccgttacgaaagcctaaaacactgagctcgcgtcctgccaagcagcaggcgcacaaacctacacctccgagcgctccctggaggtcccgcccactcttctctcccgagccggctagagatctggaagagggcgggccaagggtgaggagggcagtatgcgcatgcgcgctcaggacccagtcagtgagccaataaggaatctcgcgagtgttgaaagtcggtggcgtaggtcgtcgtcctggatgctggcgagatagatgttatcttccagaggaagaggaggaggcggcgaagcgttttcccagcctcagtctctctttcgttttccttttcccttcccccaaccctccgcccttctctaaatcagccggccttccttgacctcagtgacccgtctggccccgcccaccctcgtcgacgtgattcccgccgtgaggtaagcgccggtggaacctagagccccgcggaagagcagaacgtttgggagtgtgcagctcctgggcccggctcaggcccgtcgcggaggcgcggcgcaggggagcgctcgggtgggagtctcgctcctccaccagtttattgcgacgtagcatccaggcctaggcctccccgtccatccccgccggactcgggcctctggcagcagcgggtgacgcagacggaacatcatgtcgtccgcggccgagcctccgccacccccgcctcccgagagcgcgccttccaagcccgcagcctcgatcgccagcggcgggagcaacagcagcaacaaaggcggccccgaaggcgtcgcggcgcaggcggttgcgtctgcggccagcgctggtcccgcagacgccgagatggaggaaatatttgatgatgcgtcacctggaaagcaaaaggaaatccaagaaccagatcctacctatgaagaaaaaatgcaaactgaccgggcaaatagattcgagtatttattaaagcagacagaactttttgcacatttcattcaacctgctgctcagaagactccaacttcacctttgaagatgaaaccagggcgcccacgaataaaaaaagatgagaagcagaacttactatccgttggcgattaccgacaccgtagaacagagcaagaggaggatgaagagctattaacagaaagctccaaagcaaccaatgtttgcactcgatttgaagactctccatcgtatgtaaaatggggtaaactgagagattatcaggtccgaggattaaactggctcatttctttgtatgagaatggcatcaatggtatccttgcagatgaaatgggcctaggaaagactcttcaaacaatttctcttcttgggtacatgaaacattatagaaacattcctgggcctcatatggttttggttcctaagtctacattacacaactggatgagtgaattcaagagatgggtaccaacacttagatctgtttgtttgataggagataaagaacaaagagctgcttttgtcagagacgttttattaccgggagaatgggatgtatgtgtaacatcttatgaaatgcttattaaagagaagtctgtgttcaaaaaatttaattggagatacttagtaatagatgaagctcacaggatcaaaaatgaaaaatctaagttgtcagaaatagtgagggaattcaagactacaaatagactattattaactggaacacctcttcagaacaacttgcatgagctgtggtcacttcttaactttctgttgccagatgtgtttaattcagcagatgactttgattcctggtttgatacaaacaactgccttggggatcaaaaactagttgagaggcttcatatggttttgcgtccattcctccttcgtcgaattaaggctgatgttgaaaagagtttgcctccaaagaaggaagtaaaaatctatgtgggcctcagcaaaatgcaaagggaatggtatactcggatattaatgaaggatatagatatactcaactcagcaggcaagatggacaaaatgaggttattgaacatcctaatgcagttgagaaaatgttgtaatcatccatatctctttgatggagcagaacctggtccaccttatacaacagatatgcatctagtaaccaacagtggcaaaatggtggttttagacaagctgctccctaagttaaaagaacaaggttcacgagtactaatcttcagtcaaatgacaagggtattggacattttggaagattattgcatgtggagaaattatgagtactgcaggttggatggtcagacaccccatgatgagagacaagactccatcaatgcatacaatgaaccaaacagcacaaagtttgttttcatgttaagcacgcgtgctggtggtcttggcatcaatcttgcgactgctgatgtagtaattttgtatgattctgattggaatccccaagtagatcttcaggctatggaccgagcacatagaattgggcagactaagacagtcagagtgttccgctttataactgataacactgtagaagaaagaatagtagaacgtgctgagatgaaactcagactggattcaatagtcattcaacaagggaggcttgtggatcagaatctgaacaaaattgggaaagatgaaatgcttcaaatgattagacatggagcaacacatgtgtttgcttcaaaggaaagtgagatcactgatgaagatatcgatggtattttggaaagaggtgcaaagaaggtgagatgtagattaaataatgc

SEQ ID NO: 28778 - DNA, 373 bp, Homo sapiens
cgacaccgtagaacagagcaagaggaggatgaagagctattaacagaaagctccaaagcaaccaatgtttgcactcgatttgaagactctccatcgtgtatgttaaacacacttgatttttttaaaaaattgccctttgagatctcctttggttaatgttttggatttgtgttggctactatttgtgaagcaaatttttagtagtcttagatgtttattggttatgaaataaacttcagattttgatggagatgagagcatattacaggatagtagtgctgtatttcaaagttatataaaatgtcattgtgtttgttattgccctgaagtatatgtaaatctaaggatcgttttgctttatatttgtcccaca

SEQ ID NO: 28779 - DNA, 542 bp, Homo sapiens
taaagcaggaatacccaaattatagtgtcaggattttagctgtaccagaggcctttatgtgctacacataatttgtataaaattttatatgtgcagattgggtacataaacagttctccatttttctaagggaatgcaataaatgtagcatcgtgaataaatataacttttataatccgtaaagtggtcttttctttccatttcttttattgtttctcaacctcattcacttttccttaggacacattcccttaatggatatctttcccttaaatttctattagtagttgttttcatctgcccacatgtaattgaagatttaaaaaaaaaattctgatacctgcagtattactaatactgcttaatttcttgaaatgtggaattgctgctgttaatgtcaagcaaaacgcagtatttatggcaaattgtaaagtaatttgaatttagtgctacctcaaaattaactttttaaatactatgttagattcttaacagttaaaggtctaatacatgcatgaggaatggttacttatgaaaggaaa

SEQ ID NO: 28780 - DNA, 4260 bp, Homo sapiens
ctaacaacaaaaaaccgtgagacttcacttggggtaaccataacgtcgtcaaggctgtggcgtcacgcctctaagcggatacggcagaagttttggggccagacacaagacttccaagtttgaatgggcagcgcaaaacccagacaagttttccggtagtgccgccaacccctgtcaggcacagaagacacagcgagaaccgtgagccgttacgaaagcctaaaacactgagctcgcgtcctgccaagcagcaggcgcacaaacctacacctccgagcgctccctggaggtcccgcccactcttctctcccgagccggctagagatctggaagagggcgggccaagggtgaggagggcagtatgcgcatgcgcgctcaggacccagtcagtgagccaataaggaatctcgcgagtgttgaaagtcggtggcgtaggtcgtcgtcctggatgctggcgagatagatgttatcttccagaggaagaggaggaggcggcgaagcgttttcccagcctcagtctctctttcgttttccttttcccttcccccaaccctccgcccttctctaaatcagccggccttccttgacctcagtgacccgtctggccccgcccaccctcgtcgacgtgattcccgccgtgaggtaagcgccggtggaacctagagccccgcggaagagcagaacgtttgggagtgtgcagctcctgggcccggctcaggcccgtcgcggaggcgcggcgcaggggagcgctcgggtgggagtctcgctcctccaccagtttattgcgacgtagcatccaggcctaggcctccccgtccatccccgccggactcgggcctctggcagcagcgggtgacgcagacggaacatcatgtcgtccgcggccgagcctccgccacccccgcctcccgagagcgcgccttccaagcccgcagcctcgatcgccagcggcgggagcaacagcagcaacaaaggcggccccgaaggcgtcgcggcgcaggcggttgcgtctgcggccagcgctggtcccgcagacgccgagatggaggaaatatttgatgatgcgtcacctggaaagcaaaaggaaatccaagaaccagatcctacctatgaagaaaaaatgcaaactgaccgggcaaatagattcgagtatttattaaagcagacagaactttttgcacatttcattcaacctgctgctcagaagactccaacttcacctttgaagatgaaaccagggcgcccacgaataaaaaaagatgagaagcagaacttactatccgttggcgattaccgacaccgtagaacagagcaagaggaggatgaagagctattaacagaaagctccaaagcaaccaatgtttgcactcgatttgaagactctccatcgtatgtaaaatggggtaaactgagagattatcaggtccgaggattaaactggctcatttctttgtatgagaatggcatcaatggtatccttgcagatgaaatgggcctaggaaagactcttcaaacaatttctcttcttgggtacatgaaacattatagaaacattcctgggcctcatatggttttggttcctaagtctacattacacaactggatgagtgaattcaagagatgggtaccaacacttagatctgtttgtttgataggagataaagaacaaagagctgcttttgtcagagacgttttattaccgggagaatgggatgtatgtgtaacatcttatgaaatgcttattaaagagaagtctgtgttcaaaaaatttaattggagatacttagtaatagatgaagctcacaggatcaaaaatgaaaaatctaagttgtcagaaatagtgagggaattcaagactacaaatagactattattaactggaacacctcttcagaacaacttgcatgagctgtggtcacttcttaactttctgttgccagatgtgtttaattcagcagatgactttgattcctggtttgatacaaacaactgccttggggatcaaaaactagttgagaggcttcatatggttttgcgtccattcctccttcgtcgaattaaggctgatgttgaaaagagtttgcctccaaagaaggaagtaaaaatctatgtgggcctcagcaaaatgcaaagggaatggtatactcggatattaatgaaggatatagatatactcaactcagcaggcaagatggacaaaatgaggttattgaacatcctaatgcagttgagaaaatgttgtaatcatccatatctctttgatggagcagaacctggtccaccttatacaacagatatgcatctagtaaccaacagtggcaaaatggtggttttagacaagctgctccctaagttaaaagaacaaggttcacgagtactaatcttcagtcaaatgacaagggtattggacattttggaagattattgcatgtggagaaattatgagtactgcaggttggatggtcagacaccccatgatgagagacaagactccatcaatgcatacaatgaaccaaacagcacaaagtttgttttcatgttaagcacgcgtgctggtggtcttggcatcaatcttgcgactgctgatgtagtaattttgtatgattctgattggaatccccaagtagatcttcaggctatggaccgagcacatagaattgggcagactaagacagtcagagtgttccgctttataactgataacactgtagaagaaagaatagtagaacgtgctgagatgaaactcagactggattcaatagtcattcaacaagggaggcttgtggatcagaatctgaacaaaattgggaaagatgaaatgcttcaaatgattagacatggagcaacacatgtgtttgcttcaaaggaaagtgagatcactgatgaagatatcgatggtattttggaaagaggtgcaaagaagactgcagagatgaatgaaaagctctccaagatgggcgaaagttcacttagaaactttacaatggatacagagtcaagtgtttataacttcgaaggagaagactatagagaaaaacaaaagattgcattcacagagtggattgaaccacctaaacgagaaagaaaagccaactatgccgttgatgcatatttcagggaagctcttcgtgttagtgaacctaaagcacccaaggctcctcgacctccaaaacaacccaatgttcaggatttccagttctttcctccacgtttatttgaattactggaaaaagaaattctgttttacagaaaaactattgggtacaaggtacctcgaaatcctgagctgcctaacgcagcacaggcacaaaaagaagaacagcttaaaattgatgaagctgaatcccttaatgatgaagagttagaggaaaaagagaagcttctaacacagggatttaccaattggaataagagagattttaaccagtttatcaaagctaatgagaagtggggtcgtgatgatattgaaaatatagcaagagaagtagaaggcaaaactccagaagaagtcattgaatattcagctgtgttttgggaaaggtgcaacgagctccaggacatagagaagattatggctcagattgaaaggggagaggcgagaattcaaagaagaataagcatcaagaaagcacttgacacaaagattggacggtacaaagcaccttttcatcagctgagaatatcatatggtactaacaaaggaaaaaactatactgaagaagaagatcgttttctgatttgtatgcttcacaaacttggatttgacaaagaaaatgtttatgatgaattgcgacagtgtattcgcaactctcctcagttcagatttgactggtttcttaagtccagaactgcaatggagctccagaggagatgtaataccttaattactttgattgaaagagaaaacatggaactagaagaaaaggagaaggcagagaaaaagaaacgaggaccaaagccttcaacacagaaacgtaaaatggatggcgcacctgatggtcgaggaagaaaaaagaagctgaaactatgaatatgtttttgtttcataatcactaactttaaaccagtagttctttaatttacgggtcttcataagatgtactgtacaatgctcaattgttatgtcatttaaagacatcaggttcatctgtttactgagctagaaacatagtatgtagtttcacttttttaaatgcaacagctgtgctgaaatttttttatcattaacacttgaagtaataaaataggcttcatttatta

SEQ ID NO: 28781 - DNA, 5219 bp, Homo sapiens
ctaacaacaaaaaaccgtgagacttcacttggggtaaccataacgtcgtcaaggctgtggcgtcacgcctctaagcggatacggcagaagttttggggccagacacaagacttccaagtttgaatgggcagcgcaaaacccagacaagttttccggtagtgccgccaacccctgtcaggcacagaagacacagcgagaaccgtgagccgttacgaaagcctaaaacactgagctcgcgtcctgccaagcagcaggcgcacaaacctacacctccgagcgctccctggaggtcccgcccactcttctctcccgagccggctagagatctggaagagggcgggccaagggtgaggagggcagtatgcgcatgcgcgctcaggacccagtcagtgagccaataaggaatctcgcgagtgttgaaagtcggtggcgtaggtcgtcgtcctggatgctggcgagatagatgttatcttccagaggaagaggaggaggcggcgaagcgttttcccagcctcagtctctctttcgttttccttttcccttcccccaaccctccgcccttctctaaatcagccggccttccttgacctcagtgacccgtctggccccgcccaccctcgtcgacgtgattcccgccgtgaggtaagcgccggtggaacctagagccccgcggaagagcagaacgtttgggagtgtgcagctcctgggcccggctcaggcccgtcgcggaggcgcggcgcaggggagcgctcgggtgggagtctcgctcctccaccagtttattgcgacgtagcatccaggcctaggcctccccgtccatccccgccggactcgggcctctggcagcagcgggtgacgcagacggaacatcatgtcgtccgcggccgagcctccgccacccccgcctcccgagagcgcgccttccaagcccgcagcctcgatcgccagcggcgggagcaacagcagcaacaaaggcggccccgaaggcgtcgcggcgcaggcggttgcgtctgcggccagcgctggtcccgcagacgccgagatggaggaaatatttgatgatgcgtcacctggaaagcaaaaggaaatccaagaaccagatcctacctatgaagaaaaaatgcaaactgaccgggcaaatagattcgagtatttattaaagcagacagaactttttgcacatttcattcaacctgctgctcagaagactccaacttcacctttgaagatgaaaccagggcgcccacgaataaaaaaagatgagaagcagaacttactatccgttggcgattaccgacaccgtagaacagagcaagaggaggatgaagagctattaacagaaagctccaaagcaaccaatgtttgcactcgatttgaagactctccatcgtatgtaaaatggggtaaactgagagattatcaggtccgaggattaaactggctcatttctttgtatgagaatggcatcaatggtatccttgcagatgaaatgggcctaggaaagactcttcaaacaatttctcttcttgggtacatgaaacattatagaaacattcctgggcctcatatggttttggttcctaagtctacattacacaactggatgagtgaattcaagagatgggtaccaacacttagatctgtttgtttgataggagataaagaacaaagagctgcttttgtcagagacgttttattaccgggagaatgggatgtatgtgtaacatcttatgaaatgcttattaaagagaagtctgtgttcaaaaaatttaattggagatacttagtaatagatgaagctcacaggatcaaaaatgaaaaatctaagttgtcagaaatagtgagggaattcaagactacaaatagactattattaactggaacacctcttcagaacaacttgcatgagctgtggtcacttcttaactttctgttgccagatgtgtttaattcagcagatgactttgattcctggtttgatacaaacaactgccttggggatcaaaaactagttgagaggcttcatatggttttgcgtccattcctccttcgtcgaattaaggctgatgttgaaaagagtttgcctccaaagaaggaagtaaaaatctatgtgggcctcagcaaaatgcaaagggaatggtatactcggatattaatgaaggatatagatatactcaactcagcaggcaagatggacaaaatgaggttattgaacatcctaatgcagttgagaaaatgttgtaatcatccatatctctttgatggagcagaacctggtccaccttatacaacagatatgcatctagtaaccaacagtggcaaaatggtggttttagacaagctgctccctaagttaaaagaacaaggttcacgagtactaatcttcagtcaaatgacaagggtattggacattttggaagattattgcatgtggagaaattatgagtactgcaggttggatggtcagacaccccatgatgagagacaagactccatcaatgcatacaatgaaccaaacagcacaaagtttgttttcatgttaagcacgcgtgctggtggtcttggcatcaatcttgcgactgctgatgtagtaattttgtatgattctgattggaatccccaagtagatcttcaggctatggaccgagcacatagaattgggcagactaagacagtcagagtgttccgctttataactgataacactgtagaagaaagaatagtagaacgtgctgagatgaaactcagactggattcaatagtcattcaacaagggaggcttgtggatcagaatctgaacaaaattgggaaagatgaaatgcttcaaatgattagacatggagcaacacatgtgtttgcttcaaaggaaagtgagatcactgatgaagatatcgatggtattttggaaagaggtgcaaagaagactgcagagatgaatgaaaagctctccaagatgggcgaaagttcacttagaaactttacaatggatacagagtcaagtgtttataacttcgaaggagaagactatagagaaaaacaaaagattgcattcacagagtggattgaaccacctaaacgagaaagaaaagccaactatgccgttgatgcatatttcagggaagctcttcgtgttagtgaacctaaagcacccaaggctcctcgacctccaaaacaacccaatgttcaggatttccagttctttcctccacgtttatttgaattactggaaaaagaaattctgttttacagaaaaactattgggtacaaggtacctcgaaatcctgagctgcctaacgcagcacaggcacaaaaagaagaacagcttaaaattgatgaagctgaatcccttaatgatgaagagttagaggaaaaagagaagcttctaacacagggatttaccaattggaataagagagattttaaccagtttatcaaagctaatgagaagtggggtcgtgatgatattgaaaatatagcaagagaagtagaaggcaaaactccagaagaagtcattgaatattcagctgtgttttgggaaaggtgcaacgagctccaggacatagagaagattatggctcagattgaaaggggagaggcgagaattcaaagaagaataagcatcaagaaagcacttgacacaaagattggacggtacaaagcaccttttcatcagctgagaatatcatatggtactaacaaaggaaaaaactatactgaagaagaagatcgttttctgatttgtatgcttcacaaacttggatttgacaaagaaaatgtttatgatgaattgcgacagtgtattcgcaactctcctcagttcagatttgactggtttcttaagtccagaactgcaatggagctccagaggagatgtaataccttaattactttgattgaaagagaaaacatggaactagaagaaaaggagaaggcagagaaaaagaaacgaggaccaaagccttcaacacagaaacgtaaaatggatggcgcacctgatggtcgaggaagaaaaaagaagctgaaactatgaatatgtttttgtttcataatcactaactttaaaccagtagttctttaatttacgggtcttcataagatgtactgtacaatgctcaattgttatgtcatttaaagacatcaggttcatctgtttactgagctagaaacatagtatgtagtttcacttttttaaatgcaacagctgtgctgaaatttttttatcattaacacttgaagtaataaaataggcttcatttattactaagtgtttcatttgatttatttttctattgtagttccatttgtgaagattgtgactttttgtttattagctataatttctacacttgtaaggcttacaaacaagttaaaaagaaaattgcaaataacatttgtccctttcagtcttcacctagttgtgtaattattttaattcactttgcctttgcagaaatttgggtattttctttgtagtgctattgagtctcatctggaaagattatataaattgcattctccttgcttatgtgggtagaatgggagaagaaggcaagacaaagtatacttaaattctatgcatatttctgttatgctttctgttttttttagttgattctgaaatgaatatgccctattcttttgaaagaatggccttttagttgtatagccaaagacatttagtattttccggttccttaaggtattactgtaccattttgtaaaaggaatattattattattatttttaattatttggtaaatattttgtcatatgaccttctgaagcagccacaacttagataatgtcagaactaaggtgatttttttttttttaattttgaaagcccagccaaaatgaggtgtgaatttgtcatactgttacattgaaattggtaacaaaatatatcccctcccatttggacttttagggtaaatgaaaattttattgtattttaaagtagtttctaagtgttagcaagactgactataattccagtttctgttttctatggacagacctgataaactggagaccctaaagcaggaatacccaaattatagtgtcaggattttagctgtaccagaggcctttatgtgctacacataatttgtataaaattttatatgtgcagattgggtacataaacagttctccatttttctaagggaatgcaataaatgtagcatcgtgaataaatataacttttataatccgtaaa

SEQ ID NO: 28782 - DNA, 5250 bp, Homo sapiens
ctaacaacaaaaaaccgtgagacttcacttggggtaaccataacgtcgtcaaggctgtggcgtcacgcctctaagcggatacggcagaagttttggggccagacacaagacttccaagtttgaatgggcagcgcaaaacccagacaagttttccggtagtgccgccaacccctgtcaggcacagaagacacagcgagaaccgtgagccgttacgaaagcctaaaacactgagctcgcgtcctgccaagcagcaggcgcacaaacctacacctccgagcgctccctggaggtcccgcccactcttctctcccgagccggctagagatctggaagagggcgggccaagggtgaggagggcagtatgcgcatgcgcgctcaggacccagtcagtgagccaataaggaatctcgcgagtgttgaaagtcggtggcgtaggtcgtcgtcctggatgctggcgagatagatgttatcttccagaggaagaggaggaggcggcgaagcgttttcccagcctcagtctctctttcgttttccttttcccttcccccaaccctccgcccttctctaaatcagccggccttccttgacctcagtgacccgtctggccccgcccaccctcgtcgacgtgattcccgccgtgaggtaagcgccggtggaacctagagccccgcggaagagcagaacgtttgggagtgtgcagctcctgggcccggctcaggcccgtcgcggaggcgcggcgcaggggagcgctcgggtgggagtctcgctcctccaccagtttattgcgacgtagcatccaggcctaggcctccccgtccatccccgccggactcgggcctctggcagcagcgggtgacgcagacggaacatcatgtcgtccgcggccgagcctccgccacccccgcctcccgagagcgcgccttccaagcccgcagcctcgatcgccagcggcgggagcaacagcagcaacaaaggcggccccgaaggcgtcgcggcgcaggcggttgcgtctgcggccagcgctggtcccgcagacgccgagatggaggaaatatttgatgatgcgtcacctggaaagcaaaaggaaatccaagaaccagatcctacctatgaagaaaaaatgcaaactgaccgggcaaatagattcgagtatttattaaagcagacagaactttttgcacatttcattcaacctgctgctcagaagactccaacttcacctttgaagatgaaaccagggcgcccacgaataaaaaaagatgagaagcagaacttactatccgttggcgattaccgacaccgtagaacagagcaagaggaggatgaagagctattaacagaaagctccaaagcaaccaatgtttgcactcgatttgaagactctccatcgtatgtaaaatggggtaaactgagagattatcaggtccgaggattaaactggctcatttctttgtatgagaatggcatcaatggtatccttgcagatgaaatgggcctaggaaagactcttcaaacaatttctcttcttgggtacatgaaacattatagaaacattcctgggcctcatatggttttggttcctaagtctacattacacaactggatgagtgaattcaagagatgggtaccaacacttagatctgtttgtttgataggagataaagaacaaagagctgcttttgtcagagacgttttattaccgggagaatgggatgtatgtgtaacatcttatgaaatgcttattaaagagaagtctgtgttcaaaaaatttaattggagatacttagtaatagatgaagctcacaggatcaaaaatgaaaaatctaagttgtcagaaatagtgagggaattcaagactacaaatagactattattaactggaacacctcttcagaacaacttgcatgagctgtggtcacttcttaactttctgttgccagatgtgtttaattcagcagatgactttgattcctggtttgatacaaacaactgccttggggatcaaaaactagttgagaggcttcatatggttttgcgtccattcctccttcgtcgaattaaggctgatgttgaaaagagtttgcctccaaagaaggaagtaaaaatctatgtgggcctcagcaaaatgcaaagggaatggtatactcggatattaatgaaggatatagatatactcaactcagcaggcaagatggacaaaatgaggttattgaacatcctaatgcagttgagaaaatgttgtaatcatccatatctctttgatggagcagaacctggtccaccttatacaacagatatgcatctagtaaccaacagtggcaaaatggtggttttagacaagctgctccctaagttaaaagaacaaggttcacgagtactaatcttcagtcaaatgacaagggtattggacattttggaagattattgcatgtggagaaattatgagtactgcaggttggatggtcagacaccccatgatgagagacaagactccatcaatgcatacaatgaaccaaacagcacaaagtttgttttcatgttaagcacgcgtgctggtggtcttggcatcaatcttgcgactgctgatgtagtaattttgtatgattctgattggaatccccaagtagatcttcaggctatggaccgagcacatagaattgggcagactaagacagtcagagtgttccgctttataactgataacactgtagaagaaagaatagtagaacgtgctgagatgaaactcagactggattcaatagtcattcaacaagggaggcttgtggatcagaatctgaacaaaattgggaaagatgaaatgcttcaaatgattagacatggagcaacacatgtgtttgcttcaaaggaaagtgagatcactgatgaagatatcgatggtattttggaaagaggtgcaaagaagactgcagagatgaatgaaaagctctccaagatgggcgaaagttcacttagaaactttacaatggatacagagtcaagtgtttataacttcgaaggagaagactatagagaaaaacaaaagattgcattcacagagtggattgaaccacctaaacgagaaagaaaagccaactatgccgttgatgcatatttcagggaagctcttcgtgttagtgaacctaaagcacccaaggctcctcgacctccaaaacaacccaatgttcaggatttccagttctttcctccacgtttatttgaattactggaaaaagaaattctgttttacagaaaaactattgggtacaaggtacctcgaaatcctgagctgcctaacgcagcacaggcacaaaaagaagaacagcttaaaattgatgaagctgaatcccttaatgatgaagagttagaggaaaaagagaagcttctaacacagggatttaccaattggaataagagagattttaaccagtttatcaaagctaatgagaagtggggtcgtgatgatattgaaaatatagcaagagaagtagaaggcaaaactccagaagaagtcattgaatattcagctgtgttttgggaaaggtgcaacgagctccaggacatagagaagattatggctcagattgaaaggggagaggcgagaattcaaagaagaataagcatcaagaaagcacttgacacaaagattggacggtacaaagcaccttttcatcagctgagaatatcatatggtactaacaaaggaaaaaactatactgaagaagaagatcgttttctgatttgtatgcttcacaaacttggatttgacaaagaaaatgtttatgatgaattgcgacagtgtattcgcaactctcctcagttcagatttgactggtttcttaagtccagaactgcaatggagctccagaggagatgtaataccttaattactttgattgaaagagaaaacatggaactagaagaaaaggagaaggcagagaaaaagaaacgaggaccaaagccttcaacacagaaacgtaaaatggatggcgcacctgatggtcgaggaagaaaaaagaagctgaaactatgaatatgtttttgtttcataatcactaactttaaaccagtagttctttaatttacgggtcttcataagatgtactgtacaatgctcaattgttatgtcatttaaagacatcaggttcatctgtttactgagctagaaacatagtatgtagtttcacttttttaaatgcaacagctgtgctgaaatttttttatcattaacacttgaagtaataaaataggcttcatttattactaagtgtttcatttgatttatttttctattgtagttccatttgtgaagattgtgactttttgtttattagctataatttctacacttgtaaggcttacaaacaagttaaaaagaaaattgcaaataacatttgtccctttcagtcttcacctagttgtgtaattattttaattcactttgcctttgcagaaatttgggtattttctttgtagtgctattgagtctcatctggaaagattatataaattgcattctccttgcttatgtgggtagaatgggagaagaaggcaagacaaagtatacttaaattctatgcatatttctgttatgctttctgttttttttagttgattctgaaatgaatatgccctattcttttgaaagaatggccttttagttgtatagccaaagacatttagtattttccggttccttaaggtattactgtaccattttgtaaaaggaatattattattattatttttaattatttggtaaatattttgtcatatgaccttctgaagcagccacaacttagataatgtcagaactaaggtgatttttttttttttaattttgaaagcccagccaaaatgaggtgtgaatttgtcatactgttacattgaaattggtaacaaaatatatcccctcccatttggacttttagggtaaatgaaaattttattgtattttaaagtagtttctaagtgttagcaagactgactataattccagtttctgttttctatggacagacctgataaactggagaccctaaagcaggaatacccaaattatagtgtcaggattttagctgtaccagaggcctttatgtgctacacataatttgtataaaattttatatgtgcagattgggtacataaacagttctccatttttctaagggaatgcaataaatgtagcatcgtgaataaatataacttttataatccgtaaaaaaaaaacaggatgaagaaaaaaaaccttgt

SEQ ID NO: 28783 - DNA, 3665 bp, Homo sapiens
  misc_feature (3610)..(3610): n is a, c, g, or t
ctaacaacaaaaaaccgtgagacttcacttggggtaaccataacgtcgtcaaggctgtggcgtcacgcctctaagcggatacggcagaagttttggggccagacacaagacttccaagtttgaatgggcagcgcaaaacccagacaagttttccggtagtgccgccaacccctgtcaggcacagaagacacagcgagaaccgtgagccgttacgaaagcctaaaacactgagctcgcgtcctgccaagcagcaggcgcacaaacctacacctccgagcgctccctggaggtcccgcccactcttctctcccgagccggctagagatctggaagagggcgggccaagggtgaggagggcagtatgcgcatgcgcgctcaggacccagtcagtgagccaataaggaatctcgcgagtgttgaaagtcggtggcgtaggtcgtcgtcctggatgctggcgagatagatgttatcttccagaggaagaggaggaggcggcgaagcgttttcccagcctcagtctctctttcgttttccttttcccttcccccaaccctccgcccttctctaaatcagccggccttccttgacctcagtgacccgtctggccccgcccaccctcgtcgacgtgattcccgccgtgaggtaagcgccggtggaacctagagccccgcggaagagcagaacgtttgggagtgtgcagctcctgggcccggctcaggcccgtcgcggaggcgcggcgcaggggagcgctcgggtgggagtctcgctcctccaccagtttattgcgacgtagcatccaggcctaggcctccccgtccatccccgccggactcgggcctctggcagcagcgggtgacgcagacggaacatcatgtcgtccgcggccgagcctccgccacccccgcctcccgagagcgcgccttccaagcccgcagcctcgatcgccagcggcgggagcaacagcagcaacaaaggcggccccgaaggcgtcgcggcgcaggcggttgcgtctgcggccagcgctggtcccgcagacgccgagatggaggaaatatttgatgatgcgtcacctggaaagcaaaaggaaatccaagaaccagatcctacctatgaagaaaaaatgcaaactgaccgggcaaatagattcgagtatttattaaagcagacagaactttttgcacatttcattcaacctgctgctcagaagactccaacttcacctttgaagatgaaaccagggcgcccacgaataaaaaaagatgagaagcagaacttactatccgttggcgattaccgacaccgtagaacagagcaagaggaggatgaagagctattaacagaaagctccaaagcaaccaatgtttgcactcgatttgaagactctccatcgtatgtaaaatggggtaaactgagagattatcaggtccgaggattaaactggctcatttctttgtatgagaatggcatcaatggtatccttgcagatgaaatgggcctaggaaagactcttcaaacaatttctcttcttgggtacatgaaacattatagaaacattcctgggcctcatatggttttggttcctaagtctacattacacaactggatgagtgaattcaagagatgggtaccaacacttagatctgtttgtttgataggagataaagaacaaagagctgcttttgtcagagacgttttattaccgggagaatgggatgtatgtgtaacatcttatgaaatgcttattaaagagaagtctgtgttcaaaaaatttaattggagatacttagtaatagatgaagctcacaggatcaaaaatgaaaaatctaagttgtcagaaatagtgagggaattcaagactacaaatagactattattaactggaacacctcttcagaacaacttgcatgagctgtggtcacttcttaactttctgttgccagatgtgtttaattcagcagatgactttgattcctggtttgatacaaacaactgccttggggatcaaaaactagttgagaggcttcatatggttttgcgtccattcctccttcgtcgaattaaggctgatgttgaaaagagtttgcctccaaagaaggaagtaaaaatctatgtgggcctcagcaaaatgcaaagggaatggtatactcggatattaatgaaggatatagatatactcaactcagcaggcaagatggacaaaatgaggttattgaacatcctaatgcagttgagaaaatgttgtaatcatccatatctctttgatggagcagaacctggtccaccttatacaacagatatgcatctagtaaccaacagtggcaaaatggtggttttagacaagctgctccctaagttaaaagaacaaggttcacgagtactaatcttcagtcaaatgacaagggtattggacattttggaagattattgcatgtggagaaattatgagtactgcaggttggatggtcagacaccccatgatgagagacaagactccatcaatgcatacaatgaaccaaacagcacaaagtttgttttcatgttaagcacgcgtgctggtggtcttggcatcaatcttgcgactgctgatgtagtaattttgtatgattctgattggaatccccaagtagatcttcaggctatggaccgagcacatagaattgggcagactaagacagtcagagtgttccgctttataactgataacactgtagaagaaagaatagtagaacgtgctgagatgaaactcagactggattcaatagtcattcaacaagggaggcttgtggatcagaatctgaacaaaattgggaaagatgaaatgcttcaaatgattagacatggagcaacacatgtgtttgcttcaaaggaaagtgagatcactgatgaagatatcgatggtattttggaaagaggtgcaaagaagactgcagagatgaatgaaaagctctccaagatgggcgaaagttcacttagaaactttacaatggatacagagtcaagtgtttataacttcgaaggagaagactatagagaaaaacaaaagattgcattcacagagtggattgaaccacctaaacgagaaagaaaagccaactatgccgttgatgcatatttcagggaagctcttcgtgttagtgaacctaaagcacccaaggctcctcgacctccaaaacaacccaatgttcaggatttccagttctttcctccacgtttatttgaattactggaaaaagaaattctgttttacagaaaaactattgggtacaaggtacctcgaaatcctgagctgcctaacgcagcacaggcacaaaaagaagaacagcttaaaattgatgaagctgaatcccttaatgatgaagagttagaggaaaaagagaagcttctaacacagggatttaccaattggaataagagagattttaaccagtttatcaaagctaatgagaagtggggtcgtgatgatattgaaaatatagcaagagaagtagaaggcaaaactccagaagaagtcattgaatattcagctgtgttttgggaaaggtgcaacgagctccaggacatagagaagattatggctcagattgaaaggggagaggcgaggagaggtggnaggagaggaagaggtgggaggagaggaagaggtgggaggagaggaagggtaccga

SEQ ID NO: 28784 - DNA, 3427 bp, Homo sapiens
ctaacaacaaaaaaccgtgagacttcacttggggtaaccataacgtcgtcaaggctgtggcgtcacgcctctaagcggatacggcagaagttttggggccagacacaagacttccaagtttgaatgggcagcgcaaaacccagacaagttttccggtagtgccgccaacccctgtcaggcacagaagacacagcgagaaccgtgagccgttacgaaagcctaaaacactgagctcgcgtcctgccaagcagcaggcgcacaaacctacacctccgagcgctccctggaggtcccgcccactcttctctcccgagccggctagagatctggaagagggcgggccaagggtgaggagggcagtatgcgcatgcgcgctcaggacccagtcagtgagccaataaggaatctcgcgagtgttgaaagtcggtggcgtaggtcgtcgtcctggatgctggcgagatagatgttatcttccagaggaagaggaggaggcggcgaagcgttttcccagcctcagtctctctttcgttttccttttcccttcccccaaccctccgcccttctctaaatcagccggccttccttgacctcagtgacccgtctggccccgcccaccctcgtcgacgtgattcccgccgtgaggtaagcgccggtggaacctagagccccgcggaagagcagaacgtttgggagtgtgcagctcctgggcccggctcaggcccgtcgcggaggcgcggcgcaggggagcgctcgggtgggagtctcgctcctccaccagtttattgcgacgtagcatccaggcctaggcctccccgtccatccccgccggactcgggcctctggcagcagcgggtgacgcagacggaacatcatgtcgtccgcggccgagcctccgccacccccgcctcccgagagcgcgccttccaagcccgcagcctcgatcgccagcggcgggagcaacagcagcaacaaaggcggccccgaaggcgtcgcggcgcaggcggttgcgtctgcggccagcgctggtcccgcagacgccgagatggaggaaatatttgatgatgcgtcacctggaaagcaaaaggaaatccaagaaccagatcctacctatgaagaaaaaatgcaaactgaccgggcaaatagattcgagtatttattaaagcagacagaactttttgcacatttcattcaacctgctgctcagaagactccaacttcacctttgaagatgaaaccagggcgcccacgaataaaaaaagatgagaagcagaacttactatccgttggcgattaccgacaccgtagaacagagcaagaggaggatgaagagctattaacagaaagctccaaagcaaccaatgtttgcactcgatttgaagactctccatcgtatgtaaaatggggtaaactgagagattatcaggtccgaggattaaactggctcatttctttgtatgagaatggcatcaatggtatccttgcagatgaaatgggcctaggaaagactcttcaaacaatttctcttcttgggtacatgaaacattatagaaacattcctgggcctcatatggttttggttcctaagtctacattacacaactggatgagtgaattcaagagatgggtaccaacacttagatctgtttgtttgataggagataaagaacaaagagctgcttttgtcagagacgttttattaccgggagaatgggatgtatgtgtaacatcttatgaaatgcttattaaagagaagtctgtgttcaaaaaatttaattggagatacttagtaatagatgaagctcacaggatcaaaaatgaaaaatctaagttgtcagaaatagtgagggaattcaagactacaaatagactattattaactggaacacctcttcagaacaacttgcatgagctgtggtcacttcttaactttctgttgccagatgtgtttaattcagcagatgactttgattcctggtttgatacaaacaactgccttggggatcaaaaactagttgagaggcttcatatggttttgcgtccattcctccttcgtcgaattaaggctgatgttgaaaagagtttgcctccaaagaaggaagtaaaaatctatgtgggcctcagcaaaatgcaaagggaatggtatactcggatattaatgaaggatatagatatactcaactcagcaggcaagatggacaaaatgaggttattgaacatcctaatgcagttgagaaaatgttgtaatcatccatatctctttgatggagcagaacctggtccaccttatacaacagatatgcatctagtaaccaacagtggcaaaatggtggttttagacaagctgctccctaagttaaaagaacaaggttcacgagtactaatcttcagtcaaatgacaagggtattggacattttggaagattattgcatgtggagaaattatgagtactgcaggttggatggtcagacaccccatgatgagagacaagactccatcaatgcatacaatgaaccaaacagcacaaagtttgttttcatgttaagcacgcgtgctggtggtcttggcatcaatcttgcgactgctgatgtagtaattttgtatgattctgattggaatccccaagtagatcttcaggctatggaccgagcacatagaattgggcagactaagacagtcagagtgttccgctttataactgataacactgtagaagaaagaatagtagaacgtgctgagatgaaactcagactggattcaatagtcattcaacaagggaggcttgtggatcagaatctgaacaaaattgggaaagatgaaatgcttcaaatgattagacatggagcaacacatgtgtttgcttcaaaggaaagtgagatcactgatgaagatatcgatggtattttggaaagaggtgcaaagaagactgcagagatgaatgaaaagctctccaagatgggcgaaagttcacttagaaactttacaatggatacagagtcaagtgtttataacttcgaaggagaagactatagagaaaaacaaaaggtaatttagaaataggtttgggttacatgaaagctttattttactggaaacttggaattttaagtgttactgtaatgtcttataattttgcttaaaacagtagtcatttttgcttattcacatctgaatattttcatcattatgtaaaatttaatgccagtttttcagttggtaagctctgaaatatttttaaagtttttgtaatgaagtttgtggtatatgtttacagtgaaatatattcttgtatgggatgaatagtaatttgggatggtaacctgattcattttattttaaacagcagaattggctggtaataaagggaaaaatttcttaacttcataagtaatacttggtaatatagagataaattgaaaaatacccaga

SEQ ID NO: 28785 - DNA, 1649 bp, Homo sapiens
ggcggcgccagcggacaccggagcgggcaggagcagcggccgcggcgccgcagggaccagcgggcccaggctcggtctggggttcttgcagctggcaccagccctcccggccccggccgcccacccgccgcggggaagatgccggaacagagtaacgattaccgcgtggtggtgttcggggcgggcggcgtgggcaagagctcgctggtgctgcgcttcgtgaagggcacgttccgcgacacctacatccccaccatcgaggacacctaccggcaggtgatcagctgcgacaagagcgtgtgcacgctgcagatcacagacaccaccggcagccaccagttcccggccatgcagcgcctgtccatctccaagggccacgccttcatcctggtgttctccgtcaccagcaagcagtcgctggaggagctggggcccatctacaagctcatcgtgcagatcaagggcagcgtggaggacatccccgtgatgctcgtgggcaacaagtgcgatgagacgcagcgggaggtggacacgcgcgaggcgcaggcggtggcccaggagtggaagtgcgctttcatggagacctcggccaagatgaactacaacgtcaaggagctcttccaggagctgctgacgctggagacgcgccggaacatgagcctcaacatcgacggcaagcgctccgggaagcagaagaggacagaccgcgtcaagggcaaatgcaccctcatgtgagcccggaacgcccgccggcgcggcggggagagaaaggtaggggagatgacgcgttggacacggagacacgaagaggagccagaaggatacgagaggatgacaggtgacgaggtgagcagaaaaacagaacagaacgacacacagcgccaacccaagagaaagaaaaacaggaccagaagaccagcacacgaaatcacgcagagagacaaagaaggacaacaagaagcaaaagcgacagcagaaccatcccgagacacaagaccaaccacaaaacacccccaccaagcgatgcgcaggagacccagccaaacacaaaacaccaaagacgagcaaagaagcacctaaagaagagaaaaacgacaatcgaaaatagaaagcgcgaggaagcaaacgacaggaccacaaatgaccaaacaaaaggcgaccagaaggacaagaaaagagacagagaaaagcccaccgcccacacaaagaacgacaccaccgggaagagacatcaagccagaggacagcaacacccaacagaagagcgaacacaagaaccagaggaagacaaaaggggcgcacgagcccaagagcaaagaaagagcaggagaaggcaagacgaacagaagaaaaggaccagaagcgaggaacgaaagcacgagacagaaacacacgaaacagacccgcagagaaagaaaaagaaacagaagcgagcaaaaccagacgagcaacaaaaccccaacgacacgcgcgaacaaccaagagagggaaggaagcacgacagagcagagaccgcccagacagagaacagaaaaagacgcgaacgaaaaaggcaaacagccacagcaaaacagacaagcaaagaaacacagggcaacgcgacccaacacagcagcaccgacgaacaagcagacaacaaaaacaaaaaa

SEQ ID NO: 28786 - DNA, 943 bp, Homo sapiens
agcttctgtttcctcatgttgttcctactttttaaataataaatggctctcagcatcttaggaactagatgggtcccatctgggtagaacctgctataatttttagaatcactcttgtaattcttacctcacttaaaatattaggaaacacagtaatagaaaagacagggagaactcgtctgcaggttttggcagtgaaatttgtcttccagtgaattgctattattttcaaattgcctatagtcaaaaagcttttccattgatggagacttactttcaaatgagcttgtgttgaattcagcactctagattctctctgacattttcctgtcttttgggaaaaaaaagcagatattccaaaaatggcagaaatctaatttttgtaaactttttcatctataggattgagccaaaaaacatacatactattttaaagaaaggtaccatctaattcttttattaaagatagctacttctgaaatgtcttaacagagtttcaagattgcaaagtagtattgcatagctggttttcttacatgtgatgatggaggagagaggaagacccagacttaggcatgtagtgaaatatgtacagtttctggcatcagtgtactatttatagtctatagcatacattacttgcaaatgggaaaagtattttataattatttttgtacctcaaaataattattatattctactgtattatattcaaattaaagtttattatttgattcttagtatgatattctgttgagtgtgatgagggtgggacctaagtatgtcatgtgccttctaccctttctttcctagccctagaatgaaaggagaagttggggccatagtatctttgaagggagttatttccaaaagctttactaaaggggggtcggggacacaaagggggttggggataaagccaaattgagggggggtccaaagg

SEQ ID NO: 28787 - DNA, 442 bp, Homo sapiens
gaaattggcaccaggcaggtgacactagaggccacggtcttaatgaccacacaacatggtcttcatcagaatagattccatctccatgatgctttgcactaattaattctttccgcagcagcaccatgaggttggcggttcctttatttgccagctgtttattatttctgtgctaccaacattatgccaggcatggattggagtgtggaatcattcctggaagccaggccatgttcctgagttgtgctgctgtaagaattgggatttaaagttccaaatgtgtggcttccagtattttccttctaaaacagacacacgtcttatcccatttttatggttacatcacaagaatgattcacatttaatcaaacaagtcaggcagaatgatagctaatctatctcagggtttgttgcaaatgttatttacacatattgtgatata

SEQ ID NO: 28788 - DNA, 684 bp, Homo sapiens
gcctgattgacccagctgttccacatgcaactcaccgattaatcatcctgatgtatgtctgagtgcccccaaccttcagctgtctgtgtccactggctctggcttgaaactcttccttaaccactcctacttttgcagatgtcttattgtacatctggcttagactatggcttccttcagttactgcctccctgccccaccattcaattccccacccccataaatataatctcgtctgattctaggagattgctgatagtctttccttattatctcatgcatttatgatttatatttgttaactgtaaatgtcatttcctcaggaaagttttttcctagccacccaatttaaagtaatttctcactttctatcacatcacctcagtttattttcattgtagcattcatctctatttaatatttatggtcttttgtctttccagacctaaatgcatactcctttaggagccttatatgatctatttacagctatatcataagtggttagaacagtgcctgatatataatagacattcagtatatgatagttgaattaagtgactttatcttttttaaaaacattatatgtcacatttgcttgaattacataaattttagattttataccagaaaccaggcttatcaaatattccatcttaacatctctgtcaagacaaaaaaaaa

SEQ ID NO: 28789 - DNA, 390 bp, Homo sapiens
gctgaaaatgagagtgagccacctttttgtgacctttggtcccactgggtgtcctgagacatccttcagcaatctgttgtctacattgagatgaaacttcccttcactttcaccatccagacaagtttttcactagctcctctgtattcagaaagactattaggcagatcacgaggtcaggagatcaagaccaccatggctaacatggtgaaaccccgtctctactaagtatacaaaaaattagccaggcatggtggcgggcgcctgtagtcccagctacccaggaggctgacgcaggagaatggtgtgaacccgggaggcggagcttgcagtgagccgagatcatgccacggcactccagcctggacgaaagagcgagactctgtctca

SEQ ID NO: 28790 - DNA, 503 bp, Homo sapiens
tggataacttatttgttactgactgtgataaaaatagagtgtacattgtacagtttactacaggtgtcattaattttctcattctctcatatgcattgagtaactaccatacagcaagcactattctaggaacaggtagataagatttattagtggaaaatcacttacctaaaaccatatcatataaccgtgttaatgcaccttggtgtatgagaaactttcaactacaaatatttgattaccttaattgcaattcttaagggaggctaagtagatggatagctgaataaagttattacttggaaatgttgccatgtagccgcaggagccaatttcagtgcacacatcttaagcatcagtgtacacatttataggtctttggtgttttggccagcagaacccacctgggttatggaatcacactggtgtacttgatcgtgttcgggtatgaacatgctctgatttacattgagtactaattgagcatgtctatttaaattaaa

SEQ ID NO: 28791 - DNA, 900 bp, Homo sapiens
gcatgaatcagtttttttagtggtgatttctgagattttgttgtatccatcaccagagcagtgtacactgcacccaatgtggagtcttttatccctcaccccactcccaccctttcccctgagtccccaaagtccattgtattattcttacgcctttgcaatagactttctgttttaataggaaattgctagctttgatgatttgtgatgttttgtaaaaaatgttgaaaataactatttaaaaaactattcttcgtagcttcaaaattctgtactgtttgaagaataattacaatacttatttagggagaggcaccaaatacatattttaactaacattaaagtcaattttaaagtacttacaataaagaaaaagttgactttttaataagccagaagaaacttagtctgggttaaatagctttatccttagcaaaaatgaccagacaacctctcagaattttaaaggaagacttagagcccttattggtagctatttagttttcaatgactacatacttatataatttcataaaaattattggaagttatttccctttttacccttggatattttgagttagaacattatttttaaaatcttataagcacagtagggtaaataatcacaaacatttatgttttttaaagaaaaagacaccttactgaagggcaaatgaccctatattattagatttaactattcagtcaccgtaagaattacaatagcatgttttatacaatgtgtgaatcgtaactctaggtctgcagttataagacccctgaaaggcaaacttctggcatttgatcatatgtattgctgaactttccagatctgggtggggtatccaaacctggaattgttataatactatgcagcataagcatctaaagtttaaa

SEQ ID NO: 28792 - DNA, 374 bp, Homo sapiens
ggcagttaatataaatgctttctgttttgtaaaataggaacagtatttgattccattatcacagatctcttgtggacaagtcaaaattcttcaattaaggttatatctagttaaaggaatttttctctttggtctacatccccaccctgaatgtccttgcctgttagttccttgcaggtgaaaggtaaaaaacctttgcaacttcatgctataattgtgcctttgaattttcagaggaaaagacagtgagagagcaagagcagattgagaagcagaagagtgagtcgcaaaaagagaaaatgacagaaatggagcaccctgccacatgctcttcatcctgtggtttttttccaagctaaagatgcatgtcgacg

SEQ ID NO: 28793 - DNA, 420 bp, Homo sapiens
gaaattctttacgaaataaattagtgaaatcaaaacattactttagaccatcaaaattatgcaaattctgcctgtcttcacattttttagtcaatttattgccaatgcggtgtgtatattcaatattctaaggatttctgtgggaataacttcattgtaagataaacaagtttagtcactgacatataaatgtagccactggaataaaaatgaaatgggtccagcctattacagtacccagaattttccatatgtctattccattgtagctgccaaagtcaccattccttgtcaacctctaattggacaccaggcctaaaagccttcaaggatggggagagtccttttgagctctcggatccaaaacttcaacctactccaggcttagttataaacctattattctgtaactatgaaaac

SEQ ID NO: 28794 - DNA, 457 bp, Homo sapiens
ggtgggaaagtgaggtttgcatagaattagggaactgtaatgcaaataaaagagcaacagtgaacttaacagcccggttaaactgtctatagtggtagacctataatacgacacataaataagcactgtagtatgtaacttgataaaataaagcaaatacacaaaactccatcaaacgcatgtaatcatctaccaactaataacctggggactatcaggcagcaaaaagtgtacttggctacctttggcccctgttggattcctactctgtgccacaaagtatgctctagaggagccaactacagacaccgtagtatcatgtgacacagtcttatcctaggcacagagaacaggattcaacctttggaaggggaaaggttacactaaagttgacaccagagcacaagtattgagagagatagtacagcaggcagaaagttcagcatgttttctaaag

SEQ ID NO: 28795 - DNA, 4158 bp, Homo sapiens
  misc_feature (1239)..(1239): n is a, c, g, or t
  misc_feature (1935)..(1935): n is a, c, g, or t
  misc_feature (2602)..(2602): n is a, c, g, or t
  misc_feature (2688)..(2688): n is a, c, g, or t
  misc_feature (3034)..(3035): n is a, c, g, or t
ccgtggtcccggcgccgggtcccggagacagacgttacgcgggctcgagcgtcctcggggagtgccagccagagttggtgacgaccacttcctcgacgtggggcgggcggacgggaagcctggggtcgtggccaccgcctcgggagctctgggagcccgggtgaccgcgtagaaatgaacacagaagcggagcaacagcttctccatcacgccagaaatggcaatgctgaagaagtaagacaactattagagaccatggcgaggaatgaagtgattgctgacattaattgcaaaggaagaagtaagtctaacttgggctggacacctctacatctggcatgctattttggacacagacaagtggtccaggatctgttgaaggctggtgcagaagtgaatgtgttgaatgacatgggagacacgccgcttcatcgagctgcctttacaggacgaaaggagttggtaatgcttctcttagaatataatgctgatactactattgttaatgggagtggacagacagcaaaagaagttactcatgctgaagaaatcagaagcatgcttgaagctgtagaaaggactcaacaaagaaagcttgaagaattacttttagcagcagcaagagaaggcaaaacaacagaactcacagctctgctcaacaggcccaatcctcctgatgttaactgttcggatcagttaggaaatacacccttgcattgtgcagcttaccgggcccataaacaatgtgccttaaagcttctaagaagtggagcagaccctaatctgaagaacaaaaatgatcagaaacctcttgaccttgcccagggtgctgaaatgaaacacattcttgttggtaataaggtcatctacaaagcattgaaacgatatgagggccctctctggaagagttcaagattttttggctggagattattctgggtagtgttagagcatggagtcctttcatggtataggaaacagcctgatgcagttcataatatttatcgccagggatgcaaacacctgactcaagcagtatgcacggtaaaatccactgatagctgcctcttctttattaaatgctttgatgacaccattcatggcttccgggttcctaagaatagccttcagcagtcaagagaggactggctggaagcaatagaagaacattctgcttacagcactcactactgttcccaggaccagctgactgatgaggaggaggaagatacggtttcngctgcagacctgaagaaatcattagagaaagcacagtcatgccaacagcgactagatagggaaatttccaactttctcaaaatgattaaggagtgtgacatggctaaagaaatgcttccatcatttcttcagaaagttgaagttgtctcagaagcttctagagaaacttgtgtagctttgactgattgccttaatctcttcaccaaacaagaaggggtgaggaattttaaattggaacaagagcaagaaaaaaacaaaatcttgtcagaagcactggagacgctggccactgaacatcatgaattagagcagtctctggtgaaaggctctccacccgccagcatccttagcgaggacgagttctatgatgcgctgtcagattccgagtccgaaaggtccctgagtagattggaagcagtgacagcacgctcctttgaagaggaaggagagcatttgggcagtagaaaacacagaatgtccgaagaaaaagactgtggtggcggagatgctctctccaatggcatcaagaaacacagaacaagtttgccttctcctatgttttccagaaatgacttcagtatctggagcatcctcagaaaatgtattggaatggaactatccaagatcacgatgccagttatatttaatgagcctctgagcttcctacagcgcctaactgaatacatggagcatacntacctcatccacaaggccagttcactctctgatcctgtggaaaggatgcagtgtgtagctgcgtttgctgtatctgctgttgcttctcagtgggaacggactggaaaacctttcaacccactgctgggagagacttatgaattagtgcgagatgaccttggatttagactcatctccgaacaggtcagccatcacccaccaatcagtgcatttcatgctgaaggattaaacaatgacttcatctttcatggctctatctatcccaaactgaaattctgggggaagagtgtagaagcagaacccaaaggaaccatcaccttggagctccttgaacacaatgaggcatatacatggacaaatcccacctgctgtgtgcataatatcattgtgggtaaactgtggatcgaacagtatggcaatgtggaaattataaaccacaagactggggacaaatgtgtgttgaattttaagccatgtggcctttttggtaaggaattacacaaagttgaaggctacattcaagataaaagcaaaaagaagctctgtgccctctatgggaagtggactgaatgtttatacagtgttgaccctgccacgtttgacgcttacaaaaaaaatgataagaaaaatacagaagagaagaagaacagcaaacagatgagcaccnctgaggagttggatgaaatgccagtgccggattctgaaagtgtattcattatccctggaagcgttcttctatggcgaatagccccncggcctccaaattctgcccagatgtataattttactagttttgcaatggttttgaatgaagtagacaaagacatggagagtgtgattcccaagacagactgcaggttacggcctgacatcagagccatggaaaatggagagatagatcaagctagtgaagaaaaaaaacgacttgaggaaaaacaaagagcagcccgcaaaaacaggtccaagtcagaagaggactggaagacgaggtggttccatcaaggtcctaatccctacaatggagcacaggactggatttactctggcagctactgggacagaaattacttcaatttgcctgacatttattaaaatgcanncaagtcagggtgtttggctaatctacaaataagtcttaaacctatgtttttaaatttttttcccttggtttctacttatcttttaaaaaaaaaatgaaaaaacactcatgagataactgcatttcacccaacaaaagcagggtataaggcgatattggtgatgaaagtcttaggaaaaatgcataattttgctataaaatgtacttatttggaatactattttatatagaggtaagagaacactgctggggaatatgctttttatggttgctgttgccatatttactgaaggtttatacctaaatgtaactttagctttatggaactatatagtaatcccaaatcaagttattttgaatatttttatgctgtcatgcttgaatgttttagatgtaacctttgacatatttagaactctcctcctatacaatgtttattctcagatatagaggttatgtcattttataaagacttcattgataagatggcttttattcatactaatcctcccaatgttacccccttccatcttccaagaagaaaaaaatgcctgaatattcagaatagatatttctgatttgaaattctaagattaactggaaagtatttcattacttagtgctctgaatttacttttacagtttttctgcagtcagtatcattaaaatggttaagtttcacatttgaactgaaaatatgtataaaatctagcaattcacaaaaatgccctagaaatatagattttaatcaccattacataatgacaaaccttgttaaatgcttcacttccatgggcaaatgccactagggaaagtaagttgcactcatgtaagtatcaaactatataaaaggaggccttgtgcatttcaagtttgcaaagtacctgtgtacttaaaatatgtgtggagacctactgtacagtagttttgcccctttaattggggcacattcatcttaaatcttatagtatttatccacccaaaccccagactgagatactgctccagggcctaggtagctgccagtccgtgattttaattgctgtcttgaagttaacaagtgttataatgaaataatctacctgatgctaaataaaggctttagaatgttccccaaaaaaaaa

SEQ ID NO: 28796 - DNA, 3915 bp, Homo sapiens
  misc_feature (1065)..(1065): n is a, c, g, or t
  misc_feature (1761)..(1761): n is a, c, g, or t
  misc_feature (2359)..(2359): n is a, c, g, or t
  misc_feature (2445)..(2445): n is a, c, g, or t
  misc_feature (2791)..(2792): n is a, c, g, or t
tctcctgcctcagcctcccaagtagctgggactatgggctcaaaccaccgtgctggctttttattgttactttaaatttaatttattgttagtactgacacctaaacaatattaacaattttaattttttaaggccttaatatattttgaaggaatgattttcaccattgtatatttcttggtatttaaagtggtcatgtttactaggctggtgcagaagtgaatgtgttgaatgacatgggagacacgccgcttcatcgagctgcctttacaggacgaaaggagttggtaatgcttctcttagaatataatgctgatactactattgttaatgggagtggacagacagcaaaagaagttactcatgctgaagaaatcagaagcatgcttgaagctgtagaaaggactcaacaaagaaagcttgaagaattacttttagcagcagcaagagaaggcaaaacaacagaactcacagctctgctcaacaggcccaatcctcctgatgttaactgttcggatcagttaggaaatacacccttgcattgtgcagcttaccgggcccataaacaatgtgccttaaagcttctaagaagtggagcagaccctaatctgaagaacaaaaatgatcagaaacctcttgaccttgcccagggtgctgaaatgaaacacattcttgttggtaataaggtcatctacaaagcattgaaacgatatgagggccctctctggaagagttcaagattttttggctggagattattctgggtagtgttagagcatggagtcctttcatggtataggaaacagcctgatgcagttcataatatttatcgccagggatgcaaacacctgactcaagcagtatgcacggtaaaatccactgatagctgcctcttctttattaaatgctttgatgacaccattcatggcttccgggttcctaagaatagccttcagcagtcaagagaggactggctggaagcaatagaagaacattctgcttacagcactcactactgttcccaggaccagctgactgatgaggaggaggaagatacggtttcngctgcagacctgaagaaatcattagagaaagcacagtcatgccaacagcgactagatagggaaatttccaactttctcaaaatgattaaggagtgtgacatggctaaagaaatgcttccatcatttcttcagaaagttgaagttgtctcagaagcttctagagaaacttgtgtagctttgactgattgccttaatctcttcaccaaacaagaaggggtgaggaattttaaattggaacaagagcaagaaaaaaacaaaatcttgtcagaagcactggagacgctggccactgaacatcatgaattagagcagtctctggtgaaaggctctccacccgccagcatccttagcgaggacgagttctatgatgcgctgtcagattccgagtccgaaaggtccctgagtagattggaagcagtgacagcacgctcctttgaagaggaaggagagcatttgggcagtagaaaacacagaatgtccgaagaaaaagactgtggtggcggagatgctctctccaatggcatcaagaaacacagaacaagtttgccttctcctatgttttccagaaatgacttcagtatctggagcatcctcagaaaatgtattggaatggaactatccaagatcacgatgccagttatatttaatgagcctctgagcttcctacagcgcctaactgaatacatggagcatacntacctcatccacaaggccagttcactctctgatcctgtggaaaggatgcagtgtgtagctgcgtttgctgtatctgctgttgcttctcagtgggaacggactggaaaacctttggtcagccatcacccaccaatcagtgcatttcatgctgaaggattaaacaatgacttcatctttcatggctctatctatcccaaactgaaattctgggggaagagtgtagaagcagaacccaaaggaaccatcaccttggagctccttgaacacaatgaggcatatacatggacaaatcccacctgctgtgtgcataatatcattgtgggtaaactgtggatcgaacagtatggcaatgtggaaattataaaccacaagactggggacaaatgtgtgttgaattttaagccatgtggcctttttggtaaggaattacacaaagttgaaggctacattcaagataaaagcaaaaagaagctctgtgccctctatgggaagtggactgaatgtttatacagtgttgaccctgccacgtttgacgcttacaaaaaaaatgataagaaaaatacagaagagaagaagaacagcaaacagatgagcaccnctgaggagttggatgaaatgccagtgccggattctgaaagtgtattcattatccctggaagcgttcttctatggcgaatagccccncggcctccaaattctgcccagatgtataattttactagttttgcaatggttttgaatgaagtagacaaagacatggagagtgtgattcccaagacagactgcaggttacggcctgacatcagagccatggaaaatggagagatagatcaagctagtgaagaaaaaaaacgacttgaggaaaaacaaagagcagcccgcaaaaacaggtccaagtcagaagaggactggaagacgaggtggttccatcaaggtcctaatccctacaatggagcacaggactggatttactctggcagctactgggacagaaattacttcaatttgcctgacatttattaaaatgcanncaagtcagggtgtttggctaatctacaaataagtcttaaacctatgtttttaaatttttttcccttggtttctacttatcttttaaaaaaaaaatgaaaaaacactcatgagataactgcatttcacccaacaaaagcagggtataaggcgatattggtgatgaaagtcttaggaaaaatgcataattttgctataaaatgtacttatttggaatactattttatatagaggtaagagaacactgctggggaatatgctttttatggttgctgttgccatatttactgaaggtttatacctaaatgtaactttagctttatggaactatatagtaatcccaaatcaagttattttgaatatttttatgctgtcatgcttgaatgttttagatgtaacctttgacatatttagaactctcctcctatacaatgtttattctcagatatagaggttatgtcattttataaagacttcattgataagatggcttttattcatactaatcctcccaatgttacccccttccatcttccaagaagaaaaaaatgcctgaatattcagaatagatatttctgatttgaaattctaagattaactggaaagtatttcattacttagtgctctgaatttacttttacagtttttctgcagtcagtatcattaaaatggttaagtttcacatttgaactgaaaatatgtataaaatctagcaattcacaaaaatgccctagaaatatagattttaatcaccattacataatgacaaaccttgttaaatgcttcacttccatgggcaaatgccactagggaaagtaagttgcactcatgtaagtatcaaactatataaaaggaggccttgtgcatttcaagtttgcaaagtacctgtgtacttaaaatatgtgtggagacctactgtacagtagttttgcccctttaattggggcacattcatcttaaatcttatagtatttatccacccaaaccccagactgagatactgctccagggcctaggtagctgccagtccgtgattttaattgctgtcttgaagttaacaagtgttataatgaaataatctacctgatgctaaataaaggctttagaatgttccccaaaaaaaaa

SEQ ID NO: 28797 - DNA, 4089 bp, Homo sapiens
  misc_feature (1239)..(1239): n is a, c, g, or t
  misc_feature (1935)..(1935): n is a, c, g, or t
  misc_feature (2533)..(2533): n is a, c, g, or t
  misc_feature (2619)..(2619): n is a, c, g, or t
  misc_feature (2965)..(2966): n is a, c, g, or t
ccgtggtcccggcgccgggtcccggagacagacgttacgcgggctcgagcgtcctcggggagtgccagccagagttggtgacgaccacttcctcgacgtggggcgggcggacgggaagcctggggtcgtggccaccgcctcgggagctctgggagcccgggtgaccgcgtagaaatgaacacagaagcggagcaacagcttctccatcacgccagaaatggcaatgctgaagaagtaagacaactattagagaccatggcgaggaatgaagtgattgctgacattaattgcaaaggaagaagtaagtctaacttgggctggacacctctacatctggcatgctattttggacacagacaagtggtccaggatctgttgaaggctggtgcagaagtgaatgtgttgaatgacatgggagacacgccgcttcatcgagctgcctttacaggacgaaaggagttggtaatgcttctcttagaatataatgctgatactactattgttaatgggagtggacagacagcaaaagaagttactcatgctgaagaaatcagaagcatgcttgaagctgtagaaaggactcaacaaagaaagcttgaagaattacttttagcagcagcaagagaaggcaaaacaacagaactcacagctctgctcaacaggcccaatcctcctgatgttaactgttcggatcagttaggaaatacacccttgcattgtgcagcttaccgggcccataaacaatgtgccttaaagcttctaagaagtggagcagaccctaatctgaagaacaaaaatgatcagaaacctcttgaccttgcccagggtgctgaaatgaaacacattcttgttggtaataaggtcatctacaaagcattgaaacgatatgagggccctctctggaagagttcaagattttttggctggagattattctgggtagtgttagagcatggagtcctttcatggtataggaaacagcctgatgcagttcataatatttatcgccagggatgcaaacacctgactcaagcagtatgcacggtaaaatccactgatagctgcctcttctttattaaatgctttgatgacaccattcatggcttccgggttcctaagaatagccttcagcagtcaagagaggactggctggaagcaatagaagaacattctgcttacagcactcactactgttcccaggaccagctgactgatgaggaggaggaagatacggtttcngctgcagacctgaagaaatcattagagaaagcacagtcatgccaacagcgactagatagggaaatttccaactttctcaaaatgattaaggagtgtgacatggctaaagaaatgcttccatcatttcttcagaaagttgaagttgtctcagaagcttctagagaaacttgtgtagctttgactgattgccttaatctcttcaccaaacaagaaggggtgaggaattttaaattggaacaagagcaagaaaaaaacaaaatcttgtcagaagcactggagacgctggccactgaacatcatgaattagagcagtctctggtgaaaggctctccacccgccagcatccttagcgaggacgagttctatgatgcgctgtcagattccgagtccgaaaggtccctgagtagattggaagcagtgacagcacgctcctttgaagaggaaggagagcatttgggcagtagaaaacacagaatgtccgaagaaaaagactgtggtggcggagatgctctctccaatggcatcaagaaacacagaacaagtttgccttctcctatgttttccagaaatgacttcagtatctggagcatcctcagaaaatgtattggaatggaactatccaagatcacgatgccagttatatttaatgagcctctgagcttcctacagcgcctaactgaatacatggagcatacntacctcatccacaaggccagttcactctctgatcctgtggaaaggatgcagtgtgtagctgcgtttgctgtatctgctgttgcttctcagtgggaacggactggaaaacctttggtcagccatcacccaccaatcagtgcatttcatgctgaaggattaaacaatgacttcatctttcatggctctatctatcccaaactgaaattctgggggaagagtgtagaagcagaacccaaaggaaccatcaccttggagctccttgaacacaatgaggcatatacatggacaaatcccacctgctgtgtgcataatatcattgtgggtaaactgtggatcgaacagtatggcaatgtggaaattataaaccacaagactggggacaaatgtgtgttgaattttaagccatgtggcctttttggtaaggaattacacaaagttgaaggctacattcaagataaaagcaaaaagaagctctgtgccctctatgggaagtggactgaatgtttatacagtgttgaccctgccacgtttgacgcttacaaaaaaaatgataagaaaaatacagaagagaagaagaacagcaaacagatgagcaccnctgaggagttggatgaaatgccagtgccggattctgaaagtgtattcattatccctggaagcgttcttctatggcgaatagccccncggcctccaaattctgcccagatgtataattttactagttttgcaatggttttgaatgaagtagacaaagacatggagagtgtgattcccaagacagactgcaggttacggcctgacatcagagccatggaaaatggagagatagatcaagctagtgaagaaaaaaaacgacttgaggaaaaacaaagagcagcccgcaaaaacaggtccaagtcagaagaggactggaagacgaggtggttccatcaaggtcctaatccctacaatggagcacaggactggatttactctggcagctactgggacagaaattacttcaatttgcctgacatttattaaaatgcanncaagtcagggtgtttggctaatctacaaataagtcttaaacctatgtttttaaatttttttcccttggtttctacttatcttttaaaaaaaaaatgaaaaaacactcatgagataactgcatttcacccaacaaaagcagggtataaggcgatattggtgatgaaagtcttaggaaaaatgcataattttgctataaaatgtacttatttggaatactattttatatagaggtaagagaacactgctggggaatatgctttttatggttgctgttgccatatttactgaaggtttatacctaaatgtaactttagctttatggaactatatagtaatcccaaatcaagttattttgaatatttttatgctgtcatgcttgaatgttttagatgtaacctttgacatatttagaactctcctcctatacaatgtttattctcagatatagaggttatgtcattttataaagacttcattgataagatggcttttattcatactaatcctcccaatgttacccccttccatcttccaagaagaaaaaaatgcctgaatattcagaatagatatttctgatttgaaattctaagattaactggaaagtatttcattacttagtgctctgaatttacttttacagtttttctgcagtcagtatcattaaaatggttaagtttcacatttgaactgaaaatatgtataaaatctagcaattcacaaaaatgccctagaaatatagattttaatcaccattacataatgacaaaccttgttaaatgcttcacttccatgggcaaatgccactagggaaagtaagttgcactcatgtaagtatcaaactatataaaaggaggccttgtgcatttcaagtttgcaaagtacctgtgtacttaaaatatgtgtggagacctactgtacagtagttttgcccctttaattggggcacattcatcttaaatcttatagtatttatccacccaaaccccagactgagatactgctccagggcctaggtagctgccagtccgtgattttaattgctgtcttgaagttaacaagtgttataatgaaataatctacctgatgctaaataaaggctttagaatgttccccaaaaaaaaa

SEQ ID NO: 28798 - DNA, 1406 bp, Homo sapiens
aaattttaatgataataatattttaaaggtcagataatgccattagaggcagagacaaacctggggaccaagctaatttctctgttattgagagcgctaaagacaggtgaactggagttttatttcctctgctagagtgaaataataccctctccaccaggcacaatggctcacacctgtaattccagcactttgggaggccaaggtgggcggatcacttgaggtcaggagttcgagaccagcctggccaacatggtgaaaccccatctctactaaaaatacaaaaattagccagccatggtggcatgctcctgtaatcccagctacttgggagactgaggtgggataatcacttgaacctgggaggcggaggttgcagtgagctgagattgtgccactgcactccagcctgggtgacagagcaagactccatctaaaaaacaaaaacaaaaacaaaaaaaccctctcaattggtttaataccacgatagaaaagataaatattttaggatggaatcttaaatatgtctgtccttttgtttcatatagttgaaatcaattcagtattgtttctacattaggtgtttcaaaaacagtcacctttgcaacagaagagctcttttgttgaaaatgattcacaatatatttcagttggaatgtcaggtggtatttctcttaccaacacctcacagaatctatgccaagctgctctaccaccaatgcaagtatttttttaaagctactaaaataaactttcttcaccagccaactctaatttggagacagtgtgcattggtgaaggacctcgtcagaataagtttgaatgtctactgaactaagaagaattttgtcgttttgggggagagaatagatggcatcagtccttcaattctgtaactgaagactccaattatagtagataagaattgtgtctagcaatttttaaacactgacagtccaaacaaaaatatttggtgaggaaggatgtcccatatttttgcttaaatatcataaacaaatatgagcatttactaattttttaaatggcattttgaaagattattcttatttacactctaaaattaaaggtgtactttatcttaagaaaatgatatattaaaaattcatattttaaaagataaaattggggaatttacagttattttgtgaatggcctttaaactatgatttgatctatatacaacttttcagaatacttttgattgtgtgttggacatatctaaaattaattttatctggcagaattaaacctaaatttatttgtataaaagagtcccctttctaaaattcatacagtgcccttgtattcatttatgcagtgtttataaatatttcaagttagattgtgagatattaataaatgatttatgctgtgaactgttactg

SEQ ID NO: 28799 - DNA, 955 bp, Homo sapiens
cttaatattacctgtatttaaattctttcttttgcccttattaacactgatatttgaaacaactaatcatctaaaaggaagctcttaaagggctttaaatgtcaatatagtaagattctaatgtgcactactatttatataaaatatttcttagggcccataaatcatataataaacagtgaacccaagagctacatatggagtctagtgaagagttcccatgtagcctaactaattgtatttaaattgaggagatccaaaaaccccatcacccttcaccccaaagaccccttcacccttcaccagggaattctatcctgggtgctgtcccacctatgaccccttcaagaggccattggaaaaaggccatttacaagttaatgttacttatagctttgttactaagactcacctattgttagtgcagccaagtcacagaagtgcttattgcagttaaatagcaatttgtttccatgaaactgcaattaaagtattactgagcagccattttagattggcagtgctctgaacgcatgttaaacagccagctactcccacttgcagagtctgagatctgactagcagcaaagtgtagcacattcgccgatgctgggtacctagttaaagaggcatttgtagccctctgctcccatcgtgaacatgctgagagcaatgacaagtcagggctgatttttggaaggtgaacttgcaacttacctcaagtgaatactgttttcagttgtgcaagaagtgctttatgctagtagatatgtgcatgtttcctagagggaatgttttcaagttcagattgattctgctgagaatggacggcaactcggaggcctcaagccaataatgtactacaggccctgacatgttacagctgtgtaaacagggccattctatttcctaaatcacaactaataaagcagaggatgaaaatcaaaaaaaaatg

SEQ ID NO: 28800 - DNA, 537 bp, Homo sapiens
actaacaatgttgtcatctgtaaaaactgttcagtgaattgtcccttcatgtcttaaatctgttgtgatggtgatttctgtgtgtcaacctgactgggttaaggaatgcccagatagttggtataacattatttctgggtgtatttgtgagggcgttttcggaagagattagcatttgaccagcaatagaccaagtaaagaagattgccctcaccaacgaggacaggcatcatccgatgtgctgaggactcaaatagaggtaataggcagggaggaaaggtgaattcactctctgtgtttgagctgaaatgtctgtcttctcctagcctcagacactggcacttccggttctctggccttcagattcagactgaattacaccaccagctttcatgaatcccagtccttcagacttagactctggactttacatcaaattacaccactgactcccctggctctctacgttacacgtgcagatcgtgggacttctcagcctgcatcaccatatgaaccaattcccattataagttaaaa

SEQ ID NO: 28801 - DNA, 555 bp, Homo sapiens
ctagttgtgcagccgtgactgtttaattaatagacatttacataagctcctgattttcccccagcaagctttataatggtcttggtggttatctccttttcaccctgtgaagtatcagcagtgcattttccattttgcatatcaaaatacagagagattaaattatgtacaacaaattgataattgaataagtttgggaactcggagttctggcatattaatagtcttgcttaaagcaacaatctatatagactctataaatatattcagacactgctctctaatccaggagctggagtggagactgtcagaagcccagggagggagccctttgtagatttatgcaggtgtgggagaattagtttctggcctctctatggagccatgaaagaaggttttgttagtagaggaggtggtatctgagaattattgctatgatgtctgtaatttttaataaaaattctagaaagcctggtggtgtctgtgtagtatatgaatttgatgaactgtctttctttggttttgtttgtttgttgttgttgtttaaaccacctt

SEQ ID NO: 28802 - DNA, 1064 bp, Homo sapiens
ccagctacttgggaggctggagtgggaggatcacctgagccctggaggtcaaggctgcagtgagctatgatcacgccactgcagtacagcgtgggtgacagagcaagaccctttcttggggaaaaaagtcccatataactttccttgatgaccccaccctcacccctcactgtgtcattatgccaagagagctttgggcattctaaagaagtatgaggaatacttgaccaataaccaaagtatagttatttatttgttaatgacttctttcctagactgtgagttactttagagcagagacttatttttccctgtatccctagggtgtggcacatagtaggtgcttagtaaacttattttgcattcaataatgccaagtagaataattcatagattatggcaaaataaaagaatttggcaaaattgcaagattgaagattgctttcagaaaaaatgttccaacccctgttcaaaagtacatagcttgctgtgttgttgaagtgccagcacgaggaggaccatgccaacacatccatttattgcccattctgggtgtgttgagcgttttaagtttgctatgcttgtaaaaatcaaggaatggcaatggtatcaactttcatgaacacagtcgttcagctgaaccaagtatcagtgataacttctgttttgaattttagaaatatatctctgaggttagaatgttgattcatgcatattccagctggctttccctatgagtataaatagggaaaacaaggctattggcccaaatgtaagttgtattccaaggtttggtccaaagaccagagaatccctaagtaggaagacagttttgttttcccctcttttactggttaactttgagcaggtcacttatatttgggggcacagaagatgaagatgaccctgagcttgtcatgttcactgttaattgttctactaacaccctagacttcatcatcttgttatagcacttatcacagttgcttttaaatcatcatgcagttatatgtttattgtctgccttttccactagaataaagcctctgctgacataaggtcta

SEQ ID NO: 28803 - DNA, 443 bp, Homo sapiens
ataattctcttaaagtagtgacttcaccaacaggaattccaggccccctggtgtgccagctcaagggataagcagagtatgtcgggttcccaggtgccaatgaacagagaaatagccaaagggctcgctgagtgggagcagaggtaaatgggcctggataattggaaaactggatagtcacgaggttaactatgccacaggcaagaatccagatggttccaacctacctcagccagtgtgacgtgaaacaaggtcccagcttgaacactctgagttttgaacagatatgtctgagaggacatctgccagaagcctatttgcatgaggaacttagaaacctccaggagaaagctcagactgaaggaaagaggagtcggcttgccaactgcaaggcaccagacaataaataatgccgtagtggtcaatggaaagtagtgaatggg

SEQ ID NO: 28804 - DNA, 580 bp, Homo sapiens
aggcttggtacttttcttcatgaaaaggaactacttctgttgaagatggctagaaaactagatttcatgacccaagaagcaagatagccctagagatcactaatgttttcagaaatgctctgcaagtcatgtaaaggctaattgagaagaagattccattgataggcatggtttagctgtgaaaaacaccgaaaacaagtcagtcaggagatagtgattaaagaacatctaagtttgtagttacgctgaagaaactaaaaataaaagatgcaataacaagtataaaaaccacaagtcccatatactatgagttgtattcaaagtccaagttaataatcacaattttttaaatctacataattaatctatgtcctactctagacaaaatatcatccagtgtctagaatgaaagcaaaatgactgtgcaaatatacaaacaccccctaaaataactattgggtaataggcttaatacctgggtgatgaaataatctgtacaacaaactcccatgacatgagtttacttgtgtaacaaacctgcacatttacccctgaaactaaaagtttttttgtaaaaaaa

SEQ ID NO: 28805 - DNA, 432 bp, Homo sapiens
tttcatcaattctaagacatacattttctttttcccattttaacacctctgaaattgagatgctttttaaaatcactatcagcctgccagcagtcttgatgtcactgtcatatctgggaacacacatcaaaacttgcggaacaagtatttgcagcttaaaatcctgaggacaatagaggagtgatttttaaagaaatgctatcacaaatgcctgcaatgtgacagcagatgatagtctgttgaaaaacatggacattgacaatgctgagttcgtctctgaatatgaggaagttttaggaataacttaaacaattatttcacttatattttccttttcatgtatgtatacaaaggtcttgtgacaaacacctatgtttaaataaacctgaaagttcttttcataagtataaaaataaaattctaagtgataag

SEQ ID NO: 28806 - DNA, 360 bp, Homo sapiens
cactgcactccatcctgggcaacagagtaagaccctgcccccccaaaaaagtagtcctaagtaattattgatttaaaaggcggtgtaggataaaaggtaaagaaggccatttctactgtgggtgtacatggacttcaaattcagagtccacagataatcaaagaaacatttcacttccctattgctgaaataaagaaacaaataaagaaacacactgtatggctctgtttacatcaaattcagaaaagcaaaacatctatcatgaaaaatctgaacagcgtttaacttggggaaggtattgactgggaggagaccccagggaaccttctgaagtgttggaaatggccttatattgatcac

SEQ ID NO: 28807 - DNA, 343 bp, Homo sapiens
gaaggaagtgttaaagtttctatttattttggtaacttataaactttctatttgttacagtgtgagttctggtgtatatagtcaagccatatgctagtacatgggataatgtataaataaacatgtaagtgtcgataagtactcaactcttttttactgagagggctttaggctttttttttttttaagtttcaataccacagttcaaatgtgtgtgttggtcttatctatgtaattgttttgtgtgctctttcagggagtggtggtgtcttgtgtctcttactctgccaaaggaccttgtatgtataaatgcgaataaatatttattgaactccaaaaaaaa

SEQ ID NO: 28808 - DNA, 309 bp, Homo sapiens
cagtagaatattagggaagtcctaaatttaaataccaaaatttatgaaaatcccagcactttgggaggccaaggcaggtggatcacaaggtcaggagatccagaccatcctggctaacacggtgaaaccccatctctactaaaaatacaaaaaattagcggggcgtggtggcgggctcctgtagtcccagctactcgggaggctgaggcaagagaatggtctgaacccgggaggtggagcttgcagtgagccgagatggcgccattgcactccagcctgggcggcagagcgagactccgtcacaaaaaa

SEQ ID NO: 28809 - DNA, 303 bp, Homo sapiens
ttcttttttttaagatgaggtctcacttttgcccaggctggagtacaatggcatggtcatagctcaatgcagcctccaactcctgggctcaagtcatcctcctttctcagcctcccaagtagctaggtctctaggtgccaccaccacacctggctaattttttaaattttattttactttttgtagatacagggtcttactacgttgcctgggctggcttcaaactcctggccccatgtaatctttctgcctcaaactcctgaagtgtgggaattacaggagtgagccaccatgccctgttac

SEQ ID NO: 28810 - DNA, 329 bp, Homo sapiens
attccctggtttctcaagggggtcactttccctctcaccgagttaaatctggctctgttatattttttccaggaacacagtatgtctcttcccaatgttttattcggtttctggtttccccacttttgaccggaagtatgtgggaagaatactggctgttattattatgattattgagtgtccaatactctcctccaatatttccaccaagaattattatcgctgctctcctcattcatgttagtgttgctttgtgtgctttagatgacaatcgtcctctttactctccaagtttggagggtgagggttttttgttgtggtggtggtgg

SEQ ID NO: 28811 - DNA, 500 bp, Homo sapiens
tacctgatggagcaagggcaagaggacaacggtgggaatcgccatgttgggtggaccctcttgcatttgcatcttaaaggttgccagcctttaagagccagggcttttatgctagacaagaaatttttctggagctacgaaaaaccttccaaggaccacttttcctctccatttgcctaaaataatttcttaataactcgtgtggagtagaggggtatttctttttttctttttgttagtcctgtcctgcattctcttaaaaaatcctatctataaaaaatctcagccgggcgtggtggctcatgcctgtaatcccagcactttgggaggcccaggcgggcggatcacctgaggtcaggagttcaggaccagcctcgccaacatgttgtgaaaacccatctctactaaaaataccaaaaattagctgggcatagtggcgggcacctgtaatctagctactcaggaggctgagacaggagaatcgcttgaacccgggaggc

SEQ ID NO: 28812 - DNA, 437 bp, Homo sapiens
ggaaatatttactgtaccaaaacctattgaatgattggtccagaggttctcaactgggcacagttttagccccccagggaaaatctggccatgtctggagacatttttggttgtcacagctgggacactgctactggcatctggtgggtagaggccagggatgctatgaaatgtcctacaatacccaggccagcctcctacagcaaagaattacagcccgagggtcgccagtgctgaggtcgagagtccaggacggatctcatagctcccaacaagatcagccatggagaattgttttgttttgttttttctctgcccccggggtccttcccatgttttaaaagattttttgtctactaagtgaaacgcctaagtcaccatatattttacatttaaaaacattaaaactaaccagaactttctaatcagtccatcca

SEQ ID NO: 28813 - DNA, 4155 bp, Homo sapiens
cactgttcctgctaccactgtgaagattgtgagccttggcggtggctgtaacatgatccagcctgtcaatgcggctgtggcccagagtccccagactattcccatcactaccctcttggttaaccctacttccttcccctgtccattgaaccagtcccttgtggcctcctctgtctcacccttaattgtttctggcaattctgtgaatcttcctataccatccacccctgaagataaggcccacgtgaatgtggacattgcttgtgctgtggctgatggggaaaatgcctttcagggcctagaacccaaattagagccccaggaactatctcctctctctgctactgttttcccgaaagtggaacatagcccagggcctccactagcagatgcagagtgccaagaaggattgtcagagaatagtgcctgtcgctggaccgttgtgaaaacagaggaggggaggcaagctctggagccgctccctcagggcatccaggagtctctaaacaaccctacccctggggatttagaggaaattgtcaagatggaacctgaagaagctagagaggaaatcagtggatcccctgagcgtgatatttgtgatgacatcaaagtggaacatgctgtggaattggacactggtgccccaagcgaggagttgagcagtgctggagaagtaacgaaacagacagtcttacagaaggaagaggagaggagtcagccaactaaaaccccttcatcttctcaagagccccctgatgaaggaacctcagggacagatgtgaacaaaggatcatcaaagaatgctttgtcctcaatggatcctgaagtgaggcttagtagccccccagggaagccagaagattcatccagtgttgatggtcagtcagtggggactccagttgggccagaaactggaggagagaagaatgggccagaagaagaggaagaagaggactttgatgacctcacccaagatgaggaagatgaaatgtcatcagcttctgaggaatctgtgctttctgtcccagaactccaggaaacaatggagaaactgacttggctggcatctgaaaggcgcatgagtcaggagggtgagtctgaagaagagaattctcaggaggagaactctgagccagaagaagaggaggaagaagaagcagaaggaatggaaagcctgcagaaagaggatgaaatgacggatgaagcagttggagactctgctgagaagcctcctacttttgcttcacctgagactgctccagaagtggagaccagcagaactccaccaggagagagcatcaaagctgctggaaaaggccggaacaatcatcgagctcgcaacaagcggggaagtcgggctcgggccagcaaggacacctccaagctgctgttgctgtatgatgaggacattctcgagcgagatccactcagggagcagaaggacttggcctttgcccaagcttatctgaccagggtgcgagaagccctacaacatatccctggcaagtatgaagacttccttcaagtcatctatgaatttgagtcaagtacccagagacggacggctgtagatctctacaaaagcctgcaaattctgctccaagactggcctcagctgttgaaagactttgctgctttcctgttacctgagcaagctctggcctgtggattatttgaggagcagcaggcttttgagaagagccgcaagttccttcggcagctggagatttgctttgcagagaacccctcacaccaccagaagattatcaaggtcctccaaggctgtgcagactgccttccccaggagatcaccgagctcaagacacagatgtggcagctcctcaagggccacgaccacctgcaggatgagttttctatcttctttgaccacttgcgcccagcagctagccggatgggtgactttgaagagatcaattggactgaggaaaaggagtatgagtttgatggctttgaagaagtggccctgcctgatgtggaagaagaggaggagcctcccaagatacccacagcctcaaagaacaagaggaaaaaagagatcggggtccaaaatcatgataaggagactgaatggccagatggggccaaggactgtgcctgctcctgccatgaaggaggtccagattccaagctgaagaagagcaaaaggcggagctgtagccactgtagcagcaaggtctgtgacagcaaatcctacaagagcaaggagccccatgagttggtgggcagcagcccccaccgagaggctagtcctatgcctggtgctaaggaagctgggcagggcaaggatatgatggaagaggaagccccagaggagcgggagagcactgaggccacccagagcaggactgtcaggaccaccagaaagggagagatgcctgtttcaggattggcagtggggagcactttgccatcccctcgagaagtgactgttacagaacggctcctcctggatggcccaccacctcattcaccagagactcctcaatttccccccacaactggagctgtactgtacactgttaagagaaaccaggttgggcctgaggttcgctcctgccccaaggcatcccccagacttcagaaagagagggagggccaaaaggcagtgagtgagtcagaggctttgatgctggtctgggatgcatcagaaactgagaaattgcctggtaccgtggaaccccctgcttccttcctgagtcctgtttcctcaaagaccagagatgcagggagaagacatgtgtccgggaaaccagacactcaagagagatggctgccctcaagcagagctcgggtgaagacaagagacaggacgtgccctgtccatgaatctccatcaggaattgacacctcagagacttctcccaaagcccctagagggggtttggctaaagacagtggaacacaggccaagggtccagagggggagcagcagccaaaggccgcagaagctacggtgtgtgccaacaacagcaaggtcagctccactggggaaaaggttgtcctgtggacaagggaagctgaccgtgtgatcctcaccatgtgccaggagcaaggggcacagccacagaccttcaacatcatctcccagcagctgggaaataagacccctgctgaggtttcccaccgttttcgagaactcatgcagctcttccacactgcctgtgaagccagctctgaggatgaggatgatgcaaccagtaccagcaatgcagaccagctgtctgaccatggggaccttctgtctgaagaggagctggatgaatgagactctgggaatcatctacacaggaccaaacccaacaggcgccctggcaccggggagggggtagttgtactctgcttgtacagtccttgagcccagtttacagatctggagagcaggaggccaggacaaggacaaaggctggaggatggagtaggacccaggggctctgccatcctaggcatcattcaaggtcttttatgaagactttacagatgtcctctgtaaatagcatcgagagtggagttcagctcctttctctacttttttttggtctgatggcacatatttattgttctgtggtctaatcacagtgtttctaaatgtaaaaagtgcatatgttggtgtagctagtcccgcgacattgagctcctctgcatgaagacactgggctcctgcatccagctgtttttattgcaaactagctcctttctcccacactgggaactttagtccacgaggctgtcaccaccctggtagcactgggccaggctttgtagctcctgcagcagctctgctacgtcatcgtgctccactccagcatccatgaagctggcccagcgccgcaagtcgagtttggtgaggtctctggccaaggcttccagggtctggtgcagggacgaagaggaacacagtgccccaaacactgggatgctctccactgctgtggagggagaggaaacagagacctgtagatggatgattattctgccctgggactcgccaaactgataaggaagtccaaccttagtagacttgattgtaaactcaacaaatttggtgtattgtccccttagtacaccagtactccagaggaagaatgcttttcttgggagccatagggtgaataaaggaatgtttaactgtgg

SEQ ID NO: 28814 - DNA, 1204 bp, Homo sapiens
gatgtgctggaagggatgttcagcgaaggaggttctgggacctgggaggggccttacctccttgctctgcttggaatagtgccctagctggagatcagtagggtggagtggagagtggaatcattaggaatcaaatccagtattagtacccttcccctataggcagctaaggaggaagagaaagttttagtattctttgttaccaggcagagtctctgtgtgtttcccagttgactgggaaagcagaacatggaagtatgtgggattgattgggaagggcagcctagagaggctctggagacttcctctttccctctgtgactctcctcagctcaagacacagatgtggcagctcctcaagggccacgaccacctgcaggatgagttttctatcttctttgaccacttgcgcccagcagctagccggatgggtgactttgaagagatcaattggactgaggaaaaggagtatgagtttgatggctttgaagaagtggccctgcctgatgtggaagaagaggaggagcctcccaagatacccacagcctcaaagaacaagaggaaaaaagagatcggggtccaaaatcatgataaggagactgaatggccagatggggccaaggactgtgcctgctcctgccatgaaggaggtccagattccaagctgaagaagagcaaaaggcggagctgtagccactgtagcagcaaggtgaggaaagtatcaagggtcccgagggtatcagagctgctgggggattgtttgctaccaagaattgtaccttactgaattcctaaaaaggcacatatataaataacattcagtatacacatatgtgtacatatgcaaaataaatggaatctgctagaaatacgtgatagattttgttttttaaagagaattctgtgagtaaagcttttggaattggaaaaacaaaataccagttaaaatatttccctcagatattagaaaatgaaataaacctctgtcgtgaaaatagtctctacaagtaatcctggttctctagaatggagttggttggcaggaaaaacacagttcttggtgagagaaggagttgtggaatccaatactctattcggggccatttaaaatccttggagcagggaggcagaggttgcagtgagccatgatgataccactgagctccagcctgggtgacagagtgagaccgtgtttaaaaaaaaa

SEQ ID NO: 28815 - DNA, 401 bp, Homo sapiens
ctattttttgaggatttttaaatttttatttatttatgtattttagacgcagtttcacttgtcgcctaggctggagtgcagtggcacaatctcagctcactacaacctccacctcccaggttcaagtgattgtcctgcctcagcctctcccaaagtagctgggattacaggcacccaccaccatgccaggctaatttatttatttttagtagacacggggtttcaccatgttggcaaggctagtcttgaactcctgacctcaggttatccacctgcctcagcctcccaaagtgctgggaataggtgagatactgcgcccggccaggattttaaagtggaagccccagtttccattccagttttgtttttaggagttgtgtgactttgggcaaaacatttag

SEQ ID NO: 28816 - DNA, 4088 bp, Homo sapiens
cactgttcctgctaccactgtgaagattgtgagccttggcggtggctgtaacatgatccagcctgtcaatgcggctgtggcccagagtccccagactattcccatcactaccctcttggttaaccctacttccttcccctgtccattgaaccagtcccttgtggcctcctctgtctcacccttaattgtttctggcaattctgtgaatcttcctataccatccacccctgaagataaggcccacgtgaatgtggacattgcttgtgctgtggctgatggggaaaatgcctttcagggcctagaacccaaattagagccccaggaactatctcctctctctgctactgttttcccgaaagtggaacatagcccagggcctccactagcagatgcagagtgccaagaaggattgtcagagaatagtgcctgtcgctggaccgttgtgaaaacagaggaggggaggcaagctctggagccgctccctcagggcatccaggagtctctaaacaaccctacccctggggatttagaggaaattgtcaagatggaacctgaagaagctagagaggaaatcagtggatcccctgagcgtgatatttgtgatgacatcaaagtggaacatgctgtggaattggacactggtgccccaagcgaggagttgagcagtgctggagaagtaacgaaacagacagtcttacagaaggaagaggagaggagtcagccaactaaaaccccttcatcttctcaagagccccctgatgaaggaacctcagggacagatgtgaacaaaggatcatcaaagaatgctttgtcctcaatggatcctgaagtgaggcttagtagccccccagggaagccagaagattcatccagtgttgatggtcagtcagtggggactccagttgggccagaaactggaggagagaagaatgggccagaagaagaggaagaagaggactttgatgacctcacccaagatgaggaagatgaaatgtcatcagcttctgaggaatctgtgctttctgtcccagaactccaggaaacaatggagaaactgacttggctggcatctgaaaggcgcatgagtcaggagggtgagtctgaagaagagaattctcaggaggagaactctgagccagaagaagaggaggaagaagaagcagaaggaatggaaagcctgcagaaagaggatgaaatgacggatgaagcagttggagactctgctgagaagcctcctacttttgcttcacctgagactgctccagaagtggagaccagcagaactccaccaggagagagcatcaaagctgctggaaaaggccggaacaatcatcgagctcgcaacaagcggggaagtcgggctcgggccagcaaggacacctccaagctgctgttgctgtatgatgaggacattctcgagcgagatccactcagggagcagaaggacttggcctttgcccaagcttatctgaccagggtgcgagaagccctacaacatatccctggcaagtatgaagacttccttcaagtcatctatgaatttgagtcaagtacccagagacggacggctgtagatctctacaaaagcctgcaaattctgctccaagactggcctcagctgttgaaagactttgctgctttcctgttacctgagcaagctctggcctgtggattaagaacccctcacaccaccagaagattatcaaggtcctccaaggctgtgcagactgccttccccaggagatcaccgagctcaagacacagatgtggcagctcctcaagggccacgaccacctgcaggatgagttttctatcttctttgaccacttgcgcccagcagctagccggatgggtgactttgaagagatcaattggactgaggaaaaggagtatgagtttgatggctttgaagaagtggccctgcctgatgtggaagaagaggaggagcctcccaagatacccacagcctcaaagaacaagaggaaaaaagagatcggggtccaaaatcatgataaggagactgaatggccagatggggccaaggactgtgcctgctcctgccatgaaggaggtccagattccaagctgaagaagagcaaaaggcggagctgtagccactgtagcagcaaggtctgtgacagcaaatcctacaagagcaaggagccccatgagttggtgggcagcagcccccaccgagaggctagtcctatgcctggtgctaaggaagctgggcagggcaaggatatgatggaagaggaagccccagaggagcgggagagcactgaggccacccagagcaggactgtcaggaccaccagaaagggagagatgcctgtttcaggattggcagtggggagcactttgccatcccctcgagaagtgactgttacagaacggctcctcctggatggcccaccacctcattcaccagagactcctcaatttccccccacaactggagctgtactgtacactgttaagagaaaccaggttgggcctgaggttcgctcctgccccaaggcatcccccagacttcagaaagagagggagggccaaaaggcagtgagtgagtcagaggctttgatgctggtctgggatgcatcagaaactgagaaattgcctggtaccgtggaaccccctgcttccttcctgagtcctgtttcctcaaagaccagagatgcagggagaagacatgtgtccgggaaaccagacactcaagagagatggctgccctcaagcagagctcgggtgaagacaagagacaggacgtgccctgtccatgaatctccatcaggaattgacacctcagagacttctcccaaagcccctagagggggtttggctaaagacagtggaacacaggccaagggtccagagggggagcagcagccaaaggccgcagaagctacggtgtgtgccaacaacagcaaggtcagctccactggggaaaaggttgtcctgtggacaagggaagctgaccgtgtgatcctcaccatgtgccaggagcaaggggcacagccacagaccttcaacatcatctcccagcagctgggaaataagacccctgctgaggtttcccaccgttttcgagaactcatgcagctcttccacactgcctgtgaagccagctctgaggatgaggatgatgcaaccagtaccagcaatgcagaccagctgtctgaccatggggaccttctgtctgaagaggagctggatgaatgagactctgggaatcatctacacaggaccaaacccaacaggcgccctggcaccggggagggggtagttgtactctgcttgtacagtccttgagcccagtttacagatctggagagcaggaggccaggacaaggacaaaggctggaggatggagtaggacccaggggctctgccatcctaggcatcattcaaggtcttttatgaagactttacagatgtcctctgtaaatagcatcgagagtggagttcagctcctttctctacttttttttggtctgatggcacatatttattgttctgtggtctaatcacagtgtttctaaatgtaaaaagtgcatatgttggtgtagctagtcccgcgacattgagctcctctgcatgaagacactgggctcctgcatccagctgtttttattgcaaactagctcctttctcccacactgggaactttagtccacgaggctgtcaccaccctggtagcactgggccaggctttgtagctcctgcagcagctctgctacgtcatcgtgctccactccagcatccatgaagctggcccagcgccgcaagtcgagtttggtgaggtctctggccaaggcttccagggtctggtgcagggacgaagaggaacacagtgccccaaacactgggatgctctccactgctgtggagggagaggaaacagagacctgtagatggatgattattctgccctgggactcgccaaactgataaggaagtccaaccttagtagacttgattgtaaactcaacaaatttggtgtattgtccccttagtacaccagtactccagaggaagaatgcttttcttgggagccatagggtgaataaaggaatgtttaactgtgg

SEQ ID NO: 28817 - DNA, 4245 bp, Homo sapiens
cactgttcctgctaccactgtgaagattgtgagccttggcggtggctgtaacatgatccagcctgtcaatgcggctgtggcccagagtccccagactattcccatcactaccctcttggttaaccctacttccttcccctgtccattgaaccagtcccttgtggcctcctctgtctcacccttaattgtttctggcaattctgtgaatcttcctataccatccacccctgaagataaggcccacgtgaatgtggacattgcttgtgctgtggctgatggggaaaatgcctttcagggcctagaacccaaattagagccccaggaactatctcctctctctgctactgttttcccgaaagtggaacatagcccagggcctccactagcagatgcagagtgccaagaaggattgtcagagaatagtgcctgtcgctggaccgttgtgaaaacagaggaggggaggcaagctctggagccgctccctcagggcatccaggagtctctaaacaaccctacccctggggatttagaggaaattgtcaagatggaacctgaagaagctagagaggaaatcagtggatcccctgagcgtgatatttgtgatgacatcaaagtggaacatgctgtggaattggacactggtgccccaagcgaggagttgagcagtgctggagaagtaacgaaacagacagtcttacagaaggaagaggagaggagtcagccaactaaaaccccttcatcttctcaagagccccctgatgaaggaacctcagggacagatgtgaacaaaggatcatcaaagaatgctttgtcctcaatggatcctgaagtgaggcttagtagccccccagggaagccagaagattcatccagtgttgatggtcagtcagtggggactccagttgggccagaaactggaggagagaagaatgggccagaagaagaggaagaagaggactttgatgacctcacccaagatgaggaagatgaaatgtcatcagcttctgaggaatctgtgctttctgtcccagaactccaggaaacaatggagaaactgacttggctggcatctgaaaggcgcatgagtcaggagggtgagtctgaagaagagaattctcaggaggagaactctgagccagaagaagaggaggaagaagaagcagaaggaatggaaagcctgcagaaagaggatgaaatgacggatgaagcagttggagactctgctgagaagcctcctacttttgcttcacctgagactgctccagaagtggagaccagcagaactccaccaggagagagcatcaaagctgctggaaaaggccggaacaatcatcgagctcgcaacaagcggggaagtcgggctcgggccagcaaggacacctccaagctgctgttgctgtatgatgaggacattctcgagcgagatccactcagggagcagaaggacttggcctttgcccaagcttatctgaccagggtgcgagaagccctacaacatatccctggcaagtatgaagacttccttcaagtcatctatgaatttgagtcaagtacccagagacggacggctgtagatctctacaaaagcctgcaaattctgctccaagactggcctcagctgttgaaagactttgctgctttcctgttacctgagcaagctctggcctgtggattatttgaggagcagcaggcttttgagaagagccgcaagttccttcggcagctggagatttgctttgcagagaacccctcacaccaccagaagattatcaaggtcctccaaggctgtgcagactgccttccccaggagatcaccgagctcaagacacagatgtggcagctcctcaagggccacgaccacctgcaggatgagttttctatcttctttgaccacttgcgcccagcagctagccggatgggtgactttgaagagatcaattggactgaggaaaaggagtatgagtttgatggctttgaagaagtggccctgcctgatgtggaagaagaggaggagcctcccaagatacccacagcctcaaagaacaagaggaaaaaagagatcggggtccaaaatcatgataaggagactgaatggccagatggggccaaggactgtgcctgctcctgccatgaaggaggtccagattccaagctgaagaagagcaaaaggcggagctgtagccactgtagcagcaaggtctgtgacagcaaatcctacaagagcaaggagccccatgagttggtgggcagcagcccccaccgagaggctagtcctatgcctggtgctaaggaagctgggcagggcaaggatatgatggaagaggaagccccagaggagcgggagagcactgaggccacccagagcaggactgtcaggaccaccagaaagggagagatgcctgtttcaggattggcagtggggagcactttgccatcccctcgagaagtgactgttacagaacggctcctcctggatggcccaccacctcattcaccagagactcctcaatttccccccacaactggagctgtactgtacactgttaagagaaaccaggttgggcctgaggttcgctcctgccccaaggcatcccccagacttcagaaagagagggagggccaaaaggcagtgagtgagtcagaggctttgatgctggtctgggatgcatcagaaactgagaaattgcctggtaccgtggaaccccctgcttccttcctgagtcctgtttcctcaaagaccagagatgcagggagaagacatgtgtccgggaaaccagacactcaagagagatggctgccctcaagcagagctcgggtgaagacaagagacaggacgtgccctgtccatgaatctccatcaggaattgacacctcagagacttctcccaaagcccctagagggggtttggctaaagacagtggaacacaggccaagggtccagagggggagcagcagccaaaggccgcagaagctacggtgtgtgccaacaacagcaaggtcagctccactggggaaaaggttgtcctgtggacaaggtaggtaagggtggatgacgtgtgtttggaaaagagcatagaccacatccatgtggctccctagggttaatcatgatacctgggttacagggaagctgaccgtgtgatcctcaccatgtgccaggagcaaggggcacagccacagaccttcaacatcatctcccagcagctgggaaataagacccctgctgaggtttcccaccgttttcgagaactcatgcagctcttccacactgcctgtgaagccagctctgaggatgaggatgatgcaaccagtaccagcaatgcagaccagctgtctgaccatggggaccttctgtctgaagaggagctggatgaatgagactctgggaatcatctacacaggaccaaacccaacaggcgccctggcaccggggagggggtagttgtactctgcttgtacagtccttgagcccagtttacagatctggagagcaggaggccaggacaaggacaaaggctggaggatggagtaggacccaggggctctgccatcctaggcatcattcaaggtcttttatgaagactttacagatgtcctctgtaaatagcatcgagagtggagttcagctcctttctctacttttttttggtctgatggcacatatttattgttctgtggtctaatcacagtgtttctaaatgtaaaaagtgcatatgttggtgtagctagtcccgcgacattgagctcctctgcatgaagacactgggctcctgcatccagctgtttttattgcaaactagctcctttctcccacactgggaactttagtccacgaggctgtcaccaccctggtagcactgggccaggctttgtagctcctgcagcagctctgctacgtcatcgtgctccactccagcatccatgaagctggcccagcgccgcaagtcgagtttggtgaggtctctggccaaggcttccagggtctggtgcagggacgaagaggaacacagtgccccaaacactgggatgctctccactgctgtggagggagaggaaacagagacctgtagatggatgattattctgccctgggactcgccaaactgataaggaagtccaaccttagtagacttgattgtaaactcaacaaatttggtgtattgtccccttagtacaccagtactccagaggaagaatgcttttcttgggagccatagggtgaataaaggaatgtttaactgtgg

SEQ ID NO: 28818 - DNA, 1921 bp, Homo sapiens
ggcagtcccaccactttggcttcccaaagtgcggacattatggtgtgagccaccatgcccagccctcttttttattagaatttttgcacagtacctggccacaggtaatttctcgtgcttaggtgcatcttgaacctgacagtaccctgagatccttattttcctcctaagcaggattggcagtggggagcactttgccatcccctcgagaagtgactgttacagaacggctcctcctggatggcccaccacctcattcaccagagactcctcaatttccccccacaactggagctgtactgtacactgttaagagaaaccaggttgggcctgaggttcgctcctgccccaaggcatcccccagacttcagaaagagagggagggccaaaaggcagtgagtgagtcagaggctttgatgctggtctgggatgcatcagaaactgagaaattgcctggtaccgtggaaccccctgcttccttcctgagtcctgtttcctcaaagaccagagatgcagggagaagacatgtgtccgggaaaccagacactcaagagagatggctgccctcaagcagagctcgggtgaagacaagagacaggacgtgccctgtccatgaatctccatcaggaattgacacctcagagacttctcccaaagcccctagagggggtttggctaaagacagtggaacacaggccaagggtccagagggggagcagcagccaaaggccgcagaagctacggtgtgtgccaacaacagcaaggtcagctccactggggaaaaggttgtcctgtggacaagggaagctgaccgtgtgatcctcaccatgtgccaggagcaaggggcacagccacagaccttcaacatcatctcccagcagctgggaaataagacccctgctgaggtttcccaccgttttcgagaactcatgcagctcttccacactgcctgtgaagccagctctgaggatgaggatgatgcaaccagtaccagcaatgcagaccagctgtctgaccatggggaccttctgtctgaagaggagctggatgaatgagactctgggaatcatctacacaggaccaaacccaacaggcgccctggcaccggggagggggtagttgtactctgcttgtacagtccttgagcccagtttacagatctggagagcaggaggccaggacaaggacaaaggctggaggatggagtaggacccaggggctctgccatcctaggcatcattcaaggtcttttatgaagactttacagatgtcctctgtaaatagcatcgagagtggagttcagctcctttctctacttttttttggtctgatggcacatatttattgttctgtggtctaatcacagtgtttctaaatgtaaaaagtgcatatgttggtgtagctagtcccgcgacattgagctcctctgcatgaagacactgggctcctgcatccagctgtttttattgcaaactagctcctttctcccacactgggaactttagtccacgaggctgtcaccaccctggtagcactgggccaggctttgtagctcctgcagcagctctgctacgtcatcgtgctccactccagcatccatgaagctggcccagcgccgcaagtcgagtttggtgaggtctctggccaaggcttccagggtctggtgcagggacgaagaggaacacagtgccccaaacactgggatgctctccactgctgtggagggagaggaaacagagacctgtagatggatgattattctgccctgggactcgccaaactgataaggaagtccaaccttagtagacttgattgtaaactcaacaaatttggtgtattgtccccttagtacaccagtactccagaggaagaatgcttttcttgggagccatagggtgaataaaggaatgtttaactgtgg

SEQ ID NO: 28819 - DNA, 2779 bp, Homo sapiens
cactgttcctgctaccactgtgaagattgtgagccttggcggtggctgtaacatgatccagcctgtcaatgcggctgtggcccagagtccccagactattcccatcactaccctcttggttaaccctacttccttcccctgtccattgaaccagtcccttgtggcctcctctgtctcacccttaattgtttctggcaattctgtgaatcttcctataccatccacccctgaagataaggcccacgtgaatgtggacattgcttgtgctgtggctgatggggaaaatgcctttcagggcctagaacccaaattagagccccaggaactatctcctctctctgctactgttttcccgaaagtggaacatagcccagggcctccactagcagatgcagagtgccaagaaggattgtcagagaatagtgcctgtcgctggaccgttgtgaaaacagaggaggggaggcaagctctggagccgctccctcagggcatccaggagtctctaaacaaccctacccctggggatttagaggaaattgtcaagatggaacctgaagaagctagagaggaaatcagtggatcccctgagcgtgatatttgtgatgacatcaaagtggaacatgctgtggaattggacactggtgccccaagcgaggagttgagcagtgctggagaagtaacgaaacagacagtcttacagaaggaagaggagaggagtcagccaactaaaaccccttcatcttctcaagagccccctgatgaaggaacctcagggacagatgtgaacaaaggatcatcaaagaatgctttgtcctcaatggatcctgaagtgaggcttagtagccccccagggaagccagaagattcatccagtgttgatggtcagtcagtggggactccagttgggccagaaactggaggagagaagaatgggccagaagaagaggaagaagaggactttgatgacctcacccaagatgaggaagatgaaatgtcatcagcttctgaggaatctgtgctttctgtcccagaactccaggaaacaatggagaaactgacttggctggcatctgaaaggcgcatgagtcaggagggtgagtctgaagaagagaattctcaggaggagaactctgagccagaagaagaggaggaagaagaagcagaaggaatggaaagcctgcagaaagaggatgaaatgacggatgaagcagttggagactctgctgagaagcctcctacttttgcttcacctgagactgctccagaagtggagaccagcagaactccaccaggagagagcatcaaagctgctggaaaaggccggaacaatcatcgagctcgcaacaagcggggaagtcgggctcgggccagcaaggacacctccaagctgctgttgctgtatgatgaggacattctcgagcgagatccactcagggagcagaaggacttggcctttgcccaagcttatctgaccagggtgcgagaagccctacaacatatccctggcaagtatgaagacttccttcaagtcatctatgaatttgagtcaagtacccagagacggacggctgtagatctctacaaaagcctgcaaattctgctccaagactggcctcagctgttgaaagactttgctgctttcctgttacctgagcaagctctggcctgtggattatttgaggagcagcaggcttttgagaagagccgcaagttccttcggcagctggagatttgctttgcagagaacccctcacaccaccagaagattatcaaggtcctccaaggctgtgcagactgccttccccaggagatcaccgagctcaagacacagatgtggcagctcctcaagggccacgaccacctgcaggatgagttttctatcttctttgaccacttgcgcccagcagctagccggatgggtgactttgaagagatcaattggactgaggaaaaggagtatgagtttgatggctttgaagaagtggccctgcctgatgtggaagaagaggaggagcctcccaagatacccacagcctcaaagaacaagaggaaaaaagagatcggggtccaaaatcatgataaggagactgaatggccagatggggccaaggactgtgcctgctcctgccatgaaggaggtccagattccaagctgaagaagagcaaaaggcggagctgtagccactgtagcagcaaggtctgtgacagcaaatcctacaagagcaaggagccccatgagttggtgggcagcagcccccaccgagaggctagtcctatgcctggtgctaaggaagctgggcagggcaaggatatgatggaagaggaagccccagaggagcgggagagcactgaggccacccagagcaggactgtcaggaccaccagaaagggagagatgcctgtttcaggtgagtgatttgccaacgcagcccttctgttcctcagtctcgttatcctgtactccagacaggaacctccatgagcctggataaatagccttttcagggatggatataccacctctttcactgatggacccataggaagcccttctgctgttcaggctttttctatcatatggcctcactcctcttgcagaattaagaatgccacaaatttcatgcaattcaacattgtcttgtgttttattccaaaaacccttccccctgtctccaaatctagtgtaatctacatcctaaagactgggccgttctcagctttggcagtaggactttatatctttgcataagtgacattatgccccccacctccacccaac

SEQ ID NO: 28820 - DNA, 598 bp, Homo sapiens
  misc_feature (581)..(581): n is a, c, g, or t
  misc_feature (591)..(591): n is a, c, g, or t
ctattttttgaggatttttaaatttttatttatttatgtattttagacgcagtttcacttgtcgcctaggctggagtgcagcagagagagactccgtctcaaaaacaaaaaaaaagaccagtgaatacagccctcctcctttcttaggtttcccaccgttttcgagaactcatgcagctcttccacactgcctgtgaagccagctctgaggatgaggatgatgcaaccagtaccagcaatgcagaccagctgtctgaccatggggaccttctgtctgaagaggagctggatgaatgagactctgggaatcatctacacaggaccaaacccaacaggcgccctggcaccggggagggggtagttgtactctgcttgtacagtccttgagcccagtttacagatctggagagcaggaggccaggacaaggacaaaggctggaggatggagtaggacccaggggctctgccatcctaggcatcattcaaggtcttttatgaagactttacagatgtcctctgtaaatagcatcgagagtggagttcagctcctttctctacttttttttggtctgaagtgtcancgtggggatnctctaga

SEQ ID NO: 28821 - DNA, 893 bp, Homo sapiens
  misc_feature (876)..(876): n is a, c, g, or t
  misc_feature (886)..(886): n is a, c, g, or t
tatctataatgacatagctctcccaaccttgctgtgaggaataaacaagagatttttcaaatcagtatattgtgcttcataaatgttaacattgttacaaagcatcagtgaggctgggcgcagtggttcattcctgtaatcccaacactttgggaggccgaggtgggtggatcacctgaggtcaggaatttgagaccagcctggccaacatggtgaaaccccatctctactaaaaatataaaaactagtcaggtgtggtggtgggcacctgtaatcccagctactctgaaggctgaggcaggagaattgcttgaacccaggagacggaggttgcagtaagctgacacagtgccactgcactccagtctcagcaacgcagagagagactccgtctcaaaaacaaaaaaaaagaccagtgaatacagccctcctcctttcttaggtttcccaccgttttcgagaactcatgcagctcttccacactgcctgtgaagccagctctgaggatgaggatgatgcaaccagtaccagcaatgcagaccagctgtctgaccatggggaccttctgtctgaagaggagctggatgaatgagactctgggaatcatctacacaggaccaaacccaacaggcgccctggcaccggggagggggtagttgtactctgcttgtacagtccttgagcccagtttacagatctggagagcaggaggccaggacaaggacaaaggctggaggatggagtaggacccaggggctctgccatcctaggcatcattcaaggtcttttatgaagactttacagatgtcctctgtaaatagcatcgagagtggagttcagctcctttctctacttttttttggtctgaagtgtcancgtggggatnctctaga

SEQ ID NO: 28822 - DNA, 830 bp, Homo sapiens
ctattttttgaggatttttaaatttttatttatttatgtattttagacgcagtttcacttgtcgcctaggctggagtgcagaggccaggacaaggacaaaggctggaggatggagtaggacccaggggctctgccatcctaggcatcattcaaggtcttttatgaagactttacagatgtcctctgtaaatagcatcgagagtggagttcagctcctttctctacttttttttggtctgatggcacatatttattgttctgtggtctaatcacagtgtttctaaatgtaaaaagtgcatatgttggtgtagctagtcccgcgacattgagctcctctgcatgaagacactgggctcctgcatccagctgtttttattgcaaactagctcctttctcccacactgggaactttagtccacgaggctgtcaccaccctggtagcactgggccaggctttgtagctcctgcagcagctctgctacgtcatcgtgctccactccagcatccatgaagctggcccagcgccgcaagtcgagtttggtgaggtctctggccaaggcttccagggtctggtgcagggacgaagaggaacacagtgccccaaacactgggatgctctccactgctgtggagggagaggaaacagagacctgtagatggatgattattctgccctgggactcgccaaactgataaggaagtccaaccttagtagacttgattgtaaactcaacaaatttggtgtattgtccccttagtacaccagtactccagaggaagaatgcttttcttgggagccatagggtgaataaaggaatgtttaactgtgg

SEQ ID NO: 28823 - DNA, 3590 bp, Homo sapiens
  misc_feature (3573)..(3573): n is a, c, g, or t
  misc_feature (3583)..(3583): n is a, c, g, or t
cactgttcctgctaccactgtgaagattgtgagccttggcggtggctgtaacatgatccagcctgtcaatgcggctgtggcccagagtccccagactattcccatcactaccctcttggttaaccctacttccttcccctgtccattgaaccagtcccttgtggcctcctctgtctcacccttaattgtttctggcaattctgtgaatcttcctataccatccacccctgaagataaggcccacgtgaatgtggacattgcttgtgctgtggctgatggggaaaatgcctttcagggcctagaacccaaattagagccccaggaactatctcctctctctgctactgttttcccgaaagtggaacatagcccagggcctccactagcagatgcagagtgccaagaaggattgtcagagaatagtgcctgtcgctggaccgttgtgaaaacagaggaggggaggcaagctctggagccgctccctcagggcatccaggagtctctaaacaaccctacccctggggatttagaggaaattgtcaagatggaacctgaagaagctagagaggaaatcagtggatcccctgagcgtgatatttgtgatgacatcaaagtggaacatgctgtggaattggacactggtgccccaagcgaggagttgagcagtgctggagaagtaacgaaacagacagtcttacagaaggaagaggagaggagtcagccaactaaaaccccttcatcttctcaagagccccctgatgaaggaacctcagggacagatgtgaacaaaggatcatcaaagaatgctttgtcctcaatggatcctgaagtgaggcttagtagccccccagggaagccagaagattcatccagtgttgatggtcagtcagtggggactccagttgggccagaaactggaggagagaagaatgggccagaagaagaggaagaagaggactttgatgacctcacccaagatgaggaagatgaaatgtcatcagcttctgaggaatctgtgctttctgtcccagaactccaggaaacaatggagaaactgacttggctggcatctgaaaggcgcatgagtcaggagggtgagtctgaagaagagaattctcaggaggagaactctgagccagaagaagaggaggaagaagaagcagaaggaatggaaagcctgcagaaagaggatgaaatgacggatgaagcagttggagactctgctgagaagcctcctacttttgcttcacctgagactgctccagaagtggagaccagcagaactccaccaggagagagcatcaaagctgctggaaaaggccggaacaatcatcgagctcgcaacaagcggggaagtcgggctcgggccagcaaggacacctccaagctgctgttgctgtatgatgaggacattctcgagcgagatccactcagggagcagaaggacttggcctttgcccaagcttatctgaccagggtgcgagaagccctacaacatatccctggcaagtatgaagacttccttcaagtcatctatgaatttgagtcaagtacccagagacggacggctgtagatctctacaaaagcctgcaaattctgctccaagactggcctcagctgttgaaagactttgctgctttcctgttacctgagcaagctctggcctgtggattatttgaggagcagcaggcttttgagaagagccgcaagttccttcggcagctggagatttgctttgcagagaacccctcacaccaccagaagattatcaaggtcctccaaggctgtgcagactgccttccccaggagatcaccgagctcaagacacagatgtggcagctcctcaagggccacgaccacctgcaggatgagttttctatcttctttgaccacttgcgcccagcagctagccggatgggtgactttgaagagatcaattggactgaggaaaaggagtatgagtttgatggctttgaagaagtggccctgcctgatgtggaagaagaggaggagcctcccaagatacccacagcctcaaagaacaagaggaaaaaagagatcggggtccaaaatcatgataaggagactgaatggccagatggggccaaggactgtgcctgctcctgccatgaaggaggtccagattccaagctgaagaagagcaaaaggcggagctgtagccactgtagcagcaaggtctgtgacagcaaatcctacaagagcaaggagccccatgagttggtgggcagcagcccccaccgagaggctagtcctatgcctggtgctaaggaagctgggcagggcaaggatatgatggaagaggaagccccagaggagcgggagagcactgaggccacccagagcaggactgtcaggaccaccagaaagggagagatgcctgtttcaggattggcagtggggagcactttgccatcccctcgagaagtgactgttacagaacggctcctcctggatggcccaccacctcattcaccagagactcctcaatttccccccacaactggagctgtactgtacactgttaagagaaaccaggttgggcctgaggttcgctcctgccccaaggcatcccccagacttcagaaagagagggagggccaaaaggcagtgagtgagtcagaggctttgatgctggtctgggatgcatcagaaactgagaaattgcctggtaccgtggaaccccctgcttccttcctgagtcctgtttcctcaaagaccagagatgcagggagaagacatgtgtccgggaaaccagacactcaagagagatggctgccctcaagcagagctcgggtgaagacaagagacaggacgtgccctgtccatgaatctccatcaggaattgacacctcagagacttctcccaaagcccctagagggggtttggctaaagacagtggaacacaggccaagggtccagagggggagcagcagccaaaggccgcagaagctacggtgtgtgccaacaacagcaaggtcagctccactggggaaaaggttgtcctgtggacaagggaagctgaccgtgtgatcctcaccatgtgccaggagcaaggggcacagccacagaccttcaacatcatctcccagcagctgggaaataagacccctgctgaggtttcccaccgttttcgagaactcatgcagctcttccacactgcctgtgaagccagctctgaggatgaggatgatgcaaccagtaccagcaatgcagaccagctgtctgaccatggggaccttctgtctgaagaggagctggatgaatgagactctgggaatcatctacacaggaccaaacccaacaggcgccctggcaccggggagggggtagttgtactctgcttgtacagtccttgagcccagtttacagatctggagagcaggaggccaggacaaggacaaaggctggaggatggagtaggacccaggggctctgccatcctaggcatcattcaaggtcttttatgaagactttacagatgtcctctgtaaatagcatcgagagtggagttcagctcctttctctacttttttttggtctgaagtgtcancgtggggatnctctaga

SEQ ID NO: 28824 - DNA, 2667 bp, Homo sapiens
gatgtgctggaagggatgttcagcgaaggaggttctgggacctgggaggggccttacctccttgctctgcttggaatagtgccctagctggagatcagtagggtggagtggagagtggaatcattaggaatcaaatccagtattagtacccttcccctataggcagctaaggaggaagagaaagttttagtattctttgttaccaggcagagtctctgtgtgtttcccagttgactgggaaagcagaacatggaagtatgtgggattgattgggaagggcagcctagagaggctctggagacttcctctttccctctgtgactctcctcagctcaagacacagatgtggcagctcctcaagggccacgaccacctgcaggatgagttttctatcttctttgaccacttgcgcccagcagctagccggatgggtgactttgaagagatcaattggactgaggaaaaggagtatgagtttgatggctttgaagaagtggccctgcctgatgtggaagaagaggaggagcctcccaagatacccacagcctcaaagaacaagaggaaaaaagagatcggggtccaaaatcatgataaggagactgaatggccagatggggccaaggactgtgcctgctcctgccatgaaggaggtccagattccaagctgaagaagagcaaaaggcggagctgtagccactgtagcagcaaggtctgtgacagcaaatcctacaagagcaaggagccccatgagttggtgggcagcagcccccaccgagaggctagtcctatgcctggtgctaaggaagctgggcagggcaaggatatgatggaagaggaagccccagaggagcgggagagcactgaggccacccagagcaggactgtcaggaccaccagaaagggagagatgcctgtttcaggattggcagtggggagcactttgccatcccctcgagaagtgactgttacagaacggctcctcctggatggcccaccacctcattcaccagagactcctcaatttccccccacaactggagctgtactgtacactgttaagagaaaccaggttgggcctgaggttcgctcctgccccaaggcatcccccagacttcagaaagagagggagggccaaaaggcagtgagtgagtcagaggctttgatgctggtctgggatgcatcagaaactgagaaattgcctggtaccgtggaaccccctgcttccttcctgagtcctgtttcctcaaagaccagagatgcagggagaagacatgtgtccgggaaaccagacactcaagagagatggctgccctcaagcagagctcgggtgaagacaagagacaggacgtgccctgtccatgaatctccatcaggaattgacacctcagagacttctcccaaagcccctagagggggtttggctaaagacagtggaacacaggccaagggtccagagggggagcagcagccaaaggccgcagaagctacggtgtgtgccaacaacagcaaggtcagctccactggggaaaaggttgtcctgtggacaagggaagctgaccgtgtgatcctcaccatgtgccaggagcaaggggcacagccacagaccttcaacatcatctcccagcagctgggaaataagacccctgctgaggtttcccaccgttttcgagaactcatgcagctcttccacactgcctgtgaagccagctctgaggatgaggatgatgcaaccagtaccagcaatgcagaccagctgtctgaccatggggaccttctgtctgaagaggagctggatgaatgagactctgggaatcatctacacaggaccaaacccaacaggcgccctggcaccggggagggggtagttgtactctgcttgtacagtccttgagcccagtttacagatctggagagcaggaggccaggacaaggacaaaggctggaggatggagtaggacccaggggctctgccatcctaggcatcattcaaggtcttttatgaagactttacagatgtcctctgtaaatagcatcgagagtggagttcagctcctttctctacttttttttggtctgatggcacatatttattgttctgtggtctaatcacagtgtttctaaatgtaaaaagtgcatatgttggtgtagctagtcccgcgacattgagctcctctgcatgaagacactgggctcctgcatccagctgtttttattgcaaactagctcctttctcccacactgggaactttagtccacgaggctgtcaccaccctggtagcactgggccaggctttgtagctcctgcagcagctctgctacgtcatcgtgctccactccagcatccatgaagctggcccagcgccgcaagtcgagtttggtgaggtctctggccaaggcttccagggtctggtgcagggacgaagaggaacacagtgccccaaacactgggatgctctccactgctgtggagggagaggaaacagagacctgtagatggatgattattctgccctgggactcgccaaactgataaggaagtccaaccttagtagacttgattgtaaactcaacaaatttggtgtattgtccccttagtacaccagtactccagaggaagaatgcttttcttgggagccatagggtgaataaaggaatgtttaactgtgg

SEQ ID NO: 28825 - DNA, 1938 bp, Homo sapiens
gctttgatgctggtctgggatgcatcagaaactgagaaattgcctggtaccgtggaaccccctgcttccttcctgagtcctgtttcctcaaagaccagagatgcagggagaagacatgtgtccgggaaaccagacactcaagcagggcaggactgtcaggaccaccagaaagggagagatgcctgtttcaggattggcagtggggagcactttgccatcccctcgagaagtgactgttacagaacggctcctcctggatggcccaccacctcattcaccagagactcctcaatttccccccacaactggagctgtactgtacactgttaagagaaaccaggttgggcctgaggttcgctcctgccccaaggcatcccccagacttcagaaagagagggagggccaaaaggcagtgagtgagtcagaggctttgatgctggtctgggatgcatcagaaactgagaaattgcctggtaccgtggaaccccctgcttccttcctgagtcctgtttcctcaaagaccagagatgcagggagaagacatgtgtccgggaaaccagacactcaagagagatggctgccctcaagcagagctcgggtgaagacaagagacaggacgtgccctgtccatgaatctccatcaggaattgacacctcagagacttctcccaaagcccctagagggggtttggctaaagacagtggaacacaggccaagggtccagagggggagcagcagccaaaggccgcagaagctacggtgtgtgccaacaacagcaaggtcagctccactggggaaaaggttgtcctgtggacaagggaagctgaccgtgtgatcctcaccatgtgccaggagcaaggggcacagccacagaccttcaacatcatctcccagcagctgggaaataagacccctgctgaggtttcccaccgttttcgagaactcatgcagctcttccacactgcctgtgaagccagctctgaggatgaggatgatgcaaccagtaccagcaatgcagaccagctgtctgaccatggggaccttctgtctgaagaggagctggatgaatgagactctgggaatcatctacacaggaccaaacccaacaggcgccctggcaccggggagggggtagttgtactctgcttgtacagtccttgagcccagtttacagatctggagagcaggaggccaggacaaggacaaaggctggaggatggagtaggacccaggggctctgccatcctaggcatcattcaaggtcttttatgaagactttacagatgtcctctgtaaatagcatcgagagtggagttcagctcctttctctacttttttttggtctgatggcacatatttattgttctgtggtctaatcacagtgtttctaaatgtaaaaagtgcatatgttggtgtagctagtcccgcgacattgagctcctctgcatgaagacactgggctcctgcatccagctgtttttattgcaaactagctcctttctcccacactgggaactttagtccacgaggctgtcaccaccctggtagcactgggccaggctttgtagctcctgcagcagctctgctacgtcatcgtgctccactccagcatccatgaagctggcccagcgccgcaagtcgagtttggtgaggtctctggccaaggcttccagggtctggtgcagggacgaagaggaacacagtgccccaaacactgggatgctctccactgctgtggagggagaggaaacagagacctgtagatggatgattattctgccctgggactcgccaaactgataaggaagtccaaccttagtagacttgattgtaaactcaacaaatttggtgtattgtccccttagtacaccagtactccagaggaagaatgcttttcttgggagccatagggtgaataaaggaatgtttaactgtgg

SEQ ID NO: 28826 - DNA, 2602 bp, Homo sapiens
cactgttcctgctaccactgtgaagattgtgagccttggcggtggctgtaacatgatccagcctgtcaatgcggctgtggcccagagtccccagactattcccatcactaccctcttggttaaccctacttccttcccctgtccattgaaccagtcccttgtggcctcctctgtctcacccttaattgtttctggcaattctgtgaatcttcctataccatccacccctgaagataaggcccacgtgaatgtggacattgcttgtgctgtggctgatggggaaaatgcctttcagggcctagaacccaaattagagccccaggaactatctcctctctctgctactgttttcccgaaagtggaacatagcccagggcctccactagcagatgcagagtgccaagaaggattgtcagagaatagtgcctgtcgctggaccgttgtgaaaacagaggaggggaggcaagctctggagccgctccctcagggcatccaggagtctctaaacaaccctacccctggggatttagaggaaattgtcaagatggaacctgaagaagctagagaggaaatcagtggatcccctgagcgtgatatttgtgatgacatcaaagtggaacatgctgtggaattggacactggtgccccaagcgaggagttgagcagtgctggagaagtaacgaaacagacagtcttacagaaggaagaggagaggagtcagccaactaaaaccccttcatcttctcaagagccccctgatgaaggaacctcagggacagatgtgaacaaaggatcatcaaagaatgctttgtcctcaatggatcctgaagtgaggcttagtagccccccagggaagccagaagattcatccagtgttgatggtcagtcagtggggactccagttgggccagaaactggaggagagaagaatgggccagaagaagaggaagaagaggactttgatgacctcacccaagatgaggaagatgaaatgtcatcagcttctgaggaatctgtgctttctgtcccagaactccaggaaacaatggagaaactgacttggctggcatctgaaaggcgcatgagtcaggagggtgagtctgaagaagagaattctcaggaggagaactctgagccagaagaagaggaggaagaagaagcagaaggaatggaaagcctgcagaaagaggatgaaatgacggatgaagcagttggagactctgctgagaagcctcctacttttgcttcacctgagactgctccagaagtggagaccagcagaactccaccaggagagagcatcaaagctgctggaaaaggccggaacaatcatcgagctcgcaacaagcggggaagtcgggctcgggccagcaaggacacctccaagctgctgttgctgtatgatgaggacattctcgagcgagatccactcagggagcagaaggacttggcctttgcccaagcttatctgaccagggtgcgagaagccctacaacatatccctggcaagtatgaagacttccttcaagtcatctatgaatttgagtcaagtacccagagacggacggctgtagatctctacaaaagcctgcaaattctgctccaagactggcctcagctgttgaaagactttgctgctttcctgttacctgagcaagctctggcctgtggattatttgaggagcagcaggcttttgagaagagccgcaagttccttcggcagctggagatttgctttgcagagaacccctcacaccaccagaagattatcaaggtcctccaaggctgtgcagactgccttccccaggagatcaccgagctcaagacacagatgtggcagctcctcaagggccacgaccacctgcaggatgagttttctatcttctttgaccacttgcgcccagcagctagccggatgggtgactttgaagagatcaattggactgaggaaaaggagtatgaggtataggacctaaggctgctgtagccttatgaagggggaaggccacacgtgggagggatattggcctggtgtctgtgctcagcagcaccaactccttctcagtttgatggctttgaagaagtggccctgcctgatgtggaagaagaggaggagcctcccaagatacccacagcctcaaagaacaagaggaaaaaagagatcggggtccaaaatcatgataaggtattttctttgtttatttgtttgtttttgagacagaatctcgctctgtcacccaaactagagtgcagtggcgtaatcttggctcactgcaacctccacctcccagattcaagcgattctcccacctcagcctctcaagtagctggaattacagacaggcgccagccaccacgcccagcaaatttttgtatttttagtagagatggattttcactatgttggccaggctggtctcgaactccttacctcaagtgatccacccgcctcggcctcccaaagtgctgggattacaagtgtgagccactacgcctggcctaaaatcatgataaggtatgccaagttattgaaaattatctatgtttcatgaatcaagccttgcgttttctcactgaacatttctgtggcttactatggccc

SEQ ID NO: 28827 - DNA, 855 bp, Homo sapiens
atgtacggaagctgtcttttggagaaagaagcaggcatgtacccgggcactctcatgagccctgggggcgacggcacagctgggacaggcggcacagggggcggtgggagtccgatgccagcctccaatttcgctgcggcaccggctttctcgcactatatggggtatcctcatatgcccagcatggatcctcactggccgtctctgggagtctggggctcaccctacagtcccccgcgagaagactggagcgtgtatcctgggccgtctagtacaatgggcacagtgccggtgaacgacgtgacctctagccccgccgctttctgctcgaccgactacagcaacttgggccctgtgggcggtggaactagcggcagcagcctaccaggccaggctggcgggtcgcttgtcccgacggacgcaggcgccgccaaggccagttcccccagcaggagccgccacagcccctatgcatggatgcgcaagacggtgcaggtgacggggaaaaccaggacaaaagaaaagtatcgtgtagtttacactgatcatcaaagattggagctggaaaaggaattccattgcaatagatatatcaccatccagagaaaatcagagctggcagttaacctgggcctttccgagagacaggtgaaaatctggtttcagaatcgcagagccaaggagagaaagatgatcaaaaagaaaatctcccagtttgagaatagtggaggctcggtgcaaagtgactctgactccatcagccctggggaactacctaacacttttttcaccacaccatctgctgttcgtggatttcaacctattgagatacagcaggttatagtctccgaatga

SEQ ID NO: 28828 - DNA, 423 bp, Homo sapiens
tcttgagtagctgggactacaggtgcataccaccacacctggctaatttttttatttttatttttattaaagacaaggtctcactatgctgcccaggttggcctcccaaagtgttgggattacaagtgtgagtcaccgtgcctggtcccatgtacttgaagtcatcactaacaaaatgtatagatattgtataatggcaacagttgttatactgtactttctatttgtatttttattttttctttcttcaaatattcagcctcatctagttgaatctgaagatgtggacctgctgatgaagagggctgattgtatctaacttagggtcttgcatgcagctggcacttaatgcattttattgactgttttagctaacattcaatggacaattcctaataaaaaactccactcccaaaagtatga

SEQ ID NO: 28829 - DNA, 1122 bp, Homo sapiens
  misc_feature (1116)..(1122): n is a, c, g, or t
acagcttttgttctacagcattttaaaatataacaggtatattgaaaagtctgattcagttacaatcagtgtatggaatcacaagaagatccataagaaacaaggtgctggatttctccgttgtgttcatctttttccagtgccatcaaccacctcaaagacactggtttaatattgaatttatcaaatatttattgagcacctacctgatgcaatgttctactgggttggagtggaaaatacaaagactacgatatggtctcctccttttatcaattcacaaataagtagacagatggcatacggttgtaaaattattcagctgtaagtactgtaatcaaagtaaaaccagcatgctttgggtgacattgttccttactgtaactttcagggtcaggccagtgttatatctcttttacagatgaggcatctgagagaataaatgagttgctcctgaatgaattagtggcagaactgatgcaaacccagattctacagtttattcttggcttcttattaatacttttttgtgtgcatgtcatttgaaatggttagttaaaaaataataatgacagctaacatttgttgaccattcatgtgccaggcactatgctgtgagttttgcataattatctgatttaatccttaaaaaatatgaggattcacatattgccatatatgagaaaaccaaggctcacggataaattccttaagaccaacaactattaagacagactaaagtggtctaaaagttttggagagaaagtgactgcatgttggcaatgaagtacaccagtgtttcgtagtttttgaaatctgaattctttaaatgataggtttgatttctaatggattgtggaaatttattgtcactctatagacatgagaatctctgataccagctaatgttttcatttctttctttgttgatttcaaatagatcagaggttggatttatgcaaacctgggccaaaggacagttagaagacggtttgctggtaaatggctgattaaaaagcacagaaagccgaacaagacccaaccaaatttggtaattcatccgattcaaaattgttttggttaaatcaaaaatacaagtacacgaccgcaggaaannnnnnn

SEQ ID NO: 28830 - DNA, 1452 bp, Homo sapiens
acagcttttgttctacagcattttaaaatataacaggtatattgaaaagtctgattcagttacaatcagtgtatggaatcacaagaagatccataagaaacaaggtgctggatttctccgttgtgttcatctttttccagtgccatcaaccacctcaaagacactggtttaatattgaatttatcaaatatttattgagcacctacctgatgcaatgttctactgggttggagtggaaaatacaaagactacgatatggtctcctccttttatcaattcacaaataagtagacagatggcatacggttgtaaaattattcagctatcagaggttggatttatgcaaacctgggccaaaggacagttagaagacggttgctgatgggcccgtgcaacagttgctggtaaatggctgattaaaaagcacagaaagccgaacaagacccaaccaaatttgtggtcagaatcgttgccagacttgtccgggggaggctggctggagaatgaagggaatgaatgaagtgtcagcctctcctctcaggctggagcgcagtggcacgattccaactcatggcaacctccacctcctgggtcaagtgattctcctgcttcagcctcctgagtagctgggattacgggcacctgccaccacacccagctaatttctgtatttttacaaaaatttggactctgcttagattggcttagttttctctttagtcaaatcttcaggaaccaatttattaccattaaaaatgatctaacaagctttatttttattattgttaaaaatcctcattttgaggaacacaaccacaaagtaaagaatgttttcattgatttaaccagtaaaaatcaatatttaattataaaattttttttttcttcagctaaaacagcggaagaggtgatttattatatggttgttacactcggccacaaataaacacagaaatagtccagaatgtcacaggtccagggcagaggaccaacatgggcattttgtttatgagcaaggtgggtctcagaggtgatcggcgatcagagggcgatgaagttctagatccattgagacaagctctagacagtagcatgcagtcccacaacttgtaccagcatccccagcatctggcattccatgtttctgctcctgtggcctccacagtgcaacaagctagcggtttacttggacctctacctcatctttcttcttttgcgcttcagcctgcgcattcgcttcttcctccacttggctctcatggtgcaggtttccaagaaaatggcgctaaggccgagagttaataataaaatatttaaaacatggctccaggccatccagatgccttaacttgggctcaggctcctgatactgatgggtcttttatcttcctctgatgccttttctgtgaattcacctgttttggaagaaaacacaattaaggttatctatca

SEQ ID NO: 28831 - DNA, 1212 bp, Homo sapiens
cccgtcaagctgcacctgagaggtatattgaaaagtctgattcagttacaatcagtgtatggaatcacaagaagatccataagaaacaaggtgctggatttctccgttgtgttcatctttttccagtgccatcaaccacctcaaagacactggttatcagaggttggatttatgcaaacctgggccaaaggacagttagaagacggttgctgatgggcccgtgcaacagttgctggtaaatggctgattaaaaagcacagaaagccgaacaagacccaaccaaatttgcctctcctctcaggctggagcgcagtggcacgattccaactcatggcaacctccacctcctgggtcaagtgattctcctgcttcagcctcctgagtagctgggattacgggcacctgccaccacacccagctaatttctgtatttttacaaaaatttggactctgcttagattggcttagttttctctttagtcaaatcttcaggaaccaatttattaccattaaaaatgatctaacaagctttatttttattattgttaaaaatcctcattttgaggaacacaaccacaaagtaaagaatgttttcattgatttaaccagtaaaaatcaatatttaattataaaattttttttttcttcagctaaaacagcggaagaggtgatttattatatggttgttacactcggccacaaataaacacagaaatagtccagaatgtcacaggtccagggcagaggaccaacatgggcattttgtttatgagcaaggtgggtctcagaggtgatcggcgatcagagggcgatgaagttctagatccattgagacaagctctagacagtagcatgcagtcccacaacttgtaccagcatccccagcatctggcattccatgtttctgctcctgtggcctccacagtgcaacaagctagcggtttacttggacctctacctcatctttcttcttttgcgcttcagcctgcgcattcgcttcttcctccacttggctctcatggtgcaggtttccaagaaaatggcgctaaggccgagagttaataataaaatatttaaaacatggctccaggccatccagatgccttaacttgggctcaggctcctgatactgatgggtcttttatcttcctctgatgccttttctgtgaattcacctgttttggaagaaaacacaattaaggttatctatca

SEQ ID NO: 28832 - DNA, 1256 bp, Homo sapiens
acagcttttgttctacagcattttaaaatataacaggtatattgaaaagtctgattcagttacaatcagtgtatggaatcacaagaagatccataagaaacaaggtgctggatttctccgttgtgttcatctttttccagtgccatcaaccacctcaaagacactggtttaatattgaatttatcaaatatttattgagcacctacctgatgcaatgttctactgggttggagtggaaaatacaaagactacgatatggtctcctccttttatcaattcacaaataagtagacagatggcatacggttgtaaaattattcagctgtaagtactgtaatcaaagtaaaaccagcatgctttgggtgacattgttccttactgtaactttcagggtcaggccagtgttatatctcttttacagatgaggcatctgagagaataaatgagttgctcctgaatgaattagtggcagaactgatgcaaacccagattctacagtttattcttggcttcttattaatacttttttgtgtgcatgtcatttgaaatggttagttaaaaaataataatgacagctaacatttgttgaccattcatgtgccaggcactatgctgtgagttttgcataattatctgatttaatccttaaaaaatatgaggattcacatattgccatatatgagaaaaccaaggctcacggataaattccttaagaccaacaactattaagacagactaaagtggtctaaaagttttggagagaaagtgactgcatgttggcaatgaagtacaccagtgtttcgtagtttttgaaatctgaattctttaaatgataggtttgatttctaatggattgtggaaatttattgtcactctatagacatgagaatctctgataccagctaatgttttcatttctttctttgttgatttcaaatagatcagaggttggatttatgcaaacctgggccaaaggacagttagaagacggtacggagtttcactcttgtcgccaggctggagtgcactggcgtgatcttggctcactgcaacctccgtctccctggtttaagcgattctcccagcctcaagcctctgggaataggtggcgaatacacgtgctgattggggcccgggcaacaagttgcctggtaaacgggtcgatttaagagccagaaacgcgaaacagaaccagacacattgggctactctttcaggtgtgaccatggacagatccactcatggcactccagctg

SEQ ID NO: 28833 - DNA, 789 bp, Homo sapiens
acagcttttgttctacagcattttaaaatataacaggtatattgaaaagtctgattcagttacaatcagtgtatggaatcacaagaagatccataagaaacaaggtgctggatttctccgttgtgttcatctttttccagtgccatcaaccacctcaaagacactggtttaatattgaatttatcaaatatttattgagcacctacctgatgcaatgttctactgggttggagtggaaaatacaaagactacgatatggtctcctccttttatcaattcacaaataagtagacagatggcatacggttgtaaaattattcagctatcagaggttggatttatgcaaacctgggccaaaggacagttagaagacggtttgctggtaaatggctgattaaaaagcacagaaagccgaacaagacccaaccaaatttgcctctcctctcaggctggagcgcagtggcacgattccaactcatggcaacctccacctcctggctaaaacagcggaagaggtgatttattatatggttgttacactcggccacaaataaacacagaaatagtccagaatgtcacaggtccagggcagaggaccaacatgggcattttgtttatgagcaagcctcatctagttgaatctgaagatgtggacctgctgatgaagagggctgattgtatctaacttagggtcttgcatgcagctggcacttaatgcattttattgactgttttagctaacattcaatggacaattcctaataaaaaactccactcccaaaagtatga

SEQ ID NO: 28834 - DNA, 319 bp, Homo sapiens
agttgctctgcagaatccactgtgtagccaacttagcagcacccatttattttgcaaagagaaaagtgtctgtatttttggttggataaccagggactgtagtttaggggcatggatttttctttgtgtttcttgtgactgtttcattgtattaatttatttgacttttttcatgtgcagtaatattgaatttatcaaatatttattgagcacctacctgatgcaatgttctactgggttggagtggaaaatacaaagactacgatatggtctcctccttttatcaattcacaaataagtagacagatggcatacggtt

SEQ ID NO: 28835 - DNA, 437 bp, Homo sapiens
tctgttcttgagattgtcacagctattcttggccctttgcatttctatataaattttataatcaggtgatcaatttttacaaaactctgctgggattttgattggaattgagttgaatcaatagatcaatttggggaggtttggcattttacagtatttagtcatctaatctgtgaatacaacacacccctttattagggtttccttcatttgtcttagtgttttgttggagatttttgtataaagtctttcacagcttatttaagacttattcctaggtcttcaagatttgcatgtggttgtgaatgggtattaaaatttttttacccttataattgtttgttaccagtatataggagctaaatttgatttttgtacattgaacttgtatccatgaccttgctaaatctgcttgttaattctagcagtttatatgc

SEQ ID NO: 28836 - DNA, 493 bp, Homo sapiens
accctctgcctcccaggttcaagctactctcctgcctcagcctcctgagtagctgggattacaggggcatgccaccatgcccagctaacttttgtatttttagtagagacggggtctcaccatgtcagccaggcttgtctcaaactcctgacctcaggtgatccgcccacctctgcctcccaaagtactgggattacaggcgtgagtcaccatgcttggccgcaagttttcttcaggacatggccccatgtagtccagctctacaaggtggctgctgtgtgaactaggctacatgccgaaacgggactgtcgggggaatcagcagggggggcagaccaacagccctgtaagacatagcaataatgattataaatagcatccttctgaccgccttttgatgtactgtccaaggccaggtggaaaatctttcctcccctgcctttccccactaatcaccttcccctcatttttcaataaagattctgagcccagt

SEQ ID NO: 28837 - DNA, 1153 bp, Homo sapiens
tcttttataagtgcaaggagttatttccatcagttgacatagatattattcactaaaattttcagcagactcaaaatagagaggagactttaaacttacatgttagcataaaacagacttctctctcattgcatgcactagatcaatattatcatctgtattaagctatctgaatttattcgagacattaagaaaaagacagtacatggtgggaaagctgcacatttctcacaaggaaaaaaacattctatatttgtagcagaaatcagtggtttgaaaagtcatactttgcagatatgaacctgaaaatcaaagtgccattgttaaatcatcctaaagtgtactgtgggtattctccagcatacttgaaaatgaataaagttagattgctcacattgaagctaatggttgagacaagacacctgccagagtgaagtttgattcctatgggtgagaagatgtagatgactattgttctcactaaagttctaaaataatagcaagtgtagagaagagccgttgctttgaaaatacataccacatttgttataaagcatttgtttgttagtatcaatcacataggtagaaagagtttgagttttactgtggattaaaaagccttccctaaaaagagagcatgccagtcatagagacactaatttggcacttttcctccttcttaggtttaaatgttataccaatgcatgtgtttgaaatatccattaagatgatttaaaatttgtcttgtattttgagtttcttaaatgcgtggattcttgttcatttatctctgaatatgtctcttttatattttggcacaattatacacattggaaagggccaacctattagggctcaagtatgtatatgcaaaaaaaaaaagttatatcaaacaggcacagttattacaactagagagaaattccagaaatatttgtttttttaagagaaagtaaattttcacattagatttctattcaaagtactaatatctacatggtccacacttttctattttaaaaaattgtgttctcttgttaaatagattaacatttccacttctgtttatcacaaaagactgtatttgaaatatgcatacggaaaattgaaattatattagtaataaatgtaacttgaaaaatcaaaaaaaaaa

SEQ ID NO: 28838 - DNA, 1068 bp, Homo sapiens
ctgtaaagtaaaagagatacatgattaaaaaaaggagcctagtgcagtttgcaactcaaacaatcaggaatgctttccctcaagacaaccattatatttcagcatgcagccgaagtactttatgtgtacttcccagttcattaaaaaaaaaattatactccaggattgatatttaataaaactaatcattttaatggcttcatcaaaaacattctaagtgaaactggaagaaagatgttatctgcaagtacacaccaatgacaaatacaataactaatggttattaattacttacctatcattgcttatataccattagtgcaaaatgtcaacaccatagaaaaggcaaacaccttagtattattatgaaaacagctctgacctcacagaccttgaaaaacagtatcagggactcctgggagtccatggaccacattttgagaaccactgctttaagaggtgctgcgagaccactgtgaggtctggtgattaacaaaagctttgtggagaaagaggacatgaatgtttttttacctgcaaaggggtgcctcagaaggtcttctcttcagaaacgtcttctaataaattttgcaagacccaatcttccatagcctctaccattgccaatggcgatttccttttcacctttccctttgattcaggggcttttgaggtcaaaagcattttcataatactaaaatgtcctttgtctttttcacttttcattctctcttgagtgtagagtggggttttccagaggctgtatgtgtgatgacgtcatcaggctgaataaatggaatgtatgcttgtatatttttgtgttttctaaagttttccaaggagattggttacagtataaataaaagtgtttttggcttattatttctactatgttcctgctggtatctccaggtatacctactataatctctgtaacttcactatcatccaataagttgttatttttaaaatccaaaagtgttccttatgcctatgcggaaacaccaaaaataagtatatatctttgacttgttttaaaataaaattcaaaacttttttcaactttca

SEQ ID NO: 28839 - DNA, 1225 bp, Homo sapiens
gaggcacttgggcttccatggcaggctgtggccaactggagccgggaggacctgtgctaaatttcacaaggcccaccggttgtcatgatgggggattgtaatgcctcacttcagctttgacatcctctgccttgatgtcctctgcctaaaaaccaggggttcctagacttgaactctgattcttgcccatgtaactacagccgattttccatcagcacagccttgtctggtttccttgcaggcagcaaggattgctctgccccatgcacaagtgtttcctgagactctgatcacagggccgtgatcacaaatacgggctggctgcgggggtggcaaacaaaaatggggtcaggtgcaggcactagtgactgaattgcagtgagcagtgatcgcctgcagaggtgagagcagaatctcctaccaattcaggaggggaggggcacactgggagctcagcagggagcaggggcacatgtcctcagcaacccatttccaattattttttttcttttcttttctgagatagagtgccactgcactccagcctgggcgacagagcgagattccgtctcaaaaaaaaaaagaaaaaaaagtggagacaggggtcttgctatgttgcccaggctggtcttgaacttctaggctcaagccatcctccctgcctcagcttcccaaagtgctgaggtcacaggtgtgagccactgagcccggcctgattttgggtgtttattgagtatctgcccagcaccaggcatggcagactctggggacaccgaggaccctgggctgacccaactgtattaaccggaggttggcgctcatggagggagggaggtggaagtgacaccagtgatcagttatcaagtgggtgcattgtcaccatgcatgcttggttgggggcaggagccaaactctgggggagcacccagccaagaaacctgacaaggggtcacgtatgctttgtccaaggaggaggtgaccctgaagggagagctgtcggatgtgcgggatgatggcaggcgagccttccagacaggaatggggggtgggcggtcagtggggcaggggtgtcagaggccaaaggaaagctggaagggctctcccagcctggggcaacgctggtaacaactcactggtatttcctatttcttcatggataactgtgtacacattaaatagttattaataattaataaaaccattttataatgccggttacaaaaca

SEQ ID NO: 28840 - DNA, 915 bp, Homo sapiens
tggtgctggaggtggctgcagagagccacttgtcccacgtcaccatttcatctcattgtaggctcacctggcacagtggccaagcaggaaggggccaccagtgcatagcccatgctgaagattcagacaggaacctctttccctgttcccagagaatgcggctgagaatgagaacgctgaagatgatccagtccactgaggatgggtcctgcttgcagaagctgccctttcacccatcttgacaagatccagccacccaggactcacccatgcctggtgttccagcttcagggggtgtgcgtggttcctaggtcctgtggacatcacagcttcaggcctgaagagcagagaagccctgttctctgcatgtaggaggtcagcaggggtgggcaggcccagctggaggcagctgggtgagggtcctggttccagcagagcactggggcccatccaagtttgttctgcctggctcagcctcccaaagtgctgggattacaggtatgagccaccatgcctggcctccatgtctaatttttaacactgtcacttttttacaaaactgaaaaaaaaaagtcacccagagaggggcagtggcttgcccaaagtttgtttcttcatttattcactcattgatattaatttaatttaatttaattttttaaacagtgagccaccgcgcccagccagtactttcattttctataacaataaacaggtatttcaaaatatctgtactgtgatgaatataggaaggggtaagaccatgttggaagcgaatttcttcttattaggcatattctggtaccctgtaaaactctgttccaaagtctgaggctttagagactggtttaaaattccaccccttcaccattttgaatggtgtaccattttagggtaagccaatagtcatccaag

SEQ ID NO: 28841 - DNA, 437 bp, Homo sapiens
gcctcccaaagtgctgggattacaggtatgagccaccatgcctggcctccatgtctaatttttaacactgtcacttttttacaaaactgaaaaaaaaaagtcacccagagaggggcagtggcttgcccaaagtttgtttcttcatttattcactcattgatattaatttaatttaatttaattttttaaaagtagagacaggccgggcgcggtggctcacgcctgtaatcccagcactttgggaggccgaggcgggcagatcacgagatcaggagatggagaccatcctggctaacacggtgaaaccctgtctctactaaaaatacaaaaaattagctgggcgtgatggcgggcacctgtagtcccagctactcgaggggctgaggcaggagaatgacgtgaatctggaggcggagcttgcagtgaggcgagatcac

SEQ ID NO: 28842 - DNA, 361 bp, Homo sapiens
tgccttgatgtcctctgcctaaaaaccaggggttcctagacttgaactctgattcttgcccatgtaactacagccgattttccatcagcacagccttgtctggtttccttgcaggcagcaaggattgctctgccccatgcacaagtgtttcctgagactctgatcacagggccgtgatcacaaatacgggctggctgcgggggtggcaaacaaaaatggggtcaggtgcaggcactagtgactgaattgcagtgagcagtgatcgcctgcagaggtgagagcagaatctcctaccaattcaggaggggaggggcacactgggagctcagcagggagcaggggcacatgtcctcagcaaccc

SEQ ID NO: 28843 - DNA, 560 bp, Homo sapiens
ttttattgttttttaattgtgtatatttaagacatacaattcgatgatctcatatatgtctacattgtgaaataatcaccacagtcaagataattaagatatctgccacttcacatagctctctctctctctctcttttcttggtggtgagaacatttaggatctaccctctcagtacgttttaagtacataataaacaccgtgttgttacctgtggtcactttgctatgcattgggtctccaagccttatttatcttgaagaaatgaagctttggacccctgggccagcacctcctcatttcccctttccctgcctctggttcccatgcttgcactctgtgcttctgtgagtttcactcctgtagactccatgtgtgagggagagcgtgtgatgtctgtctttctgtgtctgcctcttttcaccctgtgtaatgtcctccagatttgtacatgttgttgtaagtaaccagatctccttcttttgaaagctgaagaatattccatatatacacgtatagatgtatgcatatattccacattttgaaaaagtcaaatacat

SEQ ID NO: 28844 - DNA, 867 bp, Homo sapiens
gagcccgtcttgatagtttctggtctcgggttcaggcttgggccctttaggtcgggcagtgaatccctctacccttctctttctcctgaagcccggctcctggggccggcccagaagctagccaactacgcgggaggccccgaagcgccgcttgggtcgcgtctcccgcaggtcctctcttccggggctgcctcctaccctttgcctgggtcgcgctgtcctgtcgctcccgccggtccgtcctttcccgccctctcctcgcttttgctcaggcccccaacgccaccgtcacaccccttcccttggctgtcacactgcctgtgaagtttagatgaatatggaatttgctctcccccttcctgtgggattctctggtcctcaaactctcctcactcttggtcactccccctgcgggtaggtggcccacatctcatgcccaggactaatagttttccccaagtatcagttatcttcttccttttctgccacttcctttttctactccacatccaggtctcagatttccttggggaagggtgaagctctgagctggattgggaggggaacagagaagggaaccagcaggctctcgaagggactttggagtctgagaaacctggtttgagtcttaaagcgataaactgtgtaagttagggcaagtcacttcccttctctggcctctggtttcctcattagttgacaatgacaaaactgacttcattgaactgttgtgaagattaaatgagatgatgcatttaaagtacttcacacagggtccgtccacaggttggaactcaattatattaaatgtgattaccttttgcctttttttttttttattttgagacagggtctctctctgtcacc

SEQ ID NO: 28845 - DNA, 2140 bp, Homo sapiens
gtgtttttaaaggtttttaaaatttaatattatgatgttaggtatcatattagtgtgtccaaaatagccacaaagaaagagatgatactgttgaaccagaaacttgaaatcctgatttatctgcttcgaggaacaaaatcaattcctcaaaaccttataagacaaaatatattttaatgtcatagtagttaggaggtatcaaactcagttataaatagggggctttaattcccatagtgatagaactttttaggcacttcaggattataatacggtaacagttttcttccctgccactctggggtgctctctgaagcggcatctccggcagagaactccatagtgtgtgatgagcctgctgcttgctcagtattggcatttacctcttaatatactgtcctatgcccatctggagtataagcctcccagaggagactgggcagagattaacttggcagtaaagattatctgacaagtctaatattttatgtctttgtaattccccattttcaagtatatatctcaattagtttatcttgatatgtgctcaaagatataaactattgtcatcccatgtttatgctattacacatagctttttatttaaagttctggtcataaaattctggttcaaacattctagaattcccagcttctatttctggagctgtgactctcagtcagtcaatgcttaggccatgcctttgaggcactaggtattgaaagttaccacttcttcattatcttaggattctcagttctttcttcaaaacttatactttcaggttttcttaattaactggtcattccatacatctgtgtaaaataatttctaggaaaactccgaatctcaaaacctttgttttatacttactacttcatttccagtagatggcaccaaacaccctttgaaggtcttcattatactaatccctagttggtgttgctggctaattgataatttcatccaccaccaaggaacgaacatggtctattcttcagctgattctctaatttttatataatgtagtatttttgtttggagtctaagctagacttgttggcatttaaattatttgctgtttctggctcagatttcaaccttttttccccctttttaagacaaaaataagtgtgactttctggtcagggtgattgtagaggaagggtcatgatactgaaataggacttggttaaaataaagagttgagagtaagagactaaagacatatgccaaatgtttgtaataaaattaaagagaaaatataaatatatacaaaatccaaaatgtcaggataatgaaatcaaagcatttttagtattatcactttgggtactttagtagaattgcactcgtttatgattttgaagtttgttttacaaataacatccaatttaaaaatactcttttaaaacttagatccttttatagttcataaacatagtaattaggtgttcccattgcatgtatgagatgtgcctcccaaagagcttgttacagcgttagtacattacctgtctgatatggagaaaaaaaactgttatatttctaccttcatttccaactttgtattgtgctttgaaaacctttaccttcagtatgtgtatttcattagtattttcataaagaatcagtttttagatccagttaaccactgaaaccagaatatgcctatatgtcaggcatgatttactacatgtttattctatttattgagttgatttaattttagtgggtttgtggacattaaaaaatacatgtttaatatttcccaccataattacatttacacctttgtctttctttttcttcagtacttgagttgtcagtgttttgtgactcagtctggaaatctgtttaaactaccttgtctttatacaactaccaacaggaggattggtaatttgggctctgggtgagacatacataggttcagtttccatgtctgcagctgaatgcatgacagggaaaatcatttagcctccctgggcctcagtttcttcacgtgcaaaatgtaattaacacaacctacctcatggggttatattgaggattagagataatgtaggtaggatacctacacatagtaagctattatatattggcaacaataataaacttttaaaaaaagaaatatgt

SEQ ID NO: 28846 - DNA, 2279 bp, Homo sapiens
cgacaaagcccaaagggaggttttggatgattaggctgtgtgtgcgtgtgagaatgatcacatgtggcgtcatgctttgtacagagcctcagaccactgggccttgtccagtgagagtcctctctggcgacatcacacgcggagcagccaggggccaccttagatctcagatctctcagagcaatacttttctgaactgccactgtgcctgggtggttgggtttggtgtcatgcttctgactagagtagatcgcgcatgtccaccagtgatacgttgagtccttacagttccccccatggagtcccataagcagctccatcgagatctgtcagcaagttgcaggaccccacaatgttctgacatgttaagacccccttacatgacgagtagagaggcagctgaggccacaaccgtgtcttcctcttgaatggagctaactcggaaccccccgttttctcttcctttctgcccaccactgaacattgccttttagataactcagtgtttcttctagatgtcatagcaatagactttcactttcatgaagtttgggtacgatttggattctcgcttaagtacatatatttatcaatatttttataaggcaaagttcacttaaaaaatctttccaagtagcagtgtgcctaagatggcaaaatactaaaaactggtgtttcctgctcctgttgtgtgtcacttttcaagccgattgaaatatttctggcttttagggcattactttttaactatctcctttaaaaacgatgttctgtaggtttagtgtctttgttcatttccaaaagagtccagacaactgtgtctgcccctgcagaggctgtttgtccaaaggcagcatgccgcttccaccggaacgcagacagcaggggagcggaattctaaagcagcgacttaaaatgaggaatccccaattgcactaaatggtttcaggattgactaatcattgtcttaacattaactcagattttcgatgtgtaaagagctgtgtgacttggcgtctgagagatccctctgctttgctttgcttcagagtcctcgcacccgcatcctcagaactgtggggcatggtgggctctaacgagcactccccttctgttttccttcattacttttgacctccttaagacttcagagagaatgtccgtcaagttcttttctccatcaagttctttaagttccttgaaaggaagggactgtgcaaacacaaagcaatattcttttgtatctgcaaatgcgtcagctggacataccaattggtatcaaatagaataaaatcaaatataaatgtttgagtcttaggttaaaaaggaaggttatttgtatagtttatagataatgaaggaaaaatttctttttcattgcaggaaatcttgtttactggaagatagagtcactcttttcatataagacaaatagtgctttaatgccaacttctttttatctcaacatttcaggatcatgctaggcacactgcccccttgaatagacattatatgcacagttgcaagtcagccaatgtttttattcagaagtatttccccccattatagtgcctgcctatcagagatacaaaaagcatccaacacactaccgtaataggcttctttggggatgagaaatttgagtctcaacaactcagagtttgagatgtcagcttttttggtaaacgtaggtgttagaggtatattttgctttcctacaacaattgttggcccttgatttcaagcatgttgcttcataggaagcaccagagtgccatctgctgcatttcaagagattgtaaatgtcatctcagctggctcagttatatctctaatgtcccgggtagcagcacctccctctaaaaatatgtttacttcgctgtttcacttgtattttgtgtatacgaaatggcagcttccgatttctagttggatttgtcttgcattgtttgtataacttgctggtcacccagggctatttgctttttcattgagaaatttggtaggggtgtctagttcagcttttatgttgatccatcctgacttattttagacattgaatttatctcaccacaagtaaaagaacatgtgtattgactgtctttgctaagtttcctaatttttcctaattatggcaattatggatgtgaataagaatactgatgctgtacaaatatttttgtggaaatgtaccttgttaatgtgactatttaaataatatgaaaataagaatactcttgaagaaaaaattaaaatatttactctttggattttgcttt

SEQ ID NO: 28847 - DNA, 522 bp, Homo sapiens
taaaactggaacatacttttaaatgattgaagctacaaagctattggtctttagacttagatctaaagtagtctagaaatttgagactttctggataatgggaaccaaatttactccactcctggaaggatacagaagccaggcctaccacatgaaatttaagactggaatcagactccctcctcaagaaaggaggctaagaaaaactatgttgattgctagggtcacagctcttataaactggagtgtttgggatggcagggggagggaggctagagggaggaggtttagagaaagccctcacagatcagcacaccagccgagctgcttctttgcttgaggactagaaccgtggtatcttcagaggccccaagacaagaaataaatacataaacaaataagacttagttatagactgggagctctaggcaaaatgcacagacaaatgagggtcaggtgatgggaagaaagaagattccacttacgatgagcatttaaactaaatttccaaaccctaagatg

SEQ ID NO: 28848 - DNA, 647 bp, Homo sapiens
tgtggtggctcatgcctgtaatcccagcgctttgggaggccaaggcaggcagatcacctgaggtcaggagtttgagaccagcctggtcaacatagtgaaaccccatctctactaaaaatacaaaaattagctgagtgtggtggcaggcgcctgtaagtcccaggtacttgggaggctgaggcaggagaatcgcttgaacccgggagacagaggttgcagtgagctgggatcataccactgcattccagcctgggcgacagagacagagcgagactctgtctcaacaacaacaaaaaaaacaagcaatgttaccacagataataacaggaaaataactgatactttcagaatgaaaaacatatgccaatcgtataccatatacaacctcctccaaatgaatctaatatatatttccatatttgtaaattggtatcttaccaattgttacaacgttatacgttaacctttctcaaattaggagtttaaatgatgtattaagaaaatgagggccaggcgtggtggctcaggcctgtaatcccagctactttgggaggctggggagtggacggggaatcacttgaggtcaggagttcaagaccagcctggccaacatggcgaaaccgcgtctctactaaaaatacaaaaaa

SEQ ID NO: 28849 - DNA, 608 bp, Homo sapiens
cccctaatttaataaagactaaaaattaatcccattaggccgtggggagggaggaaaaggtaattttacggcaagcgtttttgtttttgtttttgtttttgttttgaagacagaatttcgttcttgttgccccaggctggagtacgatggcgcgatcttggctaactgcaacctccgcctcccgggttcaagcgattcttctgcctcagcctgggcgacagagacagagcgagactctgtctcaacaacaacaaaaaaaacaagcaatgttaccacagataataacaggaaaataactgatactttcagaatgaaaaacatatgccaatcgtataccatatacaacctcctccaaatgaatctaatatatatttccatatttgtaaattggtatcttaccaattgttacaacgttatacgttaacctttctcaaattaggagtttaaatgatgtattaagaaaatgagggccaggcgtggtggctcaggcctgtaatcccagctactttgggaggctggggagtggacggggaatcacttgaggtcaggagttcaagaccagcctggccaacatggcgaaaccgcgtctctactaaaaatacaaaaaa

SEQ ID NO: 28850 - DNA, 347 bp, Homo sapiens
gttggtttaaagtctgttttgtcagaagctaggattgcaaccctgctttctttctgctttcatgagcctatgtgtgtctttgcatgtgagatgggtcttttgaatacagtacactgatgggtcttgactcttatccaccttgccattctgtgtcttttaattaaaaatacagaatgcttcatgaatttgcatgtcatctttgcacaggggccatgctaatcttctctatatcgttccaattttagtatatgtgctgccaaagtgagcacaatcttttttcatattaatttaaatgtgtaaaatgtagttataaagttggagcatatgatcaagcctgaatgatccta

SEQ ID NO: 28851 - DNA, 468 bp, Homo sapiens
tatatgtgtgtgtatgtgtgtatatacatatgagtaatttcccgaaattttaacttgtcattacacagagaacatcactgtgacttactgttttgatgtgtagggtttaaaaatgcattaaaagtctagggactatttcaaagtaatattctactttgatcctatcagtccttagtgtcatttaatttagtttggacagaaacaacacttgtcatgttttagaactcatggatttttgctgtttactatctttactgcagtcattttgtatattaaaaatgtttagaattcagtttagaattcaggtttctttggggtgaaagtgcgaaacaaaagaccaactcatctaagtgacacctgttataattgagcaaggcctaatctcactgaggtcctcagaaatggaccaactatactcttgcctgactgactcctcatccaaatctatcaagttaaaagttgtcatag

SEQ ID NO: 28852 - DNA, 432 bp, Homo sapiens
agatgctagcactccatcctgctattcccatgctagtaattaaccacagcactgttttcctctgagcttagacttggcctcagaacccttctatagcactctgggtaacaaccctcaactgcttagagttagctctaaaaaacaaaacttgaggccaagcacagtggctcacgtctgtaatcccagcactttgggaggctgaggtgggtggatcacctgaggtgaggagttcaagaccagcctggccaccatggtgaaaccccgtccttactaaaaatacaaagagtagcctggtgtggtggtaggcgcctgtaatcccagctactggggaggctgagaaggagaattgcttgaaccctggaggtggaggttgcagtgagctgagattgcgccactgcacttcagcccaggcgacagagcaagacttcttct

SEQ ID NO: 28853 - DNA, 919 bp, Homo sapiens
tgaatgtgtctttagtccagcacttctaatactgcttttaacattcattacatacatacaagtatctgtggagcactactgtgtgtgccaggcacagtggtaagggctttacataactttttaggataattctcaccaggatctgtcaacagccaccatcaccccccttctacaggcaggaagtagggtccctgagagacccagcagtttgcttagagtgataggatctgtagaggagggatttcaacccagggtgctttactgttgagccttctcccttctcccagctaaactgccttaaccacctccagctctgtggattatccgcctatctaactccatctgcagcccccaccctcagctgcagcctcttgggagtagaatacccccaaggttgacctctgggtcccccttggcctcaccccatagagggagctggggatgatctgttaactaatgtcaaatcgatgcttgagctttcttatgaaattgcatggcagtaaaacctttggctccaaagactgtagccaatactacatgcataaaaatagtctagccgtcaggaaaatccacagttgagtgttagtggctagcacatgatttccttgacactcagggcttttgtggttgaaaacaggggcttttgagtgccagcggagcctttttcttaaagactaaacctaaataacatcagtgctattcaacacaaggcttgaaacttctgacatcacttgttcacccctggtctgggcagctctgtgttaggtcaaaatcacaaccaagcagctgacacagcttctgcacatccaggggtgcatttgggagccactggttgcctctttctgttccctcttgcccagggacaagccacagctcccagacttttgaagtaacttaaagaatggaaatgtgtgcctaa

SEQ ID NO: 28854 - DNA, 291 bp, Homo sapiens
tgggaggatttgtgctgtccttgatgctaaccttgactacagtgtcatggatttatggaagagctttacaattgcaaatgtagttgtgctttttacagaggctgtagatgccccaaagcccaagacagtcagtgcatgttggaagccattatggaatgaggtagtcagtgatttcaggagcttccccattattggtgcagaagtcaggaatatggttttgtttttgtttttgttttttttgagttagagtctcactccagcctgggcagcaagagtgaaatcccatctcaa

SEQ ID NO: 28855 - DNA, 163 bp, Homo sapiens
tggaatttccaccaggtaacacaaaattctgctcctttacctcataaagtaaaaataatggagataattaggtttatttagcattctccagatgtttttacgtcaaaaatgaagagagaccttttattttttcaacttaacaaaaaatggacatatcacaaaa

SEQ ID NO: 28856 - DNA, 590 bp, Homo sapiens
tgttggtaacacaggggtttgcttaataatcctgatcctttaaacaatgtgtaagtgtgtttcatttatttttctatatgcatattatatcttgccattaaaaaatcataggtgctgggattacaggtgtgagtgaccgaccgcacctggccaagttagtctctaatttttctaagccttggctccttctaaaataagaaacttgaagtaaataatcttttcatttccttctaacagtaatattctacaatttctcccagtctagttttgagcacatgtatgattttaaaaaaaaacaataataaaccggttactcttaaattagaggtgatgggagggtagattgatcatttaaaaaaataatttgacattatgcagtgaaattgaagatttgtatatgagaatgtttatagcaccactattcataatagctgaagattagaaacaacttaaaatatatcgacaatatgttcatcattaattaaggtatatttatgtaatcaaatactgtgcagccatgaaaccatagcaatgatagggacgaatttcaccagcatgatgtagagtaaaagaaccaaagcaaaaaaaaa

SEQ ID NO: 28857 - DNA, 540 bp, Homo sapiens
tattattttatatgtcttaagaaagttctaaaggtattaggaaaatgaatgtcaagctgtatgtaattgtaattagctaagagtgattcagaataatttagactgttaatgaaaagaggacatagggaatagtttttcattttatgccaagtgatttttctgttttattagctagtgaaaccaatgttggtaaaattaagttaacaattttagagtttgtgctagaaaagatattctgaggccggatgtggtggctcacgcctgtaattccagcactttgggaggccaaggtgggtggataacctgaggtcaggagttcgagaccaccctggccaacacggtgaaaccccgtctctactataaatacaaaaatcgtccgggcggggtggctcacgcctgtagccccagctgctcaggaggctgaggcaggagggtcgcttgagcccggaaggcggaggctatagtgagctgagatggcaccactgcactccagcactccagcactccagcctgggcaacagagtgagactctgtctcaaa

SEQ ID NO: 28858 - DNA, 301 bp, Homo sapiens
tccaagagggaaggacctgggctgtcttgttcagtgttgttcagttcctaaatagcatcaggcatacagttggtatacaacaaatgattgttgaatgaacaatgaaggagctagtggtatgctggtaaatgtgaaacaacagcctatggggggtgagagggaaagcgtctgtgaatttctgtgacagaaatatgcccaccatggctaatatcaagctagcagcagcctgtcctcactgaacacagagctgaaaagagacaccatcgatgctcctgaggctgtgcaaaccagctccagtata

SEQ ID NO: 28859 - DNA, 342 bp, Homo sapiens
cacaataatggtaaagttcaaatgaaaagttgaggaaggagggatgacagagaataacatatagctaaaagattgttagtattaatattgaaaagaataaaacattgataaagacaaaatagccaatttacaaaaaagaaagaaatttaaatggccaataaatctatgaaggattatttgtattcatagtagttaaataaatgcaatttaaagcaataagatgctgaccaggtgcaggtgtcatgcacatatagtcccagctactcaggattctgaggaggcagaatggcttgagcccaggagtttgaggccagcctgggcaacatggtgagactctgtctc

SEQ ID NO: 28860 - DNA, 476 bp, Homo sapiens
tattcattctttgacaccttttctccttctgtcatgatagcaaacattgattgtgccaacagatcaatgtgcaattgtgccaatttgcacagacactgcgtagagtgcttttgaaattatttaatactcaaagaccctttaaagaagatctgattattatctccatttttcaggagaaggaacagaggcttaggatagtcaagtaacctgcccaagttacacagcagtggtaaatccaggactgaaaaatagctggtccgattcatacattgtgtttaactactttgccatattaactccctgggatctttctaatccttcaatatttccataaaattctgtcttcttcagcccctttgctgaactcttgcagttattccattgcttctcagaagttgataaattatcctgtcttcattaatgagtcaattgttctttctctaataccccacacttgatcattaaggaatgctatg

SEQ ID NO: 28861 - DNA, 356 bp, Homo sapiens
aagttgtgcttcatttgacatcagcctttcttgtgttcagcagggagatgatttgcagctagagaaaatacagtaaaccctacattgcaatgaacagctttgtaagtaggaaaacagcaggccaaataaagctttccctctggtttttggcagaagtctacactttaatttcccctttctaaccaaaccattaatgaactcaacattataggaagctgtagaatggtgagattatctcaagaccctactctctttgacttcttatccaggtgttcaacaacgctcacttccatcttattcttgttacacatcttattcttgcttgtgagtggagcaatgaagtctataaaaaaaaa

SEQ ID NO: 28862 - DNA, 333 bp, Homo sapiens
cggacttgacgcgcgcgctctgcagccctctgaaggcggggcaatcgcgatagagaaaggcaggagagaaagagacaaaaggcttcagccgcaggcggtaaacgagtgagcctgcaaaggcggcacagaaagcgctggagagtcgagtctttccgggtgaccaagctccgctccaagccactctcttctcgaggggagtcaaggagcagaaagcccttggcgcagcactgggcgcgggattccgcactctgccttttctcgctctctgtacctcattatctccctttggggccggaggagcgggctctggtgtcactaaggaactgtaaaccg

SEQ ID NO: 28863 - DNA, 372 bp, Homo sapiens
tgcccttaaggcattgcttcaaagatctgagttggtggatgatgcagcgcttggcacggtgccggtgacacatccccctaagtgttttctcagtgtgagtcttcatcggcttctctgctgtgccttcttcagcttgtttgcgagttcctggttcatcctgaccaccctgaaaggccgcccctgggactttgcataactcattctgtctcctggtgtgtaagtctctctcctggttcccagcaggagtgtaggaatgagtgcttgtcctggactctgggctgggaactagcacctagtggggactggactaggatgacttgggccaatttcttttcaggctgagcttggatttcagatcagatctcttaggac

SEQ ID NO: 28864 - DNA, 2125 bp, Homo sapiens
  misc_feature (1538)..(1538): n is a, c, g, or t
ccctgtctgatgtggagtttcttgcactgataaggaaaaactgctgaagttgtgaggctgctccaggcagagccatcatctaacagacctaaaagaagcatcatgttccatgacttcatttcaccccaggggacttcaagctgcccgtgcccagaagttcaagagtaaaaggccacggagtaacagtgattgttttcaggaagaggatctgaggcagggttttcagtggaggaagagcctcccttttggggcagcctcatcttacttgaacttggagaagctgggtgaaggctcttatgcgacagtttacaaggggattagcagaataaatggacaactagtggctttaaaagtcatcagcatgaatgcagaggaaggagtcccatttacagctatccgagaagcttctctcctgaagggtttgaaacatgccaatattgtgctcctgcatgacataatccacaccaaagagacactgacattcgtttttgaatacatgcacacagacctggcccagtatatgtctcagcatccaggagggcttcatcctcataatgtcagacttttcatgtttcaacttttgcggggcctggcgtacatccaccaccaacacgttcttcacagggacctgaaacctcagaacttactcatcagtcacctgggagagctcaaactggctgattttggtcttgcccgggccaagtccattcccagccagacatactcttcagaagtcgtgaccctctggtaccggccccctgatgctttgctgggagccactgaatattcctctgagctggacatatggggtgcaggctgcatctttattgaaatgttccagggtcaacctttgtttcctggggtttccaacatccttgaacagctggagaaaatctgggaggtgctgggagtccctacagaggatacttggccgggagtctccaagctacctaactacaatccagaatggttcccactgcctacgcctcgaagccttcatgttgtctggaacaggctgggcagggttcctgaagctgaagacctggcctcccagatgctaaaaggctttcccagagaccgcgtctccgcccaggaagcacttgttcatgattatttcagcgccctgccatctcagctgtaccagcttcctgatgaggagtctttgtttacagtttcaggagtgaggctaaagccagaaatgtgtgaccttttggcctcctaccagaaaggtcaccacccagcccagtttagcaaatgctggtgaaaagaaagggcgagatcaccaaggttcttccagggctgtatttctgcagtttcggttttcatttgcttcagcttactaagaagcttcaaatctaactccatactgaacaaggggctttatgtcctcacctatgacctggaatagtttaaatatggtgttcaaggcaatagtacataatagtggaagaaaattcagtggaaggttattgctattgtcatttgcatagaatttaagtgattgatttaaaaaaactggacataaactaagtctaagnagagggcttctgaataacttcattcattttggcatttgttaagagattcctgggctagaaggttgatttcccaaaaagacagataagagactgacaatttaaaagaatctggagacagagctggtgcttacagagacctgccactcctgtgttcacttacaatttctcccaacaaaaggatttctgtggcaaggagaaaactagcctaaagtttagaaaaagatggtttcttggataacattgttaacaaaaggacttcctgaggactatttattattattttgtagggggcacttcctccttcactaaactggattatcagaacgtattaccacccaacccatattttagaagtttggatttggctgctgattagaaatgaatttcaggctatctcctcctactgaatcttaattgtctgtgatgatggcaacagtgatggggaatctaagcgctggtttgatggtggagatattgaataagtagttgggagcagagttccaaagatgtaatttaagccctgttgcaccaccacacacacacacacacacacacacacacacacacacccctcaagtaaaatgaga

SEQ ID NO: 28865 - DNA, 801 bp, Homo sapiens
gggaaaggttcaagtgcgggttttctccttgaacctacaagattatgggtcaagagctgtgtgcaaagactgtacagcctggatgcagctgctaccattgttcagagggaggcgaggcacacagctgtcggaggagtcagcctgagaccacggaggctgcgttcaagctaacagacctaaaagaagcatcatgttccatgacttcatttcaccccaggggacttcaagctgcccgtgcccagaagttcaagagtaaaaggccacggagtaacagtgattgttttcaggaagaggatctgaggcagggttttcagtggaggaagagcctcccttttggggcagcctcatcttacttgaacttggagaagctgggtgaaggctcttatgcgacagtttacaaggggattagcagaataaatggacaactagtggctttaaaagtcatcagcatgaatgcagaggaaggagtcccatttacagctatccgagaagcttctctcctgaagggtttgaaacatgccaatattgtgctcctgcatgacataatccacaccaaagagacactgacattcgtttttgaatacatgcacacagacctggcccagtatatgtctcagcatccaggagggcttcatcctcataatgtcagacttttcatgtttcaacttttgcggggcctggcgtacatccaccaccaacacgttcttcacagggacctgaaacctcagaacttactcatcagtcacctgggagagctcaaactggctgattttggtaagtcgcccctcgggtctcattctg

SEQ ID NO: 28866 - DNA, 1850 bp, Homo sapiens
  misc_feature (1263)..(1263): n is a, c, g, or t
agcggagttccaccagatgagcatggtctgaggaagaagacggttgtttttccaggggaaaatagaagtgcccccactagaagggagaatggctgtcaggagggcagaacgacagattcactaaaatagcttctctcctgaagggtttgaaacatgccaatattgtgctcctgcatgacataatccacaccaaagagacactgacattcgtttttgaatacatgcacacagacctggcccagtatatgtctcagcatccaggagggcttcatcctcataatgtcagacttttcatgtttcaacttttgcggggcctggcgtacatccaccaccaacacgttcttcacagggacctgaaacctcagaacttactcatcagtcacctgggagagctcaaactggctgattttggtcttgcccgggccaagtccattcccagccagacatactcttcagaagtcgtgaccctctggtaccggccccctgatgctttgctgggagccactgaatattcctctgagctggacatatggggtgcaggctgcatctttattgaaatgttccagggtcaacctttgtttcctggggtttccaacatccttgaacagctggagaaaatctgggaggtgctgggagtccctacagaggatacttggccgggagtctccaagctacctaactacaatccagaatggttcccactgcctacgcctcgaagccttcatgttgtctggaacaggctgggcagggttcctgaagctgaagacctggcctcccagatgctaaaaggctttcccagagaccgcgtctccgcccaggaagcacttgttcatgattatttcagcgccctgccatctcagctgtaccagcttcctgatgaggagtctttgtttacagtttcaggagtgaggctaaagccagaaatgtgtgaccttttggcctcctaccagaaaggtcaccacccagcccagtttagcaaatgctggtgaaaagaaagggcgagatcaccaaggttcttccagggctgtatttctgcagtttcggttttcatttgcttcagcttactaagaagcttcaaatctaactccatactgaacaaggggctttatgtcctcacctatgacctggaatagtttaaatatggtgttcaaggcaatagtacataatagtggaagaaaattcagtggaaggttattgctattgtcatttgcatagaatttaagtgattgatttaaaaaaactggacataaactaagtctaagnagagggcttctgaataacttcattcattttggcatttgttaagagattcctgggctagaaggttgatttcccaaaaagacagataagagactgacaatttaaaagaatctggagacagagctggtgcttacagagacctgccactcctgtgttcacttacaatttctcccaacaaaaggatttctgtggcaaggagaaaactagcctaaagtttagaaaaagatggtttcttggataacattgttaacaaaaggacttcctgaggactatttattattattttgtagggggcacttcctccttcactaaactggattatcagaacgtattaccacccaacccatattttagaagtttggatttggctgctgattagaaatgaatttcaggctatctcctcctactgaatcttaattgtctgtgatgatggcaacagtgatggggaatctaagcgctggtttgatggtggagatattgaataagtagttgggagcagagttccaaagatgtaatttaagccctgttgcaccaccacacacacacacacacacacacacacacacacacacccctcaagtaaaatgaga

SEQ ID NO: 28867 - DNA, 443 bp, Homo sapiens
ttccgggcaaagagaagagcactgcagtagctccagaacatgacatagaataggagggctatgctttgggccagcttgtcctgtggaccaaataatggaaaaacaaggaatcagagcatgacagccagggacaatgagaacagccccttgggaggaactgtcctccttccatcaccaagggccatcctgaacctcctgtcacctacatatcattcaaaattttagattctggctatcagaatacatgaaaaatatatgactgtgccctgggcaaggtagcagaaggtgctggaacacagagcggagaattgctaatgttttcctgccagctctggtgagatggtagttgctgacagccatgctttgtgatcacagattgtctgcccactcatattgccaagcctagcttgtgatttataaatttattttttctgatcctctaa

SEQ ID NO: 28868 - DNA, 2095 bp, Homo sapiens
caaagtgacagatgtctgtgatgtttcatgacataggttatgatcgagccaatttacaaaatttaataaccaacctaaactcacatacatatttgttaagaagctgacatcagttcagtattgtaaggaaactaactaggtggtgatgatgataaaagaattagggaaaatattttatttgatatattcccttttataattcctaaaatgaagattctatttaagggttataatttatataagtttagtcatataccattacattatgataccataagcagagtgcattatgattctctagaaatataattcaatcagatatgtattatatttatttatgtcacacattttctttactgagaataaaaattatcttattttcagaagctttgtatcaatcagtttcatgtaataagcaacccagatatctactagattatgtatttcttcatttgaaactacactgttttctcctagtccccttgactctactgtgcttatccattctttcacagaaagaaagtaacagacataattcctgttgatgaggctgggattgtttttaagaggagagataataacttcatatttttaaagtgccagtagcctaatatgtgaaacagatcagaatctgttgtgtagtaagtctgctttgttgaagaatttattatgggagtaaagataagaaggaaagagatcaccatcagaaacaagtcagccttttcatgcttttttgagcatttttggagatgattccacttctcaagttattatcatttgtgcatctcttcaatgctattgttaaatgctttagaattagaatattttgatcctttaattaaagtaagccaaacgtctaggcaaaaacagccaatcattaaactttaatagtaattcaaatatagatttctcatacagttttccatgtctgtagaaatcaaagttgtaatgttaagcagagggaaatgcgtgtgatttactaatacacttcaacgttctacttttgaaaggatactcatgtgggtggggcagagaacatagaaaaagatatgatggaaaacctgtccattttctacctgttaaccttcatcattttgtgccaggccctggaagcaaagagaggaagggaccgactgcatttatctttgaacacttgagcatcagtagtactactgagtggccaggggtcttgtctgtcaaagcaaatgataagttcactcaggccattattgactgctgaactctcttccttcccaactcttccttgaaagagaaaaaaatactttgccttcttgctctccttatcaaatgtttttgtacaaatagtgtaagcctgtttaagcaaaccaattaaaataggcactgattattttgatctgtttgtaacaaatgaatgtaagtactatttacatggtgtgcctaggaggagctgaaatcattggcactttaatccatattgtaaagatcagtatcaaaagcatagtgttcttcacctctcctcctcagcatccatctctatatacttgattaaatggaaaagtctcttttatcacctctatgtaaagttttatgggtagttatcgtcagtgtatttaaatatatcttctagtatgttttaaaggctggtcttcaatactgtggagacaaaaaataaaagagcgtatgaaaagtacgttagacttttgctggcattcaagtcatggctagtctgtgtatttaataaatgtgtgttatttatgtcgtgtttgtcaatggaaaataaagttgaatattctgaaatgtcgctgtgttttcttcctgatgtcaactcacgtcaggaatactttacctataactatgttaagtattttgctgaaatcccatttgatgtgctttgtcaaataatagcacaatgtaatgcaacagccccatgctatctggaaaaattagatcattttgttttatattccataatcatgtgcataacaaattattgttgatttaatataaatatgagagttgctcttttccgattttcaacatgatgtttctttgttttattatctcaagattattgttcttaacacagagtgcatttataaattattgtaagctt

SEQ ID NO: 28869 - DNA, 516 bp, Homo sapiens
actaagaaagaaacattacaacgagactcacattttaagattattctaacaaaaacagggtggtcagatggattggagagagctttaatagacaggtaatgaaatccagtttcgcaaactacagcaactaaggcacaggaattggaaatggaaatgagaaaagagatttcaaaaatccattaagacttttagtggcaggtgaccttaaaaacacagatgatgactctagctttttaaattgtgataaaagaaaggaaaatgaactataaaaggaagaacatgttttgaaaagttatatttagttttgggcacagggtaatcttttacttaatcacagaaaacatcaagtcaaagtagtatatctcaaactttagtactatttaaaaaaaaaaattctcaggggtcacactgtaccaggttaagttacaacattttacattttatatgaacatacacacaaatgatactaaattatactaggtataaatctcttaggcttattgctcttacacaatt

SEQ ID NO: 28870 - DNA, 3719 bp, Homo sapiens
  misc_feature (264)..(264): n is a, c, g, or t
  misc_feature (428)..(428): n is a, c, g, or t
  misc_feature (1830)..(1830): n is a, c, g, or t
  misc_feature (1957)..(1957): n is a, c, g, or t
  misc_feature (1975)..(1975): n is a, c, g, or t
  misc_feature (3078)..(3078): n is a, c, g, or t
  misc_feature (3649)..(3649): n is a, c, g, or t
gtcttgctctttaattgtaactttacagtgttttcgctcacgagccgaaacttcaagttccctttttgccagcagagtttgggttgcggtcgctggaaaacttgatgcgcactgaaatctcttggtctgtgcatgaggaagagtggatccagcttcttgtcttggctctctgttctctgaatgccttgtactttttgcttttctatcttaccattttttttttgtttgctttcactgtgaataatatattttcatctttccttnccttgctttttttgctgacagaaaatggtgaatgcacaccgtgggtgcagtgagggcttggtgcctgctacgtgggcagcttccacctgtggctggcttattgggctacttggagccacagaatcattgctgagctccgatgtgccagagagtcccaggccatntgggtcactcttctagcttgggaatcttaagtccagctttttggatgtcatcctccctggagggggagctcatgaaagtccaaggttcgagtcttcctccccagagggctaccctgtaatgccgtgggggggtgtgtgtgggggtggcagggaagctctgtcagccttggctatggctgatgccagtcagggtcatagacacctgtttgttctcccctccctgccacaaacgttgaggactgtgaacattatgtcactgtgacctgcttacaatggtaactaagcgttaggcagaaggggttgaggaggggggagacataggctcttctgtaatagtatggtgtcgacatggtgttctttcccctcccttttagctattgaaacaatccacccggtagagtgaacagcttgaggttgatcctggcctgtgataagagccaggtcagtatacttgttagggacatgtgagagacctccccgccacactgcagcattcacagcacctttcctggacctcctgtcacctcgcaggtcagggagttatgtcccctgggaacccagggcttgtccagagctacccacagttgtctgcatttccaggtagcccgattttggggttctaggatgtttcatctcctgggggggtaatcaaatccctggaagaggacaagaaagactgaggtaggaataaagttcttttaaacctcaagggtgcccattgcaggttatcaaaactcacttggtgaaccctgaagagggagatgggtttggtggaaatggtttctccacttgcctatttggcctcttttatgatgcttccaaggaatcttgaattcagcacagtcaaaaccaaactcaggatcttctcttgccaaaagcagtcccttcccagggccccttctgggtgtctggcaccgatatttgaacactcattgccataagccagaaatatagaaggcgatctgtgtaccccctctctgttagcatccatacctagtccacctccaagttctgaaaaatctctccagctcttcacttgaatctgcctgccttctgccactgccctggtccaagtcaccatctgctcatgactgaacttagagtagccttcgtctggtccacctttatctgctctgactcacctctagtgctttctccattcttctgccatcctggtcttttcagagccataacatttgcttgtcacccttattatgaaaaaccaaccacttggtggccttctgttgctcttgggacagatcttcatgtggcccacaaggctctgtgcagcccagctttgtctccctgccagccttgtcttacacaccgtgttgtccatcgtatctgtagcctggccataccctagcagttgccttcctatcctcaactacatcacatgctntctggcctcaggacctttgcacatgctgtttatgctacttggagtgttttgttcctttcttcaccctcagccactccctctggactgcactccacagggcagaagctgaggatgttcagaagcccanacggagttggctgccctntgggacccaagcgagttgtaaacattctggcttcagatgtaaatcaaaggcagagccctgagttttagggcagagaattccttctatcagctctgcagtgagccctcacaggcagactcgggcccaaatatagcctaggtgctgtttatgtatttgaaagtatttaaggctggtccttctgtcatcggtcctccaaagtcttttattacattttgggactgtggtatatagagttccaaatttctttctcccctagagcaaatggtttcagtttactgtaatgcataataaacatgtaaacataaataggcacacttcagaccaggttttccctgtagcttagctttctcggctaaggcccccttccaggtttttgggtcggtgtggtcccaggttatgctcagactcgcccttcatcacctcctccttggcctgcgaggcggtcatggcttcttcgtgactcatcttcgtggcactggggattgcagggaggcatggtgatgtccttttccagtcacaaggctggactgccaaacgaactgccacagattcctttccagtgccccaagctgaaggaaagcgtgatcaggaagcaggcagcagacgtatttgaacccagacatgctcgaccccctccctgagcaggtgtgaaattatgtatgcagctccatagctccactgaggattctgaagtgatcctctgcacgacacttcccggaaataagtggaaagcttactgcatgactgaaaagtacatatcagtcctgcacccctaggattgccctggactcttgtctaaactgtttgttgttgataccagcctcagaagctggatgcctttaagccatggctagtgtgtttaaccgatcccttttatgaagatcttgtaagcgcgtggtaatagcccactatgctttttaactgaaccagcagagcaaacatagttaatggagagacatttttgtcattccttggcctctgtttatttgcaaaaacgagtaaagtgttacctgcaagtggttcagtgcgtgccggggtgtcaggctgcaggtatgtgagcttgttcaaggcttgtcttgcccacgcagcagtttgagagcccnagagggcgaacgctggggccctgttggaagcggtgtgtggatgaagccacccaggagtcccttctctcctggtcacttatagggcttgcatcactttttaaaggagcactggcccgaggcctagaaaaacagccatgtgggtgggtaagaatcacaaagacattgcaagtcagtcctaactgtctctccaagatggtcttgaatttgacaaggtgatgaagagttggtgctggcaggtttaagaaaacaaacacaaaaccaggttggggtgctgatttagtgccttgctgccttttcagatccctcccctgaactgctggcacctgatgtttgagctatttttgtacctgtctcttctcaaactagatgataagtggcctcagggcagggactacatactcctgagagctgcttgagctcgaggtgtttattttcctcagtaagcattttttttcaggagcatgacttggctcaaaaaaacaaaaagaaaaaagaaaccctcccctcaatttacctgtgtctaaactttggtgaattattctcccatctgccttctgggcagaggagaaangtggaatgcatcaagttcaaggtcttggtatttaagagctggctttaaaggttgccatgttaacaattgt

SEQ ID NO: 28871 - DNA, 1030 bp, Homo sapiens
gtgattcttctgctcagtgagtgctgggaaacagtgctaagaaggatacagtggctagaagtcgtcctgtcgtcctgcctcacagtaacatcgttaccgaattctcagcaggtgaaccaaatgaaatggtcaactgaaagccaaccaggagggtgtctggctgttttggggaaactattcctgaccttattttgactaaaaagttgcctgctgtaccagcaaaaaatcaccatgtaccaacctatccaaacttatccatggatgaatctatccagaagacgggagttccgatgcttgtcttgctctgaatgtctgcttgtcacctgcttagggttatcgactgtgattctgggactcattgttgttctacaggacccctctgactctgtggttttctctactggattaacaatgatagccataggtgctttttttgttgtcctcactggagtgacagccctgtgtacggttacagtcgacgagaacttgcagaaaaccacgaggctaagactaggagtgatacgaaaaagcggaagtctccaaggaactacagagccttccatgactcactcaataatcgctagcacctcgctgtagttgtacattgaaccctggcatcttcgtctttggaactaagtctcctgagcattgtttttaaatagaaataaaatctggctttaaaagagaagactaaatggaaaaagaatctagaaaaagagaatcttgaatacaagttcctgataacttcaaagatcataccactggacataagaactttcgaaagaatttgtacgtgaacaggctgataccattcatgaaaattcgtaggagagagagaagaaaaaaagtccatgtagtgggactagataatcaaaagcataatgttggtcataattttctattgtgaaaatgtgctgattctttgaatggtgggattactccagatttatgaactttttttcttgagcaatgggtaaagtatagcttgtgtaaacaaaggattgaaacatttgcttttgatctctatctg

SEQ ID NO: 28872 - DNA, 943 bp, Homo sapiens
ctccatcttaaaaaaaaaagaaaaagaaaaagaatgcatagtagatgcaattcacagaaaagaagaaaagattctatttacactttttgtatttgagctttcatagactttttcttcccttaaccactgcagcaaaaaatcaccatgtaccaacctatccaaacttatccatggatgaatctatccagaagacgggagttccgatgcttgtcttgctctgaatgtctgcttgtcacctgcttagggttatcgactgtgattctgggactcattgttgttctacaggacccctctgactctgtggttttctctactggattaacaatgatagccataggtgctttttttgttgtcctcactggagtgacagccctgtgtacggttacagtcgacgagaacttgcagaaaaccacgaggctaagactaggagtgatacgaaaaagcggaagtctccaaggaactacagagccttccatgactcactcaataatcgctagcacctcgctgtagttgtacattgaaccctggcatcttcgtctttggaactaagtctcctgagcattgtttttaaatagaaataaaatctggctttaaaagagaagactaaatggaaaaagaatctagaaaaagagaatcttgaatacaagttcctgataacttcaaagatcataccactggacataagaactttcgaaagaatttgtacgtgaacaggctgataccattcatgaaaattcgtaggagagagagaagaaaaaaagtccatgtagtgggactagataatcaaaagcataatgttggtcataattttctattgtgaaaatgtgctgattctttgaatggtgggattactccagatttatgaactttttttcttgagcaatgggtaaagtatagcttgtgtaaacaaaggattgaaacatttgcttttgatctctatctg

SEQ ID NO: 28873 - DNA, 1148 bp, Homo sapiens
gtgattcttctgctcagtgagtgctgggaaacagtgctaagaaggatacagtggctagaagtcgtcctgtcgtcctgcctcacagtaacatcgttaccgaattctcagcaggtgaaccaaatgaaatggtcaactgaaagccaaccaggagggtgtctggctgttttggggaaactattcctgaccttattttgactaaaaagttgcctgctgtaccagggtcttgtcctgtcactctggctggaatacaatggcgtaatcatagctcactgcggcctccatctcctgggttcaagtgattctcctgcttcagcttcccaagtatctgggactacagcaaaaaatcaccatgtaccaacctatccaaacttatccatggatgaatctatccagaagacgggagttccgatgcttgtcttgctctgaatgtctgcttgtcacctgcttagggttatcgactgtgattctgggactcattgttgttctacaggacccctctgactctgtggttttctctactggattaacaatgatagccataggtgctttttttgttgtcctcactggagtgacagccctgtgtacggttacagtcgacgagaacttgcagaaaaccacgaggctaagactaggagtgatacgaaaaagcggaagtctccaaggaactacagagccttccatgactcactcaataatcgctagcacctcgctgtagttgtacattgaaccctggcatcttcgtctttggaactaagtctcctgagcattgtttttaaatagaaataaaatctggctttaaaagagaagactaaatggaaaaagaatctagaaaaagagaatcttgaatacaagttcctgataacttcaaagatcataccactggacataagaactttcgaaagaatttgtacgtgaacaggctgataccattcatgaaaattcgtaggagagagagaagaaaaaaagtccatgtagtgggactagataatcaaaagcataatgttggtcataattttctattgtgaaaatgtgctgattctttgaatggtgggattactccagatttatgaactttttttcttgagcaatgggtaaagtatagcttgtgtaaacaaaggattgaaacatttgcttttgatctctatctg

SEQ ID NO: 28874 - DNA, 1337 bp, Homo sapiens
gtgattcttctgctcagtgagtgctgggaaacagtgctaagaaggatacagtggctagaagtcgtcctgtcgtcctgcctcacagtaacatcgttaccgaattctcagcaggtgaaccaaatgaaatggtcaactgaaagccaaccagggtaaaacagatcttttatttcttgttgttgttattattatttttttttatgtggggacattcaagtgaactgctatatgcatttgcccccagtctctccttgtgagaagtgaatttcttcaacgtttatagaactgaggtattacattattggatgaattaagaaaacaatctaacctgatgtgtgaaaatttctgcttgtgagaatccgtgttatttcaattatccaatcaagagcctaattcgtataaaagaaacacagcagcttgttgctcatctttttatctaaggacggtttgtcttgacagagggtgtctggctgttttggggaaactattcctgaccttattttgactaaaaagttgcctgctgtaccagcaaaaaatcaccatgtaccaacctatccaaacttatccatggatgaatctatccagaagacgggagttccgatgcttgtcttgctctgaatgtctgcttgtcacctgcttagggttatcgactgtgattctgggactcattgttgttctacaggacccctctgactctgtggttttctctactggattaacaatgatagccataggtgctttttttgttgtcctcactggagtgacagccctgtgtacggttacagtcgacgagaacttgcagaaaaccacgaggctaagactaggagtgatacgaaaaagcggaagtctccaaggaactacagagccttccatgactcactcaataatcgctagcacctcgctgtagttgtacattgaaccctggcatcttcgtctttggaactaagtctcctgagcattgtttttaaatagaaataaaatctggctttaaaagagaagactaaatggaaaaagaatctagaaaaagagaatcttgaatacaagttcctgataacttcaaagatcataccactggacataagaactttcgaaagaatttgtacgtgaacaggctgataccattcatgaaaattcgtaggagagagagaagaaaaaaagtccatgtagtgggactagataatcaaaagcataatgttggtcataattttctattgtgaaaatgtgctgattctttgaatggtgggattactccagatttatgaactttttttcttgagcaatgggtaaagtatagcttgtgtaaacaaaggattgaaacatttgcttttgatctctatctg

SEQ ID NO: 28875 - DNA, 960 bp, Homo sapiens
gtgattcttctgctcagtgagtgctgggaaacagtgctaagaaggatacagtggctagaagtcgtcctgtcgtcctgcctcacagtaacatcgttaccgaattctcagcaggtgaaccaaatgaaatggtcaactgaaagccaaccaggcaaaaaatcaccatgtaccaacctatccaaacttatccatggatgaatctatccagaagacgggagttccgatgcttgtcttgctctgaatgtctgcttgtcacctgcttagggttatcgactgtgattctgggactcattgttgttctacaggacccctctgactctgtggttttctctactggattaacaatgatagccataggtgctttttttgttgtcctcactggagtgacagccctgtgtacggttacagtcgacgagaacttgcagaaaaccacgaggctaagactaggagtgatacgaaaaagcggaagtctccaaggaactacagagccttccatgactcactcaataatcgctagcacctcgctgtagttgtacattgaaccctggcatcttcgtctttggaactaagtctcctgagcattgtttttaaatagaaataaaatctggctttaaaagagaagactaaatggaaaaagaatctagaaaaagagaatcttgaatacaagttcctgataacttcaaagatcataccactggacataagaactttcgaaagaatttgtacgtgaacaggctgataccattcatgaaaattcgtaggagagagagaagaaaaaaagtccatgtagtgggactagataatcaaaagcataatgttggtcataattttctattgtgaaaatgtgctgattctttgaatggtgggattactccagatttatgaactttttttcttgagcaatgggtaaagtatagcttgtgtaaacaaaggattgaaacatttgcttttgatctctatctg

SEQ ID NO: 28876 - DNA, 1078 bp, Homo sapiens
gtgattcttctgctcagtgagtgctgggaaacagtgctaagaaggatacagtggctagaagtcgtcctgtcgtcctgcctcacagtaacatcgttaccgaattctcagcaggtgaaccaaatgaaatggtcaactgaaagccaaccaggggtcttgtcctgtcactctggctggaatacaatggcgtaatcatagctcactgcggcctccatctcctgggttcaagtgattctcctgcttcagcttcccaagtatctgggactacagcaaaaaatcaccatgtaccaacctatccaaacttatccatggatgaatctatccagaagacgggagttccgatgcttgtcttgctctgaatgtctgcttgtcacctgcttagggttatcgactgtgattctgggactcattgttgttctacaggacccctctgactctgtggttttctctactggattaacaatgatagccataggtgctttttttgttgtcctcactggagtgacagccctgtgtacggttacagtcgacgagaacttgcagaaaaccacgaggctaagactaggagtgatacgaaaaagcggaagtctccaaggaactacagagccttccatgactcactcaataatcgctagcacctcgctgtagttgtacattgaaccctggcatcttcgtctttggaactaagtctcctgagcattgtttttaaatagaaataaaatctggctttaaaagagaagactaaatggaaaaagaatctagaaaaagagaatcttgaatacaagttcctgataacttcaaagatcataccactggacataagaactttcgaaagaatttgtacgtgaacaggctgataccattcatgaaaattcgtaggagagagagaagaaaaaaagtccatgtagtgggactagataatcaaaagcataatgttggtcataattttctattgtgaaaatgtgctgattctttgaatggtgggattactccagatttatgaactttttttcttgagcaatgggtaaagtatagcttgtgtaaacaaaggattgaaacatttgcttttgatctctatctg

SEQ ID NO: 28877 - DNA, 1245 bp, Homo sapiens
gtgattcttctgctcagtgagtgctgggaaacagtgctaagaaggatacagtggctagaagtcgtcctgtcgtcctgcctcacagtaacatcgttaccgaattctcagcaggtgaaccaaatgaaatggtcaactgaaagccaaccaggtctctccttgtgagaagtgaatttcttcaacgtttatagaactgaggtattacattattggatgaattaagaaaacaatctaacctgatgtgtgaaaatttctgcttgtgagaatccgtgttatttcaattatccaatcaagagcctaattcgtataaaagaaacacagcagcttgttgctcatctttttatctaaggacggtttgtcttgacagagggtgtctggctgttttggggaaactattcctgaccttattttgactaaaaagttgcctgctgtaccagcaaaaaatcaccatgtaccaacctatccaaacttatccatggatgaatctatccagaagacgggagttccgatgcttgtcttgctctgaatgtctgcttgtcacctgcttagggttatcgactgtgattctgggactcattgttgttctacaggacccctctgactctgtggttttctctactggattaacaatgatagccataggtgctttttttgttgtcctcactggagtgacagccctgtgtacggttacagtcgacgagaacttgcagaaaaccacgaggctaagactaggagtgatacgaaaaagcggaagtctccaaggaactacagagccttccatgactcactcaataatcgctagcacctcgctgtagttgtacattgaaccctggcatcttcgtctttggaactaagtctcctgagcattgtttttaaatagaaataaaatctggctttaaaagagaagactaaatggaaaaagaatctagaaaaagagaatcttgaatacaagttcctgataacttcaaagatcataccactggacataagaactttcgaaagaatttgtacgtgaacaggctgataccattcatgaaaattcgtaggagagagagaagaaaaaaagtccatgtagtgggactagataatcaaaagcataatgttggtcataattttctattgtgaaaatgtgctgattctttgaatggtgggattactccagatttatgaactttttttcttgagcaatgggtaaagtatagcttgtgtaaacaaaggattgaaacatttgcttttgatctctatctg

SEQ ID NO: 28878 - DNA, 606 bp, Homo sapiens
agtgaggaggagtggtgtactttcaagacaggcttggtctcctgtttggtaacctcgagggtgggattttagtcactctgcccttcttaattagaaagaagcagtctcacaacagtggtttctctttcttgaatacacaaaagcatattcccattagatctaccactaattgctttttatgcagtctgatttcaaaataattgtcttacttaactgtgggaatatcaaggagaggaagaaagatcaagcacttaagatgcttcatatggcagaaagacgccaggagtcatcataagtattattagaaaggctaatccctgagtcacttttaacacccctgaactctttaacctgcatacctgggatgagcaagagaggctagtgcgcacccaccttatcgtatattctctactattgtattatagtcaacctagttttttggaaaagaaaccgataataaaatttgaagcctcatgagccatatatatacagtctctgttgcatactattatttgattttctttaatgaacttttgaacatattttttaaagattctcatcttaaccctgtaagaacaggccatgacccggatttagcttgagggg

SEQ ID NO: 28879 - DNA, 701 bp, Homo sapiens
gcggccgcaagctcggcactcacggctctgagggctccgacggcactgacggccatggcgcgttcgaacctcccgctggcgctgggcctggccctggtcgcattctgcctcctggcgctgccacgcgacgcccgggcccggccgcaggagcgcatggtcggagaactccgggacctgtcgcccgacgacccgcaggtgcagaaggcggcgcaggcggccgtggccagctacaacatgggcagcaacagcatctactacttccgagacacgcacatcatcaaggcgcagagccagctggtggccggcatcaagtacttcctgacgatggagatggggagcacagactgccgcaagaccagggtcactggagaccacgtcgacctcaccacttgccccctggcagcaggggcgcagcaggagaagctgcgctgtgactttgaggtccttgtggttccctggcagaactcctctcagctcctaaagcacaactgtgtgcagatgtgataagtccccgagggcgaaggccattgggtttggggccatggtggagggcacttcaggtccgtgggccgtatctgtcacaataaatggccagtgctgcttcttgcattggtttcttccaagtgcttcgcttctgcccccatcccccactcccacttctggcagctcccagctccccagcccaagctgagaggtcaccc

SEQ ID NO: 28880 - DNA, 609 bp, Homo sapiens
gcggccgcaagctcggcactcacggctctgagggctccgacggcactgacggccatggcgcgttcgaacctcccgctggcgctgggcctggccctggtcgcattctgcctcctggcgctgccacgcgacgcccgggcccggccgcaggagcgcatggtcggagaactccgggacctgtcgcccgacgacccgcaggtgcagaaggcggcgcaggcggccgtggccagctacaacatgggcagcaacagcatctactacttccgagacacgcacatcatcaaggcgcagagccagctggtggccggcatcaagtacttcctgacgatggagatggggagcacagactgccgcaagaccagggtcactggagaccacgtcgacctcaccacttgccccctggcagcaggggcgcagcaggagaagctgcgctgtgactttgaggtccttgtggttccctggcagaactcctctcagctcctaaagcacaactgtgtgcagatgtgataagtccccgagggcgaaggccattgggtttggggccatggtggagggcacttcaggtccgtgggccgtatctgtcacaataaatggccagtgctgcttcttgca

SEQ ID NO: 28881 - DNA, 371 bp, Homo sapiens
aaagaaaaaagaaaaaaagaaaaataaaagataggaccagggagttttcagaatcagaaataaaaattaccaactgatatatgaaaaaaatggctcaacattattttgtgagattcaaatttttagaagttgccaggcgtggaggcttatgccaataatcccagcactttagtaggctgaagtgggtgaatcacttgaggccaggagttcgagaccagcctggccaacctggtgaaaccctgtgtttactaaaaatacaaaaattagccaggcgtggtggtgggcgcctgtaatcccaggtactcgggaggctgaggcaggagaatcatttgaacccgggaggcggaggttgcagtgaactgagatcgagc

SEQ ID NO: 28882 - DNA, 422 bp, Homo sapiens
attacaaatacaaatactctcctaaaaatacaaaaattatccaggcgtggtggtgggcacctgtcctcccgaatcactgggactaccggctaccaagcctggctaaaaaagtttttaaactttggttgtgatttaaaacaagtacatgcagctggccgtggtggctcacacctgtaatcctagcactttgggaggcctaggagagtggattgcctgaggtcggaagttcaagaccagcctggccaacatggtgaaaccttgtctctactaaaaatacaaaaaattagccgagtgcagtggcgtgtgcctgtaatcccagctactctggagactgaggcaagaaccctggatgtggaggttgtggtgagccaagatcacgcctctgcactccagcctgggctacagagcgagacttggtctca

SEQ ID NO: 28883 - DNA, 321 bp, Homo sapiens
aaaaacatacaaagaagaagtgcctaaagaattacaacagaaagtggcatagtgattattagagttaatataatataaataaggccaggcatggtggctcatgcctataatcccagcacttttggaggtcaagttgcagggatcacttgaggacaggggatagagacaagcctagccaacatggtgaaacccatctctactaaaaatacagaaattagctgggtgtggtgatgggcgctggtaatcccagctactcaagaaactgaagcaggagaattgcttgaacccggaagctggggctgcagtgagccaagatcgcgc

SEQ ID NO: 28884 - DNA, 324 bp, Homo sapiens
gtacatattttgctgttctatttaatcaccttgaaaagattaattcattactctttgattaattgatatttatttattccttcacatacactcttaatatttacagaaattttaatcttgtcaaatctttctcaagactttctattaagtgctacagagactagagagtgtgcaaaagtgtaataactatcaaggaattcatggcctagtgatgtgtctaaatagcttgcattagatatcctcaaattagcagtacagcagtgaaaaaaggaatttccagttgtcgttttaggcttgggtaatttggatgcagatagtactaga

SEQ ID NO: 28885 - DNA, 237 bp, Homo sapiens
agcccaggaggttgaggctgcagtgagccatgactgcgccactgtactccaagaatctaacaaacaaacaaaaaccccaaaagagccaaataaaaataaaaaaggaagtgctgctagttttcaagtctgacataaaaatctaccatacaagtgtctttaaaaggaattatttctaaaaatgcatcatttaatggttctcctagctcaaaactattgaataagtatttattgtgttcc

SEQ ID NO: 28886 - DNA, 890 bp, Homo sapiens
gtgctgggattacaggcatgagccactgtgcccagccgtgtgctgatttctaagggcctctctcaagaagctcgtgttgataaaaaggtaatttcaggtgctcacttgagagctgtgaattaaaaacagggaaaagatggcgggtgagggcagcaggcgaggactgttttgtttgcagggggccagggtaggtcactctgctgcggtgaccttgcggctgagccctgaacaatgagcagccgcagccaacatgcagggatcctgcttgggggctggaactggaatgttgaatgtttcaggaacaggagggaggacagaatggggcttggagagcttggtggcaccagttcacccacagcctctgggctctagtgaggaaatgagaccccagcagagaccagggggtcagttaatgttcggatcaacatcattatgtggtcccttagctctgagtgaagggcggattgggaggcgggcaaggaggccaggacaacatacaggtgacataggatggcggcatgggcctgggtgctgtgcttagagccagaagtgggcaggtcgcgagatacttgagaggcagagcccacaggacttgctgatggcttctgtgagggggatgacagggaaggtgaggaatcaaggcagagtctcagctttgggatctgagattcattcaacaaataattcagtgccgcgtgccaggcctattctaaaagttgaggatatgaagacaacaatggtgatggcctcaagcagtaatcccagcactttgggatgctgaggcaggagaatcgcttgaacccgggaggcgcaggttgtagggagacgaaatcgcgccactggcactccagcctgggcgacagagggaggctccgtctcaaaaaaaaaaa

SEQ ID NO: 28887 - DNA, 380 bp, Homo sapiens
gagatgggacaggctgggatgacagctggatgtgacagagcaggggttcccatgctggagggcccgcctcagagaatgtgtgtttctggccagcacagtggctcacgcctgtaatcccagcactttgggaagccgaggcaggcggatcacgaggtcaggagatcgagaccagcctggccaacatggtgaaaccctgtctctaataaaaacacaaaaaaattagccaggcgtggtggcgagcgcctgtaatcccagctactctggaggctgaggcaggagaatcgcttgaacccgggaggcgcaggttgtagggagacgaaatcgcgccactggcactccagcctgggcgacagagggaggctccgtctcaaaaaaaaaaa

SEQ ID NO: 28888 - DNA, 1439 bp, Homo sapiens
cttaacaataacaaagtcttgatgatgtacagtattcaaactttaggttgaaatacgttactctttgattcctagccagtagatcttatctacactttaatgggagagaatggtggtgtgtgggtaggcacaaatttatgtaaatagtgctccttctctttagtatgtttgctttgggggtagaaaaatggttttaacaaacactggtttccatcaaatgaatgatgtcttctccatcctgtggagacaagaatctgctagaaggatatgtgctaagttccttataagagataatggtgctctgcctatgccagcttggcacccgaagatgtgtgagtggacgtgaggctgagtattaccttagtatttttctctgggtctttggaaaaccatagtcaatttttagaacatattgctttcattccccataaactcttcacacatgataactgtttaagctttgaaaacacatactgaagtattgtgagcttaaaaaaactttttaaatatttgcatagttttgaggtgaatttgtttccttacagatctctcctaatcattgagatgtatatttcaaaagaggaaattttacatgttgtccaaaacagccttgctagtaactggtgaattttggtattaactattattaaagtctttaaacgacacaggtacctaaagatcaccttaatgtggcaatttgtgatggtgtagctagctgattgtgaaaactgttcctttaaagtcgcttcttgcatgttcggtgttagtcatccagctcaggcttgtgttgcagctgacaatctaggaaagacggccttagagagtggtgcaggccccacactgacggactgccttagaaacccgacttcctctagactttgaaccgccagacttttctcttgtttagaaaacaaacttatatttaatgtacttactacttaaaactccagacagagatataatgtagaaggcaaatattggccaattttttcctctttttaagtggaagacaaatgaacgggatttttaaagtgcttttaaagtgcatgaatggttaataaatcagtatgaattgtaagccttcatcttacatccaagtccttagttggttagggtttcttttctttcttttttaaagagtgtcaattaccttttgaacctgtgaaaatttgatagttgttaacagtctgatggtcctaattctttcttttcattctagaaatgaatgtggttgtaatcatgttcctaattcttgggacaacctctccttttccccattttttcgtgctgaagctcccaggtcaccccctggctgccagtgggagcctgcaggagtcggaagcctgagggacagcctcgcacatctccaccaagtacagctgcatcaccaagagcgcggggctgagctgatgcgctttttttcctctctgaaggatatg

SEQ ID NO: 28889 - DNA, 3191 bp, Homo sapiens
cttaacaataacaaagtcttgatgatgtacagtattcaaactttaggttgaaatacgttactctttgattcctagccagtagatcttatctacactttaatgggagagaatggtggtgtgtgggtaggcacaaatttatgtaaatagtgctccttctctttagtatgtttgctttgggggtagaaaaatggttttaacaaacactggtttccatcaaatgaatgatgtcttctccatcctgtggagacaagaatctgctagaaggatatgtgctaagttccttataagagataatggtgctctgcctatgccagcttggcacccgaagatgtgtgagtggacgtgaggctgagtattaccttagtatttttctctgggtctttggaaaaccatagtcaatttttagaacatattgctttcattccccataaactcttcacacatgataactgtttaagctttgaaaacacatactgaagtattgtgagcttaaaaaaactttttaaatatttgcatagttttgaggtgaatttgtttccttacagatctctcctaatcattgagatgtatatttcaaaagaggaaattttacatgttgtccaaaacagccttgctagtaactggtgaattttggtattaactattattaaagtctttaaacgacacaggtacctaaagatcaccttaatgtggcaatttgtgatggtgtagctagctgattgtgaaaactgttcctttaaagtcgcttcttgcatgttcggtgttagtcatccagctcaggcttgtgttgcagctgacaatctaggaaagacggccttagagagtggtgcaggccccacactgacggactgccttagaaacccgacttcctctagactttgaaccgccagacttttctcttgtttagaaaacaaacttatatttaatgtacttactacttaaaactccagacagagatataatgtagaaggcaaatattggccaattttttcctctttttaagtggaagacaaatgaacgggatttttaaagtgcttttaaagtgcatgaatggttaataaatcagtatgaattgtaagccttcatcttacatccaagtccttagttggttagggtttcttttctttcttttttaaagagtgtcaattaccttttgaacctgtgaaaatttgatagttgttaacagtctgatggtcctaattctttcttttcattctagaaatgaatgtggttgtaatcatgttcctaattcttgggacaacctgcaagacagtgagacagtttaaaaattacctttcatgttgaaaaagtctgaaacagagaacccaatgatatttaaaataaatgctacataaaactctttttaaaattttgattttaacttaattaaaacaatgtcataaatatgctttttgattttgttactgcttttaatattaaagtaatagaatattgaagcaatattgtctagcactctgctggacattaagtccgcgggaggagaagtgaacaggaatcgattctttgtcttttaactgcccttagttaggagatgttaaaatacttggcacctctggttatatgtatgttatgtgtgttctcccccctaaaatttctaagcacatttattcacttttaaaatgaatctttaaaagattatagttagtagttatagttaatattctatttacttggaaaaatgtgaataaatggatcttcaaaagattcattttaaaaatgaataaatgtataataggctataggtgatcttacttgcgtattaggtaggaggcacatatttataccatttcatatgtaatatctttgtcattgtgtttcatcgaagatcaattgctagcaacttgaagggtatttatacttgggtcacttgaactcagctgactaaattgtaagaacgagagcaagcaagatggctgttattggaagccataacttccagaagataattctgcacaattcgtaagttaaaaaaaatctgtagggtcttccactatcctttttcaggttgataatgctgttctgggcacacactttgtaaatggaatgttatggtacagtcgcctctcagtatccatggggcattggttccaggcctcccttaggatgccaaactccatggatactcaaaccccttctataaaatggtgtagtatttgcatatatcctagacacatcctcctgtatgctttaaatcatctctagattacttaaaatacctaatacaatgtaaatgctctgtaaatagttgttatactatattgtttagggaataatgacaaggaaaaaaaagcctgtacatgttcagcacaagtgaaaccatccttttttgcccccaaatattttcaatttgtatttggttgaatccatggatgcagaactcacggatacagagggccgactgtactttctttaaagtgttcaaaagtattactagcaaagaggaggaggagcaaagcatatatcagaagtaaaacaatttttcttgttgactgctttggtaaaaaacagtttgatggatagttttacatttcactggactagataaaaaatggtgctaatatttattgtagcttgatgctatagttgctttggtatcaaacttaatacctaacccatataagatccttattatataattttgtgatcagtaaaatgatattttaaagagtgatcttaaaaatatgacctggtcattgcacaacgtttgcatttgaaatgaatttttgtactatagggtggatatggagttattcagtgcaagtgtgtgcttaatatcaaaccctatgcaaggagctatgtctagatttttggtccaaatttgcctccttcaagcctactagtgtgagatggaaaaaaatcgattgctcttttaatattatttccattttgaaattctcgacacttgaatgaaggcagtagaggcctctttttggatttctcttctaataacaaaactttatttagggaaggtttccctgtgctatcgtaagtttgttttgagcactgcattcactttaaaattctggaggaacaaaggctgggcacataatcacaaagcccaggccacacaataattcggggttgtattttctaagaactatgtattgtttttagcttatagttaatattgtatttacttggaaaaatgtgaataaagttaattaacatta

SEQ ID NO: 28890 - DNA, 3538 bp, Homo sapiens
cttaacaataacaaagtcttgatgatgtacagtattcaaactttaggttgaaatacgttactctttgattcctagccagtagatcttatctacactttaatgggagagaatggtggtgtgtgggtaggcacaaatttatgtaaatagtgctccttctctttagtatgtttgctttgggggtagaaaaatggttttaacaaacactggtttccatcaaatgaatgatgtcttctccatcctgtggagacaagaatctgctagaaggatatgtgctaagttccttataagagataatggtgctctgcctatgccagcttggcacccgaagatgtgtgagtggacgtgaggctgagtattaccttagtatttttctctgggtctttggaaaaccatagtcaatttttagaacatattgctttcattccccataaactcttcacacatgataactgtttaagctttgaaaacacatactgaagtattgtgagcttaaaaaaactttttaaatatttgcatagttttgaggtgaatttgtttccttacagatctctcctaatcattgagatgtatatttcaaaagaggaaattttacatgttgtccaaaacagccttgctagtaactggtgaattttggtattaactattattaaagtctttaaacgacacaggtacctaaagatcaccttaatgtggcaatttgtgatggtgtagctagctgattgtgaaaactgttcctttaaagtcgcttcttgcatgttcggtgttagtcatccagctcaggcttgtgttgcagctgacaatctaggaaagacggccttagagagtggtgcaggccccacactgacggactgccttagaaacccgacttcctctagactttgaaccgccagacttttctcttgtttagaaaacaaacttatatttaatgtacttactacttaaaactccagacagagatataatgtagaaggcaaatattggccaattttttcctctttttaagtggaagacaaatgaacgggatttttaaagtgcttttaaagtgcatgaatggttaataaatcagtatgaattgtaagccttcatcttacatccaagtccttagttggttagggtttcttttctttcttttttaaagagtgtcaattaccttttgaacctgtgaaaatttgatagttgttaacagtctgatggtcctaattctttcttttcattctagaaatgaatgtggttgtaatcatgttcctaattcttgggacaacctgcaagacagtgagacagtttaaaaattacctttcatgttgaaaaagtctgaaacagagaacccaatgatatttaaaataaatgctacataaaactctttttaaaattttgattttaacttaattaaaacaatgtcataaatatgctttttgattttgttactgcttttaatattaaagtaatagaatattgaagcaatattgtctagcactctgctggacattaagtccgcgggaggagaagtgaacaggaatcgattctttgtcttttaactgcccttagttaggagatgttaaaatacttggcacctctggttatatgtatgttatgtgtgttctcccccctaaaatttctaagcacatttattcacttttaaaatgaatctttaaaagattatagttagtagttatagttaatattctatttacttggaaaaatgtgaataaatggatcttcaaaagattcattttaaaaatgaataaatgtataataggctataggtgatcttacttgcgtattaggtaggaggcacatatttataccatttcatatgtaatatctttgtcattgtgtttcatcgaagatcaattgctagcaacttgaagggtatttatacttgggtcacttgaactcagctgactaaattgtaagaacgagagcaagcaagatggctgttattggaagccataacttccagaagataattctgcacaattcgtaagttaaaaaaaatctgtagggtcttccactatcctttttcaggttgataatgctgttctgggcacacactttgtaaatggaatgttatggtacagtcgcctctcagtatccatggggcattggttccaggcctcccttaggatgccaaactccatggatactcaaaccccttctataaaatggtgtagtatttgcatatatcctagacacatcctcctgtatgctttaaatcatctctagattacttaaaatacctaatacaatgtaaatgctctgtaaatagttgttatactatattgtttagggaataatgacaaggaaaaaaaagcctgtacatgttcagcacaagtgaaaccatccttttttgcccccaaatattttcaatttgtatttggttgaatccatggatgcagaactcacggatacagagggccgactgtactttctttaaagtgttcaaaagtattactagcaaagaggaggaggagcaaagcatatatcagaagtaaaacaatttttcttgttgactgctttggtaaaaaacagtttgatggatagttttacatttcactggactagataaaaaatggtgctaatatttattgtagcttgatgctatagttgctttggtatcaaacttaatacctaacccatataagatccttattatataattttgtgatcagtaaaatgatattttaaagagtgatcttaaaaatatgacctggtcattgcacaacgtttgcatttgaaatgaatttttgtactatagggtggatatggagttattcagtgcaagtgtgtgcttaatatcaaaccctatgcaaggagctatgtctagatttttggtccaaatttgcctccttcaagcctactagtgtgagatggaaaaaaatcgattgctcttttaatattatttccattttgaaattctcgacacttgaatgaaggcagtagaggcctctttttggatttctcttctaataacaaaactttatttagggaaggtttccctgtgctatcgtaagtttgttttgagcactgcattcactttaaaattctggaggaacaaaggctgggcacataatcacaaagcccaggccacacaataattcggggttgtattttctaagaactatgtattgtttttagcttatagttaatattgtatttacttggaaaaatgtgaataaagttaattaacattaaaaaaaaaaaccgacaacaacactcatacaaagccacaacattgttgtggggcaacgcatctgggcccccgcaaaaaacggttgttctcaaaacacccatccggatagggcgagccggcggcacccccgaggacggttagaggagaccacggggtccacaacggtgtccaccagaggacaacatccgggggccgacaaacaagggcggggggatcacccacgccagtagaaaaagaccccggggggacaaacgaatcgtggtgaaaacaccacccgaggggagatatcgagagcacaaacgcggacatacgacggagggtcacagcgggcgcccgaataaagtagcc

SEQ ID NO: 28891 - DNA, 3137 bp, Homo sapiens
cttaacaataacaaagtcttgatgatgtacagtattcaaactttaggttgaaatacgttactctttgattcctagccagtagatcttatctacactttaatgggagagaatggtggtgtgtgggtaggcacaaatttatgtaaatagtgctccttctctttagtatgtttgctttgggggtagaaaaatggttttaacaaacactggtttccatcaaatgaatgatgtcttctccatcctgtggagacaagaatctgctagaaggatatgtgctaagttccttataagagataatggtgctctgcctatgccagcttggcacccgaagatgtgtgagtggacgtgaggctgagtattaccttagtatttttctctgggtctttggaaaaccatagtcaatttttagaacatattgctttcattccccataaactcttcacacatgataactgtttaagctttgaaaacacatactgaagtattgtgagcttaaaaaaactttttaaatatttgcatagttttgaggtgaatttgtttccttacagatctctcctaatcattgagatgtatatttcaaaagaggaaattttacatgttgtccaaaacagccttgctagtaactggtgaattttggtattaactattattaaagtctttaaacgacacaggtacctaaagatcaccttaatgtggcaatttgtgatggtgtagctagctgattgtgaaaactgttcctttaaagtcgcttcttgcatgttcggtgttagtcatccagctcaggcttgtgttgcagctgacaatctaggaaagacggccttagagagtggtgcaggccccacactgacggactgccttagaaacccgacttcctctagactttgaaccgccagacttttctcttgtttagaaaacaaacttatatttaatgtacttactacttaaaactccagacagagatataatgtagaaggcaaatattggccaattttttcctctttttaagtggaagacaaatgaacgggatttttaaagtgcttttaaagtgcatgaatggttaataaatcagtatgaattgtaagccttcatcttacatccaagtccttagttggttagggtttcttttctttcttttttaaagagtgtcaattaccttttgaacctgtgaaaatttgatagttgttaacagtctgatggtcctaattctttcttttcattctagaaatgaatgtggttgtaatcatgttcctaattcttgggacaacctgcaagacagtgagacagtttaaaaattacctttcatgttgaaaaagtctgaaacagagaacccaatgatatttaaaataaatgctacataaaactctttttaaaattttgattttaacttaattaaaacaatgtcataaatatgctttttgattttgttactgcttttaatattaaagtaatagaatattgaagcaatattgtctagcactctgctggacattaagtccgcgggaggagaagtgaacaggaatcgattctttgtcttttaactgcccttagttaggagatgttaaaatacttggcacctctggttatatgtatgttatgtgtgttctcccccctaaaatttctaagcacatttattcacttttaaaatgaatctttaaaagattatagttagtagttatagttaatattctatttacttggaaaaatgtgaataaatggatcttcaaaagattcattttaaaaatgaataaatgtataataggctataggtgatcttacttgcgtattaggtaggaggcacatatttataccatttcatatgtaatatctttgtcattgtgtttcatcgaagatcaattgctagcaacttgaagggtatttatacttgggtcacttgaactcagctgactaaattgtaagaacgagagcaagcaagatggctgttattggaagccataacttccagaagataattctgcacaattcgtaagttaaaacacacactttgtaaatggaatgttatggtacagtcgcctctcagtatccatggggcattggttccaggcctcccttaggatgccaaactccatggatactcaaaccccttctataaaatggtgtagtatttgcatatatcctagacacatcctcctgtatgctttaaatcatctctagattacttaaaatacctaatacaatgtaaatgctctgtaaatagttgttatactatattgtttagggaataatgacaaggaaaaaaaagcctgtacatgttcagcacaagtgaaaccatccttttttgcccccaaatattttcaatttgtatttggttgaatccatggatgcagaactcacggatacagagggccgactgtactttctttaaagtgttcaaaagtattactagcaaagaggaggaggagcaaagcatatatcagaagtaaaacaatttttcttgttgactgctttggtaaaaaacagtttgatggatagttttacatttcactggactagataaaaaatggtgctaatatttattgtagcttgatgctatagttgctttggtatcaaacttaatacctaacccatataagatccttattatataattttgtgatcagtaaaatgatattttaaagagtgatcttaaaaatatgacctggtcattgcacaacgtttgcatttgaaatgaatttttgtactatagggtggatatggagttattcagtgcaagtgtgtgcttaatatcaaaccctatgcaaggagctatgtctagatttttggtccaaatttgcctccttcaagcctactagtgtgagatggaaaaaaatcgattgctcttttaatattatttccattttgaaattctcgacacttgaatgaaggcagtagaggcctctttttggatttctcttctaataacaaaactttatttagggaaggtttccctgtgctatcgtaagtttgttttgagcactgcattcactttaaaattctggaggaacaaaggctgggcacataatcacaaagcccaggccacacaataattcggggttgtattttctaagaactatgtattgtttttagcttatagttaatattgtatttacttggaaaaatgtgaataaagttaattaacatta

SEQ ID NO: 28892 - DNA, 415 bp, Homo sapiens
tgggaggcagaggttgcggtgagccaagatcgctccacagcactccagcctgagtgacaagggagactgcgtctcaaaaacaaaaacaaaaacacctaagatttcaaaaaaggagggagcgcctgtctaattctggtagctggtttgctgttgttctccaagcattcctatggggcttttgttgcttcatggttcatattaaccaagcccaaattccagaacattccatcctcctggaaagccttccattcctgactacgcattcagagcaggtaggctgtgggcacttggttaaggtcaatgcctgccattcccccatgaggccctgtgtgaacaggactgggaagatgaggataagaagggccccagggagctcagcccgggcattcatgcgtcatctctgctgtctgcttcc

SEQ ID NO: 28893 - DNA, 409 bp, Homo sapiens
ataaaacaaggcacatctctacctgaaattgtaactgctggactagaacaaagtaatctgagcagcttgaatgtaccttgtaaaagggcttttgtttcatttagaaaataacttgagccctgggaaaatctggatcaagttgagagagagaaagaaagaagaagtggaagagagaagagagagagaatgagttgagagtgaattttagagtaaaacatagcacattgtatgacctccaggctataatagagtgtatataaagcatatatataaagcatatataaaagcccctgaaggcttatgagaggtaaactgcaaagcattgactaaatatatcatttggccaattttcccatgacaatttagtttggtgccctttgactgggacgttctgttttttttttccctt

SEQ ID NO: 28894 - DNA, 869 bp, Homo sapiens
cgcccggctaatatttgtatttttagtagagaggccatgttggccaggatggtctcaaactcctggcctcaagcgatctgcctgcctcagccccctaaattgctgggatttcaggcatgagccaccatgcccagcctagcatttttgactgggcaagtgagctgccttctcctagcctccgtttcctcatttgtcaaatggggctggtaactccacccacttcacagggggtggtgagaatgaatggttacaggcatgtaatgtaattgaggcagctctcagcaggaagtaagcagtcagacaacacgtcacttattcaatagcctcttggatctttggtttcttttttttgtaagacggggacccaaacctctttgtccctggattgtagacaactgggtggcatgagagttattaaaaatcacagtgccccagccggacggggcggctcacgtgtgtaatcccagcaatttgggagtctgaagcaggagggtggcttcaccctagggtttgaggctgcagtgagctatgaccgcaccactgcactccagcctgggccacagagcaaggcccagtctcaaaagagaaaaaggaggccaggcacagtggctcatgcctttaatcttgacactttgggaggccgaggcaggcagatcaggaggtcaggagatcaagaccatcctggcctacgtggtgaaaccctgtctctactaaaatacaaaaagttagctgggcatggtggcgcacgcttgtagtcccagctactcggggggctgaggcaggagaattgcttgaaccccagaggcgagattgtgccaccgcactccagcctggcgatagggcaagactccgtctcaaaacaaaaagaa

SEQ ID NO: 28895 - DNA, 329 bp, Homo sapiens
ggagagaaagagggaaagaaactccctacctccttcctgagtcgacattctgtacctcttggtactgcatttctcaggcaccctagtgcccttggaccagattcccagcttccatggcctcagggaacatggaatactaatcatccttttcctttgtcctggatagttgtaataaggaatcagcaagagaaactgaaaatctaaattctccttcagatctaactattaaaaaatatgaagcaattaataaagtatgtatgtagacatgtaaatagaataataatattttaaatgtaacctaaatgtttgaaggaacttttaaatagatt

SEQ ID NO: 28896 - DNA, 476 bp, Homo sapiens
ttttttaaatggagtctcactctgtcccccaggctggagtgcagtggcgcgatctcggctcactgcaacctccgcctcccaggttcacgccattctcccacctcagcgtcccaagtagctgggactacagatgcccgccaccacgcttggctaattttttgtatttttagtagagacagggtttcaccgtgttagccaggatggactcagtctcctgacctcctgatccgcccgcctcggcctcccaaagtgctgggattacaggcctgagccgccacgcctggcctattgctttatttattaagctacaacatttgatgagcacatttgatgaaataaaaagttcttgttgttggctcctgcagttgtgtcaatctttaaaatttacaaaagaacttaaaaacctaacagggagtaattctatcttccttgagctacaatttgcagagtttttaaagaagccacgttgagaagac

SEQ ID NO: 28897 - DNA, 561 bp, Homo sapiens
gtttccacagacacacgtaccacatgggatttttaagtagacatccaggaagagaacgaaagttcccctgttggttttcccctatttttaagtgtgagtgtatgaatgtgtgttttgttctcttccttttatattgcctcctggatttgggttgttttcctttatctgtccggactgtaaatgtggatatgaaggttcatagtcctgtagaataacgtcagtgcttgagctagtgtttggtgtgaagtacctatcttttgaagggagagaaaagaattacgactgtggtaagatttaagaggacagaattaagattatgtaagggttgaagaaaggtttgctgggaatgtggtgtgtgttttagcagagaccccaatgacctgccagggcacgtagagagagcaggctacttgagggcagggagtagaccaccgccatttctgtgacctcacatctggcatggccaggcacacagtaggtactcaataattaactccctgctgtttccctaatcatgtagaggaaagcaacaatgttcagtaattaactgtttaaaaaaaa

SEQ ID NO: 28898 - DNA, 500 bp, Homo sapiens
atgtatcaacaatatgtcttgtcaagatattattttgtaacattttcagaatgaaacccatctctgggcactggggttcattcttggtgcacaactgcctcgttgatcaagttctctggcttttattatttctgcttgcaaatagagatacaaaacagccagcctcagaagaaggaggggctgatttcatcagcatgactaaagctgacagagtacttgagaggacctggcagggtactgcagaacatcttggccttgcagatctgtgagaaaggtttgctgggaatgtggtgtgtgttttagcagagaccccaatgacctgccagggcacgtagagagagcaggctacttgagggcagggagtagaccaccgccatttctgtgacctcacatctggcatggccaggcacacagtaggtactcaataattaactccctgctgtttccctaatcatgtagaggaaagcaacaatgttcagtaattaactgtttaaaaaaaa

SEQ ID NO: 28899 - DNA, 413 bp, Homo sapiens
tttttttttttgagtcagagtctcactctgttgcccaggctggagtgcggtggcataatctcagctcactgcaaactccgcctcccaggttcaagtgattctcctgcctcaggctcccaagcagccgggaccacaggcgtccgccaccacacctggctgatttttgtattttcagcagagacagggtttccaccatgctggccaggctagcctcaaactcctgacctcaggtggtccgcctgcctcagcctttcaaagtgccggaattacaggggtgagccacagcacctggccacaaatagcaacttttaatggcacatgcccacagatcattgacttcgataggatatctggtatacaagagcaagtcattaaaaccaggaataatagagattttttgcaaaaggtcgacg

SEQ ID NO: 28900 - DNA, 411 bp, Homo sapiens
gaaatctggcttctggcccaggaactatgtcctacagaggtagagataaaaaaaaactgctgcaaagaagtgactaattcataaaattcatcactcgctaatttttgaaaagctttcaaagactttctactcactccaagagcagaatgactaaatcaataaagagcaagtagcctccttttctgactgattttaacagcaatgatgtttcttggctacatttgtaaaaataaaagatgaagtttttaatattactataaagctaatctaaaactcactggcttttggctctaaaatgaaaatatacaaagtcactaccccatgcctattgctgattcaattaattcagttgcctgtgttccaaataggtgagggtaaacagcagattatcttagctcactgataatctgc

SEQ ID NO: 28901 - DNA, 382 bp, Homo sapiens
aaaatcctgtattgctaaaaaacactaatgatcatctgagccttcagcaagtcctaatctttttgctagtggaaggtcttgccttgatgttgatgcttgctaactgatcagggtggtggttgctgaaggttgggatagctgtggcagttccttaaaataagacaacagtgaagtttgttacatcaattgactcttcttttcacgaaaacatttctctgtagcatgcagtggtgtttgagaacatattgcccgtcgtagaacctctttcagaattggagtggggtcgggcatggtgtctcatgcctgtcactttggaaggataaggtgggaggcttgcatgaggccaggagtttgagaccagccttggcaacataccaagacc

SEQ ID NO: 28902 - DNA, 5155 bp, Homo sapiens
  misc_feature (2166)..(2166): n is a, c, g, or t
  misc_feature (2169)..(2169): n is a, c, g, or t
  misc_feature (2786)..(2786): n is a, c, g, or t
cgcttccgccggtgggacggaactggtgccctccgtggacaattgtgttgaagcagaaattgttccggatctcgggtcggacacggaagtcttcctgcagtgtttctggatgcggggacagggatgcgcaggaattccagtctcagtttccagatggagcgacccctcgaggagcaagtccagagcaagtggtcgtctagtcaaggccgcacaggaacaggagggtctgatgtcctccagatgcagaacagtgaacaccatggacaaagcatcaagactcaaactgactccatctcccttgaggatgtggctgtgaacttcaccctggaggagtgggctttgctggatcctggccagaggaatatctacagagatgtgatgcgggcaaccttcaagaacctggcctgtataggggaaaaatggaaagaccaggatattgaagatgaacacaaaaaccagggaagaaatctaagaagtcctatggttgaagcactctgtgaaaataaagaagattgtccatgtggaaaaagcactagccagattcctgatcttaatacgaacctggaaactcctactggattaaaaccatgtgactgcagtgtgtgtggggaagtcttcatgcatcaggtctcccttaataggcacatgagatctcacactgaacagaaaccaaatgagtgtcacgaatatggagagaagccacataaatgcaaagaatgtgggaaaaccttcactcgcagctccagtattcgaacccatgaaagaattcacactggagagaaaccctatgaatgtaaggaatgtggcaaagccttcgcatttctcttttcctttcgaaaccatataagaattcatactggagagacaccctatgaatgtaaggaatgtgggaaggcattcagatatctcactgctcttcggcgccatgaaaaaaatcacactggagagaaaccctacaaatgtaaacagtgtggaaaagcctttatatattaccagccttttctaacccacgaaaggactcacactggagagaaaccttatgaatgtaagcaatgtgggaaagccttcagttgtcccacgtacttacggagtcatgagaaaactcatactggagagaaaccttttgtatgtagggaatgtgggagagccttcttttctcactcaagccttcgaaaacacgtgaaaacccacaccggagttcaaccttatacatgtaagaaatgtggggaagccttcaagtcatctagttcctgtgaagtgcacgaaagaactcattttggagaaaaaccctatgaatgtaaacaatgtggtaaagccttcaattcttcaagttaccttcagttgcacgaaagagttcacactggcgagaaaacttacgaatgtaaagaatgtggtaaagcctttctttattccactcactttcgaatccatgaaagaacccatactagagagaaaccctatgaatgcaaacagtgtggtcgggtcttcatttacttcagtcaccttcgaaggcacgaaagaagtcacactggagtgaaaccatgtgagtgtaagcagtgtggcaaagctttcacttgtttaaattccctgaaagtacacaaaagaattcatactggagaaagaccctttcagtgtagacaatgtggtaaagccttcagttactcaaagtctttgcacgtgcacgaaaggactcatagtagacagaagccctaagaaagtaaagtgtggtaatgctgtcagttgtattagttccttttggatgtatgagagtacttacgctggagagaaattcaaggaatgtaaacggtgtgattaagccttcagttgtcctaattccctttgaagacgtgactcatgcggcaatgaaatatttaacaaatgggggaggaacttgcactctcctgcgggattgcagatatgtgaatggactccatggacagaaaagctacgaatgtatggagtgtaggaaagccttcacttcacgtaatcttttaaagacacctgagaatatatactggagagaaactataaagaaaattctatatccatcccatcttttgtggggtttgttttttgtttttgtttttgttgagatgtaattttgctcttgttgcccaggctggagtgcagtggtgcgatcgcggctcaccgcaacctccgcctccnggnttcaagcaattctcctgccgcagcctcccaagaagctgggattacaggcatgcgccaccacgcctggctaattttgtaattttagtagagatggggtttctccatgttggtcaggctggtctcaaactcctgacctcaggtgatctgcctgcctcggcctcccaaagtgctgggattacaggtgtgagccacagcacccaacctttttttccccgccgcaccccaagatggtgtctcactctgttgccccaggctggagtgcagtggtgtgatcctggctcactgtaacctctgggttcaagcaattcttctgcctcagccttccaagtagctgggattacaagtgcccaccaccatgcccagctaatttttatatttttagtagagacagtgtttcaccatgttgaccaggctgatcttaaactcttgacctcaaatgatccacccaccttggcctcccaaattgttcgttttacttttttttttttttttttttgagctggagtcttactctgttgcctaggctggagtgaaagtggcgcaacctctgcctcccaggtcaaagcaatcctgcctcaggccccctagtagctggcattacaggcacatgccaccangcccaactaatttttatatttttagtagagacggggtttcaccatgttggccaggctggtcttgaactcctgacctcaggtaatccacctgccttggcctcccaaagtgctgggattacaggcgtgagccaccacacccggcccccagttctttttttttttttttgagacggagtccttgcccaggctggagtgcagtggcgcgatctcagctcactgcaagctccgcctcctgggttcacgccattctcctgcctcagcctcccgagtagctgggactacaggcgcccgccaccacgcccggctcattttttgtatttttagtggagacggggtttcaccgtgttagccaggatagtcttgatctcctgacctcgtgatccgccctcctcggcctcccaaagtgctgggattataggcgtgagccaccgcgcccggcctccagttcattttaaaaccatgaaaccacccacactggagagccgccttcttaaatgtaagcaatatgggaacatcttcaatgacatctgcaaccattgtcgagattcttcgtaggaagaattaaaggaatggggaagaaggacttgggccccagcaggccttttgtggcatccagtcagaagttaggaaacaccctctagggcagtgcctgccctcagctctcacacatgactggagagaagtgagaagactcccagaatctgccttttaagtttccatcagtgtcctcgggtcagactgtgggaatgctgtacttctaagacaaaggttcgcatcttacagtttttccccaagtgggatctgcctatgcacatcctaattcacagacattgtcagcattgcattattccagggctgttttgaggtcatctccagctccatttcccatctcaaacctacactttggacacttgtttaaacattcacatctgaatttctctgtggcaaccgcaggtggctctgaggtgagagactgaagaagcagagcctgtatcatgggacacacaccccttgaccacacagcatccactctcctgcggttaccagccctgcaccaaccaccacagtcagaataatctcaaaactgctagtggagtcacagacacactctgccatgtcttagctgtaggacactcagaattcttacctcccctaacttgctttccctgttttctggcacattctaccctgagatattcagcggcatatgcactgatgatgctccggccttctcacgtcagtgcatgtcacatgcatcctgctccaggactggtttcctagcctcccgctaagactagcacttagctcttcttggaaaaggacccaccctgcagcgctccagctctgttgtgtatgggaggtgctggtgtcagggttcacaagccatggaactaccttgcttcacatcacaaggcaaggtgaactcaactcccaataaactgcttgctggagcctccgaattctccgttttctgaattgcataggcacgataggggtcgggtctgtcctttgttggagtcagtccccccttttcttagcaagtcagtgtgttttagaagggaggtggcagcattgagggaaaccaggtcaccatccaccctcgtaacaacagtctccctgggtgggtcccagaagtgatctttgtgtcgctcgggtcggaactctttaggcctctggcctccaccctcccccaacagcagggatgggtcaggtggcagcatccaaaaccacggtgaagatactagggtccagaggccgactggagcaaggtttgctggcagatgaggcctcagtggaagtgacggctactgtggagatgcagtggaggacctggtggctgagccaggagatgcacacattcgcttctctcaccaggaacatttatggtagtatgaggggttggaacattattactcaacccatttcaggtcctttcacattcttgagctgccatgttgtgcttttgtagagagatgattattgtactgtgggaggtcaggaagtctctttaagaaaatagtttaaacaatttgttaaaaaattttccgtcttatttcatttctgtaacagttgatatctggctgtcctttttataaatgcagagtgagaactttccccttaccgtggtttgattacactgttgttccagggttctattgccaagaatgtgtttgtcccaaaaatgcctgtttagtttttaaaagatgggaactccaccctttgctttgggtttcacgtattgtcttggacggcgctgactcaggacctcgatgtacggcgggccgacctggaccggtggggcgcaccaccttcctgtgctaacccttttttacgtcccaacacaaaacaccaacaacaaccccccaaag

SEQ ID NO: 28903 - DNA, 6193 bp, Homo sapiens
  misc_feature (2166)..(2166): n is a, c, g, or t
  misc_feature (2169)..(2169): n is a, c, g, or t
  misc_feature (2786)..(2786): n is a, c, g, or t
  misc_feature (5654)..(5654): n is a, c, g, or t
cgcttccgccggtgggacggaactggtgccctccgtggacaattgtgttgaagcagaaattgttccggatctcgggtcggacacggaagtcttcctgcagtgtttctggatgcggggacagggatgcgcaggaattccagtctcagtttccagatggagcgacccctcgaggagcaagtccagagcaagtggtcgtctagtcaaggccgcacaggaacaggagggtctgatgtcctccagatgcagaacagtgaacaccatggacaaagcatcaagactcaaactgactccatctcccttgaggatgtggctgtgaacttcaccctggaggagtgggctttgctggatcctggccagaggaatatctacagagatgtgatgcgggcaaccttcaagaacctggcctgtataggggaaaaatggaaagaccaggatattgaagatgaacacaaaaaccagggaagaaatctaagaagtcctatggttgaagcactctgtgaaaataaagaagattgtccatgtggaaaaagcactagccagattcctgatcttaatacgaacctggaaactcctactggattaaaaccatgtgactgcagtgtgtgtggggaagtcttcatgcatcaggtctcccttaataggcacatgagatctcacactgaacagaaaccaaatgagtgtcacgaatatggagagaagccacataaatgcaaagaatgtgggaaaaccttcactcgcagctccagtattcgaacccatgaaagaattcacactggagagaaaccctatgaatgtaaggaatgtggcaaagccttcgcatttctcttttcctttcgaaaccatataagaattcatactggagagacaccctatgaatgtaaggaatgtgggaaggcattcagatatctcactgctcttcggcgccatgaaaaaaatcacactggagagaaaccctacaaatgtaaacagtgtggaaaagcctttatatattaccagccttttctaacccacgaaaggactcacactggagagaaaccttatgaatgtaagcaatgtgggaaagccttcagttgtcccacgtacttacggagtcatgagaaaactcatactggagagaaaccttttgtatgtagggaatgtgggagagccttcttttctcactcaagccttcgaaaacacgtgaaaacccacaccggagttcaaccttatacatgtaagaaatgtggggaagccttcaagtcatctagttcctgtgaagtgcacgaaagaactcattttggagaaaaaccctatgaatgtaaacaatgtggtaaagccttcaattcttcaagttaccttcagttgcacgaaagagttcacactggcgagaaaacttacgaatgtaaagaatgtggtaaagcctttctttattccactcactttcgaatccatgaaagaacccatactagagagaaaccctatgaatgcaaacagtgtggtcgggtcttcatttacttcagtcaccttcgaaggcacgaaagaagtcacactggagtgaaaccatgtgagtgtaagcagtgtggcaaagctttcacttgtttaaattccctgaaagtacacaaaagaattcatactggagaaagaccctttcagtgtagacaatgtggtaaagccttcagttactcaaagtctttgcacgtgcacgaaaggactcatagtagacagaagccctaagaaagtaaagtgtggtaatgctgtcagttgtattagttccttttggatgtatgagagtacttacgctggagagaaattcaaggaatgtaaacggtgtgattaagccttcagttgtcctaattccctttgaagacgtgactcatgcggcaatgaaatatttaacaaatgggggaggaacttgcactctcctgcgggattgcagatatgtgaatggactccatggacagaaaagctacgaatgtatggagtgtaggaaagccttcacttcacgtaatcttttaaagacacctgagaatatatactggagagaaactataaagaaaattctatatccatcccatcttttgtggggtttgttttttgtttttgtttttgttgagatgtaattttgctcttgttgcccaggctggagtgcagtggtgcgatcgcggctcaccgcaacctccgcctccnggnttcaagcaattctcctgccgcagcctcccaagaagctgggattacaggcatgcgccaccacgcctggctaattttgtaattttagtagagatggggtttctccatgttggtcaggctggtctcaaactcctgacctcaggtgatctgcctgcctcggcctcccaaagtgctgggattacaggtgtgagccacagcacccaacctttttttccccgccgcaccccaagatggtgtctcactctgttgccccaggctggagtgcagtggtgtgatcctggctcactgtaacctctgggttcaagcaattcttctgcctcagccttccaagtagctgggattacaagtgcccaccaccatgcccagctaatttttatatttttagtagagacagtgtttcaccatgttgaccaggctgatcttaaactcttgacctcaaatgatccacccaccttggcctcccaaattgttcgttttacttttttttttttttttttttgagctggagtcttactctgttgcctaggctggagtgaaagtggcgcaacctctgcctcccaggtcaaagcaatcctgcctcaggccccctagtagctggcattacaggcacatgccaccangcccaactaatttttatatttttagtagagacggggtttcaccatgttggccaggctggtcttgaactcctgacctcaggtaatccacctgccttggcctcccaaagtgctgggattacaggcgtgagccaccacacccggcccccagttctttttttttttttttgagacggagtccttgcccaggctggagtgcagtggcgcgatctcagctcactgcaagctccgcctcctgggttcacgccattctcctgcctcagcctcccgagtagctgggactacaggcgcccgccaccacgcccggctcattttttgtatttttagtggagacggggtttcaccgtgttagccaggatagtcttgatctcctgacctcgtgatccgccctcctcggcctcccaaagtgctgggattataggcgtgagccaccgcgcccggcctccagttcattttaaaaccatgaaaccacccacactggagagccgccttcttaaatgtaagcaatatgggaacatcttcaatgacatctgcaaccattgtcgagattcttcgtaggaagaattaaaggaatggggaagaaggacttgggccccagcaggccttttgtggcatccagtcagaagttaggaaacaccctctagggcagtgcctgccctcagctctcacacatgactggagagaagtgagaagactcccagaatctgccttttaagtttccatcagtgtcctcgggtcagactgtgggaatgctgtacttctaagacaaaggttcgcatcttacagtttttccccaagtgggatctgcctatgcacatcctaattcacagacattgtcagcattgcattattccagggctgttttgaggtcatctccagctccatttcccatctcaaacctacactttggacacttgtttaaacattcacatctgaatttctctgtggcaaccgcaggtggctctgaggtgagagactgaagaagcagagcctgtatcatgggacacacaccccttgaccacacagcatccactctcctgcggttaccagccctgcaccaaccaccacagtcagaataatctcaaaactgctagtggagtcacagacacactctgccatgtcttagctgtaggacactcagaattcttacctcccctaacttgctttccctgttttctggcacattctaccctgagatattcagcggcatatgcactgatgatgctccggccttctcacgtcagtgcatgtcacatgcatcctgctccaggactggtttcctagcctcccgctaagactagcacttagctcttcttggaaaaggacccaccctgcagcgctccagctctgttgtgtatgggaggtgctggtgtcagggttcacaagccatggaactaccttgcttcacatcacaaggcaaggtgaactcaactcccaataaactgcttgctggagcctccgaattctccgttttctgaattgcataggcacgataggggtcgggtctgtcctttgttggagtcagtccccccttttcttagcaagtcagtgtgttttagaagggaggtggcagcattgagggaaaccaggtcaccatccaccctcgtaacaacagtctccctgggtgggtcccagaagtgatctttgtgtcgctcgggtcggaactctttaggcctctggcctccaccctcccccaacagcagggatgggtcaggtggcagcatccaaaaccacggtgaagatactagggtccagaggccgactggagcaaggtttgctggcagatgaggcctcagtggaagtgacggctactgtggagatgcagtggaggacctggtggctgagccaggagatgcacaccttcgcttctctcaccaggaacattcgcttctctcaccaggaacatttatggtagtatgaggggttggaacattattactcaacccatttcaggtcctttcacattcttgagctgccatgttgtgcttttgtagagagatgattattgtactgtgggaggtcaggaagttcgagattccttcactgtcagaatgggctcaaggagccatcttttgtgataggtattggggaactaaggggtatctctgctacaggaatgggagtgagaacattcactttttgaaggacaagtatatgtgggtctatgatgatgtttttgtaaaacccttttgtgtatgtgtctgtgtgagtcctaatattcagtaagtattttcctctgtgtaactccctctaataggtgtagtcaacaaagctgtgctaatatctctgtccccttgatcctggcattctggaagacacgaaagcaagcaaggatatataaggcactgtggtggttattcccgaggagccagagaaacctggagaagagatcagaacacctggggtccttctatttgggagaatcttttagtatctgggctgttacacctgtgggtttgtgaatttgtgtctgtccacctgtatgtacagtgataacgtgtgtgatttttgtatatttgtctagagggctgtgtgtatatatatttatatatatttttaaatatggaatgcttttaggtttttttttttttttttttttgagatggattctcactgttgccaggctggagtgcagtggcacaatcttggctcactgcaacctccacttctcaggttcaagcaattctcctgcctcagcctcctgagtagctgggactataggcgcgtgccaccacaaccagctaaatttttttgtatttttagtagagatggggtttcaccatgttgaccaggatggtctcaatctcctgaccttgtgatccacccacctcggtctccccaaagtgctgggattacaggcgtgagccactntgcctggctggttattttgtttgtttgttgtttttttgagacacagtctcgctctgtcaccaagctggactgcagtggcatgatctcggctcactgcaatctctgcctcccaggttcaagcaattctcctgtttcagcctcctgagtagctgggattacaggcgcgtgccaccataccgagctagtttttttatttttagtagagacggggtttcaccatgttggccaggatggtctcgccctcctgaccttgtgatctgcctgcctcggcctctcaaagtgctgggattagaggcttgagccaccaggcccggctggaatgcttgcattttcttgcctgatttccctgggagcaccccccttaacactgaatggagctggtgagagcaaatatccttgtttctgatattagatattaaaaatatggtttttcaccatcaaagattttattgagtttttcatatatgccttgtagcaatttgagtaaattatattccttgtttgttgcagatttttaatcataaatgggtgttgaatta

SEQ ID NO: 28904 - DNA, 3139 bp, Homo sapiens
cgcttccgccggtgggacggaactggtgccctccgtggacaattgtgttgaagcagaaattgttccggatctcgggtcggacacggaagtcttcctgcagtgtttctggatgcggggacagggatgcgcaggaattccagtctcagtttccagatggagcgacccctcgaggagcaagtccagagcaagtggtcgtctagtcaaggccgcacaggaacaggagggtctgatgtcctccagatgcagaacagtgaacaccatggacaaagcatcaagactcaaactgactccatctcccttgaggatgtggctgtgaacttcaccctggaggagtgggctttgctggatcctggccagaggaatatctacagagatgtgatgcgggcaaccttcaagaacctggcctgtataggggaaaaatggaaagaccaggatattgaagatgaacacaaaaaccagggaagaaatctaagaagtcctatggttgaagcactctgtgaaaataaagaagattgtccatgtggaaaaagcactagccagattcctgatcttaatacgaacctggaaactcctactggattaaaaccatgtgactgcagtgtgtgtggggaagtcttcatgcatcaggtctcccttaataggcacatgagatctcacactgaacagaaaccaaatgagtgtcacgaatatggagagaagccacataaatgcaaagaatgtgggaaaaccttcactcgcagctccagtattcgaacccatgaaagaattcacactggagagaaaccctatgaatgtaaggaatgtggcaaagccttcgcatttctcttttcctttcgaaaccatataagaattcatactggagagacaccctatgaatgtaaggaatgtgggaaggcattcagatatctcactgctcttcggcgccatgaaaaaaatcacactggagagaaaccctacaaatgtaaacagtgtggaaaagcctttatatattaccagccttttctaacccacgaaaggactcacactggagagaaaccttatgaatgtaagcaatgtgggaaagccttcagttgtcccacgtacttacggagtcatgagaaaactcatactggagagaaaccttttgtatgtagggaatgtgggagagccttcttttctcactcaagccttcgaaaacacgtgaaaacccacaccggagttcaaccttatacatgtaagaaatgtggggaagccttcaagtcatctagttcctgtgaagtgcacgaaagaactcattttggagaaaaaccctatgaatgtaaacaatgtggtaaagccttcaattcttcaagttaccttcagttgcacgaaagagttcacactggcgagaaaacttacgaatgtaaagaatgtggtaaagcctttctttattccactcactttcgaatccatgaaagaacccatactagagagaaaccctatgaatgcaaacagtgtggtcgggtcttcatttacttcagtcaccttcgaaggcacgaaagaagtcacactggagtgaaaccatgtgagtgtaagcagtgtggcaaagctttcacttgtttaaattccctgaaagtacacaaaagaattcatactggagaaagaccctttcagtgtagacaatgtggtaaagccttcagttactcaaagtctttgcacgtgcacgaaaggactcatagtagacagaagccctaagaaagtaaagtgtggtaatgctgtcagttgtattagttccttttggatgtatgagagtacttacgctggagagaaattcaaggaatgtaaacggtgtgattaagccttcagttgtcctaattccctttgaagacgtgactcatgcggcaatgaaatatttaacaaatgggggaggaacttgcactctcctgcgggattgcagatatgtgaatggactccatggacagaaaagctacgaatgtatggagtgtaggaaagccttcacttcacgtaatcttttaaagacacctgagaatatatactggagagaaactataaagaaaattctatatccatcccatcttttgtggggtttgttttttgtttttgtttttgttgagatgtaattttgctcttgttgcccaggctggagtgcagtgagccgagattgtgccaccgcactccagcctggcaacagagcgagactctgtctcaagaaaaaaaaaaggaaatcctggctttctttaagccacagacttcctaaggctggtgggtcccagactccttgtactggccttgggtccctggtcaccttgcagtggccaccaacccccaggggctactgatagggctatccagtgggcttctggtagcttgggcaactgggcaggatctttatgggcagtcacaggtgccagcattggaggatggagttaggggttgaaaaagcaaaacctcgaacgaaccagcctgtagggggcctggagtggagctggatatacggggagtcacaggtgacgcgagggtcagtcagtctcctgagacgacaagaagcagacatatgccgtgagcaccattcgagagaaggtaccaaggatagggcccacgggggtccagggtgaaaatgggatggaagcatcaaagcgggggagacaggagccagtgggaaacgaagcgaagggggaaaaaacaagctgcaagcagtagggaacatccaaaggggacaacatcccgtctgacgcgaggaaacacgaaccccatgggaaccaagtgacacagcgtggcgatagggaacccgaaagcagggtgcaataccagggacgtaataagtaccagacgtgcacaagtagcaatacaggcaacggtacacagggcattaagggaaaatcgaggtagagacgtatgtggagcccccatgggcaaccaaggaggacgccaaaactatgcctgtgacaggtgccctacgcaaacagaataggagagcagcgacacattgacgaccatggggagaaagcacctaggaacacgaggtgtccaagaaggcgcacaacattcacgacttgagaaaccgctaaggagagagggcgccacataacacctcttcacaagacggagaagacagatatcagcagggaggacatcacaagaaccgggaggacatgagacg

SEQ ID NO: 28905 - DNA, 180 bp, Homo sapiens
caagctgcctggcggatgctacgctccactcaggggtctaccaccagggatcctggacctggggcctcccaaagtatttttcagtccttttgtagtcctcttctttgaaagaggataaatcattttttgttcttttacccaaacaccttgactataaatatgtgtaaattatgtattcat

SEQ ID NO: 28906 - DNA, 364 bp, Homo sapiens
ggtgtgagccaccgtgcccgaccccatttaatgttattattgacgtagttgtaattacatctgccattttagttttttgtgtttgtctcatgttgttttcttgctcctcctttgctgcattattttgcattaaatgattatttcctaattattttaatttctttaataattttttttactatctgtgtgtgtgtgttttgagatagagtctcactctgtcacccaggctggagtgcagcagggcaatcttggctcactgaaacctctgcctcctcttttcaagtgattctcctgcctcagcctcctgagtagctgagatttcaggtgtgtgccaccaagcctggctaatttttgtatttttttt

SEQ ID NO: 28907 - DNA, 930 bp, Homo sapiens
  misc_feature (264)..(264): n is a, c, g, or t
atgaagaaagaaaatcaatcctttaacctggattttattctcctgggagttactagtcagcaagaacagaataatgtcttctttgtgatttttttgtgcatttaccccatcacactgactggaaatctgctcatcatcttggccatctgtgctgacattcgccttcacaaccccatgtattttctccttgccaacctctccttggttgacatcatcttctcatccgtaaccatccctaaggtgctggccaaccatctcttgggnagcaagttcatctcctttgggggatgcctaatgcagatgtatttcatgatagccttggccaaggcagacagctataccttggctgcaatggcatacgatcgagctgtggccatcagctgcccacttcattacacaacaattatgagtccacggtcttgtatcctgcttattgctgggtcttgggtgattggaaacaccagtgctctcccccacactctgctcacagctagtttgtccttctgtggcaaccaggaagtagccaatttctactgtgacattatgcctttgctgaagttgtcctgttctgacgtccactttaatgtgaagatgatgtacctaggggtcggcgttttctctttgccattactatgcatcattgtctcctatgttcaggtcttttccacagtcttccaagttccatctaccaagagtctattcaaagccttctgcacctgtggctcccacctcacagttgtttttttatattatggtacaacgatgggcatgtatttccgccctctgaccagttacagccccaaagatgcagtgataactgtgatgtatgtggcagtgaccccagcattaaatcctttcatctatagtctgagaaattgggatatgaaggcagccctacagaaactcttcagcaagagaatctcctcatag

SEQ ID NO: 28908 - DNA, 419 bp, Homo sapiens
tttttttgagatggagtctcacttttgttgcccaggctggagtgcaatggcgcgatcttggctcactgcaaactccacttcccaagttcaagtgattctcctgcctcagcctcccaagtagctgggattacaggcgcctgccaccacacctggctaatttttttgtatttttagtagagatggggtttcatcatattgacaaggttggtctcgaactgctgacctcaggtaatctgcctgccttggcctcccaaaatgctgaggttacaggcatgagcctccatgcctggctgccaaaccctattttttaagaccatcacaagactaaagattctaataatctttaatcagtctttattgaaattacaaagagggactttatttgtgactttttggctttgaggcataggaactgtatg

SEQ ID NO: 28909 - DNA, 389 bp, Homo sapiens
ggtaaaagggaaagaagggggcgtgaaggcgaacggttgggaggggatgaagctgggggaggagaggccaggcccgggtcgcatgggcctgcagatcaggcttagcactccagacttcatcctaggagctgtgggaagccactgaggacatgtgtggcaggggtaagggcagacgctgtggtgagatcagagcacgtactctatgtcaggcacattgtcagttcttcttgtgccatcttacagaatccttgcagcagcctcagaagggcagggataatcaacctccattttaaaaatgagaaaacgtggtctcaaaggcataaacaggccgggtgcagtagctcacgcctgtaatcccagcactttgggaggccgacgtgggcagatca

SEQ ID NO: 28910 - DNA, 1687 bp, Homo sapiens
taagctattaatatttcctatcactttccatttataaacaatgctgagcttcagacacgtattatcttacatatgtgtgagtctgtctctaggataaattcctagaagtagaattcccgtgtcaaagaatatgcacatttaaaaaatgtatagacttcgggccggggcgcgggaaggtgcgggtcgtcggcggagagaagccagcagctcgagagacgcagggccaggaggacaggaccgtcccgcggtcacagcccggtccttcttccgctccccccgccccccccacgggccaccttccggtccgttctccccgcccggtcgccgcccgccagcccttcgtcccccagccgcccaacctcctaagcgctgaaggaattatttttgggagtcatgaccatagctgcctgcttcccccaaccctcgacgacgaaaaggacttcggcccccggccgggcggctccgggggaaaaaagagagagcgaccgccgccccgcgctcagggccactctagagggagaagctgccccgaggctggcagagcgcccagccgcggtggagaccggaagccttctggagcccaaggctgtgcacgtcccctgtgctgattctctgcctaggaaaggaccatgcagctggagatcaaagtagccctgaacttcatcatcttctacttgtacaacaagctgctctggcgcctctgaaaaagaaataagaagcccactggtaccctgacaaaccactgaagggctctggcttccacaccgaggagatggtggaccccgttggggagctggccgctaagcgaagtggcctgacagtggaagatgtgcgggccaatgtgcctgaggagctgagcatatggattgaccccttcggggtgtcctaccagattggtgagaagggagcagtgaaagtgctgtacctggatgacagtgacggctgtggggccccggagctggacatgaagatcaagagcagtttcactcctgacgaccagatgctctttctcctcggaagccaggacagctccttgtccaactccccgtcgctatgctttgcccatcacccagccccaccttcatcctctgcctcgcccagcccatcaccttcaccatggactcctttgctgccaccaaattaggctccactaagatgaagaagaggggtggggcaacaagtggtaggggtgcagccagcggtgaagcaggtggccagcagccagtacagcagcctccacggcccgcttcaacaccaacagcttgttgaaacacaggagtctttctctgtctgtgcattcattgaacttcatcccggccaaccggcctctcaatcccagctctcgccccaaggccacgtacagtctcaagtacaacagtggtggcttgcccagtttcttccttgatggggccaatggccagggtagtgacacccgagccctctttggaggcagtgggactgtcacctgcaacgccagcagcttctacatggtctaggtatttggaggtggtgccaccgcctcttcctggagaaggcacccttcatggaagacctcagctacaacctgaacaccatgcaatatcctagtcaaccgttccagtccgtggtgctggccaactgaccgtctacctgccctggggccgggagcacccaagaccacagaaaagagaaagaaaaggaaaggcca

SEQ ID NO: 28911 - DNA, 347 bp, Homo sapiens
ggagctgaagagacctggagccgacagacgggtctgggtctgccgcccaggatggagtacaatggtgtgatcttggctctttgcaacctctgcctcctgggctcaagccttcctcccacctgaacctcccaagtagcgggactgcagggtgaaggccatgccgcctcctgggaaagttccccgaaaggagaatctgtggctacagtgtgagtgggggtcctgctcctttgtgtgctcaaccatggaaaagttctttgagcatgtcactcagcacctgcagcagcacctgcatggctctggggaggaggaggaagaggaagaggaggatgacccacttggtaagagag

SEQ ID NO: 28912 - DNA, 385 bp, Homo sapiens
gtgtgttctctcaagtttttggcacctttgtccatgtcctctgtgtttagaatgcctttctccatctcatcgtacctctgtcctgccacactgcacttgacatcacccctttttaaactctttatttccccctttttaactcttttagggttttctctaagacctaagtccttcctccaagtactccccaagcctcctaagtcacagctcatttagtttgtcattctttgtgctgctgcaactgtagcacctaccttgtatttaaacagttttattattttgtttatttgagacagggtctggctctgtccccaggcagaggttgcagtgagctgagatcgtgctactgtactccagcctgggtgacagagcaaaactccatcta

SEQ ID NO: 28913 - DNA, 563 bp, Homo sapiens
ggggagccaggagagctgggagagccggggctgccgggtgaggtcggcatgcgggggccccaaggaccacctggactccccggacctcctggacgtgtcggagctcctgtaagtgaaggcacttgtctgggcaggggttctaccccttctccaggaatcaaaaaccaggttctagcaagttcctccacctgcatctagacagtaatgctgttttgccttactgatgccaatgaagtgttggtatctcctttcttagaccagaaattattagatgttacagtccataagaatcacccagagaacaagtttaaatgcatattcctgggacccctttctcacatcaagaagcagggtagatcccaggaatctgcatttttaaccagcaccacaggatttttgacacttgatctaaagaattcattttccccagcctgtcctgtactgtactcttgtaagaagggtggagtctactgaattcttagcccctggaacagtgccagactgtccagtatggtgttcagtatgtccagtgaataaagagatgaacaaacagatatggtgta

SEQ ID NO: 28914 - DNA, 2188 bp, Homo sapiens
gcatttcttcctttttttattcctcacctacttaaggttcgagctccctgagcccattggccaacacctctggagtctgaccacgcctagaaacactgcgcatgctccgttgctagccagcccaggcagggcgctgaatcggcacaaaccagtctcacttcttgtaccgcagtggggaggttggagagaattttttcccatgaaagggcatacgttgcccgtccccttccccgaagaacgcactaggaatactgttcctgcgtttgcatgagctgtggcaccagcaccgactcagccttccgggcctccctcatgcacggagcctctcactaggtctcacccgcggctgcgttggtgccgtccggcacggtcacgtgggcgagaaaatggcggcccccagaccgcactgcgggcgtcgcggcaggtgaagcggtggtggcagaggcgcctgcggttactggccgggccgacgggtcctgagtctccagagctcggtgaggcgtcccggaggcggcgatcacggttcttacatccccgcgtccccaggtttagcctgagcagggttgtggaaggccgggacccattgacagcacgatggtgacggagcaggaggtggatgccatcgggcagacgctggtggaccccaagcagcccctgcaggcccgcttccgggcgctgttcacgctgcgtgggctcggcggcccaggcgccattgcatggatcagccaggccttcgatgacgattccgccctgctcaagcacgagctggcctactgcctgggccagatgcaggatgcccgcgccatccccatgctggtggacgtgctgcaagacacccgtcaggagcccatggtgcgccatgaggcaggggaggccctgggggccatcggggacccggaagttctggagatcctgaagcagtattcctcggaccccgtcatcgaggtggccgagacctgccagctggccgtgcgcaggctggagtggctgcagcagcacggcggggagccggcggcgggaccctacctctccgtggaccctgccccgccggctgaggagcgtgacgtggggcgcctgcgggaggcgctgctggatgagtcccggccgctcttcgagcgataccgcgccatgttcgccctgcgcaacgcgggaggcgaggaggccgccctggcgctggccgagggtctgcactgtgggagcgccctcttccgccacgaggtcggctacgtcctgggacagctgcagcacgaggcggcggtgccccagctggcggccgccctggcccgatgcaccgagaaccccatggtgcggcacgagtgcgcggaggccctgggcgccattgcccggcccgcctgcctggccgcgctgcaggctcacgcggacgacccagagcgcgtggtgcgtgagagctgcgaggtggctctggacatgtatgagcacgagaccgggcgggccttccagtacgcggacggcctggagcagctgcgcggggccccctcctagggccccaccctcacccggagctcccggaggactcttgagggccgctcctcccccgcagagctttggcgtctaaaccgggtgtgtgtaaatcggtgtcatcgcttgtgtcttgctgggcgcacggttgctgtccccctcctccgtctgggaccgaggagctgccgttgtgctgtgactccctgagtcccctgactgctcctcggggcctggcgcagggctgtagcgtggaagtttccaggcttggggtgggactctgcgggaggctctgggatgcccggctcaggacaggggaggattgcgagggaagccaggggaggatcgcgagggaagccaggggaggatcgcgagggaagccaggggaggatcgcgagggaagccaggggaggatcgcgagggaagccaagggaggatcgcgaggggagccaggggaggatcgcgagggaagccaggggcagagctggggctctgggaagaggctgacgttatggtggcttcagcttcactaggaatgggacacagggtctgggggcctctgactcccccaccccgaggcctgggtagggacagggtggtggtccctgagtgggtcaggtagggcacaggggccagggagggacaagcagacctcagagcgctgcccagatggaatattaaattatttttgccaagaaaaacactgactcct

SEQ ID NO: 28915 - DNA, 1810 bp, Homo sapiens
cggacgcgtgggtcgacccacgcgtccggacccacgcgtccgtcccccagaccgcactgcgggcgtcgcggcaggtgaagcggtggtggcagaggcgcctgcggttactggccgggccgacgggtcctgagtctccagagctcggttcttacatccccgcgtccccaggtttagcctgagcagggttgtggaaggccgggacccattgacagcacgatggtgacggagcaggaggtggatgccatcgggcagacgctggtggaccccaagcagcccctgcaggcccgcttccgggcgctgttcacgctgcgtgggctcggcggcccaggcgccattgcatggatcagccaggccttcgatgacgattccgccctgctcaagcacgagctggcctactgcctgggccagatgcaggatgcccgcgccatccccatgctggtggacgtgctgcaagacacccgtcaggagcccatggtgcgccatgaggcaggggaggccctgggggccatcggggacccggaagttctggagatcctgaagcagtattcctcggaccccgtcatcgaggtggccgagacctgccagctggccgtgcgcaggctggagtggctgcagcagcacggcggggagccggcggcgggaccctacctctccgtggaccctgccccgccggctgaggagcgtgacgtggggcgcctgcgggaggcgctgctggatgagtcccggccgctcttcgagcgataccgcgccatgttcgccctgcgcaacgcgggaggcgaggaggccgccctggcgctggccgagggtctgcactgtgggagcgccctcttccgccacgaggtcggctacgtcctgggacagctgcagcacgaggcggcggtgccccagctggcggccgccctggcccgatgcaccgagaaccccatggtgcggcacgagtgcgcggaggccctgggcgccattgcccggcccgcctgcctggccgcgctgcaggctcacgcggacgacccagagcgcgtggtgcgtgagagctgcgaggtggctctggacatgtatgagcacgagaccgggcgggccttccagtacgcggacggcctggagcagctgcgcggggccccctcctagggccccaccctcacccggagctcccggaggactcttgagggccgctcctcccccgcagagctttggcgtctaaaccgggtgtgtgtaaatcggtgtcatcgcttgtgtcttgctgggcgcacggttgctgtccccctcctccgtctgggaccgaggagctgccgttgtgctgtgactccctgagtcccctgactgctcctcggggcctggcgcagggctgtagcgtggaagtttccaggcttggggtgggactctgcgggaggctctgggatgcccggctcaggacaggggaggattgcgagggaagccaggggaggatcgcgagggaagccaggggaggatcgcgagggaagccaggggaggatcgcgagggaagccaggggaggatcgcgagggaagccaagggaggatcgcgaggggagccaggggaggatcgcgagggaagccaggggcagagctggggctctgggaagaggctgacgttatggtggcttcagcttcactaggaatgggacacagggtctgggggcctctgactcccccaccccgaggcctgggtagggacagggtggtggtccctgagtgggtcaggtagggcacaggggccagggagggacaagcagacctcagagcgctgcccagatggaatattaaattatttttgccaagaaaaacactgactcct

SEQ ID NO: 28916 - DNA, 2160 bp, Homo sapiens
gcatttcttcctttttttattcctcacctacttaaggttcgagctccctgagcccattggccaacacctctggagtctgaccacgcctagaaacactgcgcatgctccgttgctagccagcccaggcagggcgctgaatcggcacaaaccagtctcacttcttgtaccgcagtggggaggttggagagaattttttcccatgaaagggcatacgttgcccgtccccttccccgaagaacgcactaggaatactgttcctgcgtttgcatgagctgtggcaccagcaccgactcagccttccgggcctccctcatgcacggagcctctcactaggtctcacccgcggctgcgttggtgccgtccggcacggtcacgtgggcgagaaaatggcggcccccagaccgcactgcgggcgtcgcggcaggtgaagcggtggtggcagaggcgcctgcggttactggccgggccgacgggtcctgagtctccagagctcggttcttacatccccgcgtccccaggtttagcctgagcagggttgtggaaggccgggacccattgacagcacgatggtgacggagcaggaggtggatgccatcgggcagacgctggtggaccccaagcagcccctgcaggcccgcttccgggcgctgttcacgctgcgtgggctcggcggcccaggcgccattgcatggatcagccaggccttcgatgacgattccgccctgctcaagcacgagctggcctactgcctgggccagatgcaggatgcccgcgccatccccatgctggtggacgtgctgcaagacacccgtcaggagcccatggtgcgccatgaggcaggggaggccctgggggccatcggggacccggaagttctggagatcctgaagcagtattcctcggaccccgtcatcgaggtggccgagacctgccagctggccgtgcgcaggctggagtggctgcagcagcacggcggggagccggcggcgggaccctacctctccgtggaccctgccccgccggctgaggagcgtgacgtggggcgcctgcgggaggcgctgctggatgagtcccggccgctcttcgagcgataccgcgccatgttcgccctgcgcaacgcgggaggcgaggaggccgccctggcgctggccgagggtctgcactgtgggagcgccctcttccgccacgaggtcggctacgtcctgggacagctgcagcacgaggcggcggtgccccagctggcggccgccctggcccgatgcaccgagaaccccatggtgcggcacgagtgcgcggaggccctgggcgccattgcccggcccgcctgcctggccgcgctgcaggctcacgcggacgacccagagcgcgtggtgcgtgagagctgcgaggtggctctggacatgtatgagcacgagaccgggcgggccttccagtacgcggacggcctggagcagctgcgcggggccccctcctagggccccaccctcacccggagctcccggaggactcttgagggccgctcctcccccgcagagctttggcgtctaaaccgggtgtgtgtaaatcggtgtcatcgcttgtgtcttgctgggcgcacggttgctgtccccctcctccgtctgggaccgaggagctgccgttgtgctgtgactccctgagtcccctgactgctcctcggggcctggcgcagggctgtagcgtggaagtttccaggcttggggtgggactctgcgggaggctctgggatgcccggctcaggacaggggaggattgcgagggaagccaggggaggatcgcgagggaagccaggggaggatcgcgagggaagccaggggaggatcgcgagggaagccaggggaggatcgcgagggaagccaagggaggatcgcgaggggagccaggggaggatcgcgagggaagccaggggcagagctggggctctgggaagaggctgacgttatggtggcttcagcttcactaggaatgggacacagggtctgggggcctctgactcccccaccccgaggcctgggtagggacagggtggtggtccctgagtgggtcaggtagggcacaggggccagggagggacaagcagacctcagagcgctgcccagatggaatattaaattatttttgccaagaaaaacactgactcct

SEQ ID NO: 28917 - DNA, 1386 bp, Homo sapiens
agcggaggcgggcattttccacacatccaccccaccaacatgagctctccggctgcttcttcccaggggaggccctgggggccatcggggacccggaagttctggagatcctgaagcagtattcctcggaccccgtcatcgaggtggccgagacctgccagctggccgtgcgcaggctggagtggctgcagcagcacggcggggagccggcggcgggaccctacctctccgtggaccctgccccgccggctgaggagcgtgacgtggggcgcctgcgggaggcgctgctggatgagtcccggccgctcttcgagcgataccgcgccatgttcgccctgcgcaacgcgggaggcgaggaggccgccctggcgctggccgagggtctgcactgtgggagcgccctcttccgccacgaggtcggctacgtcctgggacagctgcagcacgaggcggcggtgccccagctggcggccgccctggcccgatgcaccgagaaccccatggtgcggcacgagtgcgcggaggccctgggcgccattgcccggcccgcctgcctggccgcgctgcaggctcacgcggacgacccagagcgcgtggtgcgtgagagctgcgaggtggctctggacatgtatgagcacgagaccgggcgggccttccagtacgcggacggcctggagcagctgcgcggggccccctcctagggccccaccctcacccggagctcccggaggactcttgagggccgctcctcccccgcagagctttggcgtctaaaccgggtgtgtgtaaatcggtgtcatcgcttgtgtcttgctgggcgcacggttgctgtccccctcctccgtctgggaccgaggagctgccgttgtgctgtgactccctgagtcccctgactgctcctcggggcctggcgcagggctgtagcgtggaagtttccaggcttggggtgggactctgcgggaggctctgggatgcccggctcaggacaggggaggattgcgagggaagccaggggaggatcgcgagggaagccaggggaggatcgcgagggaagccaggggaggatcgcgagggaagccaggggaggatcgcgagggaagccaagggaggatcgcgaggggagccaggggaggatcgcgagggaagccaggggcagagctggggctctgggaagaggctgacgttatggtggcttcagcttcactaggaatgggacacagggtctgggggcctctgactcccccaccccgaggcctgggtagggacagggtggtggtccctgagtgggtcaggtagggcacaggggccagggagggacaagcagacctcagagcgctgcccagatggaatattaaattatttttgccaagaaaaacactgactcct

SEQ ID NO: 28918 - DNA, 1798 bp, Homo sapiens
gcatttcttcctttttttattcctcacctacttaaggttcgagctccctgagcccattggccaacacctctggagtctgaccacgcctagaaacactgcgcatgctccgttgctagccagcccaggcagggcgctgaatcggcacaaaccagtctcacttcttgtaccgcagtggggaggttggagagaattttttcccatgaaagggcatacgttgcccgtccccttccccgaagaacgcactaggaatactgttcctgcgtttgcatgagctgtggcaccagcaccgactcagccttccgggcctccctcatgcacggagcctctcactaggtctcacccgcggctgcgttggtgccgtccggcacggtcacgtgggcgagaaaatggcggcccccagaccgcactgcgggcgtcgcggcaggtgaagcggtggtggcagaggcgcctgcggttactggccgggccgacgggtcctgagtctccagagctcggttcttacatccccgcgtccccaggtttagcctgagcagggttgtggaaggccgggacccattgacagcacgatggtgacggagcaggaggtggatgccatcgggcagacgctggtggaccccaagcagcccctgcaggcccgcttccgggcgctgttcacgctgcgtgggctcggcggcccaggcgccattgcatggatcagccaggccttcgatgacgattccgccctgctcaagcacgagctggcctactgcctgggccagatgcaggatgcccgcgccatccccatgctggtggacgtgctgcaagacacccgtcaggagcccatggtgcgccatgaggcaggggaggccctgggggccatcggggacccggaagttctggagatcctgaagcagtattcctcggaccccgtcatcgaggtggccgagacctgccagctggccgtgcgcaggctggagtggctgcagcagcacggcggggagccggcggcgggaccctacctctccgtggaccctgccccgccggctgaggagcgtgacgtggggcgcctgcgggaggcgctgctggatgagtcccggccgctcttcgagcgataccgcgccatgttcgccctgcgcaacgcgggaggcgaggaggccgccctggcgctggccgagggtctgcactgtgggagcgccctcttccgccacgaggtcggctacgtcctgggacagctgcagcacgaggcggcggtgccccagctggcggccgccctggcccgatgcaccgagaaccccatggtgcggcacgagtgcgcggaggccctgggcgccattgcccggcccgcctgcctggccgcgctgcaggctcacgcggacgacccagagcgcgtggtgcgtgagagctgcgaggtggctctggacatgtatgagcacgagaccgggcgggccttccagtacgcggacggcctggagcagctgcgcggggccccctcctagggccccaccctcacccggagctcccggaggactcttgagggccgctcctcccccgcagagctttggcgtctaaaccgggtgtgtgtaaatcggtgtcatcgcttgtgtcttgctgggcgcacggttgctgtccccctcctccgtctgggaccgaggagctgccgttgtgctgtgatcccccaccccgaggcctgggtagggacagggtggtggtccctgagtgggtcaggtagggcacaggggccagggagggacaagcagacctcagagcgctgcccagatggaatattaaattatttttgccaagaaaaacactgactcct

SEQ ID NO: 28919 - DNA, 1024 bp, Homo sapiens
agcggaggcgggcattttccacacatccaccccaccaacatgagctctccggctgcttcttcccaggggaggccctgggggccatcggggacccggaagttctggagatcctgaagcagtattcctcggaccccgtcatcgaggtggccgagacctgccagctggccgtgcgcaggctggagtggctgcagcagcacggcggggagccggcggcgggaccctacctctccgtggaccctgccccgccggctgaggagcgtgacgtggggcgcctgcgggaggcgctgctggatgagtcccggccgctcttcgagcgataccgcgccatgttcgccctgcgcaacgcgggaggcgaggaggccgccctggcgctggccgagggtctgcactgtgggagcgccctcttccgccacgaggtcggctacgtcctgggacagctgcagcacgaggcggcggtgccccagctggcggccgccctggcccgatgcaccgagaaccccatggtgcggcacgagtgcgcggaggccctgggcgccattgcccggcccgcctgcctggccgcgctgcaggctcacgcggacgacccagagcgcgtggtgcgtgagagctgcgaggtggctctggacatgtatgagcacgagaccgggcgggccttccagtacgcggacggcctggagcagctgcgcggggccccctcctagggccccaccctcacccggagctcccggaggactcttgagggccgctcctcccccgcagagctttggcgtctaaaccgggtgtgtgtaaatcggtgtcatcgcttgtgtcttgctgggcgcacggttgctgtccccctcctccgtctgggaccgaggagctgccgttgtgctgtgatcccccaccccgaggcctgggtagggacagggtggtggtccctgagtgggtcaggtagggcacaggggccagggagggacaagcagacctcagagcgctgcccagatggaatattaaattatttttgccaagaaaaacactgactcct

SEQ ID NO: 28920 - DNA, 451 bp, Homo sapiens
tggatgggctcctgagagagtctctgctctgcttcctctgagatgtgatattttgcagcgggtgagggggtggtgctacattagggtctttaataaatatagatcccctctttaggggccttattgaggccctgaaaggatgtcttgggcagagacatgctctaactctccaggtgagagtgggcctcctccttgagtgcataaggagcagggagagacaggttggcatagggatggcaggtgtctaccttgacagagatatgagagtaaacaggtaggtaaatggccagttttaaagtacagctggaccaagggcatggtcacttagaaaacttgatgtgcatgttttcattttatggaacaatttaaagaaaaaaccaaaagtaaattattagctttttgttttgccagataaagatattaagccacaccaaatgataccaaaactatg

SEQ ID NO: 28921 - DNA, 489 bp, Homo sapiens
ataaaactcaggtgaaagaaatcaaagtaaagctcaatatcgagaatgatagtccatgttcatgaatgggaacactcaataatattaagatgtcaattatcccagactttgtctacagatttactggaattacaattcaaatatctgcaagtccttttgtagatatcaacaaacagaagctaaaatataagggaaggacaaagaccttcctagaattggcctagaatagtcaatacactaccgaagaagaacaaagttgagcccttttattaccaaatttcaagactcactataaagctataataatcaagacagcatatatttaaaagaataggtagataggtcaatgaaacagaattgagagcccagaaattaatctatgcagagtctgctgatctttaacaaaggaacaaaggcaagtcaatgaaaaaaaaaagtcttttcaaaaatggggctggaataattggacatacatataccaaaaaaaaa

SEQ ID NO: 28922 - DNA, 2050 bp, Homo sapiens
agtaaatgaagaggaaaatgctaacatgccatattggacaccacttgtctttcgatgccaggtcccttttcagccgaatatgtcagaattttctaggctccatcttttcttttattcctcttgcagcaaccataggctttgatggcttctcacaggacagaaaacctggatcatcccaaacctgctctgtgaaccctctacttcatgtatgggtttcctcccatgctgcacactgtgagggtcatgcatcaccacagcatgcacagctgagaaatgtggagagtgaaggacccaggccacattgactgtggggatgtaagccagtggagacacacttcctgaagtaagatgcatttcacaaagctcccagtttccagaaggatggagcaccagtcacccttggtcatggccaaaccctctttgtccttgccctttcctgctctctgggatcacagaacatgtgcactggacacagcttctgccttggaaacacccagactaaggtaatttctcacacaccagtttatcttccagcttctgtcagaactttaggtcaagtattatgagccagatagagtaaaaaatataaactttaaaaattataatcaccctcaacatggcaagcttctcatggtaagaaagaaatgcaagaattcagaaactaacccagggaatagcaggctcaagatttcttggcaaataaattcacttaatagatcacagatattttctcatctcaacacatgctgtgcacaggtatatttcaaacctaatcaccgtggaatttctcattttcattattacaaacaaagctacaataagttcatgtgtattgaaatccttgcaaacttgactagtagctcaagataaattttagaataaaaaatcaaatggtattcacatgtatatactctgaagcatatatttggtcttcaacaggtttccaggcatacaactactaaaatccttggattccttaaagtggtacttgtatgttaatgagttgacaaatggctagtagtccctacgtagcttcaggatgggagctgggcacctgaaagaccaaggcagaattagagaattaagatagtcagacccagcccccaacctccatggagggaagaagggatgaatgttaagcagaacaccaatggccagtgatttaatcagtcatgcctacagaatgatgcctccataaaaaccctcaaggactgggttcagagggcttccagatagctgaagacgtggaggttcctggaaggtggtgaacctggagagagcatgcaagctccacagcctttccctatacctcaccctatgcatctcttcatctgcatctcttgcgatatcctttacaataaactgctaaatgtagatgcctccatgagttctgtgggctgctctagcaaattaattgaacccaagaagggggctgtggtaacccagacttacactggtgtctgccataggattgattgtttgcttggtgtatgggcttaaccccatcacctttagtcacagaagtcttctgtgttgattgttgagtgagagaatagaaaaagcgctttagtttgtttttccttatagaacatgttgacattatgtggacatatttaaatttcccttcagacaccaaattcgtacttttgccaataatgtgtacaaaggcatatattctcacagtttcactaacatttgattttgttagtaactttagttttacttgcaaatcttacctcagtatcattttatttggcattgatttaatcattagtgaggtttaacatcttctggtatgttttggggctatttgtgtttcttcaataaattgtttttttcttaaattttcattgttttacctttttgcttactgatttgtagcggtagttgacatgattctacacatctttgtcatcatataagtgttgaatcgtttttctagtgggacgttttatccttttgctatgttttgtttgtttcctttgtggtacaaaagttttaaatgttatatgtattaaataaactatcaatcatgcctttaaaaaatcta

SEQ ID NO: 28923 - DNA, 738 bp, Homo sapiens
gtcagacacacaggtaaaaagaacttgaggcttataattggtattggaaacggggatgtcttatgagacttagccctcacccagcagacttggcgttatttccaggtagatagtgtcaaaactgaattgaaggacacccagctggtgtctgccataggattgattgtttgcttggtgtatgggcttaaccccatcacctttagtcacagaagtcttctgtgttgattgttgagtgagagaatagaaaaagcgctttagtttgtttttccttatagaacatgttgacattatgtggacatatttaaatttcccttcagacaccaaattcgtacttttgccaataatgtgtacaaaggcatatattctcacagtttcactaacatttgattttgttagtaactttagttttacttgcaaatcttacctcagtatcattttatttggcattgatttaatcattagtgaggtttaacatcttctggtatgttttggggctatttgtgtttcttcaataaattgtttttttcttaaattttcattgttttacctttttgcttactgatttgtagcggtagttgacatgattctacacatctttgtcatcatataagtgttgaatcgtttttctagtgggacgttttatccttttgctatgttttgtttgtttcctttgtggtacaaaagttttaaatgttatatgtattaaataaactatcaatcatgcctttaaaaaatcta

SEQ ID NO: 28924 - DNA, 2221 bp, Homo sapiens
aggcggtccagaggcggccggcaggtccacgtcctgggcgaccgctctgtcgcagttgggcgagacctacctagtcctgacgggtcgtatttccaagacattttcatattctatccattgttttgtgtgcattttattacttctgtatatagaggtaacaacgctaagcttttttgagatgtctgtttcttctagatgttctgaagtacctgatacatgttaaaattagaggttcatgcatgttgtgaagacaggattttgaacgctctcaccacaaagaaatgacaagtgtttgagcaaccataggctttgatggcttctcacaggacagaaaacctggatcatcccaaacctgctctgtgaaccctctacttcatgtatgggtttcctcccatgctgcacactgtgagggtcatgcatcaccacagcatgcacagctgagaaatgtggagagtgaaggacccaggccacattgactgtggggatgtaagccagtggagacacacttcctgaagtaagatgcatttcacaaagctcccagtttccagaaggatggagcaccagtcacccttggtcatggccaaaccctctttgtccttgccctttcctgctctctgggatcacagaacatgtgcactggacacagcttctgccttggaaacacccagactaaggtaatttctcacacaccagtttatcttccagcttctgtcagaactttaggtcaagtattatgagccagatagagtaaaaaatataaactttaaaaattataatcaccctcaacatggcaagcttctcatggtaagaaagaaatgcaagaattcagaaactaacccagggaatagcaggctcaagatttcttggcaaataaattcacttaatagatcacagatattttctcatctcaacacatgctgtgcacaggtatatttcaaacctaatcaccgtggaatttctcattttcattattacaaacaaagctacaataagttcatgtgtattgaaatccttgcaaacttgactagtagctcaagataaattttagaataaaaaatcaaatggtattcacatgtatatactctgaagcatatatttggtcttcaacaggtttccaggcatacaactactaaaatccttggattccttaaagtggtacttgtatgttaatgagttgacaaatggctagtagtccctacgtagcttcaggatgggagctgggcacctgaaagaccaaggcagaattagagaattaagatagtcagacccagcccccaacctccatggagggaagaagggatgaatgttaagcagaacaccaatggccagtgatttaatcagtcatgcctacagaatgatgcctccataaaaaccctcaaggactgggttcagagggcttccagatagctgaagacgtggaggttcctggaaggtggtgaacctggagagagcatgcaagctccacagcctttccctatacctcaccctatgcatctcttcatctgcatctcttgcgatatcctttacaataaactgctaaatgtagatgcctccatgagttctgtgggctgctctagcaaattaattgaacccaagaagggggctgtggtaacccagacttacactggtgtctgccataggattgattgtttgcttggtgtatgggcttaaccccatcacctttagtcacagaagtcttctgtgttgattgttgagtgagagaatagaaaaagcgctttagtttgtttttccttatagaacatgttgacattatgtggacatatttaaatttcccttcagacaccaaattcgtacttttgccaataatgtgtacaaaggcatatattctcacagtttcactaacatttgattttgttagtaactttagttttacttgcaaatcttacctcagtatcattttatttggcattgatttaatcattagtgaggtttaacatcttctggtatgttttggggctatttgtgtttcttcaataaattgtttttttcttaaattttcattgttttacctttttgcttactgatttgtagcggtagttgacatgattctacacatctttgtcatcatataagtgttgaatcgtttttctagtgggacgttttatccttttgctatgttttgtttgtttcctttgtggtacaaaagttttaaatgttatatgtattaaataaactatcaatcatgcctttaaaaaatcta

SEQ ID NO: 28925 - DNA, 511 bp, Homo sapiens
tcagttaaatacacaaccacctacaggacttgaaattcagttccacaacctcaagcaaaagacacacagtctcaatggttattctccttttcagtgaaaaatgaatgttttctttatggatttaagcagacaaatagacacacaaaaaatatggaacaactaaccatattctctgtcttctaccactcaacaaagaatatattctcatcatcctaatataggttaccaagtgatcttgtcataaaaccagattgctaattattgtcattccaaagggggaacattttatagattatgtgacctctactcacctagttattcagtacctactagtctctggaatcggctgttttatacacctgttttatacatgagggttctcttgattacataattaagcccaaccttgtgatccagtagcagttgtgaaaatggacataatcctagacaataagttaaacaaatgtggaacttcctggccaagatcaggagcgacaatgaaacaaaccag

SEQ ID NO: 28926 - DNA, 224 bp, Homo sapiens
gtggagtatttatcgcctgtagacactgggcccccacattgtgctaggccaggagtgctgagtcctggaattcagatcatagcagtggatacaagtgaacagtgcttgtgacaatttctgtaatagactgatacagaaagctcagttgaagggctcttaatgcagtctttgggaggggaccaggaaagcttcccagagaaagtgacatggaaccaaaacttgga

SEQ ID NO: 28927 - DNA, 955 bp, Homo sapiens
tcagtcactctttcaccctgccaaagcttcactgtcctactgattgaattgtatgtgagaaataaaatgtcatcatattaagccactgggatttgtatgtttatctgttatagcagcaagtcttaatttacctaatacacacattgtgacagatgttcttaatgtcccaccccatattgttacatgtccagctttgagatccctgcatgtggggtagagtttctggcatgctgatcaattcccactttaagcatctgtggcctctgtgcctctgtgcctcactgtatgaaggatttatctggcaccatagaaacttaccatgcacagtgacaacctagaagagtgagagagagcctcagccaacaggggaccagagtcagtggataagatgcttgaggctttccatctaccagtgagataaatatgaagcatgtttcatatggttctcagagggttcacagtgggatttagccccagtgcccacagtactctgctcgttaacgtactgtttatattggcctttctccattccccatctcacatatacttcctggaatcacatcaaataaactgcacctaaggtcttctatctaggtcagcttttgggggacccaaaagaagacacatatctaatatagcttatctcacattgctttaaacctttgtgcttatgtctatgtcttccactagattatgagactcctaagggactatagtaggtagaattttagatggctcctaagattcctgcttcctggtacacatgctctgaataatctccccttgagtgtgagaaggacttttgaatatgatatagtcactcttttgattaggctacaatatatggcaaagataatgattgttactttatacacaatttagctgactaaagtcagagattcccctgctgaccttgaaaaagcaagtcacccttcagtataataataataaaatc

SEQ ID NO: 28928 - DNA, 315 bp, Homo sapiens
agggtgactgcagtctcaatttacatcttatgtccggacgtcccattcaatgtcgcattcattccagacaaaagcgtcccagtttagatgacagattatatgactgcccttttttgtcctcaaggtatgatccaaagggaagcatctttctctgccattgctgtttcccacgcgggccaactgctcagatgttcaagtggagtcgcggctcggttatccaatctgctccaaacaaagctcctttaataaagtgagacttggctggaaggagctgaaaatgatcttggatcctaagtactggactggggccgagac

SEQ ID NO: 28929 - DNA, 305 bp, Homo sapiens
catcagtggtggacataggggttgtttccactgttggggttgtgaatagtgctgctgtgaacattcttgtgcaagcttttgtctgaacaagtgtatttaatttgttttagtctatactaagagtggaatttcagggtcctgtcgtgcttctgtgtttagcttaaggtggaactgccaaacttccacggcagctgtacccttttacattcccactagcaatgtgtgagggatctcatttctccacatcttcaccaacacttatatttcattaaagattttttattataaccaccctagtgggtgtg

SEQ ID NO: 28930 - DNA, 668 bp, Homo sapiens
ggtctcaaactcctgacctcaagtgatctgcctgcctcagcctcccaaagtgcaaggattacaggcatgagccaccatgcccggcataggcatggttttgacaatctgtctctttgtgccctggctccttctccaactcctctttggaggaggcacaggaggaggggtcatttcactgttcctgaaaagtagacatataacctacatgcaactgccaggtgataagggccccatctgtctggcatgacgttggaggtccacaaaggctgattagatgaatgctcagctctggggcctccccacagagctcacagacaggcgtgaaggaaagcaggactcttattagaatatgttcagagttttcactgaagaagcctcctgtgtgggccaggcactgtgctcagtgctttgattcacagtctcatttaattctcaccatttacagacaagaattcagctaagatccttttcaatcaagtctggcaatatctgcctttcaatggcagtgcctagtcctttcatatgtaatatacttatcattatgggtgggtttaagttttatcatcttgctatttgttatctatttgtcccccctcttttgttcctcctttactgccttctatttggttgagacttaataaaatattttattccatcttctctactta

SEQ ID NO: 28931 - DNA, 440 bp, Homo sapiens
gggaagaagttctggcatcatctaaatgtttagagattcaagcaaatgaacatttgtctcttgatgctaaatccatcactttttgggtaaggaataaagcattctcctttcaattatattcaggctattttgagattttaaatattattcatattggcagagaatgtacacatgtatgcatatacacatacatgcataaatagatgtgtgttctatctatctatctgtctgtctgtctgtctgtctatctatctatccatccatccatctcatctatttatctacaagaatgccaagcacagcgtttattttgaagccaagaatacatttttttaaatattttaattttctttttttctggaggacagtaactctttttttcaagtgtactttccaaccacaaattatgcaacccttctacagagcagagtgtttaggac

SEQ ID NO: 28932 - DNA, 915 bp, Homo sapiens
atgaaggagagctttagaaagatgtgtttgttgtctgtgtgcttcattgcaacagccctgccacactaggaggaagacaggttttgggtcctgtcttggtgataaagataaaactaaaggacaatcaaatctcatcaaacttctctctgaggagctgatgacgtttcagaaacagtgacaaagttcagaatcccattcttccatcctagatgggaaacatcaactttcctgatgatgctgaaaaagcaagatactcattttttccagccacccttgcagagccagaaagcccatgagattcaatagatgtaagactgagagagattttcattcctggatgaaaggagacaggcctgggagaagagttttctcttgccatctttgcagtctctccactcctgacgtgtacagggtcaggaaaggccatgtgaaaacatggcgagaagacagtcatctgcaacccaaggagagagacttcaccagacactgaccctgctggcaccttgatcttggacttccagtgttcagaactataagaaataaattcctgttatgtaaggtgcccagtccatggtattttgttgtaacagcctgagctgttgaagatggattttcctttcaagatcagatcttgggcctcagagtcagcctcactatagaaagcaagggctagtctcagcttcccacagaagacttggttttattggaggcaagttttgtcttgcttacaatgaggttatacaaagcataacaaaattcacattttgttaagtgactaccatatgatcactctgaattttattttacctgtcatttctcggtatcaataggttttacttccccttgttctggatttcagtgattgatgactgaatacaataaatatttattgagcgccttttatgaggagatatt

SEQ ID NO: 28933 - DNA, 914 bp, Homo sapiens
  misc_feature (861)..(861): n is a, c, g, or t
atgaaggagagctttagaaagatgtgtttgttgtctgtgtgcttcattgcaacagccctgccacactaggaggaagacaggttttgggtcctgtcttggtgataaagataaaactaaaggacaatcaaatctcatcaaacttctctctgaggtaagctgttgaatacaatattttattgaatataataaaagcaaagagaaatgtcaccaataatgataccagaatgcatcctgtatttccattaatgaggaaactgttctggaattaatacatggaattgattgtatggtatattgcctatttgcagtgtcatcccatgccattatctaactatttacagaaaaaaaaaagaaaaaacttctatgtaaaagcaaggaaaatgagagaaagaataatttcaaagggggatctaatttcagatgatgaatgccagctgtcaatgaacctataccgactgtgtttttgataaaactaatagtccaagcacctagaactgttacccctttaattgttgatccctcattttttaaatcataaatatgagtggctacctgcctccttcacaaggtcgtggtgagaagcaaattgatgccagtgccattttttccacctcaattccttgggttgcacaattttgtgggaatttcctgggaaaacttcaaagcaatttaaatagatctgtcccaaccatgcaattacaggagctgatgacgtttcagaaacagtgacaaagttcagaatcccattcttccatcctagatgggaaacatcaactttcctgatggtgagtttgtcagagtccattcccaagagtgggggtggggaggtgggggtggagagctgttgacaaggcggttgcnctctagggcgtttttttttgttcttgtgattcatgtatagagaaagccgcaag

SEQ ID NO: 28934 - DNA, 902 bp, Homo sapiens
atgaaggagagctttagaaagatgtgtttgttgtctgtgtgcttcattgcaacagccctgccacactaggaggaagacaggttttgggtcctgtcttggtgataaagataaaactaaaggacaatcaaatctcatcaaacttctctctgaggtaagctgttgaatacaatattttattgaatataataaaagcaaagagaaatgtcaccaataatgataccagaatgcatcctgtatttccattaatgaggaaactgttctggaattaatacatggaattgattgtatggtatattgcctatttgcagtgtcatcccatgccattatctaactatttacagaaaaaaaaaagaaaaaacttctatgtaaaagcaaggaaaatgagagaaagaataatttcaaagggggatctaatttcagatgatgaatgccagctgtcaatgaacctataccgactgtgtttttgataaaactaatagtccaagcacctagaactgttacccctttaattgttgatccctcattttttaaatcataaatatgagtggctacctgcctccttcacaaggtcgtggtgagaagcaaattgatgccagtgccattttttccacctcaattccttgggttgcacaattttgtgggaatttcctgggaaaacttcaaagcaatttaaatagatctgtcccaaccatgcaattacaggagctgatgacgtttcagaaacagtgacaaagttcagaatcccattcttccatcctagatgggaaacatcaactttcctgatggtgagtttgtcagagtccattcccaagagtgggggtggggaggtggggctgaaaaatgtgtcaggtgtagataacaggtatgttatctatatggttgaataatggggagagaagtta

SEQ ID NO: 28935 - DNA, 1691 bp, Homo sapiens
atgaaggagagctttagaaagatgtgtttgttgtctgtgtgcttcattgcaacagccctgccacactaggaggaagacaggttttgggtcctgtcttggtgataaagataaaactaaaggacaatcaaatctcatcaaacttctctctgaggtaagctgttgaatacaatattttattgaatataataaaagcaaagagaaatgtcaccaataatgataccagaatgcatcctgtatttccattaatgaggaaactgttctggaattaatacatggaattgattgtatggtatattgcctatttgcagtgtcatcccatgccattatctaactatttacagaaaaaaaaaagaaaaaacttctatgtaaaagcaaggaaaatgagagaaagaataatttcaaagggggatctaatttcagatgatgaatgccagctgtcaatgaacctataccgactgtgtttttgataaaactaatagtccaagcacctagaactgttacccctttaattgttgatccctcattttttaaatcataaatatgagtggctacctgcctccttcacaaggtcgtggtgagaagcaaattgatgccagtgccattttttccacctcaattccttgggttgcacaattttgtgggaatttcctgggaaaacttcaaagcaatttaaatagatctgtcccaaccatgcaattacaggagctgatgacgtttcagaaacagtgacaaagttcagaatcccattcttccatcctagatgggaaacatcaactttcctgatgatgctgaaaaagcaagatactcattttttccagccacccttgcagagccagaaagcccatgagattcaatagatgtaagactgagagagattttcattcctggatgaaaggagacaggcctgggagaagagttttctcttgccatctttgcagtctctccactcctgacgtgtacagggtcagatttctgttggctgctgtggcaaatgtcacacacttagtgacttcaaataacccagatgtatcatctgacagggtggagatggccccagtgagatgaacctggtatctcagttggaaatgcagaaatcacccgtcttctgcgtcgctcacgctgggagctgtagactggagctgttcctattcggccatcttccgctttaagttttttataatctttttgggaaggaaaggccatgtgaaaacatggcgagaagacagtcatctgcaacccaaggagagagacttcaccagacactgaccctgctggcaccttgatcttggacttccagtgttcagaactataagaaataaattcctgttatgtaaggtgcccagtccatggtattttgttgtaacagcctgagctgttgaagatggattttcctttcaagatcagatcttgggcctcagagtcagcctcactatagaaagcaagggctagtctcagcttcccacagaagacttggttttattggaggcaagttttgtcttgcttacaatgaggttatacaaagcataacaaaattcacattttgttaagtgactaccatatgatcactctgaattttattttacctgtcatttctcggtatcaataggttttacttccccttgttctggatttcagtgattgatgactgaatacaataaatatttattgagcgccttttatgaggagatatt

SEQ ID NO: 28936 - DNA, 1466 bp, Homo sapiens
atgaaggagagctttagaaagatgtgtttgttgtctgtgtgcttcattgcaacagccctgccacactaggaggaagacaggttttgggtcctgtcttggtgataaagataaaactaaaggacaatcaaatctcatcaaacttctctctgaggtaagctgttgaatacaatattttattgaatataataaaagcaaagagaaatgtcaccaataatgataccagaatgcatcctgtatttccattaatgaggaaactgttctggaattaatacatggaattgattgtatggtatattgcctatttgcagtgtcatcccatgccattatctaactatttacagaaaaaaaaaagaaaaaacttctatgtaaaagcaaggaaaatgagagaaagaataatttcaaagggggatctaatttcagatgatgaatgccagctgtcaatgaacctataccgactgtgtttttgataaaactaatagtccaagcacctagaactgttacccctttaattgttgatccctcattttttaaatcataaatatgagtggctacctgcctccttcacaaggtcgtggtgagaagcaaattgatgccagtgccattttttccacctcaattccttgggttgcacaattttgtgggaatttcctgggaaaacttcaaagcaatttaaatagatctgtcccaaccatgcaattacaggagctgatgacgtttcagaaacagtgacaaagttcagaatcccattcttccatcctagatgggaaacatcaactttcctgatgatgctgaaaaagcaagatactcattttttccagccacccttgcagagccagaaagcccatgagattcaatagatgtaagactgagagagattttcattcctggatgaaaggagacaggcctgggagaagagttttctcttgccatctttgcagtctctccactcctgacgtgtacagggtcaggaaaggccatgtgaaaacatggcgagaagacagtcatctgcaacccaaggagagagacttcaccagacactgaccctgctggcaccttgatcttggacttccagtgttcagaactataagaaataaattcctgttatgtaaggtgcccagtccatggtattttgttgtaacagcctgagctgttgaagatggattttcctttcaagatcagatcttgggcctcagagtcagcctcactatagaaagcaagggctagtctcagcttcccacagaagacttggttttattggaggcaagttttgtcttgcttacaatgaggttatacaaagcataacaaaattcacattttgttaagtgactaccatatgatcactctgaattttattttacctgtcatttctcggtatcaataggttttacttccccttgttctggatttcagtgattgatgactgaatacaataaatatttattgagcgccttttatgaggagatatt

SEQ ID NO: 28937 - DNA, 444 bp, Homo sapiens
tgtgggtatataccttatgtggaattgttgaatcatatggaagttctatttttagtttttgttgttgtccctttgttttcttttttcaaaaatttcagttgtttttgggatacaggtggtttttggttacgtagatgagttctttagtggtaaattctgagattttagtgtacttgtcacctgagcagtgtacggtatactcagtatgttgtcttttatccttcacctccttcctaacctcccctcctcctgagtccctacagtccattatatacctctgtatgttttgcattctcatagcttagctcccacttataagtgagaacatatggtatttggttttccattcctaagttccttaacttagaataatggcctccagttccatccaagttgctgcaaaagacattattttgttcctttttatggctgagtggtatttca

SEQ ID NO: 28938 - DNA, 389 bp, Homo sapiens
ccttttcttgattggaaacctgtataaatggagaagtagagggttaactttttaagccagcattcggatattttcattgttgttttaattatttttattaaaaaacgtaagtagagggtctctttgtgttgcccgggctggtctcaaaactcctgggctcactccttggcctcccaaaatgctgggattacaggtgtgagccacggtgcccaatgtgcacgttttcattgttggaaaaaaggcttggctgggtgtacccagcctgtaatctcttggggaggccaaggtaggaggattgtttgagcccaggagtttgaggctgcagtgagctatgatcatgccactctagcctgggcaacagagtgagaccctgtctcaaaaaaagagaa

SEQ ID NO: 28939 - DNA, 574 bp, Homo sapiens
  misc_feature (21)..(21): n is a, c, g, or t
ctagaggatcccccgcttgcngtcttaactattttggttttggatgcaattttttttttttgcaagattaagtcatgagcctgttttggtgaggcttggttaaaactgggtaataaaatctacaaatctatgtaattaaacacaagtgaatacatgctgtgttttgattgtgtccctcaaatttcatgtgttggagacttaatccccaaattcatatgttgatgacatttggaggtgatagtttttacactaataatgtgattgatcatgtacttcttgagtttcttgttaatgatggaagatccacctttattggtcaccttctggaagtggtgttaaagttactggtatataaccaggttctctcaagcattttcaaagtaacaatccactggtgagtttttccttcccagtgtgatttatttgttcagtaattcagtgtctactgcattttattttcaaatatgtttatatctatttctctatatctagacactaacattttatcagcatatatatcttaagaatcatgtatgttcaaggcattattcttagttctgttagggaacagcaa

SEQ ID NO: 28940 - DNA, 606 bp, Homo sapiens
ttgcttttctttagaatttttccatgttaaaaaaacttcctaattgtgtgtaggtggcagatcttagaagatgtctgctaagtcaacagtgtctttctatgctgtaagccttatctaaaattaatacttcgtttactttagataaaatgctctgaaatacatttttggaagcaaagctttttgtttggagacaaaacacaaaccttacagccatttattttattacaagaagtaaatatatttagtttatgtagtacacaaaggaggtgatagtttttacactaataatgtgattgatcatgtacttcttgagtttcttgttaatgatggaagatccacctttattggtcaccttctggaagtggtgttaaagttactggtatataaccaggttctctcaagcattttcaaagtaacaatccactggtgagtttttccttcccagtgtgatttatttgttcagtaattcagtgtctactgcattttattttcaaatatgtttatatctatttctctatatctagacactaacattttatcagcatatatatcttaagaatcatgtatgttcaaggcattattcttagttctgttagggaacagcaa

SEQ ID NO: 28941 - DNA, 1249 bp, Homo sapiens
ctatagtagacacaaaaactataatatctttaaatgttttctctttatttcttaacttcattgaggaaaaactcatattctagacagatattcccattggtttcacttagttgctctagaatttctgaataacttggtaaatagcctggaattttattttttaattgttctttacacaaaacatttatttttcattacagtttagtgaacagtttactaaccataataataatacatttaacttaattatgtatattcaccaaaagtagtaattgagaagattaatcctcctttatttcaagattttactttatttgtatttatttatttgagacaaggtctcactctgtcaccaaggctagagtgcagtgctgtgattataactgactgcagcctcaacctcctgggctcaagagatcctcccactgcagcctccctagtagctgggactacaggtgtgcaccaacacacccagcttattttttattttttgtagaggtgaggtttcaccatgttgcccaggctggccttgaactcttgggctcaaaatatagccttggcctcccaaagtgctatattttacgttttaaagatgtcaataaaaaatctaaaataggccttttgaatgtaggttttgttgaaacagaagaaacgaaaattatttaataaaataaaataggcctggttgcccatttttttaaatatacttaaatgtaaaggatagataagaaagaacaaaagaatgaataatgagtgaaaaatctttaacctctgcaggcctagatctgaaaaaaaaaaaaatttttttaataaaattaaaataaaattttacaaaatattttaaccactatagttttgagatcttgtggtttcccatccaacatgtaaagaggttggaagttgtactcttatcctcaccaaaaaaaagaacaaactgaaaatcaacagctcttcttagatccatcaaagaatgaagacacgggacagaccactgcccccaaaaccagaacagacaaatacagagaatcacagattactgagtagaagccgcagctagagccagcaactggtaggaacacttcaagggcgattgactaattgctagagactgagaatgagactcgtttaaaacattaagaactcctggaggcccagccttagagtacctatcaagttctcagggtcaaaagctgaggggaaaatgcccttgtgtttctgtgtgtgtagagggaagagagtaaacatttta

SEQ ID NO: 28942 - DNA, 371 bp, Homo sapiens
ctgcagcttctctcttaaacacagcattataatgcttgtatttgtattctttcaccacttagctttcagttaatgcacattatctgaaaactttgttatataatccgcaatctttcctccaatcccaattactgcaattatccttccatttttacctgaatgatggagtaaaaatccctgctcttcagcttcctcacttcttcatctcctttatttttcatctccattctacctctgatagaacggagatgaaggccgggcgcggtggctcacgcctgaaatctcagcactttgggaggctgaggcaggtggaccaccaggtcaggagatcgagaccatcctggctaacatggtgaaaccccatctctact

SEQ ID NO: 28943 - DNA, 1575 bp, Homo sapiens
  misc_feature (2)..(2): n is a, c, g, or t
  misc_feature (5)..(6): n is a, c, g, or t
gncannaggctttccatagtggagcctgggctactctgaaatagaagcacctctccttcctttggacccctggagcactgtgttctacagttcttagctctttttctgtgtgcattatttgtatgtcttatccttggtggtcaaccacttcaaggtgagagactggggtggtggttccttttttttattttttaatctcccctgccccatctttctctttcccacttcctatgttgactgacaaaatcttcgtatttcccagagtaccagagtttttctgtgagaggctaggtcagtgtttctccccaagcagaggctaagaagtacctgatgcagtcatttattttcagaatgtgtgtagcttgcctccagcggattgcctgggaagctggagatgtgcttcaggggaaaggtggtccatccacttttcctgaacaggctgtgcatgcagccttgacatagccaactctgcaggagcatgaaagaactgaagatacagtattcgacttccagtatttctaatcactttagagacaggatgacgattggtttagaagagccaggggatgactaaggagcacatgtaaaacaataatgttcagtatagactttagtttctgatttgaaacattttctaaaaaatcatgtatctttaaaaaattggaagcagctcagtgtttgctggagatgaggcatagagtgtggtggaagggagggatgacaaaggggcaggcagagactttgagggatgaggggtgtgcacatcaccttgctggtggggactgtttcatggttggatacatgtgtgaaagcatatcaaattgcatgctttaaatatgtgcagtttcctgtgtatcaagtatacctcaataaagtagttaaaaatggtatacctttattatgctgaaagaagggaaaatttggaaaggagatgtttttctgtagaagatagcttctagaaaggaaaatcaaacacagtctaagttattctctgttttgttctcctccctccacagatgtcttgttgttttgggtcctcttatctaaaatttcacaatatgtgaaagtagcctgaactctaaaggtagtagttgtggttttgggaaactgtgtgttcgtactgcctctgtaaatggaacacaagcctctcctaccctctggggagcttgtcacttagtacagttttttaggaactcctaagaagtttaagttctggccacaggtcccagagttaaggatgttgtcaactctgctactcatttgaaaaatgtcttgtggaacctatagccgcagaaagagctttgtttctctgggtgaaaacaacatacattatcatttctaataactttaatggatgctgctgctttcttctttttggcccccaagatactcagagataaacttgaaactcaactataggtggggggagggggaagggatagctttaggaaatatacctaatgctaaatgacgagttaatgggtgtagcacaccagcatggcacatgtatacatatgtaactaacctgcacattgtgcacatgtaccctaaaacttaaagtattatgataataat

SEQ ID NO: 28944 - DNA, 835 bp, Homo sapiens
tgttgggggagacagtggataaggcaagaggcactgtacaaaagacagcatgtgaataaagccaaggagacctgaaggagcacaacataatcttgaagaggaagtgggttggttagctgcgatgaaagacatcataaggggaaaagtaatgggagatgaagctggaggtctaagttgacataagatataaagatgaagggcttatacttcagattgaaaataggattttatataaaccaataaaaaggaacaatccacaaggtttttaattagggtagtgacataaccaggtttatgtttggtaacaactcagcaaaagacagaatatggcccagagtacagaaaagtcagaggcagattaattagctaaggagattacttactaccattctctagtcaaggaatgaactaaactagcagcaatgtgcataacacaaagatagaactgagcggacttaggaattaggaaggaaaacaattctatacgatttggtgataggctgactatggaggtaaagaaggggtggaagaggactatgatatttctaacttggggaattggggtagacagggacagcaccatccaagaaagtaaatacaagcaaaagaggtttgtgggagatgttaatgagtaattacataaatactcagtttgaaagacctcagggacttatactgctaaccactcagtctacaacttaatcatatgctgaattattttgatgtgtttaagtagatttctcaaccaatcacaaaacttcgaaaaccttgtattttatttctttcataacatcactagtgtataaaaagccttcattgaggatggtccgcacag

SEQ ID NO: 28945 - DNA, 1402 bp, Homo sapiens
gtctctgcccatccgcgcacccgggcttcggctggagagggccagctcgcttcaggaggccgaaccccgttcccaccaaccctctcagctcagacgcggggtgctgagtcacggggggggggtggttctgtggatagttggaatgcatacacagaggaaagggggatgcggcaccagcagacagagagacaagaccccagccagcccctgtccaggcagcatgatgaactttgaacaggcacataccgccagatcttccatccagagcagctcatcacaggcaaggaagatgctgccaataactatgcctggggccactacaccattgggaaggagttcatcgacctgctactggaccggattcggaagctggctgaccagtgcacaggacttcagggcttcctggtgttccacagccttggtcggggcactggctctgacgtcacctcattcctgatggagtggctttctgttaactatggcaagaaatccaagctgggattctccatctacccagccccccaggtgtctacagccatggtccagccctacaactctatcctgaccacccacaccaccctggagcactcagactgtgccttcatggtggacaacaaagcaatctatgacatctgccaccgcaacctagacattgagcgcccaacctacaccaacctcaatcgcctcattagccaaattgtctcctccatcacagcttctctgcgctttgacggggccctcaatgtggacctgacagagttccagaccaacctggtgtcctacctcacatccacttccccctggccacctatgcaccagtcatctctgcagaaaaagtataccacgagcagctgtcggtggcagagattaccaatgcctgctttgagcctgccaaccagatggtgaagtgtgatccccggcacggcaagtacatggcctgctgcctgctataccatggagatgtggtgcccaaggatgtcaacgctgccattgctgccatcaagaccaagtgcagcattcagtttgtggactggtgccccacaggctttaaggttgatatcaatcaccagcctcccactgtggtgcctgggagtgacctggtaaagtgcaacgtgccatgtgcatgctgagcaacatgacagccatcactatggcctgggcccgcctggaccacaagtttgacctgatgtatgccaagagggcgtttgggcactgatatgtgggtgagggcatggaggagggtgagttctccaaggcccatgaggatatgactgccctggagaaggattacaaggaggtgggcatggatagtgtggagtgtggggaagaaaagataggggggatgaatactaggggaatactgtgtgtctgtcctacataaagtgctgtggccttattgtct

SEQ ID NO: 28946 - DNA, 1297 bp, Homo sapiens
gcgagtataaggaggaggctggctggccgctgcaggcctctcacagatctatccctgctcactatcctgcagcagacagagagacaagaccccagccagcccctgtccaggcagcatgatgaactttgaacaggcacataccgccagatcttccatccagagcagctcatcacaggcaaggaagatgctgccaataactatgcctggggccactacaccattgggaaggagttcatcgacctgctactggaccggattcggaagctggctgaccagtgcacaggacttcagggcttcctggtgttccacagccttggtcggggcactggctctgacgtcacctcattcctgatggagtggctttctgttaactatggcaagaaatccaagctgggattctccatctacccagccccccaggtgtctacagccatggtccagccctacaactctatcctgaccacccacaccaccctggagcactcagactgtgccttcatggtggacaacaaagcaatctatgacatctgccaccgcaacctagacattgagcgcccaacctacaccaacctcaatcgcctcattagccaaattgtctcctccatcacagcttctctgcgctttgacggggccctcaatgtggacctgacagagttccagaccaacctggtgtcctacctcacatccacttccccctggccacctatgcaccagtcatctctgcagaaaaagtataccacgagcagctgtcggtggcagagattaccaatgcctgctttgagcctgccaaccagatggtgaagtgtgatccccggcacggcaagtacatggcctgctgcctgctataccatggagatgtggtgcccaaggatgtcaacgctgccattgctgccatcaagaccaagtgcagcattcagtttgtggactggtgccccacaggctttaaggttgatatcaatcaccagcctcccactgtggtgcctgggagtgacctggtaaagtgcaacgtgccatgtgcatgctgagcaacatgacagccatcactatggcctgggcccgcctggaccacaagtttgacctgatgtatgccaagagggcgtttgggcactgatatgtgggtgagggcatggaggagggtgagttctccaaggcccatgaggatatgactgccctggagaaggattacaaggaggtgggcatggatagtgtggagtgtggggaagaaaagataggggggatgaatactaggggaatactgtgtgtctgtcctacataaagtgctgtggccttattgtct

SEQ ID NO: 28947 - DNA, 646 bp, Homo sapiens
gagagccacccagcgagtataaggaggaggctggctggccgctgcaggcctctcacagatctatccctgctcactatcctgcagcagacagagagacaagaccccagccagcccctgtccaggcagcatggtgagtagaaggggccttggggggactgagcatgcaagtgagggtcccagtgggcccaagatatctggcgtgaaggtaccttgggagtccacatggtgatggggctacagtatgtggcgaggtggggagagggaaagagacttccagatgtggctgtggcccccaaatgtgcaggtgtggggggcatcacagggggtagggaaggaaagtttaatggtaaccaggttgtggggctgagcctaggctgagaagcagggctgctgagggggtctgaatttaggtgtggggagtgtgggggaagcaggacttgagcagaaagtgtaggcgatttcctctgctggctgaggatctccagaccctgggccttgccacaggttcactgttgggctctgatcccaccttcccaccatggggacacatcctccatggaagcttctcccctctggttcctccctccaccctgcccatctgctgtgcctttgtctgacctctcatgtcagttacagatcagtgggg

SEQ ID NO: 28948 - DNA, 361 bp, Homo sapiens
tgagacggagtctcactctgttgcccaggctggagtgcagtggcatgatctcagctgactgcaacctctgccgcccaggttcaagcgattctcctgcctcagactcccgagcacctgggattacaggcacctgccaccgcgcctggctaatttttgtatttttagtagagacagggtttcaccatcttggtcaggctggtctcgaagtcctgatctcgtgatccacctgccttggcttcccaaagtgctgggagagcaagtatgagcccctgtgcccggccaacttttttctataatttaaagtaacagtataggcatacttatcagcatagcaaatattatttatgcatacaataagttc

SEQ ID NO: 28949 - DNA, 461 bp, Homo sapiens
attttatttatttatttgtttttttttttttttgtgcaggaggccagaggaacttgtctggcaattatgagagtggatggaggaactgcctatccctgtcccatggtcttgtccacaggtcagcctcacaaagggaaagagccctggatgggaatacagtggaaggtcattctcttagtgacctggggacattggctcgagaggaagcctggcaggagtggcaactccagatgatttctgtgcctttcctctttcctgggaggtgggccaggccacagtgttagtgggaagggaactgaacagccagagtggttagagggagtgtctagggaaggcctagaggtggaggaagaagctgtgcaggacagggcttgccagtcagaatgaagtgggaggaagatgagggacacagagaagcagagagaggcagatacaccatggcagtgagcagtgagggagac

SEQ ID NO: 28950 - DNA, 387 bp, Homo sapiens
ggggaaagtgaattttgtttttctcctcaagtgcctaggcttggcaaccagcactctctaacattacgttgctcccagaggtggagagttaaagcaaatgtctcccagtgtgtggtggcagacacaaaataatagatccccaaatatcccagagagcttgggcctctactcagttccaaccacgtgtttgactgaataaattatattttatctttactatgagatattatataaccgttaaaaagaatgaattggaggtatgccagctgtcctagaaggtttttcatgagatgttggctgagacaagcaagaagagcgacaagagcgaaactccgtctcacaaaaaaattaagataaaattagcataattaaaattctttgtatcat

SEQ ID NO: 28951 - DNA, 272 bp, Homo sapiens
  misc_feature (268)..(268): n is a, c, g, or t
tgagatagaaagttggcccgggaagctcaaggagggagagcggcagaggggaagactctgcaattctgcttgccccctaccccggcccaggcaagccaccctgcccccggcccccacctgcccgccccgcctgcccttcctcaccccggtgcctgcgggattgctggagagaacgcggcgatggagccgggcaggacccagataaagcttgaccccaggtacacagcagatctttttgggaggtgctgaagaccaatttacgggcatnccct

SEQ ID NO: 28952 - DNA, 374 bp, Homo sapiens
gattccattaataggtagtctatgcaacaaactctactcaattaaagtaaaactaagtatttcttcattgtaccttagtccaggaagaaattaatggaatatggtgtgctaattatcactacctataacatgaggaatataacattgcagaaatttctcataggggcatgccagtgagcaattactttataaaaatattttccttggtgttaagtatttctctgcaacttttttttttttttttttttttttttgagatggagtcttgctctgtcccacccagtctggagtgcaatggtgcgatcttggctcactgcaacctgcgcctcctgggttcaagcaattctcctgcctcagcctcctgagtagctggg

SEQ ID NO: 28953 - DNA, 958 bp, Homo sapiens
  misc_feature (351)..(351): n is a, c, g, or t
cagttgtatagcttctttttgcctgtggacccaatatcagctgcatcctcctaatctcacttttgagtttattttggaaacaaagattggaagaagattttgctctttgttttcatttccattatttagctgatatttttcactcatttttttttactcataattgattccttatctaaggattaaaaagtaatttcctcagctctactcatagtcttgtatcattgtaatgtttttactactgattttttttaaaggcagagatagatgaataaaaataaggatttttacaaactgtgcaaccatggggtaaattacttgacgttgagtcaagaggggatccaatgttcntcacctggaatcacagggagtaggtaatagcacctgactcactgggttgttgtggggatggaatgaagggcattatgtaaagcaattagcaccttgctagaagtagtaagtgctcaatagaaggtagctattattataattgctttatattagattccgtttcagtaggtcaggggtggaggctgagaaccagtaccttgggtgatcctgaagcaacccatttctgctctaggcattattccctatcttttttaatattaataaagtaaaaaagattcatagacctcaaatatgatagtggttatgcttttcacatccagtgattaggaaacacataatggcaaagttgccctgaatgtattaatgctttgaaataaatttgtatcttttagttcagcataatagttatgtttgaaaatagtagtaggtatatgtcacggatattgtatatttagcccaaagacaatgcccatttggtatttaaaatctattttcataatgtatggagagattccttttggaccttgtgcctgccaggtcagaagtcagactacttcattcccaaagaattctgtggaacatgacagatcctttgcaaaaaaaaaaa

SEQ ID NO: 28954 - DNA, 305 bp, Homo sapiens
gtaatgctattttataagtagctggtctattttaggcaagtagttgaattaatagtgagacagtgtgaagacacctaagtgtcttctgtcactcacaggccctggaaggtgctttgacctgtgaatatcactgagacgctggaagccagtgccttttcctacaggaggagaggcaggtgctgcgggattggttgtgtttgcaaagtgatgactgtagctgacgtaagaattatagcctgtctctcatgagaagatagcttttcctttaaagtttttctcatagaacattgattatagaagataag

SEQ ID NO: 28955 - DNA, 332 bp, Homo sapiens
gcctgaggccaaggatggggtttggggtaccccccgaagggaacctaggctcctgtcccggatgggccgaggggatggaaccgcccccacaaccagctcctggggcacgggggagggatgagaagatgacctgaggggaagctcctgcagcctccttccagcctgggggctgcatcaatgtggctggtgagccgcgaactgagacgagggaagaaccgaaccgaggccacccagtaattcccattgtatcccaaaagaatcttgccaaagatggcgatccggtgcccgtagctttgagaagcagtaataacacaggctttgggaagccagca

SEQ ID NO: 28956 - DNA, 401 bp, Homo sapiens
atcacagcacactgacttctctgcaagaactcggaaagttagaagacaatgaagaaatgtctttaaagttctgagggaaatgatttctagaatcctctacgcagccatgttattaaccaaaagtgggagagaatacacttcagcaaaatgtggccaacatcccagccagaggacgggacaggaatgagggtggcctggatggcagcgacacagagagcccagactagagctggcagggaggaccttccagcggatggtcaggacccgggttctggccatgctctcagaaactgcgaggctgaattacaatcctagaaactaagcgaaatgcaaaacaaacaaaaaaaacaaacttgaagcaatttttaatttcaaggaaaacataaagttgtccaagaaag

SEQ ID NO: 28957 - DNA, 307 bp, Homo sapiens
gattcaaaccatagacttagactttgaaggccatctttttaacatggttccgtactgcaacctagaattattcttgccttttaaatgatagtatttcattctgaaataatcttcggctgatgctccattcttttgtgccaattcatgttcaaagacagtaattcccattatgtatgattgttcacgttgattctcatcccagcttggctgcttattagattggtgaccttggactagtgatttaatctctcaacaaatccatgtcctcatcttcaaataaaaattacagtatcttcggctgggtatg

SEQ ID NO: 28958 - DNA, 458 bp, Homo sapiens
aatattctcataggtactcaaagatgtatacacaatgctttcactgaagaactggaatacaaaaaaaaaaccctaattaaaaagatcaagccatataacaagtatgatcccattaaacatatatatatacacatatatatacacacacatatatacacacacacacacacacacacacacacacacacacacacacggataggctaggccccatggctcatgcctgtaataccagctactctagaagtcaagcctggctaacacagtgaaaccccgtctctactaaaatgcaaaaaaaaaaaaaaattagctgagcatgatggcgggcacctgtagttccagctactcgggaggctgaggcaggagaggcgcttgaactcgggaggtggaggttgcagtgagccaatattgtgccgctgcactccagcccgggtgacaatgagaggctctgtttcaaa

SEQ ID NO: 28959 - DNA, 776 bp, Homo sapiens
cacacacctgaaaccttggaaaacgatttgaagcttagaggttgaggtcaagtttaatacccaagtcaccgagaaggtggctttgctttttcagaggcctttgcttttcactgttgcaattgtgtgccatgcgtcgtctgggaatcagtgagtgcccgtggagtgaagtcccaatttctgggtgccttctggatgctttgtaaagaaaggtgttaggatacgttgtctacttgaaaattgcaggctgggcacagtggctcatacctgtaatcctagcactttgggaggctgaggtggatggatcacttggggtcaggagtttgagaccagcctggccaatatggtgaaaccctgtctctactaaaaatacaaaaattacctgggcatggtagtgcacgcctgtaatcccagctactcgggagtctgaggcaggagaatcgcttgaacctgggaggcggaggttgtagtgagccgagattgtgccactgcattccagcctgggcaacagagtgagactccatctcaaaaaaaaaaaaaaatttaaaaatttaaaaaaaagaaaattgctaagagattagattttaagtgttctcaccaaaaaaaaaaaaaagcctaaaataggtttatgaagtaatgcatatgtgaattagcttgatttagccattccactaagtgtaccaaaacatcacgttgtatgccataaatatatacaacttccatttgttaatttagacaattattttatttataaatttttaaaagaaatgcgttaggta

SEQ ID NO: 28960 - DNA, 470 bp, Homo sapiens
ggacttccgtaataaaagggaataaattactgacttgctgcaacacggatgagttcaaaaacattatactaaagaaaagaagccagatacaaaaaccacatatgaggtgattctatttgtacgaaatgtccagaaaaggcaaatctacagagacagaaagtaaattagtggttgcccagcactggagtgggaatagagatggtaagtgaacatgagggttattttcagagtgatagaaatgttctaaaattggttgttattatgatcaaacaaccttgtaaatttactaaaaattgttaacttgtacaatcataagaagtgaattttctgatttgtatattacacctcaatgaaaattttaagcatagtaaatgaacatcattccaagtatttttttctctgcttatacagaatgagagcaatagataaccttttaaaatgtgttcatatgaatgctactaattttagtc

SEQ ID NO: 28961 - DNA, 428 bp, Homo sapiens
ttttttgtttgtctgtttgtttgtttgtttgtttggagacggagtctcactctatcgcccaggctggagtgcagtgacatgatctcggctcactgcaagctccgcctcccaggttcacaccattctcctgcctcagcctcccgagtagctgggactacaggcacccgccaccatgcccggctaattttttgtatttttagtagagacaaggtttcaccatgttatccaggatggtctcgatctcctgacctcatgatccgcctgcctcagcctcccaaagtgctgagattacaggtgtgagccaccgcgcctggcccgcactcaccctgcttcttaactttttctgtcatcaggaaaatgagccacctggctcaagaagaaaaaaaaaaatctttgcttcaagcttccagtatctgactatgcaggat

SEQ ID NO: 28962 - DNA, 854 bp, Homo sapiens
cttgctgcctgtgtttggagctaattatttttggagaggaagaggggcagtgagacagccagcctgggcatgtggggaccaccacaaccacctcccccatgcactgacctatgaggcatgcagcaatgataaatggccctgatgacaaagcaggacagaggcctggcagtgtgatgctcaccactcctgcctgtcaactccaggctgaagatgccaaccccgttatgacagactcacttgccagcctgtgccatttgtattcctcatggcagttactcagtagctggcatttataggtctataaagaatataaggttatgaaaaacctgcttctaattttccatgcttttccctacgtcccatgttacagttgcccccccaaataatcagccaccagggtgcatggcctattaacagtcctgaggtgcacacttcaattaaagttctctctgccttcagtttaaatccctagccccttccacttaccagctgtgtgacttttggaaagttcttaatctttctgtgccttaatttctaattagtaaagtgggagtataataggaccctcctcatagggatgatatgaggattgaatgggttaataggaagcatgtaaaacagtatgtggtctctggtgagggcacttaagtgttggctgtaattatgttactattaatttgtgagttgagatttgaaggataaaaagatgcagccacagattcttacagacactaactctgtaaaccgataggaaaaacatcggcattaaaggagagtcattaacattaagtggaagaatgtccacttcttccctgcctgccctctccctgaaataaagaacagcttgacagaaa

SEQ ID NO: 28963 - DNA, 350 bp, Homo sapiens
taacattaacagctttattgtcagtagagccagaatacagaacacattgtaacctggacctgcaatcacaatcaagcttgctgccttcttcccggaatctagaccttgcaatgcatctgctgggtcgagtatttggcaaggcagatacttacttatctatttaggcagcctaccaaaagaaaaattgcttacccctcacttgtcaagcctcaagtgttgggaaagaatagtgtcacatgcaattggtttttaatacaggtattgcactcacttaagaaatggaaacaggctgggcacggtggctcacacctgcaatcccagcactttgggaggctgagatgggaggattg

SEQ ID NO: 28964 - DNA, 442 bp, Homo sapiens
taatagcagaatatttcatggccgaactcttgatagtgacaaatcagtaaatacaaccaagaaaaagaaaatgaggggtcagagttgcaataccccaaatgaaaaataacagttttttcagggctttttggtaccagaactcaggcacttggattttatgaccttatactttttctgcatctctctaaaacttgtgttttcagaccatcctgtgtatagagcaggagagtttctactgcaagtgacaatcagaggtgactatctatatttgcacttaaaatcaaagtagttcaacatgcaaatgctagggtctagccctgggtaagggccatgctggtgtactgtgttgtgatgatggaagcagtaaatcaaaattatggaaatttgcactgttgaaaagcatgctttagctttattttcaattaaaaacactgtttaaaat

SEQ ID NO: 28965 - DNA, 837 bp, Homo sapiens
tgattaaggtggattaaactgaaagaagtggtgggcgtctgaattggaattagaattaaatattaatagaaacagtagcatccactgcccttcacacacaccttcctgcccacttaccatcaggtgaagtaagctttagggatggtacatttattcagagagcaccttgcacaagcccagcagagtgcccagtgtggtgccaagagccgaatgaccagagatggttccagggggactgattcttcagacagggttctaaggacaaagggcaaaagccttccccgggaacacatgctgatggacatgttcagcccctcctgaggttcggggttaacgcgaaccaggtagaagtaatgtgtgccagggacaagagacgcacccagagcctctggcctttggtttcctattcctgggttcacaagcacattccaagtttgggactgtgtgttgggcaggtgagacctttataaggttcccatggctgtttctgcgtgagttggctgaataggaaatcaaaggacttctgtgctgttccgcagagcagggccctagttaaaattcctcacagatgatgctgactaggatggaatccctttgcctagtgcttaagagtacccaggtctggaattgagcttagtcaggtatgagcctggacaagtaactgtatctctcaaagcctgtttcctcagctgtaaagtgggggtgataatagtaggaaccccaggattggaattgctgtgagaattagagatgatgtgtaaaatgctcagcacagtgtttgggccaaagtaagctaactaccaaaacccagccatttataaaaacccaaccatcata

SEQ ID NO: 28966 - DNA, 505 bp, Homo sapiens
ggaactctgatagtctgacagcaccatctggacttggcagggatgacagccctgagatcagatggaactaaccaataaagctgctaaaattctgctgtcctgggcctatccggagtgggactcccgtaatctcctatttagaaggaacactgatctgcaaggggagagctggggcccttaatcattctgcagagctgataacggtcactgtggaggcaggactaggcgggtgcctggtttgcttagtcccaccttgaggtcccgagttccagtggtgtgccgaagtggtttgcactggcccatgagagtggattgttgaatttccaggaattttgtaagctggttggtaaacacagccacagtgaccattagagattatattaacctgcaattaaataaagtatgttaaaaacagtaataaatactcaaaactcatcacttcctaattattttactattatctatgttcttgaggatactgacatctattgtattggtatggtgt

SEQ ID NO: 28967 - DNA, 447 bp, Homo sapiens
gcaatgctaacatatatacatataaatccttaatatcatttttatttgtaagattatgttttaagcaaagtatattaaatattcattcataaggatagagtaaaagaagttatagttcatccctatggtacataaaatacattcccacatctctccaaataatactgggtgtctttatatggttgacatataaagatgttcctagtatatgttaattgagacaagcaggttgtaaaatgaccttctcttcccattcttctcatgttgtcctcaaaaaagatatacttcttttctttcttttttctttttctttttttgagatagacagactctctctgtcacccaggctggagtgctgtggcgtgatctcagcttactgcaaactctgcctcccaggttcaagagattctcctgcctctgcctcccgagtagctgggattgcaggtg

SEQ ID NO: 28968 - DNA, 1642 bp, Homo sapiens
tagttaaaaaagtaagccatgcaactgagataaaagtcaaagttatagattataactgtttgcacaactgttcacatttttaactttttttattttttggagactttttaagagtctcactgtgtcatccaggctggaatacacagtggcactatcatggctcaccacacccttaaactgcagggctcaagcaatcctcctgcctcagccccccaagtagctgggaccacagatgtggaccaccacccctggctacttttttaaaaatttttttgtagagacaatgggctcactatgtttcccaagctagagacaatggcctcattatgtttcccaggctggtctcgaactcctggcctcaagcgatcctcctgcctcagccttcctgaagtcctaggattacatgcatgagctaccacacccagcccctgctcacattttatatagtaacttattttaagaatagtaaagtatttgcaaaatagttttttaatacagtaatttattatatattgaaatcaagcttgatgatatttcattaggttttgctgagtgtcatatgctaagttatttgcttatgaatttttctccaattgcctgtatttggtaagtttgcatggaaagttctgacaggaaactcagaaatatttcattgttttaccctactatcttttttgatgtgtcttaaagttgatttgctttaaattgcagtatcatcctttttttctgtacctaaatgtttttaactgaagaacacaatttccctcaaaaccctcatccctaatttagagccctcttatattaatatgagtcattttaaatgtatttcctgaaacacttctcaacttcgtaaataaaaaagagatatatcttagtccattcaggctactataacaaaatagcacaattgggtggcttataaacaacataaatttatttatcatagttctagagcctgggaagtccaagagctgggtgccagcatggttgggttctgatgaggatcctcttccagattacagacttccagcttcttgctgtgtcctcacatggtggaaggaacaagtaatctctctggagcctcttttaaaagcccaccaatcccattcattgaggattccaccccagtgacctaatcacttcccaaagggccatctcctaatgctataaccttagaggttagggtttcaacatatgaattttgaggggacagaaacattcagcccatagcaggatgagaaaaagaaaggaaagtacaacaaagaacatcaaccataaggaacaccatgacttctgatatttaatatcatggatcacagattgtaggagtcgagaaacagaataaaaagacaaggcccaggcccagtgagcttttgatgcttgaggctcctcatgcccttgctctcccactgacctcagtgctcagcactggctttcttctcctggtgatattttccatttatcttttggtgtaaacattttagagatgagagaagtagggagcttatcattatttagtctgatcagacaatatcttcacttttaagttatgttcagaatttcattgtcctgttctttttaagaatcatatgagattatttttgtgtatgtgaataaactatgaagcattttcttacaaaaa

SEQ ID NO: 28969 - DNA, 424 bp, Homo sapiens
tctcactcgctctccagcatgcccatccttatccgctcacacattcacacacatgtatgcacgcacgcaactaccctgtgctgtgccagacagcagttactctggctcagcttatgtttttcgtcatgctgttctgagaaaaaagagaatatgtttggagagaccccagctgccagacagcagtgcttttcttccccccctaattttggccccataagtcagatctcaattttctttaccccttgagcagtgaaagagaaaggggcacacaccacaaaccagaaatgagacagaagcctggtgcagtggtgtgcacctgcagtcccgaatactcaggaggccgaggctggaggattgcttgaggccaggagtttgagtccagtctggacaacatagcgagaccttgtctctaaaaaaaaaactt

SEQ ID NO: 28970 - DNA, 542 bp, Homo sapiens
cttctctgtaaggggccggtgggggaaagctaaatccacctccagcaccccctgcgagatcacctaccacagagctttcaagcaagagccagcaggccacagcctggaccccgacgcagcagcctggaggtcaactgcgaaatggaagcctgcacatcattgatgacttcgagtctaaattcacgttccattctgtggaagactttccccctccggatgaatataaaccatgccagaagatttaccccagcaagatccccagaagccgtacacctggtccctggctccaagcggaagcagtcgggcagagctctgatgacatcaaaggcagaaattctcagttatctctaaagactcttcggtgagaagacagatgaagcgaaggtcctggggttccaggttgcagaacaacatgtcagaccccacccaccccatgctcaagctgtaattcagttggcatacaggcttggaattgagaatttatttattgtaaatatgtgatttgcacgggctttaaagcagtattttaattgacttttatt

SEQ ID NO: 28971 - DNA, 502 bp, Homo sapiens
ctaatgctaccctcataaaacgagaagtcttctctcctccttgattttctgaaggaatttatgtaggactggaatggtttattccttgagtttcaatgaaattaatcagtgaagccatctgagccacaagttttctatgtgggaaagtttataattattaatttttctttttaacgtaaggtttttcaggttttctatttctcattgtgtcagtttggtcatttgtgtcttttaagcgattagcctatttagcttaaattgttgaatttattgacatgtacttgttcataatacagtcatcccttagtataaggattggttccaggaccccctgaggataccaaaatctgcggaaatggtcaagtcccttatataaaatgatgtacatgtgcatataagctacatacactccattgtatactttaatttctagattgcttataatatctaatacaatgtaaatattgcttataatacataatacaaagttattatactcttt

SEQ ID NO: 28972 - DNA, 368 bp, Homo sapiens
gacacccaactgccaacaccttcaacttgatcttctggcctccagaattatgagaaaataaatttctgttgttaaagccacccagtctatactccttttttatggcagccctagcagaccaatataccgtgtgtctggggcagtgcctctaaccaagcccaaaatttctacagggaaatatattaattttcatagtaagtgggataaataaaatccataaatagcttcatggtagttcaggtcaagatactaagtttccaacacacagtataagagttatgcccaagagtctgtaatcccctcccctcccctgccctcccctccccttcccgagacagcctggcaacagcgcagactctgtctcggga

SEQ ID NO: 28973 - DNA, 168 bp, Homo sapiens
agtttctcaaaacatgctacatacctagtaaaattcatgcaattctaaatagataaataaatttagtctaaatgaagtcagtgatgccaatataatttttaaggtagcatcattgaaataataaaatctgggaaattctaatgcttctaattgaagactagaaggatt

SEQ ID NO: 28974 - DNA, 568 bp, Homo sapiens
tccggagtagctgggattacaagcgtgggctaccaggcctagctaatttttgtatttttagcagagtcagggtttcaccatgttggtcaggctggtctcgaactcctgtgctcaagcaatctgcccgcctcagcctcccaaagtgcggagattacaggcgtgagccaccgtgcctggccaatttttaaagaaatcaaacatttaaatgaagccagagtcctcgttcatcactacccttatcctgtcctgcccactcaggcagtaaccaccctcacaccaaggagaattttccttccagcacattcttacacattttttatggagatctgtctatctacatacaacataaagttttgtacagttttcatggtttcatatggtgtagagtgctggacatttttcctccttgacatattgtttttgagatacattatttgtacaggttgagccaatgatttgtaactgctacatgcagaggattatttcctcctataactgtaacataggtgttcatctatttcccaatggagctcgagctggcttatttcctaagcttttactgacataa

SEQ ID NO: 28975 - DNA, 413 bp, Homo sapiens
ctgctgcatttaaagtagtggacttagagactacaaaagatgggagagtgggggggcggtggtgagggttgaaaaatgacccttgagtacaatgattgctgtttgggttatgggtgcactaaaagcccagacttcacctctatgcactatatgcatataagaaatccatacttataccccctaaatatatgtaaaaaaaaaagtagtagactttagattattcattaaggcataaaatagctttccttttgtctttatagtaatccttagactgtgtgtgtgtgtgtgtgtgtgtgtgtttgtagaagcaaatgtatatatatacacacatatatatgtgtttatatatgatttgtaatggatttatgatgactaataaaatatatataaatatatgttccatgatttggcaa

SEQ ID NO: 28976 - DNA, 869 bp, Homo sapiens
atatcacgtcatgtctgggtatgcctttctcctccctcctaggagtttgcctggttctcactccctcaaagtactctatgatcaagtttctttggatccatgtttattgcacagtcaaatctgttgatattaatcacgacatgttagttgatcagggaagactcatttttttctagatttaggattgttatccggctgtgtccactgtttaatggtgatgtttgtaattctgtgtgcctagcaaggtctgtaggatcaaactacaaacttctggtagtatgtgtagcactatgcaaatacaaggtagtaataatgctgttactgtcactgtccttgagacatatcttgtgaatttcaggggattaagacagatgactgaaaagttgataatctgttgaataaatctttaatttagagcttgctctgtgctatgtaatgaaaaaaagacaacgaagatatagggggtccttggtttagtctgagtattattttagtggagccacatcttaagtaagttcagctatagagatttagttaatagaaataagatggtggttgaaagagaagtctgattttacagcagaatagtatagtaatttcctgctctgagtccatgccagaatgccctggagtgagaatgaggtgtgtgggagtcatgaatctgctttttccttgtgcactcaatttttctgccactgatgttgggtcagtcttgctgttgtgaatattttgggtaaagcatggctcctaagtataacaaaaggaaggcataaaaggaaagctggctgcatagacagtttattgagagaagatgttagagtactgaactttacaggggacttcaggaatttttgagggaaagatccttt

SEQ ID NO: 28977 - DNA, 759 bp, Homo sapiens
tgaggagtgtgtgtatttatgtgtgttttgtgtttatgtataaaattatgtatatatatgtacatatgtgtgtacatctatcttaatgtgtatatataaatatatatctatagctgtacatatgtatacacccataaacaaagctcatagtttaaaactttggaattttcagtttggagaacttattattattacaatttatatttggtttcctagacggtctaatatagttctaatttccaaaattctcttccactaaaagtggatatatttatttatggtgccgagaacattaacaaaatatttagatttaatatctatgaataataaaccaaaaaaagtgcatttaaggaaacaccaaacttgtaaaaactggctctcttatccaaaccatttgttggaatttcaaactacatgttttcacacttcttcattccaaaaaaaaaaaaaaaaccaaaccagaaaaaacccaaaacactaccaaatgaacagtgataatgtttaagaagaaaaagaaaaatgtaggtgtatgatagcacaaattcaatggttattgccctagtggtgcttcacttacctattggttaatttattatatcctggttaatttcactttatcactgatgagggttcctgtgtccctacatgatttatcggtggagctaattatctatttatttaaagctatagtaaataatttataatatgcatattgtaaatagatactaaaagtcatgggcacattgtaataatcacaaa

SEQ ID NO: 28978 - DNA, 464 bp, Homo sapiens
gccactggtaattcaccatatttacagaatgaagaagaaagatcatatcatttcaatagatacagaaaaagcatttgcaaatgtcaaaacccttttataacaagcactcttagcaaactaggagaagaaggaaaatccttgaacctgatgagggagtctctcaaaagctaccagatgacatcctgctcgatggggagctgctgggcgttttcctcctgtgaccaggaaggggcgcctgccctcaccactgccacccagtctcattcaacacagagtttgtcccctgttagaaaccgagacgttggttacacgtggaggttgggagtggctcaggcaggcagaggggcttctgggaacctggccatgttccctttcagtctgggcgctacttagagcagggggcagttgcttcaataaaactttagattcccacacaggccaggcgtggtgctcacacctgtaat

SEQ ID NO: 28979 - DNA, 224 bp, Homo sapiens
gtaaaatattcctaaattttcatatggtcactacttaatgcagtgattaataataatttcttctaaatccatgctttggcagccaccctaaaacccaactgatgtgagtgaacaactaagcttaccatctgcctacctacctgtctgtctatatagagagagaaagcaacctatagtcacttaagtgacataatgtatgaaagaattcctataccgtggctgtt

SEQ ID NO: 28980 - DNA, 274 bp, Homo sapiens
cttccattcaagatctatgaagaagatccagatgaccagaaccagtgattcccatgctttatctgcaatatgtcattctttatttccctagctattttctctcctctttgttaaagtttctgattgctaacagaaagttattatttcttaaacataatatctgtacggttcccatccttaataatatttcggcatgtttacatacttcttggcctgattccaatacctgccagcagttttattgcaatttggctaaagaatacaatcaaactga

SEQ ID NO: 28981 - DNA, 649 bp, Homo sapiens
atatagaattccattcaatgatttttgcaatttgatcagcttgaagatgtggataaaggaaatcttcaaaaataaaactgtctagtgaagataaaagcatataatgtaggatctgcagcagcagccatcattagctattgctcttccctacgaactgaaaaaaagctgcagacttccataccaactgacagaatgattgcttccatcccaagcctctgtggtgcagatgtaaatagtaaagtcatgtaaatagcattaagggaaaatttcaacattctctacatttatcacatttcctcattttagagaattcatgagtattaaatgggttattatgaaaaatgttcattctcagtgatcatcagagtgtggcgaaattcatggtgatgagattaatgtctgttacctctgttttttccacaagtgcaccactgagctttagtgtacatttttcttgtttgttttcctctttgccattccactccagtcacacaggcttcctgcaatcatctattcaatatgcctggacagaggtatatgatgtccagttttctatgacccaacgtcagcattgggaaaccagttatggcgatgctgagcagagagagggattcatgcaggtaacccagattaggacaccccctttcaa

SEQ ID NO: 28982 - DNA, 710 bp, Homo sapiens
caaataagaaagactgaaatggtagatttcaaattttatacttaaaagctataattaatatagaaatattttgtttttattttagacagtcttttcacagaaaaaattagtatttagaagttgggatctcgcataggtatgagtagaactgacttacataaagtaatccttaattttttatgagtttagccattttttatacattgcatcattattgccgtattttctaaattatgaactgcatatatttgctttcaaagaagtaatcattatgtgtttgagtagtatagatagctcttcccaggtatcaatagccaaatttgacatgatactgtaatttactagcctttttagaggaaatataatgtgtagacagagcttttaaattatttcccctgtatttaatttggctttttattcctgttgttttaaagtatatgatgctataattccagattatttgagagtgtataacttaatgggataacttgctcagaaatgtttttggtcacatagttttgtttatctggaaacttgtgagatttaaaaattttcggctggatatggtggttcctacctataatactggtgatttgggaggctgaggtgggggaattgcttgagcccaggagcttgaggctggagtaagctatgactgtgctactgcactccagcctaggccacagagcgagactccatctctttaaaga

SEQ ID NO: 28983 - DNA, 384 bp, Homo sapiens
gttcaagcaattctcctgcctcagcctcccaagtagctgggattacagacatgtgccaccataccgggctaatttttgtatttttaatagagacagagtttcaccatgttggccaggctggtctcaaactccttacctcgtcatccacccaccttggcctcccaaagtgctgggattacaggcatgagccaccgtgcccggcctaaaatgttttcttctactgagtaggccccagaactaaggctgaggtgatcatgtggggagggactgcaagcaggggtaaggacaatgcaccaggtaccacttgtcattgttttgtgagctgcttgtgtatataatggttatcagtctttatttattaccccaaactgactcctgaaatac

SEQ ID NO: 28984 - DNA, 680 bp, Homo sapiens
gttgcatttagcaaatgtttgctaattgtgaggctaaatcgtctcgcttcccagtgattagagaagcctgggcttcccagtgcccaggaaaccaaggagagttcccaaaccctcacgtatcctttgagtaacttgccaacttggggtgatgaaaacgcactcccctcctcccgccgccgctgggtcgggctctgaacgcacgagcctcggagctatgaggtcatacacgggtcacgtggccgctgtcgcatctgtcaactgtgatacaattactaagactgtccggacattcaaacctgctctctcctcctcctccctctccggtacgccggcccttttcacaccaagggaccgtctcaaaagtctaggctccaaatgctacgacgtaagaaaggaggagaaagagggaggaaaaaagtcgaagactacacttctcgttgctgccgtttgaaaactatgcctaagccccgttatttaaaatcctttctgccaaagcaagttggcatatgtattaagagccttttaaaaatcgtcatattctttaactcattaattcctgttctaggatgcttgcatatggaaatagtccaaactagagcaaaggtttacaaaattcactctcttattattaaactaactatatatgatgagaatgaataaatcaggtataaaaaaaaata

SEQ ID NO: 28985 - DNA, 439 bp, Homo sapiens
gctttttttcactgagcgtaattttctggagatccatacaacttgtgactaacagtagtttgttcctttgcatttgtgtatagtattccatgatgtgatgtactgcagcttgttgaaccattcattcattgaagaccatttgggctgttcgagtttttgcatcacaaataaagctgctatgaacatttgagtacaggtttttgtgtgagcttagttttcatttctctgagataaatgccctggaatacgtttgctgggatgttttgttttgtaagacactggccagactgttttctacaatggctggaacattttatatttacaccagcaacgtacaaggtccagtttctctgcatcctcaccgatgtttgatgtttatcactatttttttattttagcaattctgatgggtatgtactgatactttattgcggctctc

SEQ ID NO: 28986 - DNA, 2765 bp, Homo sapiens
ctaggcctcagtctgtctgcatccaggtgcttattaaaacagtgtgttgctccacaccgcctcgtgttgtctgttggcgcgctctccgggttccaaccaatgcaagagccttggggctggccctgaaacctgcgaggggcttccgtccacgtccccagtggacctaccacccctccatctgggaaagcaggccacagcagccggacaaaggaagctcctcagcctctagtcgcctctctgtgcatgcacatcggtcactgatctcgcctactggcacagacgtgtttatcggccaaactgaccctcacaaaaagctaccaccgaagtggacaggcccctacactgtgatactcagcacaccaactgcagtgagagtccgaggactccccaactggatccatcgcaccagggtcaagctcacccccaaggcagcttcttcctccaaaacattaacagctaagtgtttgtctgggccaatttctcctaccaagtttaaattaaccaacatttttttcttaaaaccaaaacacaaggaagactaaccacgtgcttccaggaatggcctgtatctacccaaccactttctatacctctcttccaaccaaaagtcttaatatgggaatatccctcaccacgatcctaatactgtcagtagctgtcctgctgtccacagcagcccctccgagctgccgtgagtgttatcagtctttgcactacagaggggagatgcaacaatactttacttaccatactcatatagaaagatcctgttatggaaacttaatcgaggaatgtgttgaatcaggaaagagttattataaagtaaagaatctaggagtatgtggcagtcgtaatggggctatttgccccagagggaagcagtggctttgcttcaccaaaattggacaatggggagtaaacactcaggtgcttgaggacataaagagagaacagattatagccaaagccaaagcctcaaaaccaacaactccccctgaaaatcgcccgcggcatttccattcctttatacaaaaactataagcagatgcatcccttcctaagccaggaaaaaatctgtttgtagatctaggagaaccattgtgcttaccatgaatgtgtccaattgttgggtatgcgggggagctttatgagtgaacagtggctgtgggacgggatagacattcccccttacttacaggcatcccaaaaccccagactcactttcactcctcaggaatgcccgcagtcctggacacttaccaacccagtatgagggacggtgtgcatatcccgcaagtggactgataaaacccatcgcgccgtaggtgaaaacccgtcaccaaaccctaacagtcaatgcctccatagctgagtggtggccaaggttaccccctggagcctggtctccttctaacttaagctacctcaattgtgtcttgtcaaaaaaggcctggtactgtacgaacaccactaacccttatgccgcatacctccgcctaagtgtactatgcgacaatcctaggaacaccagctgacaatggactgccactgacggattcctgtggatatggggaacccaggcttactcacagctaccttatcactggcaaggtacttgcttcctaggcacaattcaacctggattctttttacttccgaagcaggcgggcaacaccctcagagtccctgtgtatgataaccagagaaaaatgatccttggaggtaggagggagccaaagattgtgagaggacgagtggcctctgcaacggatcattgaatactatggtcctgccacttgggcagaggatggttcatggggttatcgcactcccatatatatgccaaatagagcgattagactacaagctgttctagagataatcactaaccaaactgcctcagccctagaaatgctcgcgcaacaacaaaaccaaatgcgcgcggcaatttatcaaaacaggctggccctagactacttattagcagaagagggtgcgggctgtggtaagtttaacatctccaattgctgtcttaacataggcaataatggagaagaggttctggaaatcgcttcaaacatcagaaaagtagcccgtgtaccagtccaaacctgggagggatgggacccagcaaaccttctaggagggtggttctctaatttaggaggatttaaaatgctggtggggacagtcattttcatcactggggtcctcctgtttctcccctgtggtatcccattaaaactcttgttgaaactacagttaacctcctgacaatccagatgatgctcctgctacagcggcacgatggataccaacccgtctctcaagaataccccaaaaattaagtttttctttttccaaggtgcccacgccacccctatgtcacgcctgaagtagttattgagaaagtcgtccctttccccttttctataaccaaatagacaggaatggaagattctcctcggggcctgaaagcttgcgggatgaataactcctcctcctcaggcccagtcccaaggtacaaacttgcaccagcagcaagatagcagaggcaggaagagagctggctggaagacacgtaccccctgaagatcaagagggaggtcgccctggtactacatagcagtcacgttaggctgggacaattcctgtttacagaggactataaaacccctgccccatcctcacttggggctgatgccattttaggcctcagcctgtctgcatgcaggcgctcattaaaacagcatgttgctccacac

SEQ ID NO: 28987 - DNA, 609 bp, Homo sapiens
aaaggaaagtcactccatggacaccagtgctccagaggtgcagaaaaattccagatttgtgaaaacgctaagaaaaaatggtgaagtctttttgtgggacatagaatgtaggtggcgggctgggagaggccatggaagtgcctggcacagccactgtcaagaatagagcagcaggaaaattctttcataaagatgtacagatcagaagctaactttatttcagacagagcagcagggaagtttgcagatagctggaagctcactccaaatagcagagaacaagtatgaggcagccattgtaaaccaaagtagaaaatctaagcaaaatctaacacagtaaattatcgttccaaatattaatatcataactttaaaaaaatgtttaacagctttattgggatatgattcacatattatacaattcaacccattaaagcatataattcaatggttgttagtatattcacagaattctgctattatcaccacaatcaattttagaacatttttatcactcctgaaagaaatccatatccattggtggtcattttccattccctcccaattcccacagtcctaagcaaccaagaatctactttctgcctctgc

SEQ ID NO: 28988 - DNA, 424 bp, Homo sapiens
tgagtatcagaagtgaaatttaacttcacacagttatgtgacaagactgtgctataaaaccatgactaaatccaaactgatccataggagggtaaaatgtccgttttcttcattaaaacttctcagctcaaatttatactaaagcatatccaggaattaaaaaaaaaggttttgatgatatttgctttctagtttaataagttttaatactgaataggttaaattaatacaaaataacataaaatgctaatatttattgagtatttactttgtacccactacgattttaagtaatttactgggattattttattttagtttaacaatgcaggtagctactataatcgtccctattttacacttgaggaaacaggctaagagagattaaattagtggcccaaggtcagaaagctcgtaattcttg

SEQ ID NO: 28989 - DNA, 963 bp, Homo sapiens
atgcttttatgtttcagatttgggaaccaatccatgaaaagagagaactttactctcatcactgactttgttttccaaggtttctctagcttccatgagcagcagatcaccctttttggcgtgttccttgcactatacatcttaaccttagcaggcaatatcatcattgtgaccatcatccgaattgatcttcatcttcacacacccatgtacttcttcctgagcatgctgtccacttcagagactgtatatacattggtcattctcccaagaatgctctccagcctcgtaggtatgagccagcccatgtcattggcagggtgtgccacacagatgttcttttttgtaacctttggcatcactaactgcttcctgctcacagcaatgggatatgaccgctatgtggccatctgcaaccccctgagatacatggttattatgaacaagaggctgcgtatccaacttgtcctgggggcctgcagcattgggctgattgtagcaataacgcaagtgacatctgtattcaggttacccttctgtgctagaaaggtgccccacttcttctgtgacatccgccctgtgatgaagctctcctgcattgacaccactgtcaatgaaatcctgactttgattatcagtgtgctggtgcttgttgtacctatgggtctggttttcatttcttatgttctcattatctctacaatcctcaagattgcttcagttgagggccggaagaaggcttttgccacctgtgcatcccacctcactgtggtcattgtccactacagctgtgcctccattgcctacctcaagcccaagtcagagaacaccagagaacatgaccagctgatctcggtgacctacactgtcatcactcccctactgaaccctgtggtatacaccctgagaaataaagaggtcaaagatgctctgtgcagggctgttggtgggaagttttcctga

SEQ ID NO: 28990 - DNA, 1091 bp, Homo sapiens
ccgcgtggtctaatggattgggaaggtttctttatcctgttgtactcctgactccttgtgtaatcatgggcaagtaactctttggaatttcaaagtctctgaggtgtctagtggtaatcagtaacgtgatggttacctatagagagttgctatgagtgccagtgaatgagctgaatttctgaaaaatgagacattggttgctttgtgtattttaatcttgtaacatttatttcaattttgatagctttatctttgttgatcttactaacaaattaatatgaaacatcatgtatactcattatgcctgcctttttttgggaagtagttgcactgatgtgtatagtgagtacacagttagattcattaagaaattacaatttctgcagtttgctgagggttggtgttagaataaagggtgaaaatgtatatagcaaaatattttaaagattggattaatcttggacttctatattatagttactatgaaagtgatttatataatatttgaaaaaatgtctttcatctttggaagaactataaatgtacatctatttctttagttttaattctttaatactatttagtcttgaagctaagtactcagccagtatttcaggaagttagaaataaagcttatgggtgttaaaataggcacataatacagagtcatgtacactgctaggtagaaacttctgaatgtgcttccattacaaaattttggtctttatctaatgatgtgctgatccataatgtttgtatacttataaatgtgttaataacttaaataacttttaaaaagtgaatcttttactgactcaattggttttcccctaaaataatttcttctggtatttgcagtcttgtaggcagttaacagactttaataactttaaaatgtttagtagcaccttgaaaaaaggcttcaactttatattttatgtaagatatactttgggaagcaaattattttgataaattatgagataaagatatgttcagaccaaattttaaattatagataaaagtagcacttaaaggaaaagattcatttgtatagaattactgaagaatatttgatgctagtatcaact

SEQ ID NO: 28991 - DNA, 555 bp, Homo sapiens
ccgcgtggtctaatggattgggaaggtttctttatcctgttgtactcctgactccttgtgtaatcatgggcaagtaactctttggaatttcaaagtctctgaggtgtctagtggtaatcagtaacgtgatggttacctatagagagttgctatgagtgccagtgaatgagctgaatttctgaaaaatgagacattggttgctttgtgtattttaatcttgtaacatttatttcaattttgatagctttatctttgttgatcttactaacaaattaatatgaaacatcatgtatactcattatgcctgcctttttttgggaagtagttgcactgatgtgtatagtgagtacacagttagattcattaagaaattacaatttctgcagtttgctgagggttggtgttagaataaagggtgaaaatgtatatagcaaaatgacttgtgaatgtgaatgtcttatattgtagactaagcataaataaatgtgagattatagctacagacagatgccgttttagaatgatgtagtactatacgtggatcctctagatcac

SEQ ID NO: 28992 - DNA, 470 bp, Homo sapiens
gtccaagaaagaggactgtactttagagcacaatttaggagtaaaccagtcattcttaagtacacaaagaaaacaggtaaaaatgtttgaggcaaaaccatgcctcttaaaagactgtaaacaaaatcaactgaaacaatagaacaaagatcagaatcagctgggtatggctatcggcagcttcgggcttagtcttaagtggcgtccggaatgaagagaagagtctgtggcaacacatctttagatagggagctcaatccctgtggctctgtggcttctttgtagcttggtagtttctatgtaagtctggcacaaggaatcaaagaaagtcagtatcaccaacttctgcaagcctccatgttaagaaaaaaagagttttaatctctctcgaggaaagaagaatttaaaaagctttaggggccaggcatagtggctcacgccagtaatcccaggtattcaggaagctgagg

SEQ ID NO: 28993 - DNA, 264 bp, Homo sapiens
atggaacagttagccagcccagtcctccctctttttccagtcccagccattttcctagtcctcttgctgcacatgtgtcacatgtggcttctcagcttcatgatcgtgtcatgacagattctctggcctctgctccaacattaccccttgaaatcttggttctactgaccatttttggccttcttctccctcctgtagactgttgagtgcatttggcattttatactctatcctttgtcctctaatcctccacttctatacacc

SEQ ID NO: 28994 - DNA, 780 bp, Homo sapiens
gctcctcacccagcattgtttgggctatgacagtggctgtgacaagaccctaagacgggaagctgcgtgcagggcacttgagggcccgctgaggagaagccgcctgtgagggacaggactgggcagggaaggccaccagccatgcggtcacagcccaggactccgccagtcctgcaggagccctggagccaggcccttgctgtccaggccacttgctgtacctggcccacagctacctcccctgcagccctgagtcctgcttgctgtgcccggctcaggctgagactgcagtgcttgtccattcaccatgaaagaaagaagaacaggaagggaggcaggaggaagtaagttagaggattaatccaaatgttccaactgtctaatgggagttccaacaagaagatatccagggaggaaattcacagtcaaatttccccaaaccaaaggtcatgagttttcaggttgaaagaacacccaaccaagaggagagaaaacagcattctaaatatcggaaggaaacgaaacctcgcctcaggcatgcgggctctgacgggcaggatggcggcacggagggctgctgtatccagtgaagtcagcagttcagatgaaacagataactcccttaaaagacacaaattgccaagactgacgcaaacactgaaacagactgaacagttctgagttaccaatttaaaactgcaaagcaaatagcaggcccaaaaggcttcactgataaattatctcaaacattgaaggcaaaaaataaaaccagacacagca

SEQ ID NO: 28995 - DNA, 419 bp, Homo sapiens
ttggagttccggatatgacatggggccagcgggtcactgctgtggtgaccctccgagaaggacactcactgtcccacagggagctcaaagagtgggccaggttgaaagaacacccaaccaagaggagagaaaacagcattctaaatatcggaaggaaacgaaacctcgcctcaggcatgcgggctctgacgggcaggatggcggcacggagggctgctgtatccagtgaagtcagcagttcagatgaaacagataactcccttaaaagacacaaattgccaagactgacgcaaacactgaaacagactgaacagttctgagttaccaatttaaaactgcaaagcaaatagcaggcccaaaaggcttcactgataaattatctcaaacattgaaggcaaaaaataaaaccagacacagca

SEQ ID NO: 28996 - DNA, 1298 bp, Homo sapiens
gctcctcacccagcattgtttgggctatgacagtggctgtgacaagaccctaagacgggaagctgcgtgcagggcacttgagggcccgctgaggagaagccgcctgtgagggacaggactgggcagggaaggccaccagccatgcggtcacagcccaggactccgccagtcctgcaggagccctggagccaggcccttgctgtccaggccacttgctgtacctggcccacagctacctcccctgcagccctgagtcctgcttgctgtgcccggctcaggctgagactgcagtgcttgtccattcaccatgaaagaaagaagaacaggaagggaggcaggaggaagtaagttagaggattaatccaaatgttccaactgtctaatgggagttccaacaagaagatatccagggaggaaattcacagtcaaatttccccaaaccaaaggtcatgagttttcaggttgaaagaacacccaaccaagaggagagaaaacagcattctaaatatcggaaggaaacgaaacctcgcctcaggcatgcgggctctgacgggcaggatggcggcacggagggctgctgtatccagtgaagtcagcagttcagatgaaacagataactcccttaaaagacacaaattgccaagactgacgcaaacactgaaacagactgaacagttctgagttaccaatttaaaactgcaaagcaaatagcaggcccaaaaggcttcactgataaattatctcaaacattgaaggcaaaaaataaaaccagacacagcaaagtaagtctctgatgaaacagagtggggaggaacacttcctaactccccgtatgggaccagcactaccctgaaatcaaaaccagacaagaaaacgagaggacagtgttcccaatgggcagacacacaaaatcctaaacaaaacgttagcaaattaaatccagttaatgcacaaaaagacaacacgtcatgatcaagcagcatttaacctgggcgacagggcaagcctctgtctcaaaagaaaaaaaaatctacacatccctcaccacactgtacataggacagctgggtgtaaattacatctccatttaaatgcctgtcatagttttatacaactataaaatatatacgtgccaaaataaatttgataggaacattggaaccaggtaaggtgacgcatacctgtagcacttcgggaggatcctttgagcccaggaagtcgaggcttcagtgagccatgactgcaccactgcactctggcccaggcaacagtgagatcctgtcctagaaagaaaagag

SEQ ID NO: 28997 - DNA, 442 bp, Homo sapiens
tattaaaaatacaaaaattagccaggcatggtggtatgcgcctgtagtcccagctagttaggaggctgaggcaggagaatcgcttgaacccgggaggcggaggttgcggcaagccgagactgcaccactgcaatccagcctgggcgacagggcaagcctctgtctcaaaagaaaaaaaaatctacacatccctcaccacactgtacataggacagctgggtgtaaattacatctccatttaaatgcctgtcatagttttatacaactataaaatatatacgtgccaaaataaatttgataggaacattggaaccaggtaaggtgacgcatacctgtagcacttcgggaggatcctttgagcccaggaagtcgaggcttcagtgagccatgactgcaccactgcactctggcccaggcaacagtgagatcctgtcctagaaag

SEQ ID NO: 28998 - DNA, 1181 bp, Homo sapiens
gctcctcacccagcattgtttgggctatgacagtggctgtgacaagaccctaagacgggaagctgcgtgcagggcacttgagggcccgctgaggagaagccgcctgtgagggacaggactgggcagggaaggccaccagccatgcggtcacagcccaggactccgccagtcctgcaggagccctggagccaggcccttgctgtccaggccacttgctgtacctggcccacagctacctcccctgcagccctgagtcctgcttgctgtgcccggctcaggctgagactgcagtgcttgtccattcaccatgaaagaaagaagaacaggaagggaggcaggaggaagttgaaagaacacccaaccaagaggagagaaaacagcattctaaatatcggaaggaaacgaaacctcgcctcaggcatgcgggctctgacgggcaggatggcggcacggagggctgctgtatccagtgaagtcagcagttcagatgaaacagataactcccttaaaagacacaaattgccaagactgacgcaaacactgaaacagactgaacagttctgagttaccaatttaaaactgcaaagcaaatagcaggcccaaaaggcttcactgataaattatctcaaacattgaaggcaaaaaataaaaccagacacagcaaagtaagtctctgatgaaacagagtggggaggaacacttcctaactccccgtatgggaccagcactaccctgaaatcaaaaccagacaagaaaacgagaggacagtgttcccaatgggcagacacacaaaatcctaaacaaaacgttagcaaattaaatccagttaatgcacaaaaagacaacacgtcatgatcaagcagcatttaacctgggcgacagggcaagcctctgtctcaaaagaaaaaaaaatctacacatccctcaccacactgtacataggacagctgggtgtaaattacatctccatttaaatgcctgtcatagttttatacaactataaaatatatacgtgccaaaataaatttgataggaacattggaaccaggtaaggtgacgcatacctgtagcacttcgggaggatcctttgagcccaggaagtcgaggcttcagtgagccatgactgcaccactgcactctggcccaggcaacagtgagatcctgtcctagaaagaaaagag

SEQ ID NO: 28999 - DNA, 266 bp, Homo sapiens
caccacaaagaatacttgagtttgttgagttactgagttgaattaatttattaatgtgccatagccaagctttgaaagcccctgtcaggttagggctggggaaggctcactaaagatgggctgagagttggggcttcagaaagaacccaagagagaaggtaaagtttactggtttaaagtacgactctgtagccagcttcttggatcaactcttgggtccactacttcacattgtgtgaccttgaataagagactttaactcttta

SEQ ID NO: 29000 - DNA, 384 bp, Homo sapiens
atccgcccaccttggcctcctaagatgcccaagttgctgctatgccaacagcctgttctgccttctctaagctccaaagaccaacttttgtccttctgctaaaacaggcagcagaactgcctctgttagagttgtggatgtcctttggtttactggagaagccagagtgcctggatgcaggtcccagcctcgccctgcctggccacaccccagggcaagcaacctgcattctgcatcccagttttgatatatagaaagtgggaatggccgggtgcggtggttcacgcctgtaatcccagcactttgggaggccgaacctggtggatcacgaggtcaggagatcaagaccaccctggctaacatggtgaaaccctgtctctacta

SEQ ID NO: 29001 - DNA, 428 bp, Homo sapiens
agtagataaggaagccagccaacacccctgtaggagttagagtcactggccatggagggcataggtttaggttcaaaccaacctggatttgaatccagctgtgctactttctagctgtgtgatcttgggtaaaggtttacacctcagtagggcacagtggctcacacctgtaatcccagcactttcggatgccgaggagggtggatcacgaggtcaggaatttgaaaccagcctgaccagcatggtgaaatccctgtctctactaaatatgcaacaaattagccaggcatggtggtgggcacctgtaatcccagctactcgggaggctgaggcaggagtatcacttgaacccaggaggcggaggttatagtgagccgagattgtggcactgcactccagcctgggccagacagagcaagactccatca

SEQ ID NO: 29002 - DNA, 398 bp, Homo sapiens
tatttcctcttctgtcgttccccaactgttagatgtttcttagttgaggcgtccgttttgtgaatatgagaataaagcacgcatttgttgctgaataagttgatctttgctttctaaagactccagcaaacattctaagttagtggttttcctgttgagaatctctatgtgtaatgagagatttgctgttgagattgtgttatacatgtgtaaagtatgaatgcagacaaaaggttgaagattactagtgtaggaatgaagacctgctccatctgtaatcttgttttgcttgctcttccttgcccttctctaccacggttggtcattctcactgccaaggaacctgacaatgttactcttgcttggcgttttaagccttggtgtgtaagcattacagg

SEQ ID NO: 29003 - DNA, 402 bp, Homo sapiens
ctcccaccaggccccacctccaacatttggaatcacatttcaacatgagatttggggggggacagacatccaaaccatatcacataggaggaaaaacacacaggaagagcacacaggtgcacttcccttagtgccttctgaaggacgcaactcaggtttttatgatatactgattaacgggttattgttatgggctttgtcttggattttaacctgatactttctcagtgttggttttgctagatgttcattacttcattaaacagaggtgccgggtgcggtggctcacgcctgtaatcccagcactttgggaggccgaggcgggcggatcacgaggtcaggagatcgagaccatcctggctaatacggcgaaaccccatctctactaaaaatacaaaaaat

SEQ ID NO: 29004 - DNA, 451 bp, Homo sapiens
gttaagtccctagttgtgaaagcttttggtagggccagtttttttttcttcttcgttttaatttccctcatttgagaatgttgtagtcatcattgggtgtcatcattcaccagtttgtgaagggagttaaaggaaagtgcattcctctcccatcttttctttctttggggtttaataaattgtgggaaactaagactgtgttctagactgtacaccatgcagtttatattatgatcttctgtcatctttgcagcctcagattccatttttagctaagactggggttttaaataacttgtttaaggttcctacaactaattgtcacaattggaattcaaacaattctaggtatttttgactacaaagatctaagatctttgcagagcaagcctatctgatgcttaaaaaaatatatattttttaaatttttgagactccatctcactccgtt

SEQ ID NO: 29005 - DNA, 271 bp, Homo sapiens
ggcatagaactttaattcacattattgtggcttgtgaaaacattttattacctttgttttagtttgtatttcattcaacaaataaaaagtttggaaagagttaggcacatgataaaattggtaacttagtttatagaatagagttcagcttcagccagtttcctgtgaaaccaaatgctatttcatagaattagtgtcatgttgggagggccatgagctacagactttcactgttactagggatatttttagatttgtcccattttgtcca

SEQ ID NO: 29006 - DNA, 1079 bp, Homo sapiens
ttttaatatggctgggaatgcagaaattttaaaaatggatacatttgagtgtgttaaaagtaaaaacttctcttggacaaaacataaactgctaaccgcaacgggggagaagatatttgccgcacatgtaaataacagagactgttctacagcaccaggaggaattctgactgccaatgggtgaagacgaggcacccagggaaataaaggggcagggatggggcagccctccacgcagaggagacgcctgagaatgcgcacattcactggttgtctatctctagacaacagcagatgcctcttcacaccaatcgatggcacccagaaaggcctaggatgtgccctgttcaaactctccctgcggtgcagcttaaatttctatagagaaattcgggagacatttggccgcatctgaaagcgcagaaggtgcgtgctccctggcacccagcacacaggtgttggggaagcggggacgaggcagccctggagcatggtttgcaggagtgcaagactgcaagcctcctccacggccaccactccaggcctggataaagaattcgtggcatatttcagggaacagaatgtcccctggggcgaaaggggatgaagtcattctacttgtaccaacttgagtgcctcctaaaagtgtaaccttgggggcggggatacagaaggatgatgctgacaatggaatttaaaaacaaacagcaacattttgtggtgtctacaggcgtgggggtggaggagctgcagcgtcaccatgggaacaaaagtctcccacgcatctcaggcccgaggaatctttaaagagggagagtgggcatgggaggaggacttaagctattagtcatattttatttcgaaaactagatcttaagtaactgtagcaaaatgttaacaattcttaccttggaataccggttacatgggattatgttactctattttttcatcatgtgaaatattttatattttgacaattaaaactaaatagtagctttttataaaagtggcatatgcactgaagtataatgtgctaatttgggattcgtttaaataaaacagctttcttagaatat

SEQ ID NO: 29007 - DNA, 828 bp, Homo sapiens
caccaccatgcctggataattttttcttatttttagtagagacaggatttcatcatgttggccacgctggtttcgaactcctgaccacatgtggtccacccaccttggcctcaattatgtgcattttggtatatttacttgtatttcaacatcttgtgagtttgaaaaacctgaaaggccagaatgcttccttttatttctcaccatttgggcagcacctaagtggttttgtaaaatgcagcatctggtgctgtgggtctctctcaggccttgagggacacttccttcctccccactcgcctcctctccactagactttggttcctagagggcgtggggccgggtctgaggttcttgcctgccttccctcccattggtctttggttgctcatccctctaactgcaccccttcttggtccttcctccacagacttcagataatagataagtcattagcaaaccagaccgaatctttagggtgaagagctccccaaagccatctggtgaggtcattgtggggaccagggactgattatttgtcacctggatcacaaagatgggactgtctgctcaggctggtggtgacaggatcctgacccgtggtcctctcccgttccctctgcttccaccaggacacatgtataggacactgtgctgtgtgcagtggagaaatctccctgggccaggggaaagttcagacagtgcctctagattgtgttttggctcctccaatgtagagttgacatctggaccccagagcccagcagggctttctgtcagacatgctagggtggtagaaatgggccctccaggtccccctgcagtgca

SEQ ID NO: 29008 - DNA, 269 bp, Homo sapiens
gaaaacagtctgtacagcaaatgctgtgtgagatcttaggcttttcactttttttgttttgttttgtttttgaaagaaagaaaaaaatacaattaacaagcctcttttgtaaatgggtttcctttctatgtataaaatcgtggtggtcccttgtttttacatgttcatgctgtgtaattttgagatgttactgagatatgttctgaacataatgtgcatttttttctgtacagatgaaatgggagaatttaataaagagtttgcaggtt

SEQ ID NO: 29009 - DNA, 657 bp, Homo sapiens
catgagaatttaatctcaaaacagaaatcagaaaaatatgaagtccagggcataaaacctaaaactattgctcatatttattctttctaaatagagcaaagtgtacaatcttctccataagacatacattgtggttataaaaaggcaaaagtcttagtgagaatcattggtattccatagaagagtgaattaaacacagccaagggaagacccacgtctcatacttctcttgtatattccaaagttccagggaaattccaggtgatagaggttatttcccatactgttaaagcaaggtttcagacacttctgaattttggtcccagtactctagaagggcacacctctgtcctggaaaataatacaggaatgaatactcttcccgtgacccattctggtcattcttccagcatcacaaaaaccaaaaaatggaaatatggccaaatacgtgattagctgtccctcatcttcaggtttcttatctgttacttatagataatagcattaccttaaggattatgatgaagatacaatgtccaaatataaacacagttttgagcaaaatgccttgtacgaattggtcaatgaataattactaaatatgtgaatatttactggattgtatggatcctatgaataattactgaataattattg

SEQ ID NO: 29010 - DNA, 401 bp, Homo sapiens
ccagcagactgcatccccaagaaccatgcctgaaggatgggaaggcacttttccccactaaaaccactgagagccccctggccaaggtgaacagggatcagtgctttacctccgaagtggtttctaaggccctgaaacaagaggtggccaaccctgtcaagattacctataggtgttcatatggggggctggacatgatgcaggcgccgggaccctctaaggaagaaattatctataagatcatgcggcttctctgggccacttcctactgtgggccgcaaccctgtggctgattgagacctcatgtgaagcctccctgccccagcacccttcccattgcccttcagaggagcagttcttggatgacccagatttgaatcattaaagtagactctcatgca

SEQ ID NO: 29011 - DNA, 903 bp, Homo sapiens
caatgtttctaacaattacattgccttgctgattatacacagtgatgacatttagatcataaacatgtctaagaattttcttatgtttagcattcaaacaagggccgtcctaaacagctaaataagcctcatcctcacagaagcgaaagcttctagatgggcttggtgttgttcatcaacgaggttttatcaggatagtggcaattctggtgaatgacggactgagcccctcttgagaactggatgtgtctgcttgggctgcatgccatttcccacccagtgcttaccatgctgctagcagcaattagggtcgactcaccttagcagttgcatggagcagctgtttcttccaaagcaagttgggactggaatttggccatataatcacacagttaaggacagctctggcatttatatatgaatctcagaattttaggtacaccatttcttttccgtaaataaaatttctttctgcttttaagtgtcttttcctgattctacatagaaaatttgatgaatatttacagccataaaaaagaatgaaatcatgtcctttgcagtaacatggatgcacctggagaccattattttaagcgaactaatacaggaacagaaaaccaaaaagcacacgttctcacttatacgtggtagctaaacattgactacataaagatgggaacgatagacagtggggaatgcttgagagagagggtgggggaggcatggattggaagactaactgttgggtactgtgcttactaccttggtgatgggatccttcgtacaccaagcctcagcaacacacaacctacccgtgtaacaaacctgcacatatatctcctgaacctaagataaaagtagaaaagaagaaaaatgtaaaaaacatttgcttaagtaagaaca

SEQ ID NO: 29012 - DNA, 945 bp, Homo sapiens
tcctgagttcaaatgattctcctgcctcagcctccctagatgctgggattacaggcgcccaccaccatgcccagctaattttttttgtatttttagtagagacgggtttcaccatgttggccaggctggtcttgaactcctgaccttgtgatccacccgccttggcctcccaaagtgctgggtttacaggcgtgagccaccgcgcccagccttataattttttataaagtagataaaatgttttgaaatagttaaaatgtatttgcatgaatatccatataagttaaatatgtataactagggaattctttcttaagaggtgattaatatagataacagaaatctcatgatttcttcccgcttgagatactgttcacaggtattttcacctttaagaagccttattagagttgcttataggacccttcttggtgcatttaaatgcttatatacagattacattaattgcagtactatcatatcagttattgagtggccagcattaatacatttgtcctatttttctttctctgtctttttaaaaaaagacctttattgaagtgtagttgacatacagtaaactgcacatattaaaggtatacatgcgccatctcagttcactcactgcaacctccgcctcccgggttcaagtgattctcctgccttggcctcccgagtagctggaactacaagtacaagacggggtttcgccatgttggccaggctggtctagaactcctgacctcaaatgatctgcccacctcagccacccaaagtgctgggattacaggcatgagccaccaccgtgcccgctgtgccatttcttttctttttttttttttgagacaggctcttgctctgtcacccaggctggagtgcagtggcgcgatctcggctcactttaacctctgcctcccagattcaagcgattcttacacaacagcc

SEQ ID NO: 29013 - DNA, 407 bp, Homo sapiens
ttttttgagacagagtcttgctgtgttgcccagggtggagtgtagtggcgtgatcttggctcactgcaacctccgcctcccgggttcaagcaatcctcccgtctcagcctcccaagtacctgggattataggcacatgctatcacacctggcaaatttttgtatttttagtagagacagggtttcaccatgttgaccaggctggtctcaaactcctgaggctcaagtcatccgcctgcctctgcctcccaaaatgctgggattacaggactgagccactgtgcccagatgttttctacagtcttaggatcacaacttctgagtcagctaaatataaacagaaaaccccagagaaactctgacatattaacggggagaaataaagaatagaaccataggcctctgctg

SEQ ID NO: 29014 - DNA, 163 bp, Homo sapiens
aacacatatcaaataccaccaggtccttttaaagccttctcacttcttgagatagaagggaagtacttcgggctgggcacggtggcttgtgcctgtaatcccagcacttttggagatggaggcaggaggatcacctgaggtcaggagttcgagaccagcctgg

SEQ ID NO: 29015 - DNA, 423 bp, Homo sapiens
gtcagggctaggtctgctgtgggcgtatgacaggagacattttcctgcacgtctcagggctttgccacagcccgtgaagttagggaagaaaaggaagaaaaacaaagcaggctacaaaacagccaggtctgtactgctgaatccctagcccttaagcacagtctctggcacagaataaatacgaaatgaatgagtgaatgaatggatggatgggtgaagagaaaaggcaatgcacaagatttacctatcaaaatccaccaatggtccttaaaaatggttttgtcagtagagatgctgaatatattcatataatacatttatttcaatactattaagaattctagtgtttttttttctctttgggtatgtatacttaatgaatactggtagcacagggtcccaaattcaatgaagttttctttg

SEQ ID NO: 29016 - DNA, 477 bp, Homo sapiens
cagcttcctaagtcaaacaatacccaactgcagtataaacaaagtcacggacaactggcttgtttaaaacttatggcgcttgagcaggagttttctttttaaccttttctgctaagagactttttttttcctacacatcaactgtacttattcatgccctctctgaaacccacatctccagtaattacaatgagtttagaaacaagtgtggaagaaattggaccatacgataccttcccctaggcatctaactagatgtcactttggaaattaagatgagcttcctaattctagaaagaagccaccagaccacagatgcctgtaaatcagctgtgaagacatcagatagaatcatttgggcataaataggaaattaggggggcatttgtcatttaaatatgtatttgaaagctttttttttttttcttacaaaaaaccattttgctttgttttataacagtattgactggcggggca

SEQ ID NO: 29017 - DNA, 680 bp, Homo sapiens
gcggcgttggtccggtgcgtcctgttctacagctatggccgggccagctgcagctttccgccgcttgggcgccttgtccggagctgcggccttaggcttcgcttcctacggggcgcacggcgcccaattcccagatgcctacgggaaggagctgtttgacaaggccaacaaacaccacttcttacacagcctggccctgttaggggtgccccattgcagaaagccactctgggctgggttattgctagcttccggaacgaccttattctgcaccagcttttactaccaggctctgagtggagaccccagcatccagactttggcccctgcgggagggaccctgctactcttgggctggcttgccttggctctttgagctcccttttgcttaattactgggttttctgggcagttttttttttaaagagttggagtaagaagaggattaaaaaggaaaggcaaataaaaaaaaaaacaaaaaaaaaaaaactctcggagggcttctatttgcggggtgggggaaaaaacggtgtcttgagatttgggccttgggtcatacgtggttctcctggacccggtttttttgttacaatgtgggaaatctgcgagggtcccccctattaggggggtcggtattaatttcggataacgccgggttaacctggttttgttctctcaga

SEQ ID NO: 29018 - DNA, 567 bp, Homo sapiens
gcggcgttggtccggtgcgtcctgttctacagctatggccgggccagctgcagctttccgccgcttgggcgccttgtccggagctgcggccttaggcttcgcttcctacggggcgcacggcgcccaattcccagatgcctacgggaaggagctgtttgacaaggccaacaaacaccacttcttacacagcctggccctgttaggggtgccccattgcagaaagccactctgggctgggttattgctagcttccggaacgaccttattctgcaccagcttttactaccaggctctgagtggagaccccagcatccagactttggccctggaatacagtggcgcgacctcggctcactgcaacctctgcctcccaggttcaagcgattctcctgcctcggcctcctgaatagctgggattacaggcgcctgccaccatgcccaactaattttttgtatttttagtagacacggggttgtgccatgttggcaagctggtctcaaattcctgggctcaagtgatcctcccaccttgcccttatcgggtaccgagactcgagtcgtatcatg

SEQ ID NO: 29019 - DNA, 361 bp, Homo sapiens
  misc_feature (60)..(60): n is a, c, g, or t
  misc_feature (66)..(66): n is a, c, g, or t
  misc_feature (287)..(288): n is a, c, g, or t
  misc_feature (291)..(296): n is a, c, g, or t
  misc_feature (300)..(303): n is a, c, g, or t
  misc_feature (305)..(305): n is a, c, g, or t
  misc_feature (312)..(312): n is a, c, g, or t
ctaattggtgctggtttctccgcccgccagacgtcttcgccactctgcagcggttttacnaaaggncgggtgaagagcgcaatgctgaaatgaacacggcccggattgggcgcctgtgaaccttatttgcatgggcggtcgggattggctggcctcttgggtggcctgggcggcgttggtccggtgcgtcctgttctacagctatggccgggccagctgcagctttccgccgcttgggcgccttgtccggagctgcggccttaggcttcgcttcctacggggcggcnnacnnnnnnggtnnnncnagggggnctggggacgaagatgggactgtgcttggggcgtcctctggggtctgctg

SEQ ID NO: 29020 - DNA, 468 bp, Homo sapiens
gcggcgttggtccggtgcgtcctgttctacagctatggccgggccagctgcagctttccgccgcttgggcgccttgtccggagctgcggccttaggcttcgcttcctacggggcgcacggcgcccaattcccagatgcctacgggaaggagctgtttgacaaggccaacaaacaccacttcttacacagcctggccctgttaggggtgccccattgcagaaagccactctgggctgggttattgctagcttccggaacgaccttattctgcaccagcttttactaccaggctctgagtggagaccccagcatccagactttggcccctgcgggagggaccctgctactcttgggctggcttgccttggctctttgagctcccttttgcttaattactgggttttctgggcagttttttttttaaagagttggagtaagaagaggattaaaaaggaaaggcaaataaaa

SEQ ID NO: 29021 - DNA, 409 bp, Homo sapiens
  misc_feature (56)..(56): n is a, c, g, or t
gtgggggaaggaactttggtcccttgtgtcatcaggggatctcagtacctgtattngcctacgacatcccttcgtttctgtttttcttacagctgtttgacaaggccaacaaacaccacttcttacacagcctggccctgttaggggtgccccattgcagaaagccactctgggctgggttattgctagcttccggaacgaccttattctgcaccagcttttactaccaggctctgagtggagaccccagcatccagactttggcccctgcgggagggaccctgctactcttgggctggcttgccttggctctttgagctcccttttgcttaattactgggttttctgggcagttttttttttaaagagttggagtaagaagaggattaaaaaggaaaggcaaataaaa

SEQ ID NO: 29022 - DNA, 4497 bp, Homo sapiens
gcactcgcggcggaggcaagcggcggcgcgcggacggttggtccagttctccggcctggcggcaggcaagtctagctcggcgctgtcggatacttggggtgagcggaaagcatggcggggacctccgcgccaggcagcaagaggcggagcgagcccccggcgcctcgccccggcccgccgccgggcaccgggcaccccccgagcaagcgggcccggggcttctccgcagccgctgccccggaccctgacgacccgttcggcgcgcatggggacttcactgccgacgacctggaggagcttgacaccctcgcgtcacaggccctgagccaatgtccggccgcggctcgggacgtgtccagtgatcataaggtccacagattattagatggcatgtcaaaaaatccttcagggaaaaacagagaaactgttccaattaaagataatttcgaattagaggtacttcaggcacaatacaaagaacttaaagaaaagatgaaagtaatggaagaagaagttctcattaagaatggagaaattaaaattttgcgagactcactacatcagacggaatccgttctagaggaacagagaagatcacattttcttcttgagcaagagaaaacccaagcactcagtgacaaggaaaaggaattctccaaaaagctccaatcattgcagtctgaactccagtttaaagatgcagagatgaatgaattaaggacaaagctccagaccagtgaacgagcaaataaactggctgctccctctgtttcccatgtcagtcctaggaaaaacccttctgtggttataaagccagaagcatgttctccacaatttggaaaaacatcttttcctacaaaggagtcttttagtgctaacatgtcccttccccacccctgccagacggagtcaggatacaagcctctggtgggcagagaggatagtaagccccacagtctgagaggtgactccataaaacaagaagaggcccagaaaagctttgttgacagctggagacagagatcaaacactcaaggttccattttgataaacctgctcctgaagcagcctttgatcccagggtcatccctaagcctttgccacctcctgagtagtagttctgagtctcctgctggcacccccctgcagccaccagggtttggcagtaccttggctggaatgtcaggcctcaggaccacaggttcttatgatgggtcattttccctctcagccctgagagaagcacagaacctggcattcactggactgaatctggttgcccggaatgagtgctcacgtgatggagacccagcagagggaggcagaagggccttcccactctgccagcttcctggagccgtgcatttcctcccccttgtacagttcttcatcggcttacactgccaggccctgcaggacttggcagctgctaagagaagcggagcacctggggactcaccgacacattcctcctgcgtgagctctggggtagagaccaaccctgaggactcagtgtgcatcctggaaggcttctctgtgactgcacttagcattcttcagcacctggtgtgccacagcggagcagtcgtctccctattactgtcaggagtgggggcagattctgctgctggggaaggaaacaggagcctggttcacaggcttagtgatggagatatgacctcagccctaaggggggttgctgatgaccaaggacagcacccactgttgaagatgcttcttcacctgttggctttctcttctgcagcaacaggtcaccttcaagccagtgtcctgacccagtgccttaaggttttggtgaaattagccgaaaacacttcctgtgatttcttgcccaggttccagtgtgtgttccaagtgctgccaaagtgcctcagcccagagacacccctgcctagcgtgctgctggctgttgagctcctctccctgctggcggaccacgaccagctggcacctcagctctgttcccactcagaaggctgcctcctgctgctgctgtacatgtacatcacatcacggcctgacagagtggccttggagacacaatggctccagctggaacaagaggtggtcagagcgctcacggtgatgttgcacagacagtggctgacagtgcggagggcagggggacccccaaggaccgaccagcagaggcggacagtgcgctgtctgcgggacacggtgctgctgctgcacggcctatcgcagaaggacaagctcttcatgatgcactgcgtggaggtcctgcatcagtttgaccaggtgatgccgggggtcagcatgctcatccgagggcttcctgatgtgacggactgtgaagaggcagccctggatgacctctgtgccgcggaaaccgatgtggaagaccccgaggtggagtgtggctgaggccctgagtgtccagccacatggtggcaccagcaccactcctttccttaccacatcaactgattaaagcagtgaccagcaggaactgcccagagaactggctggccttgtttcctgagtctgatctgtttggcggagtgggaggggtggagcaggacccggaccctgagtggctgggatccttcttcctgtccctggctgttgctgagcccgtccccatggtaactgatctgccttgaggaaggagccctgccctgcctgtggaattgtcctgagtcattgctttgggctggggccatgggaagaaaccattgtgtggcagggaaggaggtggctcttggcccaggcctaaaccaggaaagcctgggaaactgggacccacaggtgggcatgaaagggccgcagcaggggctcccagcagtgtgtaagaccgggagctggtctggcaccactgccctggtccttccagctgcctgtcactggtatgatggccccggtgcattgtgccaccagcaggccacagctgtggatcttggaaggcctctggggtcccccgggagcaggggagtgggtgtgggggggaacggatggtggtgagagggacagaccaggcaggctgacgagcagggcgggcctggctcacgtgggcctgtaggcgggcccacgccaagtttcacttaccgccactgctgccagcgagagccgcgggagagtgtgcagccgagtcactactgcctgcctgcctgcctgctacggtgagtgtggcccccacaatgggatggcgcagggcaggagggccatgggttcccccaccccagactaagggggcactaggggaggggccgagtcatgtgaagagggagaccctctcagacagtcgaatgtgctggtcccactaaggaaaccacctcaccctctccaacttcctgcctgaaaatgggccctggagctcgcagacagggcaggattgtgcagggaaggcctgagatgtgcttctgcccaccccctaccccactccctccccttcggatcttaacactgggcactcacacacccaccccatgctcctctccaggctcagcagcaggtacgtacccaaccatgggctcgcaggccctgcccccggggcccatgcagaccctcatctttttcgacatggaggccactggcttgcccttctcccagcccaaggtcacggagctgtgcctgctggctgtccacagatgtgccctggagagcccccccacctctcaggggccacctcccacagttcctccaccaccgcgtgtggtagacaagctctccctgtgtgtggctccggggaaggcctgcagccctgcagccagcgagatcacaggtctgagcacagctgtgctggcagcgcatgggcgtcaatgttttgatgacaacctggccaacctgctcctagccttcctgcggcgccagccacagccctggtgcctggtggcacacaatggtgaccgctacgacttccccctgctccaagcagagctggctatgctgggcctcaccagtgctctggatggtgccttctgtgtggatagcatcactgcgctgaaggccctggagcgagcaagcagcccctcagaacacggcccaaggaagagctacagcctaggcagcatctacactcgcctgtatgggcagtcccctccagactcgcacacggctgagggtgatgtcctggccctgctcagcatctgtcagtggagaccacaggccctgctgcggtgggtggatgctcacgccaggcctttcggcaccatcaggcccatgtatggggtcacagcctctgctaggaccaagccaagaccatctgctgtcacaaccactgcacacctggccacaaccaggaacactagtcccagccttggagagagcaggggtaccaaggatcttcctccagtgaaggaccctggagccctatccagggaggggctgctggccccactgggtctgctggccatcctgaccttggcagtagccacactgtatggactatccctggccacacctggggagtaggccaagaaggaaaatctgacgaataaagacccccgctgccccata

SEQ ID NO: 29023 - DNA, 3999 bp, Homo sapiens
gcactcgcggcggaggcaagcggcggcgcgcggacggttggtccagttctccggcctggcggcaggcaagtctagctcggcgctgtcggatacttggggtgagcggaaagcatggcggggacctccgcgccaggcagcaagaggcggagcgagcccccggcgcctcgccccggcccgccgccgggcaccgggcaccccccgagcaagcgggcccggggcttctccgcagccgctgccccggaccctgacgacccgttcggcgcgcatggggacttcactgccgacgacctggaggagcttgacaccctcgcgtcacaggccctgagccaatgtccggccgcggctcgggacgtgtccagtgatcataaggtccacagattattagatggcatgtcaaaaaatccttcagggaaaaacagagaaactgttccaattaaagataatttcgaattagaggtacttcaggcacaatacaaagaacttaaagaaaagatgaaagtaatggaagaagaagttctcattaagaatggagaaattaaaattttgcgagactcactacatcagacggaatccgttctagaggaacagagaagatcacattttcttcttgagcaagagaaaacccaagcactcagtgacaaggaaaaggaattctccaaaaagctccaatcattgcagtctgaactccagtttaaagatgcagagatgaatgaattaaggacaaagctccagaccagtgaacgagcaaataaactggctgctccctctgtttcccatgtcagtcctaggaaaaacccttctgtggttataaagccagaagcatgttctccacaatttggaaaaacatcttttcctacaaaggagtcttttagtgctaacatgtcccttccccacccctgccagacggagtcaggatacaagcctctggtgggcagagaggatagtaagccccacagtctgagaggtgactccataaaacaagaagaggcccagaaaagctttgttgacagctggagacagagatcaaacactcaaggttccattttgataaacctgctcctgaagcagcctttgatcccagggtcatccctaagcctttgccacctcctgagtagtagttctgagtctcctgctggcacccccctgcagccaccagggtttggcagtaccttggctggaatgtcaggcctcaggaccacaggttcttatgatgggtcattttccctctcagccctgagagaagcacagaacctggcattcactggactgaatctggttgcccggaatgagtgctcacgtgatggagacccagcagagggaggcagaagggccttcccactctgccagcttcctggagccgtgcatttcctcccccttgtacagttcttcatcggcttacactgccaggccctgcaggacttggcagctgctaagagaagcggagcacctggggactcaccgacacattcctcctgcgtgagctctggggtagagaccaaccctgaggactcagtgtgcatcctggaaggcttctctgtgactgcacttagcattcttcagcacctggtgtgccacagcggagcagtcgtctccctattactgtcaggagtgggggcagattctgctgctggggaaggaaacaggagcctggttcacaggcttagtgatggagatatgacctcagccctaaggggggttgctgatgaccaaggacagcacccactgttgaagatgcttcttcacctgttggctttctcttctgcagcaacaggtcaccttcaagccagtgtcctgacccagtgccttaaggttttggtgaaattagccgaaaacacttcctgtgatttcttgcccaggttccagtgtgtgttccaagtgctgccaaagtgcctcagcccagagacacccctgcctagcgtgctgctggctgttgagctcctctccctgctggcggaccacgaccagctggcacctcagctctgttcccactcagaaggctgcctcctgctgctgctgtacatgtacatcacatcacggcctgacagagtggccttggagacacaatggctccagctggaacaagaggtggtcagagcgctcacggtgatgttgcacagacagtggctgacagtgcggagggcagggggacccccaaggaccgaccagcagaggcggacagtgcgctgtctgcgggacacggtgctgctgctgcacggcctatcgcagaaggacaagctcttcatgatgcactgcgtggaggtcctgcatcagtttgaccaggtgatgccgggggtcagcatgctcatccgagggcttcctgatgtgacggactgtgaagaggcagccctggatgacctctgtgccgcggaaaccgatgtggaagaccccgaggtggagtgtggctgaggccctgagtgtccagccacatggtggcaccagcaccactcctttccttaccacatcaactgattaaagcagtgaccagcaggaactgcccagagaactggctggccttgtttcctgagtctgatctgtttggcggagtgggaggggtggagcaggacccggaccctgagtggctgggatccttcttcctgtccctggctgttgctgagcccgtccccatggtaactgatctgccttgaggaaggagccctgccctgcctgtggaattgtcctgagtcattgctttgggctggggccatgggaagaaaccattgtgtggcagggaaggaggtggctcttggcccaggcctaaaccaggaaagcctgggaaactgggacccacaggtgggcatgaaagggccgcagcaggggctcccagcagtgtgtaagaccgggagctggtctggcaccactgccctggtccttccagctgcctgtcactggtatgatggccccggtgcattgtgccaccagcaggccacagctgtggatcttggaaggcctctggggtcccccgggagcaggggagtgggtgtgggggggaacggatggtggtgagagggacagaccaggcaggccctgcccccggggcccatgcagaccctcatctttttcgacatggaggccactggcttgcccttctcccagcccaaggtcacggagctgtgcctgctggctgtccacagatgtgccctggagagcccccccacctctcaggggccacctcccacagttcctccaccaccgcgtgtggtagacaagctctccctgtgtgtggctccggggaaggcctgcagccctgcagccagcgagatcacaggtctgagcacagctgtgctggcagcgcatgggcgtcaatgttttgatgacaacctggccaacctgctcctagccttcctgcggcgccagccacagccctggtgcctggtggcacacaatggtgaccgctacgacttccccctgctccaagcagagctggctatgctgggcctcaccagtgctctggatggtgccttctgtgtggatagcatcactgcgctgaaggccctggagcgagcaagcagcccctcagaacacggcccaaggaagagctacagcctaggcagcatctacactcgcctgtatgggcagtcccctccagactcgcacacggctgagggtgatgtcctggccctgctcagcatctgtcagtggagaccacaggccctgctgcggtgggtggatgctcacgccaggcctttcggcaccatcaggcccatgtatggggtcacagcctctgctaggaccaagccaagaccatctgctgtcacaaccactgcacacctggccacaaccaggaacactagtcccagccttggagagagcaggggtaccaaggatcttcctccagtgaaggaccctggagccctatccagggaggggctgctggccccactgggtctgctggccatcctgaccttggcagtagccacactgtatggactatccctggccacacctggggagtaggccaagaaggaaaatctgacgaataaagacccccgctgccccata

SEQ ID NO: 29024 - DNA, 4927 bp, Homo sapiens
gcactcgcggcggaggcaagcggcggcgcgcggacggttggtccagttctccggcctggcggcaggcaagtctagctcggcgctgtcggatacttggggtgagcggaaagcatggcggggacctccgcgccaggcagcaagaggcggagcgagcccccggcgcctcgccccggcccgccgccgggcaccgggcaccccccgagcaagcgggcccggggcttctccgcagccgctgccccggaccctgacgacccgttcggcgcgcatggggacttcactgccgacgacctggaggagcttgacaccctcgcgtcacaggccctgagccaatgtccggccgcggctcgggacgtgtccagtgagtgctcctcgcggccttttgctcggagggagttgtcaaccgcgccagatccccttgatggctgtggcttcggaacctcgcggccagcactgccttttcgcctttttaaaatatgggaacaccctgatttaagcagcggttgtcttccagaaggtcctttgattttagggggaaatgcattagccaggtcaaacagccgatttgaaacacagaaggctaagttgacattttacgttattttctaaagtttaggccacttggttcttggttctaagcagagatccttggaacacacctaccaccaccatcagaaccatcactacccatgcatggggacccattcttgtgacaagtttgagcggctttagatcttatgaagcccactgtctcccttgggcagtgtgagcatgggaggagccagacacaggtgatcataaggtccacagattattagatggcatgtcaaaaaatccttcagggaaaaacagagaaactgttccaattaaagataatttcgaattagaggtacttcaggcacaatacaaagaacttaaagaaaagatgaaagtaatggaagaagaagttctcattaagaatggagaaattaaaattttgcgagactcactacatcagacggaatccgttctagaggaacagagaagatcacattttcttcttgagcaagagaaaacccaagcactcagtgacaaggaaaaggaattctccaaaaagctccaatcattgcagtctgaactccagtttaaagatgcagagatgaatgaattaaggacaaagctccagaccagtgaacgagcaaataaactggctgctccctctgtttcccatgtcagtcctaggaaaaacccttctgtggttataaagccagaagcatgttctccacaatttggaaaaacatcttttcctacaaaggagtcttttagtgctaacatgtcccttccccacccctgccagacggagtcaggatacaagcctctggtgggcagagaggatagtaagccccacagtctgagaggtgactccataaaacaagaagaggcccagaaaagctttgttgacagctggagacagagatcaaacactcaaggttccattttgataaacctgctcctgaagcagcctttgatcccagggtcatccctaagcctttgccacctcctgagtagtagttctgagtctcctgctggcacccccctgcagccaccagggtttggcagtaccttggctggaatgtcaggcctcaggaccacaggttcttatgatgggtcattttccctctcagccctgagagaagcacagaacctggcattcactggactgaatctggttgcccggaatgagtgctcacgtgatggagacccagcagagggaggcagaagggccttcccactctgccagcttcctggagccgtgcatttcctcccccttgtacagttcttcatcggcttacactgccaggccctgcaggacttggcagctgctaagagaagcggagcacctggggactcaccgacacattcctcctgcgtgagctctggggtagagaccaaccctgaggactcagtgtgcatcctggaaggcttctctgtgactgcacttagcattcttcagcacctggtgtgccacagcggagcagtcgtctccctattactgtcaggagtgggggcagattctgctgctggggaaggaaacaggagcctggttcacaggcttagtgatggagatatgacctcagccctaaggggggttgctgatgaccaaggacagcacccactgttgaagatgcttcttcacctgttggctttctcttctgcagcaacaggtcaccttcaagccagtgtcctgacccagtgccttaaggttttggtgaaattagccgaaaacacttcctgtgatttcttgcccaggttccagtgtgtgttccaagtgctgccaaagtgcctcagcccagagacacccctgcctagcgtgctgctggctgttgagctcctctccctgctggcggaccacgaccagctggcacctcagctctgttcccactcagaaggctgcctcctgctgctgctgtacatgtacatcacatcacggcctgacagagtggccttggagacacaatggctccagctggaacaagaggtggtcagagcgctcacggtgatgttgcacagacagtggctgacagtgcggagggcagggggacccccaaggaccgaccagcagaggcggacagtgcgctgtctgcgggacacggtgctgctgctgcacggcctatcgcagaaggacaagctcttcatgatgcactgcgtggaggtcctgcatcagtttgaccaggtgatgccgggggtcagcatgctcatccgagggcttcctgatgtgacggactgtgaagaggcagccctggatgacctctgtgccgcggaaaccgatgtggaagaccccgaggtggagtgtggctgaggccctgagtgtccagccacatggtggcaccagcaccactcctttccttaccacatcaactgattaaagcagtgaccagcaggaactgcccagagaactggctggccttgtttcctgagtctgatctgtttggcggagtgggaggggtggagcaggacccggaccctgagtggctgggatccttcttcctgtccctggctgttgctgagcccgtccccatggtaactgatctgccttgaggaaggagccctgccctgcctgtggaattgtcctgagtcattgctttgggctggggccatgggaagaaaccattgtgtggcagggaaggaggtggctcttggcccaggcctaaaccaggaaagcctgggaaactgggacccacaggtgggcatgaaagggccgcagcaggggctcccagcagtgtgtaagaccgggagctggtctggcaccactgccctggtccttccagctgcctgtcactggtatgatggccccggtgcattgtgccaccagcaggccacagctgtggatcttggaaggcctctggggtcccccgggagcaggggagtgggtgtgggggggaacggatggtggtgagagggacagaccaggcaggctgacgagcagggcgggcctggctcacgtgggcctgtaggcgggcccacgccaagtttcacttaccgccactgctgccagcgagagccgcgggagagtgtgcagccgagtcactactgcctgcctgcctgcctgctacggtgagtgtggcccccacaatgggatggcgcagggcaggagggccatgggttcccccaccccagactaagggggcactaggggaggggccgagtcatgtgaagagggagaccctctcagacagtcgaatgtgctggtcccactaaggaaaccacctcaccctctccaacttcctgcctgaaaatgggccctggagctcgcagacagggcaggattgtgcagggaaggcctgagatgtgcttctgcccaccccctaccccactccctccccttcggatcttaacactgggcactcacacacccaccccatgctcctctccaggctcagcagcaggtacgtacccaaccatgggctcgcaggccctgcccccggggcccatgcagaccctcatctttttcgacatggaggccactggcttgcccttctcccagcccaaggtcacggagctgtgcctgctggctgtccacagatgtgccctggagagcccccccacctctcaggggccacctcccacagttcctccaccaccgcgtgtggtagacaagctctccctgtgtgtggctccggggaaggcctgcagccctgcagccagcgagatcacaggtctgagcacagctgtgctggcagcgcatgggcgtcaatgttttgatgacaacctggccaacctgctcctagccttcctgcggcgccagccacagccctggtgcctggtggcacacaatggtgaccgctacgacttccccctgctccaagcagagctggctatgctgggcctcaccagtgctctggatggtgccttctgtgtggatagcatcactgcgctgaaggccctggagcgagcaagcagcccctcagaacacggcccaaggaagagctacagcctaggcagcatctacactcgcctgtatgggcagtcccctccagactcgcacacggctgagggtgatgtcctggccctgctcagcatctgtcagtggagaccacaggccctgctgcggtgggtggatgctcacgccaggcctttcggcaccatcaggcccatgtatggggtcacagcctctgctaggaccaagccaagaccatctgctgtcacaaccactgcacacctggccacaaccaggaacactagtcccagccttggagagagcaggggtaccaaggatcttcctccagtgaaggaccctggagccctatccagggaggggctgctggccccactgggtctgctggccatcctgaccttggcagtagccacactgtatggactatccctggccacacctggggagtaggccaagaaggaaaatctgacgaataaagacccccgctgccccata

SEQ ID NO: 29025 - DNA, 4204 bp, Homo sapiens
gcactcgcggcggaggcaagcggcggcgcgcggacggttggtccagttctccggcctggcggcaggtgatcataaggtccacagattattagatggcatgtcaaaaaatccttcagggaaaaacagagaaactgttccaattaaagataatttcgaattagaggtacttcaggcacaatacaaagaacttaaagaaaagatgaaagtaatggaagaagaagttctcattaagaatggagaaattaaaattttgcgagactcactacatcagacggaatccgttctagaggaacagagaagatcacattttcttcttgagcaagagaaaacccaagcactcagtgacaaggaaaaggaattctccaaaaagctccaatcattgcagtctgaactccagtttaaagatgcagagatgaatgaattaaggacaaagctccagaccagtgaacgagcaaataaactggctgctccctctgtttcccatgtcagtcctaggaaaaacccttctgtggttataaagccagaagcatgttctccacaatttggaaaaacatcttttcctacaaaggagtcttttagtgctaacatgtcccttccccacccctgccagacggagtcaggatacaagcctctggtgggcagagaggatagtaagccccacagtctgagaggtgactccataaaacaagaagaggcccagaaaagctttgttgacagctggagacagagatcaaacactcaaggttccattttgataaacctgctcctgaagcagcctttgatcccagggtcatccctaagcctttgccacctcctgagtagtagttctgagtctcctgctggcacccccctgcagccaccagggtttggcagtaccttggctggaatgtcaggcctcaggaccacaggttcttatgatgggtcattttccctctcagccctgagagaagcacagaacctggcattcactggactgaatctggttgcccggaatgagtgctcacgtgatggagacccagcagagggaggcagaagggccttcccactctgccagcttcctggagccgtgcatttcctcccccttgtacagttcttcatcggcttacactgccaggccctgcaggacttggcagctgctaagagaagcggagcacctggggactcaccgacacattcctcctgcgtgagctctggggtagagaccaaccctgaggactcagtgtgcatcctggaaggcttctctgtgactgcacttagcattcttcagcacctggtgtgccacagcggagcagtcgtctccctattactgtcaggagtgggggcagattctgctgctggggaaggaaacaggagcctggttcacaggcttagtgatggagatatgacctcagccctaaggggggttgctgatgaccaaggacagcacccactgttgaagatgcttcttcacctgttggctttctcttctgcagcaacaggtcaccttcaagccagtgtcctgacccagtgccttaaggttttggtgaaattagccgaaaacacttcctgtgatttcttgcccaggttccagtgtgtgttccaagtgctgccaaagtgcctcagcccagagacacccctgcctagcgtgctgctggctgttgagctcctctccctgctggcggaccacgaccagctggcacctcagctctgttcccactcagaaggctgcctcctgctgctgctgtacatgtacatcacatcacggcctgacagagtggccttggagacacaatggctccagctggaacaagaggtggtcagagcgctcacggtgatgttgcacagacagtggctgacagtgcggagggcagggggacccccaaggaccgaccagcagaggcggacagtgcgctgtctgcgggacacggtgctgctgctgcacggcctatcgcagaaggacaagctcttcatgatgcactgcgtggaggtcctgcatcagtttgaccaggtgatgccgggggtcagcatgctcatccgagggcttcctgatgtgacggactgtgaagaggcagccctggatgacctctgtgccgcggaaaccgatgtggaagaccccgaggtggagtgtggctgaggccctgagtgtccagccacatggtggcaccagcaccactcctttccttaccacatcaactgattaaagcagtgaccagcaggaactgcccagagaactggctggccttgtttcctgagtctgatctgtttggcggagtgggaggggtggagcaggacccggaccctgagtggctgggatccttcttcctgtccctggctgttgctgagcccgtccccatggtaactgatctgccttgaggaaggagccctgccctgcctgtggaattgtcctgagtcattgctttgggctggggccatgggaagaaaccattgtgtggcagggaaggaggtggctcttggcccaggcctaaaccaggaaagcctgggaaactgggacccacaggtgggcatgaaagggccgcagcaggggctcccagcagtgtgtaagaccgggagctggtctggcaccactgccctggtccttccagctgcctgtcactggtatgatggccccggtgcattgtgccaccagcaggccacagctgtggatcttggaaggcctctggggtcccccgggagcaggggagtgggtgtgggggggaacggatggtggtgagagggacagaccaggcaggctgacgagcagggcgggcctggctcacgtgggcctgtaggcgggcccacgccaagtttcacttaccgccactgctgccagcgagagccgcgggagagtgtgcagccgagtcactactgcctgcctgcctgcctgctacggtgagtgtggcccccacaatgggatggcgcagggcaggagggccatgggttcccccaccccagactaagggggcactaggggaggggccgagtcatgtgaagagggagaccctctcagacagtcgaatgtgctggtcccactaaggaaaccacctcaccctctccaacttcctgcctgaaaatgggccctggagctcgcagacagggcaggattgtgcagggaaggcctgagatgtgcttctgcccaccccctaccccactccctccccttcggatcttaacactgggcactcacacacccaccccatgctcctctccaggctcagcagcaggtacgtacccaaccatgggctcgcaggccctgcccccggggcccatgcagaccctcatctttttcgacatggaggccactggcttgcccttctcccagcccaaggtcacggagctgtgcctgctggctgtccacagatgtgccctggagagcccccccacctctcaggggccacctcccacagttcctccaccaccgcgtgtggtagacaagctctccctgtgtgtggctccggggaaggcctgcagccctgcagccagcgagatcacaggtctgagcacagctgtgctggcagcgcatgggcgtcaatgttttgatgacaacctggccaacctgctcctagccttcctgcggcgccagccacagccctggtgcctggtggcacacaatggtgaccgctacgacttccccctgctccaagcagagctggctatgctgggcctcaccagtgctctggatggtgccttctgtgtggatagcatcactgcgctgaaggccctggagcgagcaagcagcccctcagaacacggcccaaggaagagctacagcctaggcagcatctacactcgcctgtatgggcagtcccctccagactcgcacacggctgagggtgatgtcctggccctgctcagcatctgtcagtggagaccacaggccctgctgcggtgggtggatgctcacgccaggcctttcggcaccatcaggcccatgtatggggtcacagcctctgctaggaccaagccaagaccatctgctgtcacaaccactgcacacctggccacaaccaggaacactagtcccagccttggagagagcaggggtaccaaggatcttcctccagtgaaggaccctggagccctatccagggaggggctgctggccccactgggtctgctggccatcctgaccttggcagtagccacactgtatggactatccctggccacacctggggagtaggccaagaaggaaaatctgacgaataaagacccccgctgccccata

SEQ ID NO: 29026 - DNA, 4177 bp, Homo sapiens
gcactcgcggcggaggcaagcggcggcgcgcggacggttggtccagttctccggcctggcggcaggcaagtctagctcggcgctgtcggatacttggggtgagcggaaagcatggcggggacctccgcgccaggcagcaagaggcggagcgagcccccggcgcctcgccccggcccgccgccgggcaccgggcaccccccgagcaagcgggcccggggcttctccgcagccgctgccccggaccctgacgacccgttcggcgcgcatggggacttcactgccgacgacctggaggagcttgacaccctcgcgtcacaggccctgagccaatgtccggccgcggctcgggacgtgtccagtgatcataaggtccacagattattagatggcatgtcaaaaaatccttcagggaaaaacagagaaactgttccaattaaagataatttcgaattagaggtacttcaggcacaatacaaagaacttaaagaaaagatgaaagtaatggaagaagaagttctcattaagaatggagaaattaaaattttgcgagactcactacatcagacggaatccgttctagaggaacagagaagatcacattttcttcttgagcaagagaaaacccaagcactcagtgacaaggaaaaggaattctccaaaaagctccaatcattgcagtctgaactccagtttaaagatgcagagatgaatgaattaaggacaaagctccagaccagtgaacgagcaaataaactggctgctccctctgtttcccatgtcagtcctaggaaaaacccttctgtggttataaagccagaagcatgttctccacaatttggaaaaacatcttttcctacaaaggagtcttttagtgctaacatgtcccttccccacccctgccagacggagtcaggatacaagcctctggtgggcagagaggatagtaagccccacagtctgagaggtgactccataaaacaagaagaggcccagaaaagctttgttgacagctggagacagagatcaaacactcaaggttccattttgataaacctgctcctgaagcagcctttgatcccagggtcatccctaagcctttgccacctcctgagtagtagttctgagtctcctgctggcacccccctgcagccaccagggtttggcagtaccttggctggaatgtcaggcctcaggaccacaggttcttatgatgggtcattttccctctcagccctgagagaagcacagaacctggcattcactggactgaatctggttgcccggaatgagtgctcacgtgatggagacccagcagagggaggcagaagggccttcccactctgccagcttcctggagccgtgcatttcctcccccttgtacagttcttcatcggcttacactgccaggccctgcaggacttggcagctgctaagagaagcggagcacctggggactcaccgacacattcctcctgcgtgagctctggggtagagaccaaccctgaggactcagtgtgcatcctggaaggcttctctgtgactgcacttagcattcttcagcacctggtgtgccacagcggagcagtcgtctccctattactgtcaggagtgggggcagattctgctgctggggaaggaaacaggagcctggttcacaggcttagtgatggagatatgacctcagccctaaggggggttgctgatgaccaaggacagcacccactgttgaagatgcttcttcacctgttggctttctcttctgcagcaacaggtcaccttcaagccagtgtcctgacccagtgccttaaggttttggtgaaattagccgaaaacacttcctgtgatttcttgcccaggttccagtgtgtgttccaagtgctgccaaagtgcctcagcccagagacacccctgcctagcgtgctgctggctgttgagctcctctccctgctggcggaccacgaccagctggcacctcagctctgttcccactcagaaggctgcctcctgctgctgctgtacatgtacatcacatcacggcctgacagagtggccttggagacacaatggctccagctggaacaagaggtggtcagagcgctcacggtgatgttgcacagacagtggctgacagtgcggagggcagggggacccccaaggaccgaccagcagaggcggacagtgcgctgtctgcgggacacggtgctgctgctgcacggcctatcgcagaaggacaagctcttcatgatgcactgcgtggaggtcctgcatcagtttgaccaggtgatgccgggggtcagcatgctcatccgagggcttcctgatgtgacggactgtgaagaggcagccctggatgacctctgtgccgcggaaaccgatgtggaagaccccgaggtggagtgtggctgaggccctgagtgtccagccacatggtggcaccagcaccactcctttccttaccacatcaactgattaaagcagtgaccagcaggaactgcccagagaactggctggccttgtttcctgagtctgatctgtttggcggagtgggaggggtggagcaggacccggaccctgagtggctgggatccttcttcctgtccctggctgttgctgagcccgtccccatggtaactgatctgccttgaggaaggagccctgccctgcctgtggaattgtcctgagtcattgctttgggctggggccatgggaagaaaccattgtgtggcagggaaggaggtggctcttggcccaggcctaaaccaggaaagcctgggaaactgggacccacaggtgggcatgaaagggccgcagcaggggctcccagcagtgtgtaagaccgggagctggtctggcaccactgccctggtccttccagctgcctgtcactggtatgatggccccggtgcattgtgccaccagcaggccacagctgtggatcttggaaggcctctggggtcccccgggagcaggggagtgggtgtgggggggaacggatggtggtgagagggacagaccaggcaggctgacgagcagggcgggcctggctcacgtgggcctgtaggcgggcccacgccaagtttcacttaccgccactgctgccagcgagagccgcgggagagtgtgcagccgagtcactactgcctgcctgcctgcctgctacggctcagcagcaggtacgtacccaaccatgggctcgcaggccctgcccccggggcccatgcagaccctcatctttttcgacatggaggccactggcttgcccttctcccagcccaaggtcacggagctgtgcctgctggctgtccacagatgtgccctggagagcccccccacctctcaggggccacctcccacagttcctccaccaccgcgtgtggtagacaagctctccctgtgtgtggctccggggaaggcctgcagccctgcagccagcgagatcacaggtctgagcacagctgtgctggcagcgcatgggcgtcaatgttttgatgacaacctggccaacctgctcctagccttcctgcggcgccagccacagccctggtgcctggtggcacacaatggtgaccgctacgacttccccctgctccaagcagagctggctatgctgggcctcaccagtgctctggatggtgccttctgtgtggatagcatcactgcgctgaaggccctggagcgagcaagcagcccctcagaacacggcccaaggaagagctacagcctaggcagcatctacactcgcctgtatgggcagtcccctccagactcgcacacggctgagggtgatgtcctggccctgctcagcatctgtcagtggagaccacaggccctgctgcggtgggtggatgctcacgccaggcctttcggcaccatcaggcccatgtatggggtcacagcctctgctaggaccaagccaagaccatctgctgtcacaaccactgcacacctggccacaaccaggaacactagtcccagccttggagagagcaggggtaccaaggatcttcctccagtgaaggaccctggagccctatccagggaggggctgctggccccactgggtctgctggccatcctgaccttggcagtagccacactgtatggactatccctggccacacctggggagtaggccaagaaggaaaatctgacgaataaagacccccgctgccccata

SEQ ID NO: 29027 - DNA, 4258 bp, Homo sapiens
gcactcgcggcggaggcaagcggcggcgcgcggacggttggtccagttctccggcctggcggcaggcaagtctagctcggcgctgtcggatacttggggtgagcggaaagcatggcggggacctccgcgccaggcagcaagaggcggagcgagcccccggcgcctcgccccggcccgccgccgggcaccgggcaccccccgagcaagcgggcccggggcttctccgcagccgctgccccggaccctgacgacccgttcggcgcgcatggggacttcactgccgacgacctggaggagcttgacaccctcgcgtcacaggccctgagccaatgtccggccgcggctcgggacgtgtccagtgatcataaggtccacagattattagatggcatgtcaaaaaatccttcagggaaaaacagagaaactgttccaattaaagataatttcgaattagaggtacttcaggcacaatacaaagaacttaaagaaaagatgaaagtaatggaagaagaagttctcattaagaatggagaaattaaaattttgcgagactcactacatcagacggaatccgttctagaggaacagagaagatcacattttcttcttgagcaagagaaaacccaagcactcagtgacaaggaaaaggaattctccaaaaagctccaatcattgcagtctgaactccagtttaaagatgcagagatgaatgaattaaggacaaagctccagaccagtgaacgagcaaataaactggctgctccctctgtttcccatgtcagtcctaggaaaaacccttctgtggttataaagccagaagcatgttctccacaatttggaaaaacatcttttcctacaaaggagtcttttagtgctaacatgtcccttccccacccctgccagacggagtcaggatacaagcctctggtgggcagagaggatagtaagccccacagtctgagaggtgactccataaaacaagaagaggcccagaaaagctttgttgacagctggagacagagatcaaacactcaaggttccattttgataaacctgctcctgaagcagcctttgatcccagggtcatccctaagcctttgccacctcctgagtagtagttctgagtctcctgctggcacccccctgcagccaccagggtttggcagtaccttggctggaatgtcaggcctcaggaccacaggttcttatgatgggtcattttccctctcagccctgagagaagcacagaacctggcattcactggactgaatctggttgcccggaatgagtgctcacgtgatggagacccagcagagggaggcagaagggccttcccactctgccagcttcctggagccgtgcatttcctcccccttgtacagttcttcatcggcttacactgccaggccctgcaggacttggcagctgctaagagaagcggagcacctggggactcaccgacacattcctcctgcgtgagctctggggtagagaccaaccctgaggactcagtgtgcatcctggaaggcttctctgtgactgcacttagcattcttcagcacctggtgtgccacagcggagcagtcgtctccctattactgtcaggagtgggggcagattctgctgctggggaaggaaacaggagcctggttcacaggcttagtgatggagatatgacctcagccctaaggggggttgctgatgaccaaggacagcacccactgttgaagatgcttcttcacctgttggctttctcttctgcagcaacaggtcaccttcaagccagtgtcctgacccagtgccttaaggttttggtgaaattagccgaaaacacttcctgtgatttcttgcccaggttccagtgtgtgttccaagtgctgccaaagtgcctcagcccagagacacccctgcctagcgtgctgctggctgttgagctcctctccctgctggcggaccacgaccagctggcacctcagctctgttcccactcagaaggctgcctcctgctgctgctgtacatgtacatcacatcacggcctgacagagtggccttggagacacaatggctccagctggaacaagaggtggtgtggctcctggctaagcttggtgtgcagagccccttgcccccagtcactggctccaactgccagtgtaatgtggaggtggtcagagcgctcacggtgatgttgcacagacagtggctgacagtgcggagggcagggggacccccaaggaccgaccagcagaggcggacagtgcgctgtctgcgggacacggtgctgctgctgcacggcctatcgcagaaggacaagctcttcatgatgcactgcgtggaggtcctgcatcagtttgaccaggtgatgccgggggtcagcatgctcatccgagggcttcctgatgtgacggactgtgaagaggcagccctggatgacctctgtgccgcggaaaccgatgtggaagaccccgaggtggagtgtggctgaggccctgagtgtccagccacatggtggcaccagcaccactcctttccttaccacatcaactgattaaagcagtgaccagcaggaactgcccagagaactggctggccttgtttcctgagtctgatctgtttggcggagtgggaggggtggagcaggacccggaccctgagtggctgggatccttcttcctgtccctggctgttgctgagcccgtccccatggtaactgatctgccttgaggaaggagccctgccctgcctgtggaattgtcctgagtcattgctttgggctggggccatgggaagaaaccattgtgtggcagggaaggaggtggctcttggcccaggcctaaaccaggaaagcctgggaaactgggacccacaggtgggcatgaaagggccgcagcaggggctcccagcagtgtgtaagaccgggagctggtctggcaccactgccctggtccttccagctgcctgtcactggtatgatggccccggtgcattgtgccaccagcaggccacagctgtggatcttggaaggcctctggggtcccccgggagcaggggagtgggtgtgggggggaacggatggtggtgagagggacagaccaggcaggctgacgagcagggcgggcctggctcacgtgggcctgtaggcgggcccacgccaagtttcacttaccgccactgctgccagcgagagccgcgggagagtgtgcagccgagtcactactgcctgcctgcctgcctgctacggctcagcagcaggtacgtacccaaccatgggctcgcaggccctgcccccggggcccatgcagaccctcatctttttcgacatggaggccactggcttgcccttctcccagcccaaggtcacggagctgtgcctgctggctgtccacagatgtgccctggagagcccccccacctctcaggggccacctcccacagttcctccaccaccgcgtgtggtagacaagctctccctgtgtgtggctccggggaaggcctgcagccctgcagccagcgagatcacaggtctgagcacagctgtgctggcagcgcatgggcgtcaatgttttgatgacaacctggccaacctgctcctagccttcctgcggcgccagccacagccctggtgcctggtggcacacaatggtgaccgctacgacttccccctgctccaagcagagctggctatgctgggcctcaccagtgctctggatggtgccttctgtgtggatagcatcactgcgctgaaggccctggagcgagcaagcagcccctcagaacacggcccaaggaagagctacagcctaggcagcatctacactcgcctgtatgggcagtcccctccagactcgcacacggctgagggtgatgtcctggccctgctcagcatctgtcagtggagaccacaggccctgctgcggtgggtggatgctcacgccaggcctttcggcaccatcaggcccatgtatggggtcacagcctctgctaggaccaagccaagaccatctgctgtcacaaccactgcacacctggccacaaccaggaacactagtcccagccttggagagagcaggggtaccaaggatcttcctccagtgaaggaccctggagccctatccagggaggggctgctggccccactgggtctgctggccatcctgaccttggcagtagccacactgtatggactatccctggccacacctggggagtaggccaagaaggaaaatctgacgaataaagacccccgctgccccata

SEQ ID NO: 29028 - DNA, 4054 bp, Homo sapiens
gcactcgcggcggaggcaagcggcggcgcgcggacggttggtccagttctccggcctggcggcaggcaagtctagctcggcgctgtcggatacttggggtgagcggaaagcatggcggggacctccgcgccaggcagcaagaggcggagcgagcccccggcgcctcgccccggcccgccgccgggcaccgggcaccccccgagcaagcgggcccggggcttctccgcagccgctgccccggaccctgacgacccgttcggcgcgcatggggacttcactgccgacgacctggaggagcttgacaccctcgcgtcacaggccctgagccaatgtccggccgcggctcgggacgtgtccagtgatcataaggtccacagattattagatggcatgtcaaaaaatccttcagggaaaaacagagaaactgttccaattaaagataatttcgaattagaggtacttcaggcacaatacaaagaacttaaagaaaagatgaaagtaatggaagaagaagttctcattaagaatggagaaattaaaattttgcgagactcactacatcagacggaatccgttctagaggaacagagaagatcacattttcttcttgagcaagagaaaacccaagcactcagtgacaaggaaaaggaattctccaaaaagctccaatcattgcagtctgaactccagtttaaagatgcagagatgaatgaattaaggacaaagctccagaccagtgaacgagcaaataaactggctgctccctctgtttcccatgtcagtcctaggaaaaacccttctgtggttataaagccagaagcatgttctccacaatttggaaaaacatcttttcctacaaaggagtcttttagtgctaacatgtcccttccccacccctgccagacggagtcaggatacaagcctctggtgggcagagaggatagtaagccccacagtctgagaggtgactccataaaacaagaagaggcccagaaaagctttgttgacagctggagacagagatcaaacactcaaggttccattttgataaacctgctcctgaagcagcctttgatcccagggtcatccctaagcctttgccacctcctgagtagtagttctgagtctcctgctggcacccccctgcagccaccagggtttggcagtaccttggctggaatgtcaggcctcaggaccacaggttcttatgatgggtcattttccctctcagccctgagagaagcacagaacctggcattcactggactgaatctggttgcccggaatgagtgctcacgtgatggagacccagcagagggaggcagaagggccttcccactctgccagcttcctggagccgtgcatttcctcccccttgtacagttcttcatcggcttacactgccaggccctgcaggacttggcagctgctaagagaagcggagcacctggggactcaccgacacattcctcctgccaacaggtcaccttcaagccagtgtcctgacccagtgccttaaggttttggtgaaattagccgaaaacacttcctgtgatttcttgcccagagccgcaagattggggagaactgtgaacacaaccagcccaccccctcatccagtaatccagtctccctcagcactctaccaaagggttccagtgtgtgttccaagtgctgccaaagtgcctcagcccagagacacccctgcctagcgtgctgctggctgttgagctcctctccctgctggcggaccacgaccagctggcacctcagctctgttcccactcagaaggctgcctcctgctgctgctgtacatgtacatcacatcacggcctgacagagtggccttggagacacaatggctccagctggaacaagaggtggtgtggctcctggctaagcttggtgtgcagagccccttgcccccagtcactggctccaactgccagtgtaatgtggaggtggtcagagcgctcacggtgatgttgcacagacagtggctgacagtgcggagggcagggggacccccaaggaccgaccagcagaggcggacagtgcgctgtctgcgggacacggtgctgctgctgcacggcctatcgcagaaggacaagctcttcatgatgcactgcgtggaggtcctgcatcagtttgaccaggtgatgccgggggtcagcatgctcatccgagggcttcctgatgtgacggactgtgaagaggcagccctggatgacctctgtgccgcggaaaccgatgtggaagaccccgaggtggagtgtggctgaggccctgagtgtccagccacatggtggcaccagcaccactcctttccttaccacatcaactgattaaagcagtgaccagcaggaactgcccagagaactggctggccttgtttcctgagtctgatctgtttggcggagtgggaggggtggagcaggacccggaccctgagtggctgggatccttcttcctgtccctggctgttgctgagcccgtccccatggtaactgatctgccttgaggaaggagccctgccctgcctgtggaattgtcctgagtcattgctttgggctggggccatgggaagaaaccattgtgtggcagggaaggaggtggctcttggcccaggcctaaaccaggaaagcctgggaaactgggacccacaggtgggcatgaaagggccgcagcaggggctcccagcagtgtgtaagaccgggagctggtctggcaccactgccctggtccttccagctgcctgtcactggtatgatggccccggtgcattgtgccaccagcaggccacagctgtggatcttggaaggcctctggggtcccccgggagcaggggagtgggtgtgggggggaacggatggtggtgagagggacagaccaggcaggctgacgagcagggcgggcctggctcacgtgggcctgtaggcgggcccacgccaagtttcacttaccgccactgctgccagcgagagccgcgggagagtgtgcagccgagtcactactgcctgcctgcctgcctgctacggctcagcagcaggtacgtacccaaccatgggctcgcaggccctgcccccggggcccatgcagaccctcatctttttcgacatggaggccactggcttgcccttctcccagcccaaggtcacggagctgtgcctgctggctgtccacagatgtgccctggagagcccccccacctctcaggggccacctcccacagttcctccaccaccgcgtgtggtagacaagctctccctgtgtgtggctccggggaaggcctgcagccctgcagccagcgagatcacaggtctgagcacagctgtgctggcagcgcatgggcgtcaatgttttgatgacaacctggccaacctgctcctagccttcctgcggcgccagccacagccctggtgcctggtggcacacaatggtgaccgctacgacttccccctgctccaagcagagctggctatgctgggcctcaccagtgctctggatggtgccttctgtgtggatagcatcactgcgctgaaggccctggagcgagcaagcagcccctcagaacacggcccaaggaagagctacagcctaggcagcatctacactcgcctgtatgggcagtcccctccagactcgcacacggctgagggtgatgtcctggccctgctcagcatctgtcagtggagaccacaggccctgctgcggtgggtggatgctcacgccaggcctttcggcaccatcaggcccatgtatggggtcacagcctctgctaggaccaagccaagaccatctgctgtcacaaccactgcacacctggccacaaccaggaacactagtcccagccttggagagagcaggggtaccaaggatcttcctccagtgaaggaccctggagccctatccagggaggggctgctggccccactgggtctgctggccatcctgaccttggcagtagccacactgtatggactatccctggccacacctggggagtaggccaagaaggaaaatctgacgaataaagacccccgctgccccata

SEQ ID NO: 29029 - DNA, 5224 bp, Homo sapiens
gcactcgcggcggaggcaagcggcggcgcgcggacggttggtccagttctccggcctggcggcaggcaagtctagctcggcgctgtcggatacttggggtgagcggaaagcatggcggggacctccgcgccaggcagcaagaggcggagcgagcccccggcgcctcgccccggcccgccgccgggcaccgggcaccccccgagcaagcgggcccggggcttctccgcagccgctgccccggaccctgacgacccgttcggcgcgcatggggacttcactgccgacgacctggaggagcttgacaccctcgcgtcacaggccctgagccaatgtccggccgcggctcgggacgtgtccagtgatcataaggtccacagattattagatggcatgtcaaaaaatccttcagggaaaaacagagaaactgttccaattaaagataatttcgaattagaggtacttcaggcacaatacaaagaacttaaagaaaagatgaaagtaatggaagaagaagttctcattaagaatggagaaattaaaattttgcgagactcactacatcagacggaatccgttctagaggaacagagaagatcacattttcttcttgagcaagagaaaacccaagcactcagtgacaaggaaaaggaattctccaaaaagctccaatcattgcagtctgaactccagtttaaagatgcagagatgaatgaattaaggacaaagctccagaccagtgaacgagcaaataaactggctgctccctctgtttcccatgtcagtcctaggaaaaacccttctgtggttataaagccagaagcatgttctccacaatttggaaaaacatcttttcctacaaaggagtcttttagtgctaacatgtcccttccccacccctgccagacggagtcaggatacaagcctctggtgggcagagaggatagtaagccccacagtctgagaggtgactccataaaacaagaagaggcccagaaaagctttgttgacagctggagacagagatcaaacactcaaggttccattttgataaacctgctcctgaagcagcctttgatcccagggtcatccctaagcctttgccacctcctgagtagtagttctgagtctcctgctggcacccccctgcagccaccagggtttggcagtaccttggctggaatgtcaggcctcaggaccacaggttcttatgatgggtcattttccctctcagccctgagagaagcacagaacctggcattcactggactgaatctggttgcccggaatgagtgctcacgtgatggagacccagcagagggaggcagaagggccttcccactctgccagcttcctggagccgtgcatttcctcccccttgtacagttcttcatcggcttacactgccaggccctgcaggacttggcagctgctaagagaagcggagcacctggggactcaccgacacattcctcctgcgtgagctctggggtagagaccaaccctgaggactcagtgtgcatcctggaaggcttctctgtgactgcacttagcattcttcagcacctggtgtgccacagcggagcagtcgtctccctattactgtcaggagtgggggcagattctgctgctggggaaggaaacaggagcctggttcacaggcttagtgatggagatatgacctcagccctaaggggggttgctgatgaccaaggacagcacccactgttgaagatgcttcttcacctgttggctttctcttctgcagcaacaggtcaccttcaagccagtgtcctgacccagtgccttaaggttttggtgaaattagccgaaaacacttcctgtgatttcttgcccaggtattaagctgcataggagtcatgattctttgtgggtctcacctgacctcttaaggtctaacccatggcacttgtactttgctcacatcttgacttatctacactagttagttctaaggcttggttcagggagttctgaagtgatgggaagtggggccaaatgggagaaccaaggaagtggtttatttgatttaattctgcctctgaacaacaggtaagcaaaaggcacacatgattaaaggaggctgctaacctctgtggaggagggccctgccccaggacaagggttaagacaaggggcctctgaacctgagatgtgggtaaggtgaagaccacacatcacaagcacgttgaagtttagtggtttccctaaggaagcagaggatgtggagagggtctgcagcccacgggctgaccttgctgggagtctctgcctgtcattgtgcccatctttagcatgcatctggggtggcctgttcttcttaaggtttgtgggtagtatattatagtgaacctagcgaatgaacactgtgatcataaattcctcccttgggattccagagccgcaagattggggagaactgtgaacacaaccagcccaccccctcatccagtaatccagtctccctcagcactctaccaaagggttccagtgtgtgttccaagtgctgccaaagtgcctcagcccagagacacccctgcctagcgtgctgctggctgttgagctcctctccctgctggcggaccacgaccagctggcacctcagctctgttcccactcagaaggctgcctcctgctgctgctgtacatgtacatcacatcacggcctgacagagtggccttggagacacaatggctccagctggaacaagaggtggtgtggctcctggctaagcttggtgtgcagagccccttgcccccagtcactggctccaactgccagtgtaatgtggaggtggtcagagcgctcacggtgatgttgcacagacagtggctgacagtgcggagggcagggggacccccaaggaccgaccagcagaggcggacagtgcgctgtctgcgggacacggtgctgctgctgcacggcctatcgcagaaggacaagctcttcatgatgcactgcgtggaggtcctgcatcagtttgaccaggtgatgccgggggtcagcatgctcatccgagggcttcctgatgtgacggactgtgaagaggcagccctggatgacctctgtgccgcggaaaccgatgtggaagaccccgaggtggagtgtggctgaggccctgagtgtccagccacatggtggcaccagcaccactcctttccttaccacatcaactgattaaagcagtgaccagcaggaactgcccagagaactggctggccttgtttcctgagtctgatctgtttggcggagtgggaggggtggagcaggacccggaccctgagtggctgggatccttcttcctgtccctggctgttgctgagcccgtccccatggtaactgatctgccttgaggaaggagccctgccctgcctgtggaattgtcctgagtcattgctttgggctggggccatgggaagaaaccattgtgtggcagggaaggaggtggctcttggcccaggcctaaaccaggaaagcctgggaaactgggacccacaggtgggcatgaaagggccgcagcaggggctcccagcagtgtgtaagaccgggagctggtctggcaccactgccctggtccttccagctgcctgtcactggtatgatggccccggtgcattgtgccaccagcaggccacagctgtggatcttggaaggcctctggggtcccccgggagcaggggagtgggtgtgggggggaacggatggtggtgagagggacagaccaggcaggctgacgagcagggcgggcctggctcacgtgggcctgtaggcgggcccacgccaagtttcacttaccgccactgctgccagcgagagccgcgggagagtgtgcagccgagtcactactgcctgcctgcctgcctgctacggtgagtgtggcccccacaatgggatggcgcagggcaggagggccatgggttcccccaccccagactaagggggcactaggggaggggccgagtcatgtgaagagggagaccctctcagacagtcgaatgtgctggtcccactaaggaaaccacctcaccctctccaacttcctgcctgaaaatgggccctggagctcgcagacagggcaggattgtgcagggaaggcctgagatgtgcttctgcccaccccctaccccactccctccccttcggatcttaacactgggcactcacacacccaccccatgctcctctccaggctcagcagcaggtacgtacccaaccatgggctcgcaggccctgcccccggggcccatgcagaccctcatctttttcgacatggaggccactggcttgcccttctcccagcccaaggtcacggagctgtgcctgctggctgtccacagatgtgccctggagagcccccccacctctcaggggccacctcccacagttcctccaccaccgcgtgtggtagacaagctctccctgtgtgtggctccggggaaggcctgcagccctgcagccagcgagatcacaggtctgagcacagctgtgctggcagcgcatgggcgtcaatgttttgatgacaacctggccaacctgctcctagccttcctgcggcgccagccacagccctggtgcctggtggcacacaatggtgaccgctacgacttccccctgctccaagcagagctggctatgctgggcctcaccagtgctctggatggtgccttctgtgtggatagcatcactgcgctgaaggccctggagcgagcaagcagcccctcagaacacggcccaaggaagagctacagcctaggcagcatctacactcgcctgtatgggcagtcccctccagactcgcacacggctgagggtgatgtcctggccctgctcagcatctgtcagtggagaccacaggccctgctgcggtgggtggatgctcacgccaggcctttcggcaccatcaggcccatgtatggggtcacagcctctgctaggaccaagccaagaccatctgctgtcacaaccactgcacacctggccacaaccaggaacactagtcccagccttggagagagcaggggtaccaaggatcttcctccagtgaaggaccctggagccctatccagggaggggctgctggccccactgggtctgctggccatcctgaccttggcagtagccacactgtatggactatccctggccacacctggggagtaggccaagaaggaaaatctgacgaataaagacccccgctgccccata

SEQ ID NO: 29030 - DNA, 3755 bp, Homo sapiens
gcactcgcggcggaggcaagcggcggcgcgcggacggttggtccagttctccggcctggcggcaggcaagtctagctcggcgctgtcggatacttggggtgagcggaaagcatggcggggacctccgcgccaggcagcaagaggcggagcgagcccccggcgcctcgccccggcccgccgccgggcaccgggcaccccccgagcaagcgggcccggggcttctccgcagccgctgccccggaccctgacgacccgttcggcgcgcatggggacttcactgccgacgacctggaggagcttgacaccctcgcgtcacaggccctgagccaatgtccggccgcggctcgggacgtgtccagtgatcataaggtccacagattattagatggcatgtcaaaaaatccttcagggaaaaacagagaaactgttccaattaaagataatttcgaattagaggtacttcaggcacaatacaaagaacttaaagaaaagatgaaagtaatggaagaagaagttctcattaagaatggagaaattaaaattttgcgagactcactacatcagacggaatccgttctagaggaacagagaagatcacattttcttcttgagcaagagaaaacccaagcactcagtgacaaggaaaaggaattctccaaaaagctccaatcattgcagtctgaactccagtttaaagatgcagagatgaatgaattaaggacaaagctccagaccagtgaacgagcaaataaactggctgctccctctgtttcccatgtcagtcctaggaaaaacccttctgtggttataaagccagaagcatgttctccacaatttggaaaaacatcttttcctacaaaggagtcttttagtgctaacatgtcccttccccacccctgccagacggagtcaggatacaagcctctggtgggcagagaggatagtaagccccacagtctgagaggtgactccataaaacaagaagaggcccagaaaagctttgttgacagctggagacagagatcaaacactcaaggttccattttgataaacctgctcctgaagcagcctttgatcccagggtcatccctaagcctttgccacctcctgagtagtagttctgagtctcctgctggcacccccctgcagccaccagggtttggcagtaccttggctggaatgtcaggcctcaggaccacaggttcttatgatgggtcattttccctctcagccctgagagaagcacagaacctggcattcactggactgaatctggttgcccggaatgagtgctcacgtgatggagacccagcagagggaggcagaagggccttcccactctgccagcttcctggagccgtgcatttcctcccccttgtacagttcttcatcggcttacactgccaggccctgcaggacttggcagctgctaagagaagcggagcacctggggactcaccgacacattcctcctgcgtgagctctggggtagagaccaaccctgaggactcagtgtgcatcctggaaggcttctctgtgactgcacttagcattcttcagcacctggtgtgccacagcggagcagtcgtctccctattactgtcaggagtgggggcagattctgctgctggggaaggaaacaggagcctggttcacaggcttagtgatggagatatgacctcagccctaaggggggttgctgatgaccaaggacagcacccactgttgaagatgcttcttcacctgttggctttctcttctgcagcaacaggtcaccttcaagccagtgtcctgacccagtgccttaaggttttggtgaaattagccgaaaacacttcctgtgatttcttgcccaggttccagtgtgtgttccaagtgctgccaaagtgcctcagcccagagacacccctgcctagcgtgctgctggctgttgagctcctctccctgctggcggaccacgaccagctggcacctcagctctgttcccactcagaaggctgcctcctgctgctgctgtacatgtacatcacatcacggcctgacagagtggccttggagacacaatggctccagctggaacaagaggtggtcagagcgctcacggtgatgttgcacagacagtggctgacagtgcggagggcagggggacccccaaggaccgaccagcagaggcggacagtgcgctgtctgcgggacacggtgctgctgctgcacggcctatcgcagaaggacaagctcttcatgatgcactgcgtggaggtcctgcatcagtttgaccaggtgatgccgggggtcagcatgctcatccgagggcttcctgatgtgacggactgtgaagaggcagccctggatgacctctgtgccgcggaaaccgatgtggaagaccccgaggtggagtgtggctgaggccctgagtgtccagccacatggtggcaccagcaccactcctttccttaccacatcaactgattaaagcagtgaccagcaggaactgcccagagaactggctggccttgtttcctgagtctgatctgtttggcggagtgggaggggtggagcaggacccggaccctgagtggctgggatccttcttcctgtccctggctgttgctgagcccgtccccatggtaactgatctgccttgaggaaggagccctgccctgcctgtggaattgtcctgagtcattgctttgggctggggccatgggaagaaaccattgtgtggcagggaaggaggtggctcttggcccaggcctaaaccaggaaagcctgggaaactgggacccacagcgagagccgcgggagagtgtgcagccgagtcactactgcctgcctgcctgcctgctacgcccaaggtcacggagctgtgcctgctggctgtccacagatgtgccctggagagcccccccacctctcaggggccacctcccacagttcctccaccaccgcgtgtggtagacaagctctccctgtgtgtggctccggggaaggcctgcagccctgcagccagcgagatcacaggtctgagcacagctgtgctggcagcgcatgggcgtcaatgttttgatgacaacctggccaacctgctcctagccttcctgcggcgccagccacagccctggtgcctggtggcacacaatggtgaccgctacgacttccccctgctccaagcagagctggctatgctgggcctcaccagtgctctggatggtgccttctgtgtggatagcatcactgcgctgaaggccctggagcgagcaagcagcccctcagaacacggcccaaggaagagctacagcctaggcagcatctacactcgcctgtatgggcagtcccctccagactcgcacacggctgagggtgatgtcctggccctgctcagcatctgtcagtggagaccacaggccctgctgcggtgggtggatgctcacgccaggcctttcggcaccatcaggcccatgtatggggtcacagcctctgctaggaccaagccaagaccatctgctgtcacaaccactgcacacctggccacaaccaggaacactagtcccagccttggagagagcaggggtaccaaggatcttcctccagtgaaggaccctggagccctatccagggaggggctgctggccccactgggtctgctggccatcctgaccttggcagtagccacactgtatggactatccctggccacacctggggagtaggccaagaaggaaaatctgacgaataaagacccccgctgccccata

SEQ ID NO: 29031 - DNA, 4029 bp, Homo sapiens
gcactcgcggcggaggcaagcggcggcgcgcggacggttggtccagttctccggcctggcggcaggcaagtctagctcggcgctgtcggatacttggggtgagcggaaagcatggcggggacctccgcgccaggcagcaagaggcggagcgagcccccggcgcctcgccccggcccgccgccgggcaccgggcaccccccgagcaagcgggcccggggcttctccgcagccgctgccccggaccctgacgacccgttcggcgcgcatggggacttcactgccgacgacctggaggagcttgacaccctcgcgtcacaggccctgagccaatgtccggccgcggctcgggacgtgtccagtgatcataaggtccacagattattagatggcatgtcaaaaaatccttcagggaaaaacagagaaactgttccaattaaagataatttcgaattagaggtacttcaggcacaatacaaagaacttaaagaaaagatgaaagtaatggaagaagaagttctcattaagaatggagaaattaaaattttgcgagactcactacatcagacggaatccgttctagaggaacagagaagatcacattttcttcttgagcaagagaaaacccaagcactcagtgacaaggaaaaggaattctccaaaaagctccaatcattgcagtctgaactccagtttaaagatgcagagatgaatgaattaaggacaaagctccagaccagtgaacgagcaaataaactggctgctccctctgtttcccatgtcagtcctaggaaaaacccttctgtggttataaagccagaagcatgttctccacaatttggaaaaacatcttttcctacaaaggagtcttttagtgctaacatgtcccttccccacccctgccagacggagtcaggatacaagcctctggtgggcagagaggatagtaagccccacagtctgagaggtgactccataaaacaagaagaggcccagaaaagctttgttgacagctggagacagagatcaaacactcaaggttccattttgataaacctgctcctgaagcagcctttgatcccagggtcatccctaagcctttgccacctcctgagtagtagttctgagtctcctgctggcacccccctgcagccaccagggtttggcagtaccttggctggaatgtcaggcctcaggaccacaggttcttatgatgggtcattttccctctcagccctgagagaagcacagaacctggcattcactggactgaatctggttgcccggaatgagtgctcacgtgatggagacccagcagagggaggcagaagggccttcccactctgccagcttcctggagccgtgcatttcctcccccttgtacagttcttcatcggcttacactgccaggccctgcaggacttggcagctgctaagagaagcggagcacctggggactcaccgacacattcctcctgcgtgagctctggggtagagaccaaccctgaggactcagtgtgcatcctggaaggcttctctgtgactgcacttagcattcttcagcacctggtgtgccacagcggagcagtcgtctccctattactgtcaggagtgggggcagattctgctgctggggaaggaaacaggagcctggttcacaggcttagtgatggagatatgacctcagccctaaggggggttgctgatgaccaaggacagcacccactgttgaagatgcttcttcacctgttggctttctcttctgcagcaacaggtcaccttcaagccagtgtcctgacccagtgccttaaggttttggtgaaattagccgaaaacacttcctgtgatttcttgcccaggttccagtgtgtgttccaagtgctgccaaagtgcctcagcccagagacacccctgcctagcgtgctgctggctgttgagctcctctccctgctggcggaccacgaccagctggcacctcagctctgttcccactcagaaggctgcctcctgctgctgctgtacatgtacatcacatcacggcctgacagagtggccttggagacacaatggctccagctggaacaagaggtggtcagagcgctcacggtgatgttgcacagacagtggctgacagtgcggagggcagggggacccccaaggaccgaccagcagaggcggacagtgcgctgtctgcgggacacggtgctgctgctgcacggcctatcgcagaaggacaagctcttcatgatgcactgcgtggaggtcctgcatcagtttgaccaggtgatgccgggggtcagcatgctcatccgagggcttcctgatgtgacggactgtgaagaggcagccctggatgacctctgtgccgcggaaaccgatgtggaagaccccgaggtggagtgtggctgaggccctgagtgtccagccacatggtggcaccagcaccactcctttccttaccacatcaactgattaaagcagtgaccagcaggaactgcccagagaactggctggccttgtttcctgagtctgatctgtttggcggagtgggaggggtggagcaggacccggaccctgagtggctgggatccttcttcctgtccctggctgttgctgagcccgtccccatggtaactgatctgccttgaggaaggagccctgccctgcctgtggaattgtcctgagtcattgctttgggctggggccatgggaagaaaccattgtgtggcagggaaggaggtggctcttggcccaggcctaaaccaggaaagcctgggaaactgggacccacaggtgggcatgaaagggccgcagcaggggctcccagcagtgtgtaagaccgggagctggtctggcaccactgccctggtccttccagctgcctgtcactggtatgatggccccggtgcattgtgccaccagcaggccacagctgtggatcttggaaggcctctggggtcccccgggagcaggggagtgggtgtgggggggaacggatggtggtgagagggacagaccaggcaggctgacgagcagggcgggcctggctcacgtgggcctgtaggcgggcccacgccaagtttcacttaccgccactgctgccagcgagagccgcgggagagtgtgcagccgagtcactactgcctgcctgcctgcctgctacgatgtgccctggagagcccccccacctctcaggggccacctcccacagttcctccaccaccgcgtgtggtagacaagctctccctgtgtgtggctccggggaaggcctgcagccctgcagccagcgagatcacaggtctgagcacagctgtgctggcagcgcatgggcgtcaatgttttgatgacaacctggccaacctgctcctagccttcctgcggcgccagccacagccctggtgcctggtggcacacaatggtgaccgctacgacttccccctgctccaagcagagctggctatgctgggcctcaccagtgctctggatggtgccttctgtgtggatagcatcactgcgctgaaggccctggagcgagcaagcagcccctcagaacacggcccaaggaagagctacagcctaggcagcatctacactcgcctgtatgggcagtcccctccagactcgcacacggctgagggtgatgtcctggccctgctcagcatctgtcagtggagaccacaggccctgctgcggtgggtggatgctcacgccaggcctttcggcaccatcaggcccatgtatggggtcacagcctctgctaggaccaagccaagaccatctgctgtcacaaccactgcacacctggccacaaccaggaacactagtcccagccttggagagagcaggggtaccaaggatcttcctccagtgaaggaccctggagccctatccagggaggggctgctggccccactgggtctgctggccatcctgaccttggcagtagccacactgtatggactatccctggccacacctggggagtaggccaagaaggaaaatctgacgaataaagacccccgctgccccata

SEQ ID NO: 29032 - DNA, 3739 bp, Homo sapiens
gcactcgcggcggaggcaagcggcggcgcgcggacggttggtccagttctccggcctggcggcaggcaagtctagctcggcgctgtcggatacttggggtgagcggaaagcatggcggggacctccgcgccaggcagcaagaggcggagcgagcccccggcgcctcgccccggcccgccgccgggcaccgggcaccccccgagcaagcgggcccggggcttctccgcagccgctgccccggaccctgacgacccgttcggcgcgcatggggacttcactgccgacgacctggaggagcttgacaccctcgcgtcacaggccctgagccaatgtccggccgcggctcgggacgtgtccagtgatcataaggtccacagattattagatggcatgtcaaaaaatccttcagggaaaaacagagaaactgttccaattaaagataatttcgaattagaggtacttcaggcacaatacaaagaacttaaagaaaagatgaaagtaatggaagaagaagttctcattaagaatggagaaattaaaattttgcgagactcactacatcagacggaatccgttctagaggaacagagaagatcacattttcttcttgagcaagagaaaacccaagcactcagtgacaaggaaaaggaattctccaaaaagctccaatcattgcagtctgaactccagtttaaagatgcagagatgaatgaattaaggacaaagctccagaccagtgaacgagcaaataaactggctgctccctctgtttcccatgtcagtcctaggaaaaacccttctgtggttataaagccagaagcatgttctccacaatttggaaaaacatcttttcctacaaaggagtcttttagtgctaacatgtcccttccccacccctgccagacggagtcaggatacaagcctctggtgggcagagaggatagtaagccccacagtctgagaggtgactccataaaacaagaagaggcccagaaaagctttgttgacagctggagacagagatcaaacactcaaggttccattttgataaacctgctcctgaagcagcctttgatcccagggtcatccctaagcctttgccacctcctgagtagtagttctgagtctcctgctggcacccccctgcagccaccagggtttggcagtaccttggctggaatgtcaggcctcaggaccacaggttcttatgatgggtcattttccctctcagccctgagagaagcacagaacctggcattcactggactgaatctggttgcccggaatgagtgctcacgtgatggagacccagcagagggaggcagaagggccttcccactctgccagcttcctggagccgtgcatttcctcccccttgtacagttcttcatcggcttacactgccaggccctgcaggacttggcagctgctaagagaagcggagcacctggggactcaccgacacattcctcctgcgtgagctctggggtagagaccaaccctgaggactcagtgtgcatcctggaaggcttctctgtgactgcacttagcattcttcagcacctggtgtgccacagcggagcagtcgtctccctattactgtcaggagtgggggcagattctgctgctggggaaggaaacaggagcctggttcacaggcttagtgatggagatatgacctcagccctaaggggggttgctgatgaccaaggacagcacccactgttgaagatgcttcttcacctgttggctttctcttctgcagcaacaggtcaccttcaagccagtgtcctgacccagtgccttaaggttttggtgaaattagccgaaaacacttcctgtgatttcttgcccaggttccagtgtgtgttccaagtgctgccaaagtgcctcagcccagagacacccctgcctagcgtgctgctggctgttgagctcctctccctgctggcggaccacgaccagctggcacctcagctctgttcccactcagaaggctgcctcctgctgctgctgtacatgtacatcacatcacggcctgacagagtggccttggagacacaatggctccagctggaacaagaggtggtcagagcgctcacggtgatgttgcacagacagtggctgacagtgcggagggcagggggacccccaaggaccgaccagcagaggcggacagtgcgctgtctgcgggacacggtgctgctgctgcacggcctatcgcagaaggacaagctcttcatgatgcactgcgtggaggtcctgcatcagtttgaccaggtgatgccgggggtcagcatgctcatccgagggcttcctgatgtgacggactgtgaagaggcagccctggatgacctctgtgccgcggaaaccgatgtggaagaccccgaggtggagtgtggctgaggccctgagtgtccagccacatggtggcaccagcaccactcctttccttaccacatcaactgattaaagcagtgaccagcaggaactgcccagagaactggctggccttgtttcctgagtctgatctgtttggcggagtgggaggggtggagcaggacccggaccctgagtggctgggatccttcttcctgtccctggctgttgctgagcccgtccccatggtaactgatctgccttgaggaaggagccctgccctgcctgtggaattgtcctgagtcattgctttgggctggggccatgggaagaaaccattgtgtggcagggaaggaggtggctcttggcccaggcctaaaccaggaaagcctgggaaactgggacccacaggtgggcatgaaagggccgcagcaggggctcccagcagtgtgtaagaccgggagctggtctggcaccactgccctggtccttccagctgcctgtcactggtatgatggccccggtgcattgtgccaccagcaggccacagctgtggatcttggaaggcctctggggtcccccgggagcaggggagtgggtgtgggggggaacggatggtggtgagagggacagaccaggcaggctgacgagcagggcgggcctggctcacgtgggcctgtaggcgggcccacgccaagtttcacttaccgccactgctgccagcgagagccgcgggagagtgtgcagccgagtcactactgcctgcctgcctgcctgctacgtggctatgctgggcctcaccagtgctctggatggtgccttctgtgtggatagcatcactgcgctgaaggccctggagcgagcaagcagcccctcagaacacggcccaaggaagagctacagcctaggcagcatctacactcgcctgtatgggcagtcccctccagactcgcacacggctgagggtgatgtcctggccctgctcagcatctgtcagtggagaccacaggccctgctgcggtgggtggatgctcacgccaggcctttcggcaccatcaggcccatgtatggggtcacagcctctgctaggaccaagccaagaccatctgctgtcacaaccactgcacacctggccacaaccaggaacactagtcccagccttggagagagcaggggtaccaaggatcttcctccagtgaaggaccctggagccctatccagggaggggctgctggccccactgggtctgctggccatcctgaccttggcagtagccacactgtatggactatccctggccacacctggggagtaggccaagaaggaaaatctgacgaataaagacccccgctgccccata

SEQ ID NO: 29033 - DNA, 3046 bp, Homo sapiens
ctgcatccctgtttgggagcatgtggaagccaggcatcccagatccaggaggtcatcccacttcctgggcgatgctacaccagataagggcctgtcctctcagctgcagcagtcttgcagtggaagtgcccacttgttcacatgaaacaagtttcatagcaagtaagtaggggtcaggccagcactgaaacccaagtctggctgaaccaactcacctgttcatactgacttgctcaattttctgttacctctagtggagtgtgaaggtaggttatggagctggggttggggagtgtcacgtctctctgggtccctgtcttttaggttccagtgtgtgttccaagtgctgccaaagtgcctcagcccagagacacccctgcctagcgtgctgctggctgttgagctcctctccctgctggcggaccacgaccagctggcacctcagctctgttcccactcagaaggctgcctcctgctgctgctgtacatgtacatcacatcacggcctgacagagtggccttggagacacaatggctccagctggaacaagaggtggtgtggctcctggctaagcttggtgtgcagagccccttgcccccagtcactggctccaactgccagtgtaatgtggaggtggtcagagcgctcacggtgatgttgcacagacagtggctgacagtgcggagggcagggggacccccaaggaccgaccagcagaggcggacagtgcgctgtctgcgggacacggtgctgctgctgcacggcctatcgcagaaggacaagctcttcatgatgcactgcgtggaggtcctgcatcagtttgaccaggtgatgccgggggtcagcatgctcatccgagggcttcctgatgtgacggactgtgaagaggcagccctggatgacctctgtgccgcggaaaccgatgtggaagaccccgaggtggagtgtggctgaggccctgagtgtccagccacatggtggcaccagcaccactcctttccttaccacatcaactgattaaagcagtgaccagcaggaactgcccagagaactggctggccttgtttcctgagtctgatctgtttggcggagtgggaggggtggagcaggacccggaccctgagtggctgggatccttcttcctgtccctggctgttgctgagcccgtccccatggtaactgatctgccttgaggaaggagccctgccctgcctgtggaattgtcctgagtcattgctttgggctggggccatgggaagaaaccattgtgtggcagggaaggaggtggctcttggcccaggcctaaaccaggaaagcctgggaaactgggacccacaggtgggcatgaaagggccgcagcaggggctcccagcagtgtgtaagaccgggagctggtctggcaccactgccctggtccttccagctgcctgtcactggtatgatggccccggtgcattgtgccaccagcaggccacagctgtggatcttggaaggcctctggggtcccccgggagcaggggagtgggtgtgggggggaacggatggtggtgagagggacagaccaggcaggctgacgagcagggcgggcctggctcacgtgggcctgtaggcgggcccacgccaagtttcacttaccgccactgctgccagcgagagccgcgggagagtgtgcagccgagtcactactgcctgcctgcctgcctgctacggtgagtgtggcccccacaatgggatggcgcagggcaggagggccatgggttcccccaccccagactaagggggcactaggggaggggccgagtcatgtgaagagggagaccctctcagacagtcgaatgtgctggtcccactaaggaaaccacctcaccctctccaacttcctgcctgaaaatgggccctggagctcgcagacagggcaggattgtgcagggaaggcctgagatgtgcttctgcccaccccctaccccactccctccccttcggatcttaacactgggcactcacacacccaccccatgctcctctccaggctcagcagcaggtacgtacccaaccatgggctcgcaggccctgcccccggggcccatgcagaccctcatctttttcgacatggaggccactggcttgcccttctcccagcccaaggtcacggagctgtgcctgctggctgtccacagatgtgccctggagagcccccccacctctcaggggccacctcccacagttcctccaccaccgcgtgtggtagacaagctctccctgtgtgtggctccggggaaggcctgcagccctgcagccagcgagatcacaggtctgagcacagctgtgctggcagcgcatgggcgtcaatgttttgatgacaacctggccaacctgctcctagccttcctgcggcgccagccacagccctggtgcctggtggcacacaatggtgaccgctacgacttccccctgctccaagcagagctggctatgctgggcctcaccagtgctctggatggtgccttctgtgtggatagcatcactgcgctgaaggccctggagcgagcaagcagcccctcagaacacggcccaaggaagagctacagcctaggcagcatctacactcgcctgtatgggcagtcccctccagactcgcacacggctgagggtgatgtcctggccctgctcagcatctgtcagtggagaccacaggccctgctgcggtgggtggatgctcacgccaggcctttcggcaccatcaggcccatgtatggggtcacagcctctgctaggaccaagccaagaccatctgctgtcacaaccactgcacacctggccacaaccaggaacactagtcccagccttggagagagcaggggtaccaaggatcttcctccagtgaaggaccctggagccctatccagggaggggctgctggccccactgggtctgctggccatcctgaccttggcagtagccacactgtatggactatccctggccacacctggggagtaggccaagaaggaaaatctgacgaataaagacccccgctgccccata

SEQ ID NO: 29034 - DNA, 2877 bp, Homo sapiens
tttctttccgctgaggagaaacggagctttaattcattttagtaacaagagttgataaagcaactaaagaggtaaactcagtttgggggctgtgcaccacacagatgcaatgcagacaggacttggcagagttgcctgatgactgatcctgtcttggctttgggacgtgggggcagaatagggggctggaggcaggtgggttgctggtgacacatgagtgcttgtcctgggtcttccctgggaaggtcccacaccacttcttggaccccatttgtgcagacaaacagttgctgaagcaagtgaactcttatagaagcttaagaaaaccctcgcagggactggtctccttctgcccaggatggaaccactctgttcttgttctaggtggtgtggctcctggctaagcttggtgtgcagagccccttgcccccagtcactggctccaactgccagtgtaatgtggaggtggtcagagcgctcacggtgatgttgcacagacagtggctgacagtgcggagggcagggggacccccaaggaccgaccagcagaggcggacagtgcgctgtctgcgggacacggtgctgctgctgcacggcctatcgcagaaggacaagctcttcatgatgcactgcgtggaggtcctgcatcagtttgaccaggtgatgccgggggtcagcatgctcatccgagggcttcctgatgtgacggactgtgaagaggcagccctggatgacctctgtgccgcggaaaccgatgtggaagaccccgaggtggagtgtggctgaggccctgagtgtccagccacatggtggcaccagcaccactcctttccttaccacatcaactgattaaagcagtgaccagcaggaactgcccagagaactggctggccttgtttcctgagtctgatctgtttggcggagtgggaggggtggagcaggacccggaccctgagtggctgggatccttcttcctgtccctggctgttgctgagcccgtccccatggtaactgatctgccttgaggaaggagccctgccctgcctgtggaattgtcctgagtcattgctttgggctggggccatgggaagaaaccattgtgtggcagggaaggaggtggctcttggcccaggcctaaaccaggaaagcctgggaaactgggacccacaggtgggcatgaaagggccgcagcaggggctcccagcagtgtgtaagaccgggagctggtctggcaccactgccctggtccttccagctgcctgtcactggtatgatggccccggtgcattgtgccaccagcaggccacagctgtggatcttggaaggcctctggggtcccccgggagcaggggagtgggtgtgggggggaacggatggtggtgagagggacagaccaggcaggctgacgagcagggcgggcctggctcacgtgggcctgtaggcgggcccacgccaagtttcacttaccgccactgctgccagcgagagccgcgggagagtgtgcagccgagtcactactgcctgcctgcctgcctgctacggtgagtgtggcccccacaatgggatggcgcagggcaggagggccatgggttcccccaccccagactaagggggcactaggggaggggccgagtcatgtgaagagggagaccctctcagacagtcgaatgtgctggtcccactaaggaaaccacctcaccctctccaacttcctgcctgaaaatgggccctggagctcgcagacagggcaggattgtgcagggaaggcctgagatgtgcttctgcccaccccctaccccactccctccccttcggatcttaacactgggcactcacacacccaccccatgctcctctccaggctcagcagcaggtacgtacccaaccatgggctcgcaggccctgcccccggggcccatgcagaccctcatctttttcgacatggaggccactggcttgcccttctcccagcccaaggtcacggagctgtgcctgctggctgtccacagatgtgccctggagagcccccccacctctcaggggccacctcccacagttcctccaccaccgcgtgtggtagacaagctctccctgtgtgtggctccggggaaggcctgcagccctgcagccagcgagatcacaggtctgagcacagctgtgctggcagcgcatgggcgtcaatgttttgatgacaacctggccaacctgctcctagccttcctgcggcgccagccacagccctggtgcctggtggcacacaatggtgaccgctacgacttccccctgctccaagcagagctggctatgctgggcctcaccagtgctctggatggtgccttctgtgtggatagcatcactgcgctgaaggccctggagcgagcaagcagcccctcagaacacggcccaaggaagagctacagcctaggcagcatctacactcgcctgtatgggcagtcccctccagactcgcacacggctgagggtgatgtcctggccctgctcagcatctgtcagtggagaccacaggccctgctgcggtgggtggatgctcacgccaggcctttcggcaccatcaggcccatgtatggggtcacagcctctgctaggaccaagccaagaccatctgctgtcacaaccactgcacacctggccacaaccaggaacactagtcccagccttggagagagcaggggtaccaaggatcttcctccagtgaaggaccctggagccctatccagggaggggctgctggccccactgggtctgctggccatcctgaccttggcagtagccacactgtatggactatccctggccacacctggggagtaggccaagaaggaaaatctgacgaataaagacccccgctgccccata

SEQ ID NO: 29035 - DNA, 3045 bp, Homo sapiens
tttctttccgctgaggagaaacggagctttaattcattttagtaacaagagttgataaagcaactaaagaggtaaactcagtttgggggctgtgcaccacacagatgcaatgcagacaggacttggcagagttgcctgatgactgatcctgtcttggctttgggacgtgggggcagaatagggggctggaggcaggtgggttgctggtgacacatgagtgcttgtcctgggtcttccctgggaaggtcccacaccacttcttggaccccatttgtgcagacaaacagttgctgaagcaagtgaactcttatagaagcttaagaaaaccctcgcagggactggtctccttctgcccaggatggaaccactctgttcttgttctaggtggtgtggctcctggctaagcttggtgtgcagagccccttgcccccagtcactggctccaactgccagtgtaatgtggaggtgagtgggtaggggccaacagctggcagctctggtggtaagggggccccgtgcaaggactgtaggccccactgcaaaccccctcacgtgaggtggctaggctgagcggattgttagggtgcaggccatggtggcaccaggcctcagtctgcaccccccctctctcaggtggtcagagcgctcacggtgatgttgcacagacagtggctgacagtgcggagggcagggggacccccaaggaccgaccagcagaggcggacagtgcgctgtctgcgggacacggtgctgctgctgcacggcctatcgcagaaggacaagctcttcatgatgcactgcgtggaggtcctgcatcagtttgaccaggtgatgccgggggtcagcatgctcatccgagggcttcctgatgtgacggactgtgaagaggcagccctggatgacctctgtgccgcggaaaccgatgtggaagaccccgaggtggagtgtggctgaggccctgagtgtccagccacatggtggcaccagcaccactcctttccttaccacatcaactgattaaagcagtgaccagcaggaactgcccagagaactggctggccttgtttcctgagtctgatctgtttggcggagtgggaggggtggagcaggacccggaccctgagtggctgggatccttcttcctgtccctggctgttgctgagcccgtccccatggtaactgatctgccttgaggaaggagccctgccctgcctgtggaattgtcctgagtcattgctttgggctggggccatgggaagaaaccattgtgtggcagggaaggaggtggctcttggcccaggcctaaaccaggaaagcctgggaaactgggacccacaggtgggcatgaaagggccgcagcaggggctcccagcagtgtgtaagaccgggagctggtctggcaccactgccctggtccttccagctgcctgtcactggtatgatggccccggtgcattgtgccaccagcaggccacagctgtggatcttggaaggcctctggggtcccccgggagcaggggagtgggtgtgggggggaacggatggtggtgagagggacagaccaggcaggctgacgagcagggcgggcctggctcacgtgggcctgtaggcgggcccacgccaagtttcacttaccgccactgctgccagcgagagccgcgggagagtgtgcagccgagtcactactgcctgcctgcctgcctgctacggtgagtgtggcccccacaatgggatggcgcagggcaggagggccatgggttcccccaccccagactaagggggcactaggggaggggccgagtcatgtgaagagggagaccctctcagacagtcgaatgtgctggtcccactaaggaaaccacctcaccctctccaacttcctgcctgaaaatgggccctggagctcgcagacagggcaggattgtgcagggaaggcctgagatgtgcttctgcccaccccctaccccactccctccccttcggatcttaacactgggcactcacacacccaccccatgctcctctccaggctcagcagcaggtacgtacccaaccatgggctcgcaggccctgcccccggggcccatgcagaccctcatctttttcgacatggaggccactggcttgcccttctcccagcccaaggtcacggagctgtgcctgctggctgtccacagatgtgccctggagagcccccccacctctcaggggccacctcccacagttcctccaccaccgcgtgtggtagacaagctctccctgtgtgtggctccggggaaggcctgcagccctgcagccagcgagatcacaggtctgagcacagctgtgctggcagcgcatgggcgtcaatgttttgatgacaacctggccaacctgctcctagccttcctgcggcgccagccacagccctggtgcctggtggcacacaatggtgaccgctacgacttccccctgctccaagcagagctggctatgctgggcctcaccagtgctctggatggtgccttctgtgtggatagcatcactgcgctgaaggccctggagcgagcaagcagcccctcagaacacggcccaaggaagagctacagcctaggcagcatctacactcgcctgtatgggcagtcccctccagactcgcacacggctgagggtgatgtcctggccctgctcagcatctgtcagtggagaccacaggccctgctgcggtgggtggatgctcacgccaggcctttcggcaccatcaggcccatgtatggggtcacagcctctgctaggaccaagccaagaccatctgctgtcacaaccactgcacacctggccacaaccaggaacactagtcccagccttggagagagcaggggtaccaaggatcttcctccagtgaaggaccctggagccctatccagggaggggctgctggccccactgggtctgctggccatcctgaccttggcagtagccacactgtatggactatccctggccacacctggggagtaggccaagaaggaaaatctgacgaataaagacccccgctgccccata

SEQ ID NO: 29036 - DNA, 4281 bp, Homo sapiens
gcactcgcggcggaggcaagcggcggcgcgcggacggttggtccagttctccggcctggcggcaggcaagtctagctcggcgctgtcggatacttggggtgagcggaaagcatggcggggacctccgcgccaggcagcaagaggcggagcgagcccccggcgcctcgccccggcccgccgccgggcaccgggcaccccccgagcaagcgggcccggggcttctccgcagccgctgccccggaccctgacgacccgttcggcgcgcatggggacttcactgccgacgacctggaggagcttgacaccctcgcgtcacaggccctgagccaatgtccggccgcggctcgggacgtgtccagtgatcataaggtccacagattattagatggcatgtcaaaaaatccttcagggaaaaacagagaaactgttccaattaaagataatttcgaattagaggtacttcaggcacaatacaaagaacttaaagaaaagatgaaagtaatggaagaagaagttctcattaagaatggagaaattaaaattttgcgagactcactacatcagacggaatccgttctagaggaacagagaagatcacattttcttcttgagcaagagaaaacccaagcactcagtgacaaggaaaaggaattctccaaaaagctccaatcattgcagtctgaactccagtttaaagatgcagagatgaatgaattaaggacaaagctccagaccagtgaacgagcaaataaactggctgctccctctgtttcccatgtcagtcctaggaaaaacccttctgtggttataaagccagaagcatgttctccacaatttggaaaaacatcttttcctacaaaggagtcttttagtgctaacatgtcccttccccacccctgccagacggagtcaggatacaagcctctggtgggcagagaggatagtaagccccacagtctgagaggtgactccataaaacaagaagaggcccagaaaagctttgttgacagctggagacagagatcaaacactcaaggttccattttgataaacctgctcctgaagcagcctttgatcccagggtcatccctaagcctttgccacctcctgagtagtagttctgagtctcctgctggcacccccctgcagccaccagggtttggcagtaccttggctggaatgtcaggcctcaggaccacaggttcttatgatgggtcattttccctctcagccctgagagaagcacagaacctggcattcactggactgaatctggttgcccggaatgagtgctcacgtgatggagacccagcagagggaggcagaagggccttcccactctgccagcttcctggagccgtgcatttcctcccccttgtacagttcttcatcggcttacactgccaggccctgcaggacttggcagctgctaagagaagcggagcacctggggactcaccgacacattcctcctgcgtgagctctggggtagagaccaaccctgaggactcagtgtgcatcctggaaggcttctctgtgactgcacttagcattcttcagcacctggtgtgccacagcggagcagtcgtctccctattactgtcaggagtgggggcagattctgctgctggggaaggaaacaggagcctggttcacaggcttagtgatggagatatgacctcagccctaaggggggttgctgatgaccaaggacagcacccactgttgaagatgcttcttcacctgttggctttctcttctgcagcaacaggtcaccttcaagccagtgtcctgacccagtgccttaaggttttggtgaaattagccgaaaacacttcctgtgatttcttgcccaggttccagtgtgtgttccaagtgctgccaaagtgcctcagcccagagacacccctgcctagcgtgctgctggctgttgagctcctctccctgctggcggaccacgaccagctggcacctcagctctgttcccactcagaaggctgcctcctgctgctgctgtacatgtacatcacatcacggcctgacagagtggccttggagacacaatggctccagctggaacaagaggtggtcagagcgctcacggtgatgttgcacagacagtggctgacagtgcggagggcagggggacccccaaggaccgaccagcagaggcggacagtgcgctgtctgcgggacacggtgctgctgctgcacggcctatcgcagaaggacaagctcttcatgatgcactgcgtggaggtcctgcatcagtttgaccaggtgatgccgggggtcagcatgctcatccgagggcttcctgatgtgacggactgtgaagaggcagccctggatgacctctgtgccgcggaaaccgatgtggaagaccccgaggtggagtgtggctgaggccctgagtgtccagccacatggtggcaccagcaccactcctttccttaccacatcaactgattaaagcagtgaccagcaggaactgcccagagaactggctggccttgtttcctgagtctgatctgtttggcggagtgggaggggtggagcaggacccggaccctgagtggctgggatccttcttcctgtccctggctgttgctgagcccgtccccatggtaactgatctgccttgaggaaggagccctgccctgcctgtggaattgtcctgagtcattgctttgggctggggccatgggaagaaaccattgtgtggcagggaaggaggtggctcttggcccaggcctaaaccaggaaagcctgggaaactgggacccacaggtgggcatgaaagggccgcagcaggggctcccagcagtgtgtaagaccgggagctggtctggcaccactgccctggtccttccagctgcctgtcactggtatgatggccccggtgcattgtgccaccagcaggccacagctgtggatcttggaaggcctctggggtcccccgggagcaggggagtgggtgtgggggggaacggatggtggtgagagggacagaccaggcaggctgacgagcagggcgggcctggctcacgtgggcctgtaggcgggcccacgccaagtttcacttaccgccactgctgccagcgagagccgcgggagagtgtgcagccgagtcactactgcctgcctgcctgcctgctacggctcagcagcaggtacgtacccaaccatgggctcgcaggccctgcccccggggcccatgcagaccctcatctttttcgacatggaggccactggcttgcccttctcccagcccaaggtcacggagctgtgcctgctggctgtccacagatgtgccctggagagcccccccacctctcaggggccacctcccacagttcctccaccaccgcgtgtggtagacaagctctccctgtgtgtggctccggggaaggcctgcagccctgcagccagcgagatcacaggtctgagcacagctgtgctggcagcgcatgggcgtcaatgttttgatgacaacctggccaacctgctcctagccttcctgcggcgccagccacagccctggtgcctggtggcacacaatggtgaccgctacgacttccccctgctccaagcagagctggctatgctgggcctcaccagtgctctggatggtgccttctgtgtggatagcatcactgcgctgaaggccctggagcgagcaagcagcccctcagaacacggcccaaggaagagctacagcctaggcagcatctacactcgcctgtatgggcagtcccctccagactcgcacacggctgagggtgatgtcctggccctgctcagcatctgtcagtggagaccacaggccctgctgcggtgggtggatgctcacgccaggcctttcggcaccatcaggcccatgtatggggtcacagcctctgctaggaccaagccaagaccatctgctgtcacaaccactgcacacctggccacaaccaggaacactagtcccagccttggagagagcaggggtaccaaggatcttcctccagtgaaggaccctggagccctatccagggaggggctgctggccccactgggtctgctggccatcctgaccttggcagtagccacactgtatggactatccctggccacacctggggagtaggccaagaaggaaaatctgacgaataaagacccccgctgccccatagcactgagtggtcaattggctcctacccttcttggcagcacagacctctgcccacacccagggacctggggaggagggcacagtgtttgtccctcactttccct

SEQ ID NO: 29037 - DNA, 4981 bp, Homo sapiens
gcactcgcggcggaggcaagcggcggcgcgcggacggttggtccagttctccggcctggcggcaggcaagtctagctcggcgctgtcggatacttggggtgagcggaaagcatggcggggacctccgcgccaggcagcaagaggcggagcgagcccccggcgcctcgccccggcccgccgccgggcaccgggcaccccccgagcaagcgggcccggggcttctccgcagccgctgccccggaccctgacgacccgttcggcgcgcatggggacttcactgccgacgacctggaggagcttgacaccctcgcgtcacaggccctgagccaatgtccggccgcggctcgggacgtgtccagtgatcataaggtccacagattattagatggcatgtcaaaaaatccttcagggaaaaacagagaaactgttccaattaaagataatttcgaattagaggtacttcaggcacaatacaaagaacttaaagaaaagatgaaagtaatggaagaagaagttctcattaagaatggagaaattaaaattttgcgagactcactacatcagacggaatccgttctagaggaacagagaagatcacattttcttcttgagcaagagaaaacccaagcactcagtgacaaggaaaaggaattctccaaaaagctccaatcattgcagtctgaactccagtttaaagatgcagagatgaatgaattaaggacaaagctccagaccagtgaacgagcaaataaactggctgctccctctgtttcccatgtcagtcctaggaaaaacccttctgtggttataaagccagaagcatgttctccacaatttggaaaaacatcttttcctacaaaggagtcttttagtgctaacatgtcccttccccacccctgccagacggagtcaggatacaagcctctggtgggcagagaggatagtaagccccacagtctgagaggtgactccataaaacaagaagaggcccagaaaagctttgttgacagctggagacagagatcaaacactcaaggttccattttgataaacctgctcctgaagcagcctttgatcccagggtcatccctaagcctttgccacctcctgagtagtagttctgagtctcctgctggcacccccctgcagccaccagggtttggcagtaccttggctggaatgtcaggcctcaggaccacaggttcttatgatgggtcattttccctctcagccctgagagaagcacagaacctggcattcactggactgaatctggttgcccggaatgagtgctcacgtgatggagacccagcagagggaggcagaagggccttcccactctgccagcttcctggagccgtgcatttcctcccccttgtacagttcttcatcggcttacactgccaggccctgcaggacttggcagctgctaagagaagcggagcacctggggactcaccgacacattcctcctgcgtgagctctggggtagagaccaaccctgaggactcagtgtgcatcctggaaggcttctctgtgactgcacttagcattcttcagcacctggtgtgccacagcggagcagtcgtctccctattactgtcaggagtgggggcagattctgctgctggggaaggaaacaggagcctggttcacaggcttagtgatggagatatgacctcagccctaaggggggttgctgatgaccaaggacagcacccactgttgaagatgcttcttcacctgttggctttctcttctgcagcaacaggtcaccttcaagccagtgtcctgacccagtgccttaaggttttggtgaaattagccgaaaacacttcctgtgatttcttgcccaggttccagtgtgtgttccaagtgctgccaaagtgcctcagcccagagacacccctgcctagcgtgctgctggctgttgagctcctctccctgctggcggaccacgaccagctggcacctcagctctgttcccactcagaaggctgcctcctgctgctgctgtacatgtacatcacatcacggcctgacagagtggccttggagacacaatggctccagctggaacaagaggtggtgtggctcctggctaagcttggtgtgcagagccccttgcccccagtcactggctccaactgccagtgtaatgtggaggtggtcagagcgctcacggtgatgttgcacagacagtggctgacagtgcggagggcagggggacccccaaggaccgaccagcagaggcggacagtgcgctgtctgcgggacacggtgctgctgctgcacggcctatcgcagaaggacaagctcttcatgatgcactgcgtggaggtcctgcatcagtttgaccaggtgatgccgggggtcagcatgctcatccgagggcttcctgatgtgacggactgtgaaggtaagcctgccagaggccatcctgcccagcccccatggcttcttccagaggttccccaacaagtcagattcctgggtgtcccctcagcaggcccccgcccactgcagcctgttccagcactggggccattttcttttatcttcctgcctcagttcttctccaagcatattgggatgccttttgcatctatctgttgagtgtgcctggcagagccacggtttttccagaaatagccgtgtctgaattgcctttgtatcactttgtttgcagtagctgagggagcagggcctgggtgtggaagggactggttagttcctgcggacgttgggggaggagaggtgggacctgccctaggccctggcacctttgggccctcaccaggaacctctcctttttgtctcagaggcagccctggatgacctctgtgccgcggaaaccgatgtggaagaccccgaggtggagtgtggctgaggccctgagtgtccagccacatggtggcaccagcaccactcctttccttaccacatcaactgattaaagcagtgaccagcaggaactgcccagagaactggctggccttgtttcctgagtctgatctgtttggcggagtgggaggggtggagcaggacccggaccctgagtggctgggatccttcttcctgtccctggctgttgctgagcccgtccccatggtaactgatctgccttgaggaaggagccctgccctgcctgtggaattgtcctgagtcattgctttgggctggggccatgggaagaaaccattgtgtggcagggaaggaggtggctcttggcccaggcctaaaccaggaaagcctgggaaactgggacccacaggtgggcatgaaagggccgcagcaggggctcccagcagtgtgtaagaccgggagctggtctggcaccactgccctggtccttccagctgcctgtcactggtatgatggccccggtgcattgtgccaccagcaggccacagctgtggatcttggaaggcctctggggtcccccgggagcaggggagtgggtgtgggggggaacggatggtggtgagagggacagaccaggcaggctgacgagcagggcgggcctggctcacgtgggcctgtaggcgggcccacgccaagtttcacttaccgccactgctgccagcgagagccgcgggagagtgtgcagccgagtcactactgcctgcctgcctgcctgctacggtgagtgtggcccccacaatgggatggcgcagggcaggagggccatgggttcccccaccccagactaagggggcactaggggaggggccgagtcatgtgaagagggagaccctctcagacagtcgaatgtgctggtcccactaaggaaaccacctcaccctctccaacttcctgcctgaaaatgggccctggagctcgcagacagggcaggattgtgcagggaaggcctgagatgtgcttctgcccaccccctaccccactccctccccttcggatcttaacactgggcactcacacacccaccccatgctcctctccaggctcagcagcaggtacgtacccaaccatgggctcgcaggccctgcccccggggcccatgcagaccctcatctttttcgacatggaggccactggcttgcccttctcccagcccaaggtcacggagctgtgcctgctggctgtccacagatgtgccctggagagcccccccacctctcaggggccacctcccacagttcctccaccaccgcgtgtggtagacaagctctccctgtgtgtggctccggggaaggcctgcagccctgcagccagcgagatcacaggtctgagcacagctgtgctggcagcgcatgggcgtcaatgttttgatgacaacctggccaacctgctcctagccttcctgcggcgccagccacagccctggtgcctggtggcacacaatggtgaccgctacgacttccccctgctccaagcagagctggctatgctgggcctcaccagtgctctggatggtgccttctgtgtggatagcatcactgcgctgaaggccctggagcgagcaagcagcccctcagaacacggcccaaggaagagctacagcctaggcagcatctacactcgcctgtatgggcagtcccctccagactcgcacacggctgagggtgatgtcctggccctgctcagcatctgtcagtggagaccacaggccctgctgcggtgggtggatgctcacgccaggcctttcggcaccatcaggcccatgtatggggtcacagcctctgctaggaccaagccaagaccatctgctgtcacaaccactgcacacctggccacaaccaggaacactagtcccagccttggagagagcaggggtaccaaggatcttcctccagtgaaggaccctggagccctatccagggaggggctgctggccccactgggtctgctggccatcctgaccttggcagtagccacactgtatggactatccctggccacacctggggagtaggccaagaaggaaaatctgacgaataaagacccccgctgccccata

SEQ ID NO: 29038 - DNA, 3448 bp, Homo sapiens
tttctttccgctgaggagaaacggagctttaattcattttagtaacaagagttgataaagcaactaaagaggtaaactcagtttgggggctgtgcaccacacagatgcaatgcagacaggacttggcagagttgcctgatgactgatcctgtcttggctttgggacgtgggggcagaatagggggctggaggcaggtgggttgctggtgacacatgagtgcttgtcctgggtcttccctgggaaggtcccacaccacttcttggaccccatttgtgcagacaaacagttgctgaagcaagtgaactcttatagaagcttaagaaaaccctcgcagggactggtctccttctgcccaggatggaaccactctgttcttgttctaggtggtgtggctcctggctaagcttggtgtgcagagccccttgcccccagtcactggctccaactgccagtgtaatgtggaggtgagtgggtaggggccaacagctggcagctctggtggtaagggggccccgtgcaaggactgtaggccccactgcaaaccccctcacgtgaggtggctaggctgagcggattgttagggtgcaggccatggtggcaccaggcctcagtctgcaccccccctctctcaggtggtcagagcgctcacggtgatgttgcacagacagtggctgacagtgcggagggcagggggacccccaaggaccgaccagcagaggcggacagtgcgctgtctgcgggacacggtgctgctgctgcacggcctatcgcagaaggacaagctcttcatgatgcactgcgtggaggtcctgcatcagtttgaccaggtgatgccgggggtcagcatgctcatccgagggcttcctgatgtgacggactgtgaaggtaagcctgccagaggccatcctgcccagcccccatggcttcttccagaggttccccaacaagtcagattcctgggtgtcccctcagcaggcccccgcccactgcagcctgttccagcactggggccattttcttttatcttcctgcctcagttcttctccaagcatattgggatgccttttgcatctatctgttgagtgtgcctggcagagccacggtttttccagaaatagccgtgtctgaattgcctttgtatcactttgtttgcagtagctgagggagcagggcctgggtgtggaagggactggttagttcctgcggacgttgggggaggagaggtgggacctgccctaggccctggcacctttgggccctcaccaggaacctctcctttttgtctcagaggcagccctggatgacctctgtgccgcggaaaccgatgtggaagaccccgaggtggagtgtggctgaggccctgagtgtccagccacatggtggcaccagcaccactcctttccttaccacatcaactgattaaagcagtgaccagcaggaactgcccagagaactggctggccttgtttcctgagtctgatctgtttggcggagtgggaggggtggagcaggacccggaccctgagtggctgggatccttcttcctgtccctggctgttgctgagcccgtccccatggtaactgatctgccttgaggaaggagccctgccctgcctgtggaattgtcctgagtcattgctttgggctggggccatgggaagaaaccattgtgtggcagggaaggaggtggctcttggcccaggcctaaaccaggaaagcctgggaaactgggacccacaggtgggcatgaaagggccgcagcaggggctcccagcagtgtgtaagaccgggagctggtctggcaccactgccctggtccttccagctgcctgtcactggtatgatggccccggtgcattgtgccaccagcaggccacagctgtggatcttggaaggcctctggggtcccccgggagcaggggagtgggtgtgggggggaacggatggtggtgagagggacagaccaggcaggctgacgagcagggcgggcctggctcacgtgggcctgtaggcgggcccacgccaagtttcacttaccgccactgctgccagcgagagccgcgggagagtgtgcagccgagtcactactgcctgcctgcctgcctgctacggtgagtgtggcccccacaatgggatggcgcagggcaggagggccatgggttcccccaccccagactaagggggcactaggggaggggccgagtcatgtgaagagggagaccctctcagacagtcgaatgtgctggtcccactaaggaaaccacctcaccctctccaacttcctgcctgaaaatgggccctggagctcgcagacagggcaggattgtgcagggaaggcctgagatgtgcttctgcccaccccctaccccactccctccccttcggatcttaacactgggcactcacacacccaccccatgctcctctccaggctcagcagcaggtacgtacccaaccatgggctcgcaggccctgcccccggggcccatgcagaccctcatctttttcgacatggaggccactggcttgcccttctcccagcccaaggtcacggagctgtgcctgctggctgtccacagatgtgccctggagagcccccccacctctcaggggccacctcccacagttcctccaccaccgcgtgtggtagacaagctctccctgtgtgtggctccggggaaggcctgcagccctgcagccagcgagatcacaggtctgagcacagctgtgctggcagcgcatgggcgtcaatgttttgatgacaacctggccaacctgctcctagccttcctgcggcgccagccacagccctggtgcctggtggcacacaatggtgaccgctacgacttccccctgctccaagcagagctggctatgctgggcctcaccagtgctctggatggtgccttctgtgtggatagcatcactgcgctgaaggccctggagcgagcaagcagcccctcagaacacggcccaaggaagagctacagcctaggcagcatctacactcgcctgtatgggcagtcccctccagactcgcacacggctgagggtgatgtcctggccctgctcagcatctgtcagtggagaccacaggccctgctgcggtgggtggatgctcacgccaggcctttcggcaccatcaggcccatgtatggggtcacagcctctgctaggaccaagccaagaccatctgctgtcacaaccactgcacacctggccacaaccaggaacactagtcccagccttggagagagcaggggtaccaaggatcttcctccagtgaaggaccctggagccctatccagggaggggctgctggccccactgggtctgctggccatcctgaccttggcagtagccacactgtatggactatccctggccacacctggggagtaggccaagaaggaaaatctgacgaataaagacccccgctgccccata

SEQ ID NO: 29039 - DNA, 4002 bp, Homo sapiens
gcactcgcggcggaggcaagcggcggcgcgcggacggttggtccagttctccggcctggcggcaggcaagtctagctcggcgctgtcggatacttggggtgagcggaaagcatggcggggacctccgcgccaggcagcaagaggcggagcgagcccccggcgcctcgccccggcccgccgccgggcaccgggcaccccccgagcaagcgggcccggggcttctccgcagccgctgccccggaccctgacgacccgttcggcgcgcatggggacttcactgccgacgacctggaggagcttgacaccctcgcgtcacaggccctgagccaatgtccggccgcggctcgggacgtgtccagtgatcataaggtccacagattattagatggcatgtcaaaaaatccttcagggaaaaacagagaaactgttccaattaaagataatttcgaattagaggtacttcaggcacaatacaaagaacttaaagaaaagatgaaagtaatggaagaagaagttctcattaagaatggagaaattaaaattttgcgagactcactacatcagacggaatccgttctagaggaacagagaagatcacattttcttcttgagcaagagaaaacccaagcactcagtgacaaggaaaaggaattctccaaaaagctccaatcattgcagtctgaactccagtttaaagatgcagagatgaatgaattaaggacaaagctccagaccagtgaacgagcaaataaactggctgctccctctgtttcccatgtcagtcctaggaaaaacccttctgtggttataaagccagaagcatgttctccacaatttggaaaaacatcttttcctacaaaggagtcttttagtgctaacatgtcccttccccacccctgccagacggagtcaggatacaagcctctggtgggcagagaggatagtaagccccacagtctgagaggtgactccataaaacaagaagaggcccagaaaagctttgttgacagctggagacagagatcaaacactcaaggttccattttgataaacctgctcctgaagcagcctttgatcccagggtcatccctaagcctttgccacctcctgagtagtagttctgagtctcctgctggcacccccctgcagccaccagggtttggcagtaccttggctggaatgtcaggcctcaggaccacaggttcttatgatgggtcattttccctctcagccctgagagaagcacagaacctggcattcactggactgaatctggttgcccggaatgagtgctcacgtgatggagacccagcagagggaggcagaagggccttcccactctgccagcttcctggagccgtgcatttcctcccccttgtacagttcttcatcggcttacactgccaggccctgcaggacttggcagctgctaagagaagcggagcacctggggactcaccgacacattcctcctgcgtgagctctggggtagagaccaaccctgaggactcagtgtgcatcctggaaggcttctctgtgactgcacttagcattcttcagcacctggtgtgccacagcggagcagtcgtctccctattactgtcaggagtgggggcagattctgctgctggggaaggaaacaggagcctggttcacaggcttagtgatggagatatgacctcagccctaaggggggttgctgatgaccaaggacagcacccactgttgaagatgcttcttcacctgttggctttctcttctgcagcaacaggtcaccttcaagccagtgtcctgacccagtgccttaaggttttggtgaaattagccgaaaacacttcctgtgatttcttgcccaggttccagtgtgtgttccaagtgctgccaaagtgcctcagcccagagacacccctgcctagcgtgctgctggctgttgagctcctctccctgctggcggaccacgaccagctggcacctcagctctgttcccactcagaaggctgcctcctgctgctgctgtacatgtacatcacatcacggcctgacagagtggccttggagacacaatggctccagctggaacaagaggtggtcagagcgctcacggtgatgttgcacagacagtggctgacagtgcggagggcagggggacccccaaggaccgaccagcagaggcggacagtgcgctgtctgcgggacacggtgctgctgctgcacggcctatcgcagaaggacaagctcttcatgatgcactgcgtggaggtcctgcatcagtttgaccaggtgatgccgggggtcagcatgctcatccgagggcttcctgatgtgacggactgtgaagaggcagccctggatgacctctgtgccgcggaaaccgatgtggaagaccccgaggtggagtgtggctgaggccctgagtgtccagccacatggtggcaccagcaccactcctttccttaccacatcaactgattaaagcagtgaccagcaggaactgcccagagaactggctggccttgtttcctgagtctgatctgtttggcggagtgggaggggtggagcaggacccggaccctgagtggctgggatccttcttcctgtccctggctgttgctgagcccgtccccatggtaactgatctgccttgaggaaggagccctgccctgcctgtggaattgtcctgagtcattgctttgggctggggccatgggaagaaaccattgtgtggcagggaaggaggtggctcttggcccaggcctaaaccaggaaagcctgggaaactgggacccacaggtgggcatgaaagggccgcagcaggggctcccagcagtgtgtaagaccgggagctggtctggcaccactgccctggtccttccagctgcctgtcactggtatgatggccccggtgcattgtgccaccagcaggccacagctgtggatcttggaaggcctctggggtcccccgggagcaggggagtgggtgtgggggggaacggatggtggtgagagggacagaccaggcaggctgacgagcagggcgggcctggctcacgtgggcctgtaggcgggcccacgccaagtttcacttaccgccactgctgccagcgagagccgcgggagagtgtgcagccgagtcactactgcctgcctgcctgcctgctacggctcagcagcaggtacgtacccaaccatgggctcgcaggccctgcccccggggcccatgcagaccctcatctttttcgacatggaggccactggcttgcccttctcccagcccaaggtcacggagctgtgcctgctggctgtccacagatgtgccctggagagcccccccacctctcaggggccacctcccacagttcctccaccaccgcgtgtggtagacaagctctccctgtgtgtggctccggggaaggcctgcagccctgcagccagcgagatcacaggtctgagcacagctgtgctggcagcgcatgggcgtcaatgttttgatgacaacctggccaacctgctcctagccttcctgcggcgccagccacagccctggtgcctggtggcacacaatggtgaccgctacgacttccccctgctccaagcagagctggctatgctgggcctcaccagtgctctggatggtgccttctgtgtggatagcatcactgcgctgaaggccctggagcgagcaagcagcccctcagaacacggcccatgtatggggtcacagcctctgctaggaccaagccaagaccatctgctgtcacaaccactgcacacctggccacaaccaggaacactagtcccagccttggagagagcaggggtaccaaggatcttcctccagtgaaggaccctggagccctatccagggaggggctgctggccccactgggtctgctggccatcctgaccttggcagtagccacactgtatggactatccctggccacacctggggagtaggccaagaaggaaaatctgacgaataaagacccccgctgccccata

SEQ ID NO: 29040 - DNA, 3855 bp, Homo sapiens
gcactcgcggcggaggcaagcggcggcgcgcggacggttggtccagttctccggcctggcggcaggcaagtctagctcggcgctgtcggatacttggggtgagcggaaagcatggcggggacctccgcgccaggcagcaagaggcggagcgagcccccggcgcctcgccccggcccgccgccgggcaccgggcaccccccgagcaagcgggcccggggcttctccgcagccgctgccccggaccctgacgacccgttcggcgcgcatggggacttcactgccgacgacctggaggagcttgacaccctcgcgtcacaggccctgagccaatgtccggccgcggctcgggacgtgtccagtgatcataaggtccacagattattagatggcatgtcaaaaaatccttcagggaaaaacagagaaactgttccaattaaagataatttcgaattagaggtacttcaggcacaatacaaagaacttaaagaaaagatgaaagtaatggaagaagaagttctcattaagaatggagaaattaaaattttgcgagactcactacatcagacggaatccgttctagaggaacagagaagatcacattttcttcttgagcaagagaaaacccaagcactcagtgacaaggaaaaggaattctccaaaaagctccaatcattgcagtctgaactccagtttaaagatgcagagatgaatgaattaaggacaaagctccagaccagtgaacgagcaaataaactggctgctccctctgtttcccatgtcagtcctaggaaaaacccttctgtggttataaagccagaagcatgttctccacaatttggaaaaacatcttttcctacaaaggagtcttttagtgctaacatgtcccttccccacccctgccagacggagtcaggatacaagcctctggtgggcagagaggatagtaagccccacagtctgagaggtgactccataaaacaagaagaggcccagaaaagctttgttgacagctggagacagagatcaaacactcaaggttccattttgataaacctgctcctgaagcagcctttgatcccagggtcatccctaagcctttgccacctcctgagtagtagttctgagtctcctgctggcacccccctgcagccaccagggtttggcagtaccttggctggaatgtcaggcctcaggaccacaggttcttatgatgggtcattttccctctcagccctgagagaagcacagaacctggcattcactggactgaatctggttgcccggaatgagtgctcacgtgatggagacccagcagagggaggcagaagggccttcccactctgccagcttcctggagccgtgcatttcctcccccttgtacagttcttcatcggcttacactgccaggccctgcaggacttggcagctgctaagagaagcggagcacctggggactcaccgacacattcctcctgcgtgagctctggggtagagaccaaccctgaggactcagtgtgcatcctggaaggcttctctgtgactgcacttagcattcttcagcacctggtgtgccacagcggagcagtcgtctccctattactgtcaggagtgggggcagattctgctgctggggaaggaaacaggagcctggttcacaggcttagtgatggagatatgacctcagccctaaggggggttgctgatgaccaaggacagcacccactgttgaagatgcttcttcacctgttggctttctcttctgcagcaacaggtcaccttcaagccagtgtcctgacccagtgccttaaggttttggtgaaattagccgaaaacacttcctgtgatttcttgcccaggttccagtgtgtgttccaagtgctgccaaagtgcctcagcccagagacacccctgcctagcgtgctgctggctgttgagctcctctccctgctggcggaccacgaccagctggcacctcagctctgttcccactcagaaggctgcctcctgctgctgctgtacatgtacatcacatcacggcctgacagagtggccttggagacacaatggctccagctggaacaagaggtggtcagagcgctcacggtgatgttgcacagacagtggctgacagtgcggagggcagggggacccccaaggaccgaccagcagaggcggacagtgcgctgtctgcgggacacggtgctgctgctgcacggcctatcgcagaaggacaagctcttcatgatgcactgcgtggaggtcctgcatcagtttgaccaggtgatgccgggggtcagcatgctcatccgagggcttcctgatgtgacggactgtgaagaggcagccctggatgacctctgtgccgcggaaaccgatgtggaagaccccgaggtggagtgtggctgaggccctgagtgtccagccacatggtggcaccagcaccactcctttccttaccacatcaactgattaaagcagtgaccagcaggaactgcccagagaactggctggccttgtttcctgagtctgatctgtttggcggagtgggaggggtggagcaggacccggaccctgagtggctgggatccttcttcctgtccctggctgttgctgagcccgtccccatggtaactgatctgccttgaggaaggagccctgccctgcctgtggaattgtcctgagtcattgctttgggctggggccatgggaagaaaccattgtgtggcagggaaggaggtggctcttggcccaggcctaaaccaggaaagcctgggaaactgggacccacaggtgggcatgaaagggccgcagcaggggctcccagcagtgtgtaagaccgggagctggtctggcaccactgccctggtccttccagctgcctgtcactggtatgatggccccggtgcattgtgccaccagcaggccacagctgtggatcttggaaggcctctggggtcccccgggagcaggggagtgggtgtgggggggaacggatggtggtgagagggacagaccaggcaggctgacgagcagggcgggcctggctcacgtgggcctgtaggcgggcccacgccaagtttcacttaccgccactgctgccagcgagagccgcgggagagtgtgcagccgagtcactactgcctgcctgcctgcctgctacggctcagcagcaggtacgtacccaaccatgggctcgcaggccctgcccccggggcccatgcagaccctcatctttttcgacatggaggccactggcttgcccttctcccagcccaaggtcacggagctgtgcctgctggctgtccacagatgtgccctggagagcccccccacctctcaggggccacctcccacagttcctccaccaccgcgtgtggtagacaagctctccctgtgtgtggctccggggaaggcctgcagccctgcagccagcgagatcacaggtctgagcacagctgtgctggcagcgcatgggcgtcaatgttttgatgacaacctggccaacctgctcctagccttcctgcggcgccagccacagccctggtgcctggtggcacacaatggtgaccgctacgacttccccctgctccaagcagagctggctatgctgggcctcaccagtgctctggatggtgccttctgtgtggatagcatcactgcgctgaaggccctggagcgagcatccacccaccggagcagggcctgtggtctccactgacagatgctgagcagggccaggacatcaccctcagccgtgtgcgagtctggaggggactgcccatacaggcgagttgtggatgctgcctaggctatagctcttccttgggccgtgttctgaggggctgcttgctcgct

SEQ ID NO: 29041 - DNA, 4051 bp, Homo sapiens
gcactcgcggcggaggcaagcggcggcgcgcggacggttggtccagttctccggcctggcggcaggcaagtctagctcggcgctgtcggatacttggggtgagcggaaagcatggcggggacctccgcgccaggcagcaagaggcggagcgagcccccggcgcctcgccccggcccgccgccgggcaccgggcaccccccgagcaagcgggcccggggcttctccgcagccgctgccccggaccctgacgacccgttcggcgcgcatggggacttcactgccgacgacctggaggagcttgacaccctcgcgtcacaggccctgagccaatgtccggccgcggctcgggacgtgtccagtgatcataaggtccacagattattagatggcatgtcaaaaaatccttcagggaaaaacagagaaactgttccaattaaagataatttcgaattagaggtacttcaggcacaatacaaagaacttaaagaaaagatgaaagtaatggaagaagaagttctcattaagaatggagaaattaaaattttgcgagactcactacatcagacggaatccgttctagaggaacagagaagatcacattttcttcttgagcaagagaaaacccaagcactcagtgacaaggaaaaggaattctccaaaaagctccaatcattgcagtctgaactccagtttaaagatgcagagatgaatgaattaaggacaaagctccagaccagtgaacgagcaaataaactggctgctccctctgtttcccatgtcagtcctaggaaaaacccttctgtggttataaagccagaagcatgttctccacaatttggaaaaacatcttttcctacaaaggagtcttttagtgctaacatgtcccttccccacccctgccagacggagtcaggatacaagcctctggtgggcagagaggatagtaagccccacagtctgagaggtgactccataaaacaagaagaggcccagaaaagctttgttgacagctggagacagagatcaaacactcaaggttccattttgataaacctgctcctgaagcagcctttgatcccagggtcatccctaagcctttgccacctcctgagtagtagttctgagtctcctgctggcacccccctgcagccaccagggtttggcagtaccttggctggaatgtcaggcctcaggaccacaggttcttatgatgggtcattttccctctcagccctgagagaagcacagaacctggcattcactggactgaatctggttgcccggaatgagtgctcacgtgatggagacccagcagagggaggcagaagggccttcccactctgccagcttcctggagccgtgcatttcctcccccttgtacagttcttcatcggcttacactgccaggccctgcaggacttggcagctgctaagagaagcggagcacctggggactcaccgacacattcctcctgcgtgagctctggggtagagaccaaccctgaggactcagtgtgcatcctggaaggcttctctgtgactgcacttagcattcttcagcacctggtgtgccacagcggagcagtcgtctccctattactgtcaggagtgggggcagattctgctgctggggaaggaaacaggagcctggttcacaggcttagtgatggagatatgacctcagccctaaggggggttgctgatgaccaaggacagcacccactgttgaagatgcttcttcacctgttggctttctcttctgcagcaacaggtcaccttcaagccagtgtcctgacccagtgccttaaggttttggtgaaattagccgaaaacacttcctgtgatttcttgcccaggttccagtgtgtgttccaagtgctgccaaagtgcctcagcccagagacacccctgcctagcgtgctgctggctgttgagctcctctccctgctggcggaccacgaccagctggcacctcagctctgttcccactcagaaggctgcctcctgctgctgctgtacatgtacatcacatcacggcctgacagagtggccttggagacacaatggctccagctggaacaagaggtggtcagagcgctcacggtgatgttgcacagacagtggctgacagtgcggagggcagggggacccccaaggaccgaccagcagaggcggacagtgcgctgtctgcgggacacggtgctgctgctgcacggcctatcgcagaaggacaagctcttcatgatgcactgcgtggaggtcctgcatcagtttgaccaggtgatgccgggggtcagcatgctcatccgagggcttcctgatgtgacggactgtgaagaggcagccctggatgacctctgtgccgcggaaaccgatgtggaagaccccgaggtggagtgtggctgaggccctgagtgtccagccacatggtggcaccagcaccactcctttccttaccacatcaactgattaaagcagtgaccagcaggaactgcccagagaactggctggccttgtttcctgagtctgatctgtttggcggagtgggaggggtggagcaggacccggaccctgagtggctgggatccttcttcctgtccctggctgttgctgagcccgtccccatggtaactgatctgccttgaggaaggagccctgccctgcctgtggaattgtcctgagtcattgctttgggctggggccatgggaagaaaccattgtgtggcagggaaggaggtggctcttggcccaggcctaaaccaggaaagcctgggaaactgggacccacaggtgggcatgaaagggccgcagcaggggctcccagcagtgtgtaagaccgggagctggtctggcaccactgccctggtccttccagctgcctgtcactggtatgatggccccggtgcattgtgccaccagcaggccacagctgtggatcttggaaggcctctggggtcccccgggagcaggggagtgggtgtgggggggaacggatggtggtgagagggacagaccaggcaggctgacgagcagggcgggcctggctcacgtgggcctgtaggcgggcccacgccaagtttcacttaccgccactgctgccagcgagagccgcgggagagtgtgcagccgagtcactactgcctgcctgcctgcctgctacggctcagcagcaggtacgtacccaaccatgggctcgcaggccctgcccccggggcccatgcagaccctcatctttttcgacatggaggccactggcttgcccttctcccagcccaaggtcacggagctgtgcctgctggctgtccacagatgtgccctggagagcccccccacctctcaggggccacctcccacagttcctccaccaccgcgtgtggtagacaagctctccctgtgtgtggctccggggaaggcctgcagccctgcagccagcgagatcacaggtctgagcacagctgtgctggcagcgcatgggcgtcaatgttttgatgacaacctggccaacctgctcctagccttcctgcggcgccagccacagccctggtgcctggtggcacacaatggtgaccgctacgacttccccctgctccaagcagagcctgctgcggtgggtggatgctcacgccaggcctttcggcaccatcaggcccatgtatggggtcacagcctctgctaggaccaagccaagaccatctgctgtcacaaccactgcacacctggccacaaccaggaacactagtcccagccttggagagagcaggggtaccaaggatcttcctccagtgaaggaccctggagccctatccagggaggggctgctggccccactgggtctgctggccatcctgaccttggcagtagccacactgtatggactatccctggccacacctggggagtaggccaagaaggaaaatctgacgaataaagacccccgctgccccatagcactgagtggtcaattggctcctacccttcttggcagcacagacctctgcccacacccagggacctggggaggagggcacagtgtttgtccctcactttccct

SEQ ID NO: 29042 - DNA, 3534 bp, Homo sapiens
gcactcgcggcggaggcaagcggcggcgcgcggacggttggtccagttctccggcctggcggcaggcaagtctagctcggcgctgtcggatacttggggtgagcggaaagcatggcggggacctccgcgccaggcagcaagaggcggagcgagcccccggcgcctcgccccggcccgccgccgggcaccgggcaccccccgagcaagcgggcccggggcttctccgcagccgctgccccggaccctgacgacccgttcggcgcgcatggggacttcactgccgacgacctggaggagcttgacaccctcgcgtcacaggccctgagccaatgtccggccgcggctcgggacgtgtccagtgatcataaggtccacagattattagatggcatgtcaaaaaatccttcagggaaaaacagagaaactgttccaattaaagataatttcgaattagaggtacttcaggcacaatacaaagaacttaaagaaaagatgaaagtaatggaagaagaagttctcattaagaatggagaaattaaaattttgcgagactcactacatcagacggaatccgttctagaggaacagagaagatcacattttcttcttgagcaagagaaaacccaagcactcagtgacaaggaaaaggaattctccaaaaagctccaatcattgcagtctgaactccagtttaaagatgcagagatgaatgaattaaggacaaagctccagaccagtgaacgagcaaataaactggctgctccctctgtttcccatgtcagtcctaggaaaaacccttctgtggttataaagccagaagcatgttctccacaatttggaaaaacatcttttcctacaaaggagtcttttagtgctaacatgtcccttccccacccctgccagacggagtcaggatacaagcctctggtgggcagagaggatagtaagccccacagtctgagaggtgactccataaaacaagaagaggcccagaaaagctttgttgacagctggagacagagatcaaacactcaaggttccattttgataaacctgctcctgaagcagcctttgatcccagggtcatccctaagcctttgccacctcctgagtagtagttctgagtctcctgctggcacccccctgcagccaccagggtttggcagtaccttggctggaatgtcaggcctcaggaccacaggttcttatgatgggtcattttccctctcagccctgagagaagcacagaacctggcattcactggactgaatctggttgcccggaatgagtgctcacgtgatggagacccagcagagggaggcagaagggccttcccactctgccagcttcctggagccgtgcatttcctcccccttgtacagttcttcatcggcttacactgccaggccctgcaggacttggcagctgctaagagaagcggagcacctggggactcaccgacacattcctcctgcgtgagctctggggtagagaccaaccctgaggactcagtgtgcatcctggaaggcttctctgtgactgcacttagcattcttcagcacctggtgtgccacagcggagcagtcgtctccctattactgtcaggagtgggggcagattctgctgctggggaaggaaacaggagcctggttcacaggcttagtgatggagatatgacctcagccctaaggggggttgctgatgaccaaggacagcacccactgttgaagatgcttcttcacctgttggctttctcttctgcagcaacaggtcaccttcaagccagtgtcctgacccagtgccttaaggttttggtgaaattagccgaaaacacttcctgtgatttcttgcccaggttccagtgtgtgttccaagtgctgccaaagtgcctcagcccagagacacccctgcctagcgtgctgctggctgttgagctcctctccctgctggcggaccacgaccagctggcacctcagctctgttcccactcagaaggctgcctcctgctgctgctgtacatgtacatcacatcacggcctgacagagtggccttggagacacaatggctccagctggaacaagaggtggtcagagcgctcacggtgatgttgcacagacagtggctgacagtgcggagggcagggggacccccaaggaccgaccagcagaggcggacagtgcgctgtctgcgggacacggtgctgctgctgcacggcctatcgcagaaggacaagctcttcatgatgcactgcgtggaggtcctgcatcagtttgaccaggtgatgccgggggtcagcatgctcatccgagggcttcctgatgtgacggactgtgaagaggcagccctggatgacctctgtgccgcggaaaccgatgtggaagaccccgaggtggagtgtggctgaggccctgagtgtccagccacatggtggcaccagcaccactcctttccttaccacatcaactgattaaagcagtgaccagcaggaactgcccagagaactggctggccttgtttcctgagtctgatctgtttggcggagtgggaggggtggagcaggacccggaccctgagtggctgggatccttcttcctgtccctggctgttgctgagcccgtccccatggtaactgatctgccttgaggaaggagccctgccctgcctgtggaattgtcctgagtcattgctttgggctggggccatgggaagaaaccattgtgtggcagggaaggaggtggctcttggcccaggcctaaaccaggaaagcctgggaaactgggacccacaggtgggcatgaaagggccgcagcaggggctcccagcagtgtgtaagaccgggagctggtctggcaccactgccctggtccttccagctgcctgtcactggtatgatggccccggtgcattgtgccaccagcaggccacagctgtggatcttggaaggcctctggggtcccccgggagcaggggagtgggtgtgggggggaacggatggtggtgagagggacagaccaggcaggctgacgagcagggcgggcctggctcacgtgggcctgtaggcgggcccacgccaagtttcacttaccgccactgctgccagcgagagccgcgggagagtgtgcagccgagtcactactgcctgcctgcctgcctgctacggctcagcagcaggtacgtacccaaccatgggctcgcaggccctgcccccggggcccatgcagaccctcatctttttcgacatggaggccactggcttgcccttctcccagcccaaggtcacggagctgtgcctgctggctgtccacagatgtgccctggagagcccccccacctctcaggggccacctcccacagttcctccaccaccgcgtgtggtagacaagctctccctgtgtgtggctccggggaaggcctgcagccctgcagccagcgagatcacaggtctgagcacagctgtgctggcagcgcatgggcgtcaatgttttgatgacaacctggtcatccataaactaggggtgccgagctcgaaagg

SEQ ID NO: 29043 - DNA, 2212 bp, Homo sapiens
ctcggtccattatgaacaaagattcaatatcccaccgcccacccactacttcaaggcagccctggatgacctctgtgccgcggaaaccgatgtggaagaccccgaggtggagtgtggctgaggccctgagtgtccagccacatggtggcaccagcaccactcctttccttaccacatcaactgattaaagcagtgaccagcaggaactgcccagagaactggctggccttgtttcctgagtctgatctgtttggcggagtgggaggggtggagcaggacccggaccctgagtggctgggatccttcttcctgtccctggctgttgctgagcccgtccccatggtaactgatctgccttgaggaaggagccctgccctgcctgtggaattgtcctgagtcattgctttgggctggggccatgggaagaaaccattgtgtggcagggaaggaggtggctcttggcccaggcctaaaccaggaaagcctgggaaactgggacccacaggtgggcatgaaagggccgcagcaggggctcccagcagtgtgtaagaccgggagctggtctggcaccactgccctggtccttccagctgcctgtcactggtatgatggccccggtgcattgtgccaccagcaggccacagctgtggatcttggaaggcctctggggtcccccgggagcaggggagtgggtgtgggggggaacggatggtggtgagagggacagaccaggcaggctgacgagcagggcgggcctggctcacgtgggcctgtaggcgggcccacgccaagtttcacttaccgccactgctgccagcgagagccgcgggagagtgtgcagccgagtcactactgcctgcctgcctgcctgctacggtgagtgtggcccccacaatgggatggcgcagggcaggagggccatgggttcccccaccccagactaagggggcactaggggaggggccgagtcatgtgaagagggagaccctctcagacagtcgaatgtgctggtcccactaaggaaaccacctcaccctctccaacttcctgcctgaaaatgggccctggagctcgcagacagggcaggattgtgcagggaaggcctgagatgtgcttctgcccaccccctaccccactccctccccttcggatcttaacactgggcactcacacacccaccccatgctcctctccaggctcagcagcaggtacgtacccaaccatgggctcgcaggccctgcccccggggcccatgcagaccctcatctttttcgacatggaggccactggcttgcccttctcccagcccaaggtcacggagctgtgcctgctggctgtccacagatgtgccctggagagcccccccacctctcaggggccacctcccacagttcctccaccaccgcgtgtggtagacaagctctccctgtgtgtggctccggggaaggcctgcagccctgcagccagcgagatcacaggtctgagcacagctgtgctggcagcgcatgggcgtcaatgttttgatgacaacctggccaacctgctcctagccttcctgcggcgccagccacagccctggtgcctggtggcacacaatggtgaccgctacgacttccccctgctccaagcagagctggctatgctgggcctcaccagtgctctggatggtgccttctgtgtggatagcatcactgcgctgaaggccctggagcgagcaagcagcccctcagaacacggcccaaggaagagctacagcctaggcagcatctacactcgcctgtatgggcagtcccctccagactcgcacacggctgagggtgatgtcctggccctgctcagcatctgtcagtggagaccacaggccctgctgcggtgggtggatgctcacgccaggcctttcggcaccatcaggcccatgtatggggtcacagcctctgctaggaccaagccaagaccatctgctgtcacaaccactgcacacctggccacaaccaggaacactagtcccagccttggagagagcaggggtaccaaggatcttcctccagtgaaggaccctggagccctatccagggaggggctgctggccccactgggtctgctggccatcctgaccttggcagtagccacactgtatggactatccctggccacacctggggagtaggccaagaaggaaaatctgacgaataaagacccccgctgccccata

SEQ ID NO: 29044 - DNA, 2545 bp, Homo sapiens
  misc_feature (2533)..(2533): n is a, c, g, or t
gcactcgcggcggaggcaagcggcggcgcgcggacggttggtccagttctccggcctggcggcaggcaagtctagctcggcgctgtcggatacttggggtgagcggaaagcatggcggggacctccgcgccaggcagcaagaggcggagcgagcccccggcgcctcgccccggcccgccgccgggcaccgggcaccccccgagcaagcgggcccggggcttctccgcagccgctgccccggaccctgacgacccgttcggcgcgcatggggacttcactgccgacgacctggaggagcttgacaccctcgcgtcacaggccctgagccaatgtccggccgcggctcgggacgtgtccagtgatcataaggtccacagattattagatggcatgtcaaaaaatccttcagggaaaaacagagaaactgttccaattaaagataatttcgaattagaggtacttcaggcacaatacaaagaacttaaagaaaagatgaaagtaatggaagaagaagttctcattaagaatggagaaattaaaattttgcgagactcactacatcagacggaatccgttctagaggaacagagaagatcacattttcttcttgagcaagagaaaacccaagcactcagtgacaaggaaaaggaattctccaaaaagctccaatcattgcagtctgaactccagtttaaagatgcagagatgaatgaattaaggacaaagctccagaccagtgaacgagcaaataaactggctgctccctctgtttcccatgtcagtcctaggaaaaacccttctgtggttataaagccagaagcatgttctccacaatttggaaaaacatcttttcctacaaaggagtcttttagtgctaacatgtcccttccccacccctgccagacggagtcaggatacaagcctctggtgggcagagaggatagtaagccccacagtctgagaggtgactccataaaacaagaagaggcccagaaaagctttgttgacagctggagacagagatcaaacactcaaggttccattttgataaacctgctcctgaagcagcctttgatcccagggtcatccctaagcctttgccacctcctgagtagtagttctgagtctcctgctggcacccccctgcagccaccagggtttggcagtaccttggctggaatgtcaggcctcaggaccacaggttcttatgatgggtcattttccctctcagccctgagagaagcacagaacctggcattcactggactgaatctggttgcccggaatgagtgctcacgtgatggagacccagcagagggaggcagaagggccttcccactctgccagcttcctggagccgtgcatttcctcccccttgtacagttcttcatcggcttacactgccaggccctgcaggacttggcagctgctaagagaagcggagcacctggggactcaccgacacattcctcctgcgtgagctctggggtagagaccaaccctgaggactcagtgtgcatcctggaaggcttctctgtgactgcacttagcattcttcagcacctggtgtgccacagcggagcagtcgtctccctattactgtcaggagtgggggcagattctgctgctggggaaggaaacaggagcctggttcacaggcttagtgatggagatatgacctcagccctaaggggggttgctgatgaccaaggacagcacccactgttgaagatgcttcttcacctgttggctttctcttctgcagcaacaggtcaccttcaagccagtgtcctgacccagtgccttaaggttttggtgaaattagccgaaaacacttcctgtgatttcttgcccaggttccagtgtgtgttccaagtgctgccaaagtgcctcagcccagagacacccctgcctagcgtgctgctggctgttgagctcctctccctgctggcggaccacgaccagctggcacctcagctctgttcccactcagaaggctgcctcctgctgctgctgtacatgtacatcacatcacggcctgacagagtggccttggagacacaatggctccagctggaacaagaggtggtgtggctcctggctaagcttggtgtgcagagccccttgcccccagtcactggctccaactgccagtgtaatgtggaggtggtcagagcgctcacggtgatgttgcacagacagtggctgacagtgcggagggcagggggacccccaaggaccgaccagcagaggcggacagtgcgctgtctgcgggacacggtgctgctgctgcacggcctatcgcagaaggacaagctcttcatgatgcactgcgtggaggtcctgcatcagtttgaccaggtgatgccgggggtcagcatgctcatccgagggcttcctgatgtgacggactgtgaagaggcagccctggatgacctctgtgccgcggaaaccgatgtggaagaccccgaggtggagtgtggctgaggccctgagtgtccagccacattgtttaaacgcagcccaggcgggnccaagcttcctt

SEQ ID NO: 29045 - DNA, 2557 bp, Homo sapiens
gcactcgcggcggaggcaagcggcggcgcgcggacggttggtccagttctccggcctggcggcaggcaagtctagctcggcgctgtcggatacttggggtgagcggaaagcatggcggggacctccgcgccaggcagcaagaggcggagcgagcccccggcgcctcgccccggcccgccgccgggcaccgggcaccccccgagcaagcgggcccggggcttctccgcagccgctgccccggaccctgacgacccgttcggcgcgcatggggacttcactgccgacgacctggaggagcttgacaccctcgcgtcacaggccctgagccaatgtccggccgcggctcgggacgtgtccagtgatcataaggtccacagattattagatggcatgtcaaaaaatccttcagggaaaaacagagaaactgttccaattaaagataatttcgaattagaggtacttcaggcacaatacaaagaacttaaagaaaagatgaaagtaatggaagaagaagttctcattaagaatggagaaattaaaattttgcgagactcactacatcagacggaatccgttctagaggaacagagaagatcacattttcttcttgagcaagagaaaacccaagcactcagtgacaaggaaaaggaattctccaaaaagctccaatcattgcagtctgaactccagtttaaagatgcagagatgaatgaattaaggacaaagctccagaccagtgaacgagcaaataaactggctgctccctctgtttcccatgtcagtcctaggaaaaacccttctgtggttataaagccagaagcatgttctccacaatttggaaaaacatcttttcctacaaaggagtcttttagtgctaacatgtcccttccccacccctgccagacggagtcaggatacaagcctctggtgggcagagaggatagtaagccccacagtctgagaggtgactccataaaacaagaagaggcccagaaaagctttgttgacagctggagacagagatcaaacactcaaggttccattttgataaacctgctcctgaagcagcctttgatcccagggtcatccctaagcctttgccacctcctgagtagtagttctgagtctcctgctggcacccccctgcagccaccagggtttggcagtaccttggctggaatgtcaggcctcaggaccacaggttcttatgatgggtcattttccctctcagccctgagagaagcacagaacctggcattcactggactgaatctggttgcccggaatgagtgctcacgtgatggagacccagcagagggaggcagaagggccttcccactctgccagcttcctggagccgtgcatttcctcccccttgtacagttcttcatcggcttacactgccaggccctgcaggacttggcagctgctaagagaagcggagcacctggggactcaccgacacattcctcctgcgtgagctctggggtagagaccaaccctgaggactcagtgtgcatcctggaaggcttctctgtgactgcacttagcattcttcagcacctggtgtgccacagcggagcagtcgtctccctattactgtcaggagtgggggcagattctgctgctggggaaggaaacaggagcctggttcacaggcttagtgatggagatatgacctcagccctaaggggggttgctgatgaccaaggacagcacccactgttgaagatgcttcttcacctgttggctttctcttctgcagcaacaggtcaccttcaagccagtgtcctgacccagtgccttaaggttttggtgaaattagccgaaaacacttcctgtgatttcttgcccaggtattaagctgcataggagtcatgattctttgtgggtctcacctgacctcttaaggtctaacccatggcacttgtactttgctcacatcttgacttatctacactagttagttctaaggcttggttcagggagttctgaagtgatgggaagtggggccaaatgggagaaccaaggaagtggtttatttgatttaattctgcctctgaacaacaggtaagcaaaaggcacacatgattaaaggaggctgctaacctctgtggaggagggccctgccccaggacaagggttaagacaaggggcctctgaacctgagatgtgggtaaggtgaagaccacacatcacaagcacgttgaagtttagtggtttccctaaggaagcagaggatgtggagagggtctgcagcccacgggctgaccttgctgggagtctctgcctgtcattgtgcccatctttagcatgcatctggggtggcctgttcttcttaaggtttgtgggtagtatattatagtgaacctagcgaatgaacactgtgatcataaattcctcccttgggattccagagccgcaagattggggagaactgtgaacacaaccagcccaccccctcatccagtaatccagtctccctcagcactctaccaaagggtcagtttctatgttggaatgattccactggctgaatatatcttaaatcatctca

SEQ ID NO: 29046 - DNA, 1994 bp, Homo sapiens
gcactcgcggcggaggcaagcggcggcgcgcggacggttggtccagttctccggcctggcggcaggcaagtctagctcggcgctgtcggatacttggggtgagcggaaagcatggcggggacctccgcgccaggcagcaagaggcggagcgagcccccggcgcctcgccccggcccgccgccgggcaccgggcaccccccgagcaagcgggcccggggcttctccgcagccgctgccccggaccctgacgacccgttcggcgcgcatggggacttcactgccgacgacctggaggagcttgacaccctcgcgtcacaggccctgagccaatgtccggccgcggctcgggacgtgtccagtgatcataaggtccacagattattagatggcatgtcaaaaaatccttcagggaaaaacagagaaactgttccaattaaagataatttcgaattagaggtacttcaggcacaatacaaagaacttaaagaaaagatgaaagtaatggaagaagaagttctcattaagaatggagaaattaaaattttgcgagactcactacatcagacggaatccgttctagaggaacagagaagatcacattttcttcttgagcaagagaaaacccaagcactcagtgacaaggaaaaggaattctccaaaaagctccaatcattgcagtctgaactccagtttaaagatgcagagatgaatgaattaaggacaaagctccagaccagtgaacgagcaaataaactggctgctccctctgtttcccatgtcagtcctaggaaaaacccttctgtggttataaagccagaagcatgttctccacaatttggaaaaacatcttttcctacaaaggagtcttttagtgctaacatgtcccttccccacccctgccagacggagtcaggatacaagcctctggtgggcagagaggatagtaagccccacagtctgagaggtgactccataaaacaagaagaggcccagaaaagctttgttgacagctggagacagagatcaaacactcaaggttccattttgataaacctgctcctgaagcagcctttgatcccagggtcatccctaagcctttgccacctcctgagtagtagttctgagtctcctgctggcacccccctgcagccaccagggtttggcagtaccttggctggaatgtcaggcctcaggaccacaggttcttatgatgggtcattttccctctcagccctgagagaagcacagaacctggcattcactggactgaatctggttgcccggaatgagtgctcacgtgatggagacccagcagagggaggcagaagggccttcccactctgccagcttcctggagccgtgcatttcctcccccttgtacagttcttcatcggcttacactgccaggccctgcaggacttggcagctgctaagagaagcggagcacctggggactcaccgacacattcctcctgcgtgagctctggggtagagaccaaccctgaggactcagtgtgcatcctggaaggcttctctgtgactgcacttagcattcttcagcacctggtgtgccacagcggagcagtcgtctccctattactgtcaggagtgggggcagattctgctgctggggaaggaaacaggagcctggttcacaggcttagtgatggagatatgacctcagccctaaggggggttgctgatgaccaaggacagcacccactgttgaagatgcttcttcacctgttggctttctcttctgcagcaacaggtcaccttcaagccagtgtcctgacccagtgccttaaggttttggtgaaattagccgaaaacacttcctgtgatttcttgcccaggtattaagctgcataggagtcatgattctttgtgggtctcacctgacctcttaaggtctaacccatggcactgtttggactctgggcactgtttggactctgggcactgtttggacactgggcactgtttggacacta

SEQ ID NO: 29047 - DNA, 353 bp, Homo sapiens
acccaggacaactagaaaggtcagggtagaacccagagtcagtaagagtggtagtaacagtatgcaggatttaggtttggctccagagacctggacttcacacatcaactgtcatcacattacgctgggtctataaaactcaatatctaaatcaatctgcgtgtgtgtttgtgtgtgtgcacatgtgcatacatgcatgcttgcccatgattatggcgtgaagtaagttcaggttttgttgttgttgttgtcgtcgtcgtcgttgttgctgttgttgttgttgttgttgttgttttgaaatggagttttgctcttgttgcccagctggagtgcaatggtgcgatctcagctca

SEQ ID NO: 29048 - DNA, 331 bp, Homo sapiens
ctacttatttctcccccagatattttctatgtaaagattagctgttgaagctattacattctgggtggtgctagaaatcattacttaaggaatagaaattagaatgttgttatacatttaccaaagcaaaagagcaataatccaaattttaatcagatcttagaggaaacatttttatagctgtttattacaagacctcagagttttcttactgtgagcactctcaaaattatctaaagtatttttttaattgaactattggtcatagttattaatgttattaatatattactataaaaaggcatagaaaaatcataataagaaacagata

SEQ ID NO: 29049 - DNA, 262 bp, Homo sapiens
tggctgtaggatacttattcttgcttccaatagaagccatagtgatgactttagtgatggatgcctcagctccatcctgttgttcctcagcttctggaactcaggagaagagactagggaggatacgcctgcttgtctttctgagtaattggtatgattcttggagcagcattgtcttttgtacagcaccatctctgtatattcagaacttaggaaaaggataggcacatcataggaattagtaacagttttcccagtgtgt

SEQ ID NO: 29050 - DNA, 333 bp, Homo sapiens
aatctttgagatatatgaagtcatccctgaatactgtttaatgctctggttaaactccatttcactctgaccaatcagagtatgtgagctgatcataaggagctattatcaagagacttgtcagaggattcactgcccaatatgtttttatgaccctttttatctgtaagagttgctggtattgctttttagaatgaaatagactaattttgtccattacagtgttgatagtttgataactcactgtgggaatcaattgatcttatcagaataatataaccagtagaggaaatgtaactgaagcatatacagttttatttaatatattgttta

SEQ ID NO: 29051 - DNA, 413 bp, Homo sapiens
acaaatgagtgaaactaaaattcaaaaattggggacttgtatgctatttgatcatggtcaagatgacaagaatatatcatttaaaatattatataatttaaaagtagttgtgcattgaaaatgcgtgacaggctgggtacaggggctcatgcttgtaatcccagcactttgggaggccgaggcgggcagatcacttgagatcaggagtttgagaccagcctggccaacatgttgaaaccctgtgtctactaaaaatacaaaaattagccaggtgtggtggcaggtgcctgtaatcccagctactcgggaggctgaggcaggagaatcgcttgaacccgggaggtaaaggttgcagtgagccaagatcgcaccactgcactccagcctgggtgatagagtaagactcagtctca

SEQ ID NO: 29052 - DNA, 675 bp, Homo sapiens
atggcattttatcccttgcaaattgctgggctggttcttgggttccttggcatggtggggactcttgccacaacccttctgcctcagtggagagtatcagcttttgttggcagcaacattattgtctttgagaggctctgggaagggctctggatgaattgcatccgacaagccagggtccggttgcaatgcaagttctatagctccttgttggctctcccgcctgccctggaaacagcccgggccctcatgtgtgtggctgttgctctctccttgatcgccctgcttattggcatctgtggcatgaagcaggtccagtgcacaggctctaacgagagggccaaagcataccttctgggaacttcaggagtcctcttcatcctgacgggcatcttcgttctgattccggtgagctggacagccaatataatcatcagagatttctacaacccagccatccacataggtcagaaacgagagctgggagcagcacttttccttggctgggcaagcgctgctgtcctcttcattggagggggtctgctttgtggattttgctgctgcaacagaaagaagcaagggtacagatatccagtgcctggctaccgtgtgccacacacagataagcgaagaaatacgacaatgcttagtaagacctccaccagttatgtctaa

SEQ ID NO: 29053 - DNA, 760 bp, Homo sapiens
gttcttcttacatcaagctttccccttgttgcctcatactgactgacttctcccaccccaggcaggagaccccaacagggagatacccctctctactcttcaggaatatttggggttggtgacagtgcccctttccaattctgaaatgggtgaaaaccctgctggcatgtggcaccttatattagcaataagggcctaacagaatgacctgtcttcttctgtacttccagatgcagaagtggccctgaatcttggcttcttatgtaatttcatgagcaatttgttaacttctggaagagccaccgttagacctgtgctaccctcctcccatagtcacggtagtgagttttgagggcagaaatggtggtagtagtatttcttcttgagagatggtggttggatctaagagtcacatattcagaatttcctttagctgcccctaaagagattaagaaagtactggccagccgtggtggctcatgcttgtaatcccaatactttgggaggccaaggcgaaggattgcttgagtccaggagtttgagatcagcctgggcaacatagtgagacctttgtctctacaaaaaaaataaataaataaacattagctgggcctggtggcacttgcctataatcccagctactcaggagactgaggtgggagaactgcttgaacccgggaggttgaggctgcagtgagccatgattgcgccactgcactccagtctgggcaacagagagagaccctgactcaaaaaaaaa

SEQ ID NO: 29054 - DNA, 395 bp, Homo sapiens
ttttttttttgagacagggtctcactccggtcacccaacctcaattgcagtggcatgatcacggctcactacagcctccacttcccgggctcaggtgattctctcacctcagtctctcgagtagctgggaccataggcgtgcaccaccaccaccagctaactttttgtagagacaaagcttgtccatgttgcccaggctggtctggaactcctggactcaaacaagcaatctacccactttggactcccaaagtgctaggattacaggtgtgagccaccacacctggcctccactgtctttaaataatgaggttttaatttttgctcgtgtgaattatcaagattttttgttttatagtttgtgcttttggtgtcctaagaaatcttcaccaacc

SEQ ID NO: 29055 - DNA, 431 bp, Homo sapiens
ccgagatcgtaccattgcactccagcctgggtgacagaatggaatgagactctgtctcaaaaaaaaaaaaaaaaaaaaaagaagccctagatttcggttgtgttggttgtaaaaggagagacccagtaagtgggggttgtgccgcagattgctacccacaatggacgggtcactgagcaggtccggccaactgggcgttccctcgctggagggccagcacaccagactgcaggtggcgcgggtcagcaaggtaccaggggatgtgtcacacacacagcccacccccgtccagtcacgcacggacaccctgggcttccgagcaaacctgctcccacgtggtgtgaccacatggagccacagacacccagcaaggacacgcagcccgcacacccccggtactccagacacagtgacctgcaccagggctcgag

SEQ ID NO: 29056 - DNA, 373 bp, Homo sapiens
gaacacagcaacctggcactgtgttattgcccttagaatggaatgaatatatgtttagcacaaggtaggaagtgatgcgttaagttggaaggctttgccgatcatggtgtgtatgttgactaacctttattgtgcctttaaaaaatatactcaagaactaccttaaccaagtaattaaagtcaagattaccagttgtgggacaaatgacatgtacttcctggtgtgatatagaaggaaggacacagtatcacctatatagtattcttgaccagaatatttaacctgattttaaacaagaagtaaaaattcaaataaatttagattgtggtgcattcaaggcctgaactttaataaatgtccatgtcacggcag

SEQ ID NO: 29057 - DNA, 364 bp, Homo sapiens
caaaggccacaaactcaaatgactatagagtacatacaggtaatgtaagtgaatggcagtcaagactggggtatagtgaagaatatatgcatcatgtaagaagaacggctgattgttttcatgtgagaatgcaggcctaagattgctagatctgagtcttcaggaaaagccaaaagttcagaggtttatatgatgtctcatattgggaactaattccacttaagggaaaaaaaaaaccctactactgggggaacttaataaaacatagcaaattaattgcatttggccaatgagcttccaattttcatctgctctatacgattaatgtagaaacacaatttctcccttctttttattgtgctta

SEQ ID NO: 29058 - DNA, 103 bp, Homo sapiens
cctccgtagtcatatccttaccctgatgtattgctgtgtttcatcctcactccaaaatgcattttatatgttgtaaatatttttctacctttgtgttgattta

SEQ ID NO: 29059 - DNA, 410 bp, Homo sapiens
agtcatttggatcaactcctctcagtaaacaaatgaagaaacttaggtccagacacttgttaaagcccagtaagctatcgtacggcagagctgaaactaagattatgcttgctttatcatactgttaagtggaaattgaggccatgaaaaaggaaaacgtttgcatattaaatttgagaaaacaaactcagcagaaagaccacaaatatatgtgcaaaataaaattatcagaatacattaagatatgtcactattggccaggtgtggtggctcacacctgtaatcccagcactttgggaggccgagatgggctgatcacctgaggtcaggagttcgagaccagcctgaccaacatggagaaacctagtctctactaaaaataaagaattagccgggcgtggtggcgcatg

SEQ ID NO: 29060 - DNA, 381 bp, Homo sapiens
atgcctgaaccagtcaaatctgctccagtccctaaaaaaggctccaagaaggccattaacaaggctcagaagaaggatggaaagaagcgcaaacgcagccgcaaggagagctactctgtgtatgtgtacaaggtgctgaagcaggtccaccccgacaccggcatctcttccaaggctatgggaatcatgaactccttcgtcaacgacatctttgagcgtatcgccggagaagcgtcacgcctggcgcattacaacaagcgctcgaccatcacttcgagggagatccagacggccgtgcgcctactgctacccggggaattggccaagcacgccgtgtccgagggcaccaaggccgtcaccaagtataccagctccaagtga

SEQ ID NO: 29061 - DNA, 473 bp, Homo sapiens
cttgatgtaaactatattacatctgtaaaaaggtacctgtgactgtatatcaacataaagaagatgaccacctagattttatgattttagtgattataaattatgtaattgccttccctaaatacctccttaatccactgtggtagactgaataatgctactcccttccaaaaatgtccacaccctaatcctcagaatctgttaatgttaccttatatggcaaaagagatcttgtcagtgggattaaattaagaatgttgatgtcgaggagatattcctggattattcaggtgggtcccaaatataatcatgagggtcctcctaagagagagcagatgatcagagtgtatcagagaagatgtgactgcagtagcaaactctttgtgatatgctttgaagatgagaaaaaggcactggccaaggaatacaggggacttagaggagctagaaaaaacaaagaaatggaatccctc

SEQ ID NO: 29062 - DNA, 511 bp, Homo sapiens
gtaaaaatgccctcacattcaaagggttggccaccactgatttaaggtatctactcaccttctagatttcttaaatgcactgtcatcaaccagcttagaacattgctaagtgtatagtaagctctcaattattaccttatttcttaataactattatcttttaattttgtcttatttagtaggaagcctactgaagttctgttgagatctatctatatataaaaatgtgtgtctcacacacatacacatacctatataagttatatatgtgtataataaattcttacttaactttgctgataggttcttggaaacagtaagtgaagcaacatattaagtaaactaatttttaccagaatttaatacaagagttatgtttgcatgacatatagcaacaatgttcatttaaagatgcacttttcatgaacctattttgaacataaagtgaggacttactgtacatacatgtgcaacctggatttttctgataaataaaaattgtataatgtgt

SEQ ID NO: 29063 - DNA, 776 bp, Homo sapiens
cggcttttgcttgtagctccagccagagctcggttagggcctcatcgctctgctcccgctccttagggaagcctcggtgattctgccacagcctcagcctctgtggctctgtgacctgccggtattggatgattcgtatctaagactctgggacactcctgaagtcgggaaatgacggagtcttcgctgtgtcgccaggctggagtgcagtagtgcgatctcggctcaccgcattctccacctcccaggttcaagcgattcacctgctcagcctcctgagtagttgggattacaggcgcgccaccacactcagctaatttttttgtatttttagtagagacggggtttcgccatgttggccaggatggtctccatcttctgacctcatgatccaccggcctcggcctcccaaagtgctgggattataggcgtgagccaccgtgcctggctgaaggttttctcatttcacccaaaactttggacagtgcaggcatagaagattcattccacaaattataccaaaaggaccatgagaaagtggacatgagaatttaagaaaaaacttgtgaaaagtataacatgagtgtaaggtggcgaacggtggttataatagaaattaaccaatggtttattaattactcagaaaaaaacaattcattctattatttgtgtcaaaggttctcataaatttccaattcaaacaaagattagatagaatacggggataaccttactggcggatggggcccattcagggcccacggctaataaaaaga

SEQ ID NO: 29064 - DNA, 751 bp, Homo sapiens
  misc_feature (731)..(731): n is a, c, g, or t
  misc_feature (739)..(739): n is a, c, g, or t
cggcttttgcttgtagctccagccagagctcggttagggcctcatcgctctgctcccgctccttagggaagcctcggtgattctgccacagcctcagcctctgtggctctgtgacctgccggtattggatgattcgtatctaagactctgggacactcctgaagtcgggaaatgacggagtcttcgctgtgtcgccaggctggagtgcagtagtgcgatctcggctcaccgcattctccacctcccaggttcaagcgattcacctgctcagcctcctgagtagttgggattacaggcgcgccaccacactcagctaatttttttgtatttttagtagagacggggtttcgccatgttggccaggatggtctccatcttctgacctcatgatccaccggcctcggcctcccaaagtgctgggattataggcgtgagccaccgtgcctggctgaaggttaatttttcttttagtcatattttccatgcactgtttagaagtactggacgttatatacaaagtgcccaccaggcttcacttgagagaaaaacctttcttctcaggattccagccacaacccacaattgtatgacaaagtgcagcaaggtgctccccaaatctgcaaacaaaatagtctctctatttgggatctacagtcccttctagagcagttagactagatttctacaaaaatcacttcaggacagcaatcagttatttcacctccttcagngctcctgncatcttcagatc

SEQ ID NO: 29065 - DNA, 407 bp, Homo sapiens
  misc_feature (312)..(312): n is a, c, g, or t
cggcttttgcttgtagctccagccagagctcggttagggcctcatcgctctgctcccgctccttagggaagcctcggtgattctgccacagcctcagcctctgtggctctgtgacctgccggtattggatgattcgtatctaagactctgggacactcctgaagtcgggaaatgacggagtcttcgctgtgtcgccaggctggagtgcagtagtgcgatctcggctcaccgcattctccacctcccaggttcaagcgattcacctgctcagcctcctgagtagttgggattacaggcgcgccaccacatctntactaaaaatacaaaaattagcctggtatggttgtgcgcacctgtaaatcccagctacttgggaggctgaggtaggagaattgcttgaccccagg

SEQ ID NO: 29066 - DNA, 220 bp, Homo sapiens
  misc_feature (216)..(216): n is a, c, g, or t
cggcttttgcttgtagctccagccagagctcggttagggcctcatcgctctgctcccgctccttagggaagcctcggtgattctgccacagcctcagcctctgtggctctgtgacctgccggtattggatgattcgtatctaagactctgggacactcctgaagtcgggaaatgaactcttaacattcaaggatgtggccatagaattctctccanaaga

SEQ ID NO: 29067 - DNA, 1394 bp, Homo sapiens
cggcttttgcttgtagctccagccagagctcggttagggcctcatcgctctgctcccgctccttagggaagcctcggtgattctgccacagcctcagcctctgtggctctgtgacctgccggtattggatgattcgtatctaagactctgggacactcctgaagtcgggaaatggtgagtgtgcagggcagggcgtcccaaggctgtggaggcctcatcggaaccggcgggaaatggcggcggtgggaggagtctgtgaatggagcccgctcagccctctgtcctcagtcccctccggtgagggacccgcgctcttgtcagtccccgtacagcggctctggcccagcctgcagccctccttgtgcagctctgcgccggtagccctgcacccccgggctgtggagtgagtaggagctcatccggaagacaccgcggcggcctgcgcggtgccggcgtgggaggagctgtggtccggaatcccgtccctactttaccctgttcagaatgagattgaggccccatcaaaacatggagttcatgtgagcaaacaggacttattaatgggaaagctctgccgtggctcgtggtttggggactgccagcgggtcttgaaggaaaggcttttgtgaggtgtgtgaggaagcgaagcaaatcacctgcctgcgccaactttgccgccagtccccttgccctgtgcgcctcctccgcgtggctgttcctgaatacgctggtgtctgttcgcatcttttagaatacgctggtgtcggtgcgcacagcgcttctcttagttctacggagtcttcgctgtgtcgccaggctggagtgcagtagtgcgatctcggctcaccgcattctccacctcccaggttcaagcgattcacctgctcagcctcctgagtagttgggattacaggcgcgccaccacactcagctaatttttttgtatttttagtagagacggggtttcgccatgttggccaggatggtctccatcttctgacctcatgatccaccggcctcggcctcccaaagtgctgggattataggcgtgagccaccgtgcctggctgaaggttttctcatttcacccaaaactttggacagtgcaggcatagaagattcattccacaaattataccaaaaggaccatgagaaagtggacatgagaatttaagaaaaaacttgtgaaaagtataacatgagtgtaaggtggcgaacggtggttataatagaaattaaccaatggtttattaattactcagaaaaaaacaattcattctattatttgtgtcaaaggttctcataaatttccaattcaaacaaagattagatagaatacggggataaccttactggcggatggggcccattcagggcccacggctaataaaaaga

SEQ ID NO: 29068 - DNA, 1340 bp, Homo sapiens
cggcttttgcttgtagctccagccagagctcggttagggcctcatcgctctgctcccgctccttagggaagcctcggtgattctgccacagcctcagcctctgtggctctgtgacctgccggtattggatgattcgtatctaagactctgggacactcctgaagtcgggaaatggtgagtgtgcagggcagggcgtcccaaggctgtggaggcctcatcggaaccggcgggaaatggcggcggtgggaggagtctgtgaatggagcccgctcagccctctgtcctcagtcccctccggtgagggacccgcgctcttgtcagtccccgtacagcggctctggcccagcctgcagccctccttgtgcagctctgcgccggtagccctgcacccccgggctgtggagtgagtaggagctcatccggaagacaccgcggcggcctgcgcggtgccggcgtgggaggagctgtggtccggaatcccgtccctactttaccctgttcagaatgagattgaggccccatcaaaacatggagttcatgtgagcaaacaggacttattaatgggaaagctgtgaggtgtgtgaggaagcgaagcaaatcacctgcctgcgccaactttgccgccagtccccttgccctgtgcgcctcctccgcgtggctgttcctgaatacgctggtgtctgttcgcatcttttagaatacgctggtgtcggtgcgcacagcgcttctcttagttctacggagtcttcgctgtgtcgccaggctggagtgcagtagtgcgatctcggctcaccgcattctccacctcccaggttcaagcgattcacctgctcagcctcctgagtagttgggattacaggcgcgccaccacactcagctaatttttttgtatttttagtagagacggggtttcgccatgttggccaggatggtctccatcttctgacctcatgatccaccggcctcggcctcccaaagtgctgggattataggcgtgagccaccgtgcctggctgaaggttttctcatttcacccaaaactttggacagtgcaggcatagaagattcattccacaaattataccaaaaggaccatgagaaagtggacatgagaatttaagaaaaaacttgtgaaaagtataacatgagtgtaaggtggcgaacggtggttataatagaaattaaccaatggtttattaattactcagaaaaaaacaattcattctattatttgtgtcaaaggttctcataaatttccaattcaaacaaagattagatagaatacggggataaccttactggcggatggggcccattcagggcccacggctaataaaaaga

SEQ ID NO: 29069 - DNA, 993 bp, Homo sapiens
cggcttttgcttgtagctccagccagagctcggttagggcctcatcgctctgctcccgctccttagggaagcctcggtgattctgccacagcctcagcctctgtggctctgtgacctgccggtattggatgattcgtatctaagactctgggacactcctgaagtcgggaaatggtgagtgtgcagggcagggcgtcccaaggctgtggaggcctcatcggaaccggcgggaaatggcggcggtgggaggagtctgtgaatggagcccgctcagccctctgtcctcagtcccctccggtgagggacccgcgctcttgtcagtccccgtacagcggctctggcccagcctgcagccctccttgtgcagctctgcgccggtagccctgcacccccgggctgtggagtgagtaggagctcatccggaagacaccgcggcggcctgcgcggtgccggcgtgggaggagctgtggtccggaatcccgtccctactttaccctgttcagaatgagattgaggccccatcaaaacatggagttcatgtgagcaaacaggacttattaatgggaaagctctgccgtggctcgtggtttggggactgccagcgggtcttgaaggaaaggcttttgtgaggtgtgtgaggaagcgaagcaaatcacctgcctgcgccaactttgccgccagtccccttgccctgtgcgcctcctccgcgtggctgttcctgaatacgctggtgtctgttcgcatcttttagaatacgctggtgtcggtgcgcacagcgcttctcttagttctacggagtcttcgctgtgtcgccaggctggagtgcagtagtgcgatctcggctcaccgcattctccacctcccagagacggggtttcgccatgttggccaggatggtctccatcttctgacctcatgatccaccggcctcggcctcccagctctcagggaggctaagaggcgggaggatagcttgagcccaggagttcgaga

SEQ ID NO: 29070 - DNA, 611 bp, Homo sapiens
gactttttttctgtgtttgcagtctcttagtagattgcctgtgatgcacatcacattttggtttaattatataacaaaacattttcttgctgttctattatggtggaaaatttttttaggattggagataatttttctctttttttttttttttaagacggagtcttcgctgtgtcgccaggctggagtgcagtagtgcgatctcggctcaccgcattctccacctcccaggttcaagcgattcacctgctcagcctcctgagtagttgggattacaggcgcgccaccacactcagctaatttttttgtatttttagtagagacggggtttcgccatgttggccaggatggtctccatcttctgacctcatgatccaccggcctcggcctcccaaagtgctgggattataggcgtgagccaccgtgcctggctgaaggtttgtgaataatttttgtgatatccactaccacagataagtaaaaatgccctcacattcaaagggttggccaccactgatttaaggtatctactcaccttctagatttcttaaatgcactgtcatcaaccagcttagaacattgctaagtgtatagtaagctctcaattatta

SEQ ID NO: 29071 - DNA, 1889 bp, Homo sapiens
  misc_feature (1032)..(1032): n is a, c, g, or t
tggtgagggaagagagagaccctctcatattgttttatactcagaaaagaaaagagaagcaaaactaaaggcaggtagcctggcacctaggaacagacccaaaaccaaggaaccagacccgaaaccaggcctgggcctgcctgacctaagcctagtagttaaaattctacccctgacctagcaactgatgttatctctagattatagaaagacattgtaaaacttcccggtctgttctatttcactctgaccaccgttgcatgcagcccctgtcacgtaccccctgcttgctcaatcgatcatgaccctctcacgcggaccccccttagagttgtgagcccttaaaagggacaggaattgctcactcggggagctcggattttaagacactagcctgctgatgctcccagctgattaaagccactcccttcactatcttggtgtctgaggggttttgtctgcggcttgtcctgctacatttcttggttccctgaccaggaagcgaggtgattaacggatggttgaggcagctccttaggcgactttagcctgccctgtggaacatccctgcgggggactccaaccagccaaagcaacgcggatcctgagagtgctcctgggtaggcacttgccctgatgggacgccttgccagagcagtgtgtggcaggcccccgtggaggatcagcacagtggctgaacaccaggaaggaactggcatttggagtctggacatctaaaacttggtaagacttgtctttggaacttgcccactccatctgagtggaagcatggcctgatcatccacggtgtgcctttatcggcactttggttttggttttgacatggtttgaattccttgacagggttggtcttgggaatttgcctctaccatttgagcggaagcatggcctgatcacccatggcgtgcctgtaccggcactttggtttttgtttttgacttgacttgggttgcttgatactttggttttggttttgacctggcttggatttctggatactctgattttggntttgattttggtttggtgtaaactgcaaaagtgtgtgtgtgccctttttacctgttctttgttttgtgcgtgtggtgtgagcgtggtgttttgtctcaaagaagcatgggtcaggaacaaataagcccaccctactaggaactatgttgaaaaatttcaagaaaggatttaagggagattacggtgttactatgacaccaggaaaacttagaactttgtgtgaaatagactggccagcattagaggtgggttggccatcagaaggaagcctagacaggtcccttgtttcaaaggtatggcacaaggtaacctgtaagccaaggcacccagaccagtttccctacatagacagttacagctggttttagacccccttccccgccacagtagttaagagaacagcagcataagcggctggcagaggcaaggaaagaccagcagagacaaagagaggaaaagacaggaagagacagagagacaaagaaggagtcaagaaaagagaaagagagacagagaaagagagaggcagaaagaggaagagacagaggcaaaaggaaagtcagagagagagagacagaaagtcaaagagagaaaaagagaaagaaatatacaagtacttaagaaaaaaacagtataccctattcctttaaaagccaaggtaaatttgaaacctataattgataattaaaggtattcttcgtaaccctgtaacactctaataccactttgttgtcagtgtagtcagtgtaaacaagggcgtatcccgaaagcactgaggccttcctatcaaaaatccttaacccagtaacccgcagatggcccagatgcattcaatctgtagtggcagctgctttgct

SEQ ID NO: 29072 - DNA, 854 bp, Homo sapiens
tcggactatatgatcccatttaggagacaattgggaaaagggaaaatccaggggtgaagaatagatctgtggtggcaggggtgggaaaagcggggaggatttgcctactgaggggcagcacaagagaattttgcggggcgatggatctgtctgtatcttgaccatagtgatgatacatgactgtgcatttgtcagaactcacaggactgaatgaaaagagaagtgaattttactgcatgtgaattgttaaaataaatgctagacagtattttaaaaatcaagcccagatcctgcaagacattatggctccccaccagaaggggagagacggggaaagagaagtgtccccaaagttaacccacgttccctgggacccacctccctccccactgccacttcccaccagcctcacgcacgggccaggcccttccctttgcagctcacagcccagcagatgttaggtcagaatgcgtcccctcacttgactaaaggtttacagccagcagggtggaaatgaaccagatattaacaccccctcctccatgccctgcccaccttctggccagtaccagtgaagcagaagccactctcccacccccaggctgtcccaaagccctgaagacccaagaaagcagagccaagtggagtgaccctgataccagggccagctgcccagtcccctgtagctggggaggaccccctcttcttgtgaggcagacactgggagtgacccctccctgcaagggagatttctcatcccccagggttcccagagggttcccagaggaaatacaggatacccaatacatttgaatttcagataaaaaataaataacgttctgatacaagtctgt

SEQ ID NO: 29073 - DNA, 1173 bp, Homo sapiens
  misc_feature (4)..(4): n is a, c, g, or t
  misc_feature (6)..(6): n is a, c, g, or t
ttcngncaagaaacccaaacccaatgagccattgttcagtcccaattaattcctttaagaaaatatgatttgcccatttttagtgatgtggcaaaggctgcaaggaacacactttaaactcactgtggcaaaggcccactcttgtgtgtacatggttttagagtatccctaaaataatatcctatcacatataatcatattacatacaatcatgatgccaaatatttgcctaatacattatgctggcataattgctttcatataatttatctttgattctgttggcaagtgcatgacttcagtagcatgggtgcatagaggtagtactagaagcagagcagtggaccccaacctttttggtaccagggaccaatttagtggaagacaatttttccacagactgggttgggaatagtttcaggatgattcaagtgcattacatttattttgcactatatttttattattattacattgtaatatataatgaaataattatacaactcaccataatatagagtcagtgggagccctgagcttgttttcctgccactagacagttttatctgggggtgatgggagatagtgacagtctgatgatctgctgatctgacaggaggtggagctcaggcggtaatgggagtgatgtggagtggctataaatacagatgaagcttcgctcccttgcctgacattcacatcctgctgttgcaacccaagtcctaacaggccactgaccagtactggttcatggcccaggggttggggacccctggactagaggaaaatgctgtagagaaagaagctgatgtttagagagattgagttgcttagccgaggtcactgcagcaagtcaagtccttcaaggtaaactcatttcaagggatacatttaagggtggggacataatccatttcttgccaacaggacacaaaaatgtctactggagggcttctgggaaaggtttccttgctaaaagtaggagttccaaaagaaaaaaagggagagagagagagatagctcttctttaggtaaatgtcattttgttgaatactaaaggttgagcgttgtcatgttggctcttaatgccccaaattttgtcagtcatcttggaatattgaaggaagctacttagagagataaaagtcaatactcaaaaggtaatagagtgaa

SEQ ID NO: 29074 - DNA, 268 bp, Homo sapiens
tcaaaataaatgcataaaacaatatatgtataatagtgttgagcctataatgcaaacaaaactaatatatttgacattaagagcacaaaagaaataattggagcaaagttgtattaaagaaatgaaatgacactaagatacaacttgaatcaacaggaaaaaaatgaagagaaccagaaattgtaaagaataatgttaacataacaatgctaatagttactttgctttcctttcttctctcatgttctttaaaagacataaaattaca

SEQ ID NO: 29075 - DNA, 360 bp, Homo sapiens
caaacgttgcaatatcctgccttccttcttccttcctaaaggctccagcttttctgggccatacctttccatctccgctaccccatccccacctcctttataaggctgttccactcagggctgctgttggcctttcttagttaccccagggccaggtgacagacaaaagccccagtcaatactccagaccctgctgaaattactcaaactagctcatcctaagccccttgtggtatgtcatgcctcctgcttccagggaactgtgagcttaaacttcttccattatgacagtcatttctgtgtctgtgtctgttgtaaacaaatcctgggtataattaaaataccatgcatcaaactcca

SEQ ID NO: 29076 - DNA, 780 bp, Homo sapiens
gtggcctaaaaaactgaaagcctccatatgcctcttcatcttgccagctacagtccacaaattgtagagcctgcgggcactgtggaagccagctagatttgctctatccagtagcagcagattgagagccatacatggaatttatacttttctagcagccacaggaaaagagtacaaagaagcaggtaaaatttatattacaacatcttttttactgtgtattaaattattattgtaatacctattttaatatataataatgccataatatattttatttaacccaacgtatccaaaatggcatcatttctacaagcgattcctattttaaaaattatccgcaagatattttatgttctttcttttttgtacaaagtctgcaaaatccagtgtgttctttggtcagtgatgtctgagatcccaagttccaatgtctgtctgaaattatgaaaatcaagtcatgggagatggataccctattccctacgatccacttatttcacattgcatgcctgtatcaaaacatctcatgtactccataaatatatacacttactatgtaaccgcaaaaattttaagaatatacaaaaaattttaaaaactgaattaaagagcattgtagataattgtatttttcaaaaaataagtaaaatatctggtatataacagttaaaaaaaaaactgtattatcaactctgtgaccttagaactacctttttacattttcaaagattaactctccttaaaaaaataaatgtacaaattattaccaaaaaaaaa

SEQ ID NO: 29077 - DNA, 435 bp, Homo sapiens
tcagcactgcagtctctgcctctgtcctgcccccaccgcctccactgtggtcaaacttccttctgccttcctggtaaaagaacccctatgattgcacctggccccttagataacccaggttaacctctccagccctcatcacacctacaaagtctcttgtactgtgtaagataacacagccacaggttccagggatcaggacatcttgtggggaagggcattattcagccaaccacatccatggtcaaatgcaaacatgtgaaataaaggcaggaatgtggtgggattggggtgggaggcactcaccctcaaggcctgtgcaagtgcatagctgctcctttctgtattgaaaactttgatcttttgttcatcaaagattttttgcctaatatttattcttaaaagtattacaataaagtgtttatcctagttact

SEQ ID NO: 29078 - DNA, 755 bp, Homo sapiens
gtatggagccaggtacacattttcatgtaaggaactctttgaaaatattgtccagaatgtactcttctaataggaattaaagatgaaaacattgtattaccggacattgtggctagcactgaccctggaggtttgctttgagttgtaaagattttagaatatggacttcagttaaaacctatgctgaatttttctcgtgtaaatgtttgtctttaaaaagtgtgttgtcacagataccatgaataatttgaatttagatgaaaacagcttctggaattatggcaaactagccaaggggcatattagtcatatactggatagtttttcctggaaatctataaattgccttcttaacataaaaataaaggaatagatatggccagattgctcaagtgactccattgctcatgtggttacatgtgcattttgtcagctttgccacactgtaattggctcttctgttggataacttcctagaaagcctaaaataatttagtctatataagtcttatgagtcaatgataccctaagtggaaacacaggtatttaaaaccagccagctttccttttgacttttttttcctgaggcccttctcaggaacgtaactatttttgttaggaagtgcagaaaggagtggtctgttgtttaatgacagaaccactgacatgcaggaggagaccaaagggaaggtgccttagttctaaggaaaaatcttttgtcatttgtacagtgaaagctcattataagagctagt

SEQ ID NO: 29079 - DNA, 406 bp, Homo sapiens
gaaatcgcagcctcagaggtgcggtgacttataaagtcctcagcggagccaggtcctaacccaaacctcctcacctcttttttggcacaaactctgaaagaactttgaaaggttgagaggactgtgtatatcatgcaatctcttgttgctgttgccatgacgatcgtattaaaagtggacccccatgggcactggattgtaacttgaaaatgatgaagataatcaattgtactacagtgttgtaaaaggcctgaaattccgatgcatgctacaacatagatgaacctggagaacatgctaagtaaaattaatcagatacaaaataacaaatgttgtatggttccatgcatttaaggcatatgagtggttgaatgcatagagaaattagaatggtgttcatgatgat

SEQ ID NO: 29080 - DNA, 1073 bp, Homo sapiens
aaaaaaaaaaaaaaaaaaaaaaaacaagcaaatgacatataaaggagctccaattcatctggcaaaagacttcttaacagaagccatataggccaggaggaagtgcagagacattttcaaagtgctgaaattaaaaaaaaaaaaaaactatcatccaagaatactgtatctagcaaagttatccttcaaatatgaaggagagataaagtctttccaagataaacaaaagatgagagaatttaccacaacagacttctaagaaaggttcaagggagtttccaatgtgaaagaaaaagctactaatgtgcaaaatgaaagcttctgaaactgtaaaacccagtggtaaagttaagtacacagacaaaccaagaatagtattgtaattgtgatgtgcaatccactcataactagtatgtagcccaaaagaaatctatcaaaaagaataatagcaagagcaatttgttaagaaataggtaatataaaaatatgtacattgagacaaccaaaaatcaaaaggtgggacggatgggagttaagtgtagaagtgtttcttcttttcatttttctttgtttctattacttgtaatctaagataagttgtcatctctttaaaataacctgttatatctataaaatgtattttgtaagctttatggtaaacacaatacaaaaacctataatagattcactaaaagtaaaaagcaacaaattaaaacatactgttaaccacaaaggaagacagaaaaatgaagactcttaaatatttaagcaaaaaaagaagacagtaagaaaggaagaaagaaagggaggagttacaaaacaaccagaaaacaagcaacaaatggcagtagtaagtccttactaatcaataataacactgaatgtaaattgactcatcctctgattaaaagacataaagtggctgaatggatagagaaacaagacccaactatatgctgcctgcaagaaacccacttcacctgtaaagacacacatagtctaaaagtgaaggggtggaaaaagacatagcttgcaacaggcaacgaaaaaagagcaggagtagctatacttgt

SEQ ID NO: 29081 - DNA, 974 bp, Homo sapiens
catagcaaaattcaagcgagtgagtgtgtgtgcctgcgtgtgtctcagtgacgtgggaaggaatggcagatgctacaacagtgcagactcggcaccccatttatagaatgttctttttatatactatggaggaatctccactcaccttccactccacgtggtccctgtctcctgtccttgggacagagcagatccatttatattctcacatacaaccggatggatagccattccttttcttaatttgattcctgccaacaccctaaccgtcatgacttcaccttttaccatgggtggcttattaaaaacattttcctggacgaagacagttccctccccaagcggaattcgagtgccatctcttaaggtgatgcatttttaattcccactgcacaagccaggcatcacaatgaccatattcaccactcgttgtcaggggtacaccttttggaaggcagcgtgggctaatgtgaatggtactagtctgagtcagatccagttcaaatccaggtaacttaaagcttgtgtgacccagggacactttacttcaacttgttaaaccttaattttgtcacctataaatgtgatacataaacaaacttgaatgtgtcgcacttaaccacatgcctggctttccataggttcctttcctcttgcttcccccactgtgagcaacacaagcatcgccttcttgtgatcatggctcagtgccaagggataaaagctggcagacagcagctttacagctgggaaaaagagctgctgggggcagggctggcggtagctcaagcatgctgtggttcaggctaatgactggaaggtcccatccatccttgagattttatgacgctatgtgcaagatctagcgaacgtatttggctaagaaaaatcctggaggagagactgcctcagacaactggggggctggaaagccgacctggaaagcagcctgaccttggatgatttagcacctg

SEQ ID NO: 29082 - DNA, 510 bp, Homo sapiens
gaaatacaataatttgtgcgtgtgtgtggtgggttaagtgtcacatcttcataaaattcaaccctacccccatttcagtcacttgtcagagaggaaagccaagaagccaattccaagagtttagtgtgacatcagtgtctaggtcatctaaatctggccatctttctgccatacctatctaagtcctgtggcaattaacacagtagagctatatttgcataagtaactttatagtctctgtgtatatgctgagcagagctgattcattttacaatcatttgcacttgtcatagagctccttcaatactactacccaaacatgttggacaaagaaaagaagatagacacttttgttttgttgcttgttttctactgattttgtaatactgtattttcaacttcttagcgacattggccccatgttaaaggcctatgtcacacagcctgttgtgaataagaagttttttttaacagttgcccttgcaataataaacttctatttgcattgaa

SEQ ID NO: 29083 - DNA, 393 bp, Homo sapiens
ggaatgagaaaaatcattctcagtcttttactgtgggtttcaggttgaggccatcaaaaatttcaaggcctagatttaattacaattatctatttgtggtagctactttgaaaaacaaaatcaaagtagttgaagtcaataaaacaatccctggctttcaacttcaggtttggggagcaatgtgtgtgcatgtaaatgtgttgttccctttgctggggggaaatttttacagtgttgggtgtattttatttttatagaagttatgttctctgtgttttatggctttgtttgtttgttttgtcagtttaataccagctttattattaagaagtatttttcttattcttgtaaccactttgtaaaatacatcagaaattttctgtgttttcctaa

SEQ ID NO: 29084 - DNA, 382 bp, Homo sapiens
acacacacacacacacacacagtctcattcagactgggaccgtggagacatgccaaggaacctaagggacatatctctgggaactgaataagaaaccagagtacctgagaaaacccatgcagacatgggaagaacttgcggactccacatggatggtgaccctgaccaggaaccaatttttcttctcatcagtgttataacaaaacaaagttgaattaaacagtgttattcaagggccttctgtgtgcatatgaatgtaaataattcagtcccaagccagaatttggtctcagaatctgggttgcaatcctggcttgaccacttgcatgctggttactgaccattctctctgaactttatctgtaagtctctttatctgtaa

SEQ ID NO: 29085 - DNA, 495 bp, Homo sapiens
caacctcactgccatttgtagagcattacacccaacaactagatacacattcttctcaagtgtacatggtttgttcaccaacataggccacaaacaacaacccttgattaatgtgaaggtattgaaaacatacagaatatgttctcaaataacaaatttaattaaaaatcaataataatagtattataatatacctaggagaaaaagccaagtatctggaaatgaaacaacatacttttaagtaatccataagtgaacagaattcacaagggaaactggaaaatatctcaaaactgaatggcaatgaagagataaagtattcaaatatatgaaatacatgtaaagcagtgcttaagggaaatatgttgctttaaatttatacagatgctccttgacttaccatggggttacatcctgataaacccattgtaagttgaaaatattttaagttgaaaatgtacgtaatatcccaataaacccatcacaaagcaaaaa

SEQ ID NO: 29086 - DNA, 600 bp, Homo sapiens
aaattgtcattatatatgacttgtatggcaaacctggaaactttctctcacaggggttgtctttatttgaagtgactcaagtttgtctggtgcaaaaagcctttggatgtttctcctaaacaattatagacgattgtttagcttcacaaagccgcctcatgtggcattaacagctagggcagacaagaagctcaccaataaatggaaaaggaaaagctgggccatgagatgtcataggggactttgaaaagctccatcgtattcctgggaatctccaaccccactcacacgatcagggctgtgggcatgccagagaagacttgagaaggccctgtgcttttggttcttactgagtaagcaggcagcgaaaaccaaggcagagttgcaaactgcctgcctgggtgatgaaggcatcccctaacaaaaacacagagcccctcgacaaaggctgggaggcttaccagttggaagcatttaaggatatctctgtccattaatgagctgaccactaagctaaccaaacagagacttcagtggccaaacacaacaatgaatatcgaatttaccaaattatttcagcaaaaataagcacaacaaaca

SEQ ID NO: 29087 - DNA, 419 bp, Homo sapiens
gaaaaacaaagccagggcaatcacagttgaacctggatgatgggtacatggaatttcattatgcttttctatctatacttttatatacttgaaattttatagaattaaaaggttttatcttttgttgagaagaggttaccctctgacaccaggctggactgcatttgcacagtcacagcttactccagcctgggcaacagagcaagactccgtctcaaaaaaaataaataaaaataaaaaaaatcccagcactttgggaggccaaggagaaaggatcacttgagtccagggagttcaagagcagcctaggacaacataatgagattccatctctattaaaaaaattaaaaattaggccagggtgtgggtggtatacacctgtaggcgctagtttacttggggagggctgaaccgggggg

SEQ ID NO: 29088 - DNA, 448 bp, Homo sapiens
aatgaacttcaactgtggagtaagaaatatcttagccaccttgggtaagtcaatcagcttctctgtcaatactcttatatacgatgcctgcttgttcccaaccgcagtttgtaaagaaaaatggaataggaagcagaatgcttttggaattctcacaagtaagctattccttcttttccccctcttaaattccctttatcttaaaaagaataatgttctatgaaatgcaatgcaaaatgcaataacatttgagatgttatttttgagttattgcttttttatttctcttaaatgtatatttatttcaacattttaaaaaaatttcctaagccggtcgtggtggctcacgtctgtaatcccaaaactttgagaggtagaggcggctggatcacttgaggtcagcagttcaagtccaccctggccaatatggcgaaaccgcatctctact

SEQ ID NO: 29089 - DNA, 1167 bp, Homo sapiens
  misc_feature (248)..(248): n is a, c, g, or t
  misc_feature (850)..(850): n is a, c, g, or t
  misc_feature (897)..(897): n is a, c, g, or t
  misc_feature (924)..(924): n is a, c, g, or t
  misc_feature (962)..(962): n is a, c, g, or t
  misc_feature (1092)..(1095): n is a, c, g, or t
atgagcgccccctcgacgctgccccccgggggcgaggaagggctggggacggcctggccctctgcagccaatgccagtagcgctccggcggaggcggaggaggcggtggcggggcccggggacgcgcgggcggcgggcatggtcgctatccagtgcatctacgcgctggtgtgcctggtggggctggtgggcaacgccctggtcatcttcgtgatccttcgctacgccaagatgaagacggctaccancatctacctgctcaacctggccgtagccgacgagctcttcatgctgagcgtgcccttcgtggcctcgtcggccgccctgcgccactggcccttcggctccgtgctgtgccgcgcggtgctcagcgtcgacggcctcaacatgttcaccagcgtcttctgtctcaccgtgctcagcgtggaccgctacgtggccgtggtgcaccctctgcgcgcggcgacctaccggcggcccagcgtggccaagctcatcaacctgggcgtgtggctggcatccctgttggtcactctccccatcgccatcttcgcagacaccagaccggctcgcggcggccaggccgtggcctgcaacctgcagtggccacacccggcctggtcggcagtcttcgtggtctacactttcctgctgggcttcctgctgcccgtgctggccattggcctgtgctacctgctcatcgtgggcaagatgcgcgccgtggccctgcgcgctggctggcagcagcgcaggcgctcggagaagaaaatcaccaggctggtgctgatggtcgtggtcgtctttgtgctctgctggatgcctttctacgtggtgcagctgctgaacctcntcgtgaccagccttgatgccaccgtcaaccacgtgtcccttatcctnagctatgccaacagctgcgccaacccnattctctatggcttcctctccgacaacttccgccgatncttccagcgggttctctgcctgcgctgctgcctcctggaaggtgctggaggtgctgaggaggagcccctggactactatgccactgctctcaagagcaaaggtggggcagggtgcatgtgccccccactnnnntgccagcaggaagccctgcaaccagaacccggccgcaagcgcatccccctcaccaggaccaccaccttctga

SEQ ID NO: 29090 - DNA, 416 bp, Homo sapiens
gcagaggttgcagtgagccgagattgcactactgcactccagctgggcaacagtgagactccgtctcgaaaaaaacaaacaaacaaaagcctcagtgaatgtaagctgattcaatttgtagaaagtatgatctctggccaggtgcggtggctcacgcctgtaatcccagcactttgggaggctgaggcgggcggatcacgaggtcaggagatcaagaccatcctggctaacatggtgaaaccccttctctactaaaaatacaaaaaatcagctgggcatggtggcgctcacctgtagtctcagctactcaggaggctgaggcaggagaatcacttgaacccgggaggatgaggttgcagtgagccgagatggtgtcactgcactccagcctggctgagagagcgagactccatctc

SEQ ID NO: 29091 - DNA, 946 bp, Homo sapiens
agatggagtttcgctcttgttgcctaggctggagagcagtggtgcgatcttggctcactgcaacctccacctccctggttcaagtgattctgctgcctcagcctcccaagtagctgggattacaggcgcccgccaccatgcccggtggcgtgcatggtaatttttgtatttttagtagaaacaggatctcgccatgttggccaggctggtcttgaactcctgacctcaggtgatccacccgccttggcctcccaaagtactggggattacagatgtgagccaccacgcctggcccacagtctgtattttaacaagatccccacctcagtcttaggcacatggattctcctcaacccccaataccacagagtctattaatttttacccaatagggaaggggaaaaagtcaagaaagaataatgaattaagtaatctttccccctccaggaagctctttatttaatttcgctcccatgaaacacaatttgaagagtctctcaaataaacaaattccattttctgataattatttaattgccccacttttgaaatttttgtcaaagacgactgtcactccctgtcagaacttctattcagcacagtataccaagcgtttctccatcgagttgttataatatgatcaaaaagcagggagagatgctgcttggttaccctgtggggccttatcggggctcagtgcagtctttccatgtaggcattctcaaatactcaattgaaacctgattgaggatcatttgatctctgttggccctagtgcagtaggctgctgagaaccactgatgcaatagactgagagactaactgcctgcttccctgtcagcccaggctctgctaaggccgtcttagttacagaagaaagtggggcagagagccctgcaaggattacattccattcctaacggagacaggcaagcgttcagtgccc

SEQ ID NO: 29092 - DNA, 484 bp, Homo sapiens
ttttttttttgagatggagtctcgctctgtcacccaggctggagtgcagtggtgtgatcatgactcactgcagcctctgcctcccgggttcaagtgattctggtgcctcagcctcccgagtagctgggactacaggaataagccaccacgcccagctaatttttttgtatttttagtagagatggggtttcgccatgttggccaggctatcctcgaactcctgacctcaggtgatctgcttgcctcggcctcccaaagtgctgggattacaggcatgagccgccacgcctggctctaatatttttatataaggcctgagatgggaaaaactgaagtcatacagtattcactgaccaagagcggcgagcagagaaagaaggcagggaaggaagatggaataagaaaattacctacacagtccatccctgcttctcccatctccatacacccagagggtctttcccaattccatgctttggtacgt

SEQ ID NO: 29093 - DNA, 568 bp, Homo sapiens
cctgttataaacatctgtacctgaaatggtaaaaaatgtaaagtgtttatacttttcttatttaccagttcactggaaaatacatttttatggattaccacctcctctgatgctgccaggtgaatgaggagttagctacagtaataaggtggtaacacagttgattggttatatctaacactatttgtgtggtaccaaaagcacttgtacatatgaagcataatatattttaaaattatttattttaactgcatctgaaatagaaggaaaaaaggaggtttttgagccctagcattaatgagctagggccttcataattaaaaaagtgacctagtgagctgtacctattaggcatcaaatattttaatttttttccatgtgataacagacactttcatttctccttttctgtaatttttctcctgttccttaatacttcttttattttattaaaggaaattcatctcaaggtaaaggtttacttattggactatgttataagatagcaagataatagggaaatggtgtttccagtagaatttttgctaaacaaaatttacatgtctcc

SEQ ID NO: 29094 - DNA, 2308 bp, Homo sapiens
  misc_feature (1348)..(1348): n is a, c, g, or t
  misc_feature (1651)..(1651): n is a, c, g, or t
agcagctccaggctggatctgcgccggacacaggagaaagcagcgggtaggctaagcaggggtgctgaggatggaggaaagttgggaggctgagcacagctgaagtcctgagctccctgtgcccttgacttctctgtgggctcgagcaaggaccatcccaactcaggatgaaccctccttcggggccaagagtcctgcccagcccaacccaagagcccagctgcatggccaccccagcaccacccagctggtgggacagctcccagagcagcatctccagcctgggccggcttccatccatcagtcccacagcacctgggacttgggctgctgcctgggtccccctccccacggttgatgttccagaccatgcccactataccctgggcacagtgatcttgctggtgggactcacggggatgctgggcaacctgacggtcatctataccttctgcaggagcagaagcctccggacacctgccaacatgttcattatcaacctcgcggtcagcgacttcctcatgtccttcacccaggcccctgtcttcttcaccagtagcctctataagcagtggctctttggggagacaggctgcgagttctatgccttctgtggagctctctttggcatttcctccatgatcaccctgacggccatcgccctggaccgctacctggtaatcacacgcccgctggccacctttggtgtggcgtccaagaggcgtgcggcatttgtcctgctgggcgtttggctctatgccctggcctggagtctgccacccttcttcggctggagcgcctacgtgcccgaggggttgctgacatcctgctcctgggactacatgagcttcacgccggccgtgcgtgcctacaccatgcttctctgctgcttcgtgttcttcctccctctgcttatcatcatctactgctacatcttcatcttcagggccatccgggagacaggacgggctctccagaccttcggggcctgcaagggcaatggcgagtccctgtggcagcggcagcggctgcagagcgagtgcaagatggccaagatcatgctgctggtcatcctcctcttcgtgctctcctgggctccctattccgctgtggccctggtggcctttgctgggtacgcacacgtcctgacaccctacatgagctcggtgccagccgtcatcgccaaggcctctgcaatccacaaccccatcatttacgccatcacccaccccaagtacagggtggccattgcccagcacctgccctgcctgggggtgctgctgggtgtatcacgccggcacagtcgcccctaccccagctaccgctccacccaccgctccacgctgancagccacacctccaacctcagctggatctccatacggaggcgccaggagtccctgggctcggagagtgaggtgggctggacacacatggaggcagcagctgtgtggggagctgcccagcaagcaaatgggcggtccctctacggtcagggtctggaggacttggaagccaaggcaccccccagaccccagggacacgaagcagagactccagggaagaccaaggggctgatccccagccaggaccccaggatgtaggacgcccactggctctccctttcttctgagacacatccagccccccnacgtctccctcatatacacagacccaggattatgctgtgagcctgcaggctttggaagtggccctgtcacccgtgctgcacgggattcacagccccagccccatggcccctctccacacctcaaaactcctgccccataacgtcctccgcatccactttccagctcagcagccgcacccgaggctcagcctgaggggtgtgtgcccaggccctcccacttcccgagttgtctgcctctcctcaaatgctgtgtgctgcaattgtccaggcgatgacaatggtgatggctccagagaacacaccagctatttatgagcctctgcccccaggctgggcctgtcactggcataggaaggccagccccgcatctcccactgccaacagctgaagccgagcacagacctccctttgcacgctggaacagttactcacctgtggcttcttcccccagtgtaccgttccactgtggcccacattcttgtgcacgcgggcatttgcaggcacgctctcgcgtagttacctatctgaatgcacaccaagcacatgcgtgcacactctgcgtctgtgattcatttcatgtagtggtctaagctcctcccagggctgtgtggatctgacagggtataggaaaataaaaagcggagaaggtgtcttcag

SEQ ID NO: 29095 - DNA, 2341 bp, Homo sapiens
  misc_feature (1381)..(1381): n is a, c, g, or t
  misc_feature (1684)..(1684): n is a, c, g, or t
agcagctccaggctggatctgcgccggacacaggagaaagcagcgggtaggctaagcaggggtgctgaggatggaggaaagttgggaggctgagcacagctgaagtcctgagctccctgtgcccttgacttctctgtgggctcgagcaaggaccatcccaactcaggatgaaccctccttcggggccaagagtcctgcccagcccaacccaagagcccagctgcatggccaccccagcaccacccagctggtgggacagctcccagagcagcatctccagcctgggccggcttccatccatcagtcccacagcacctgggacttgggctgctgcctgggtccccctccccacggttgatgttccagaccatgcccactataccctgggcacagtgatcttgctggtgggactcacggggatgctgggcaacctgacggtcatctataccttctgcagagctgtgcttcgtggagtcactgtgatgatgcagagcagaagcctccggacacctgccaacatgttcattatcaacctcgcggtcagcgacttcctcatgtccttcacccaggcccctgtcttcttcaccagtagcctctataagcagtggctctttggggagacaggctgcgagttctatgccttctgtggagctctctttggcatttcctccatgatcaccctgacggccatcgccctggaccgctacctggtaatcacacgcccgctggccacctttggtgtggcgtccaagaggcgtgcggcatttgtcctgctgggcgtttggctctatgccctggcctggagtctgccacccttcttcggctggagcgcctacgtgcccgaggggttgctgacatcctgctcctgggactacatgagcttcacgccggccgtgcgtgcctacaccatgcttctctgctgcttcgtgttcttcctccctctgcttatcatcatctactgctacatcttcatcttcagggccatccgggagacaggacgggctctccagaccttcggggcctgcaagggcaatggcgagtccctgtggcagcggcagcggctgcagagcgagtgcaagatggccaagatcatgctgctggtcatcctcctcttcgtgctctcctgggctccctattccgctgtggccctggtggcctttgctgggtacgcacacgtcctgacaccctacatgagctcggtgccagccgtcatcgccaaggcctctgcaatccacaaccccatcatttacgccatcacccaccccaagtacagggtggccattgcccagcacctgccctgcctgggggtgctgctgggtgtatcacgccggcacagtcgcccctaccccagctaccgctccacccaccgctccacgctgancagccacacctccaacctcagctggatctccatacggaggcgccaggagtccctgggctcggagagtgaggtgggctggacacacatggaggcagcagctgtgtggggagctgcccagcaagcaaatgggcggtccctctacggtcagggtctggaggacttggaagccaaggcaccccccagaccccagggacacgaagcagagactccagggaagaccaaggggctgatccccagccaggaccccaggatgtaggacgcccactggctctccctttcttctgagacacatccagccccccnacgtctccctcatatacacagacccaggattatgctgtgagcctgcaggctttggaagtggccctgtcacccgtgctgcacgggattcacagccccagccccatggcccctctccacacctcaaaactcctgccccataacgtcctccgcatccactttccagctcagcagccgcacccgaggctcagcctgaggggtgtgtgcccaggccctcccacttcccgagttgtctgcctctcctcaaatgctgtgtgctgcaattgtccaggcgatgacaatggtgatggctccagagaacacaccagctatttatgagcctctgcccccaggctgggcctgtcactggcataggaaggccagccccgcatctcccactgccaacagctgaagccgagcacagacctccctttgcacgctggaacagttactcacctgtggcttcttcccccagtgtaccgttccactgtggcccacattcttgtgcacgcgggcatttgcaggcacgctctcgcgtagttacctatctgaatgcacaccaagcacatgcgtgcacactctgcgtctgtgattcatttcatgtagtggtctaagctcctcccagggctgtgtggatctgacagggtataggaaaataaaaagcggagaaggtgtcttcag

SEQ ID NO: 29096 - DNA, 767 bp, Homo sapiens
caccatctctcaggaacatgaccctttcttttcaaaatggcctgaaaatagagcaaatggccctgttttaaggcatcattacaaagacatctcaaagtctcaacttgtttatccacatgagtttcttaaatgctctgaggcccacttccctcctagggaaaagggaatattggtaaaaatgagcattgataaaaatgagcattgattggaggctccctggcgtaaggtcccgtgcttagcactatccaaggattgtggagtaagttctccaggaagccctctgaggcaggtcccagggccctgggctagatgaaaggcagagctagcattcttcctgggcagtgtgacgctggagtccctgctctgactaccacggtccacagccccctgtagcacccacctcccaccttggaggagttgctgcagggattgacaaagtaacatctagaaagtacttagctggtctgctacggacggacatcccttaaacaatgagagctgctgctgtgagttgagggcttcatcccctgggagggatctgaagagctatgaaggggaggggctaagggaacgtgaaaggggtggccctggttgggggccccatcagctggggtagggcctggaggaacccaggagtaggggtgtaaccagggtgctgtggatggatgcacaggccctgtgcttccatgcagatggctagtccttccgtgcagatgacttagccctcaggagccccttagagcagcagggtctttgccttcccttta

SEQ ID NO: 29097 - DNA, 418 bp, Homo sapiens
ctgtccttagattacaggctcaggtctgagatgctatgaagtaagaaaaaagtgtgctgagaatagaggataaaatttatcaaaattgccaagtcaatttttatcagttttggcagcaaggatcacctggaaatgcaaagcgtgttttcttttttacacagaaaagcaaatattctctaaacattaaaagtttatttacctctcaacttcaattccctatcacagtttcttctacccaaaatgagagaaaagatataacaaggttatcatggatatggtggaatgaagcaaagtcaactttgaaataatttgggatcatatttagatcacaccttattgagtggagatttggttttctccagaagggaatggatgtctcactattcataatcctgtgaagaaatgtttaattctgggc

SEQ ID NO: 29098 - DNA, 383 bp, Homo sapiens
tataaagtagaggtctaatttcatttttttgcatgtggatatccagctattccagcattatcattgaagagactaccttttccccatttattgtcttggtaaccttgaataaagttaaccacaaatgtaagggtttatttctggactttcaattctattccattgatttatatgtttatctttatgtcagtaccatgctgttttgattattgtagctttgtagtaaaatttgaaatttggaactctgagtcctgaaactttgtttttctttttccagatttctttttttttcttctatttttgaccccttgaatttcaaaatgaatgttaggaaaagtatgtccatttctgcaaaaagagcaaagtggtcctttgatgtatat

SEQ ID NO: 29099 - DNA, 378 bp, Homo sapiens
ttcattacagtttagtgaacagtttactaaccataataataatacatttaacttaattatgtatattcaccaaaagtagtaattgagaagattaatcctcctttatttcaagattttactttatttgtatttatttatttgagacaaggtctcactctgtcaccaaggctagagtgcagtgctgtgattataactgactgcagcctcaacctcctgggctcaagagatcctcccactgcagcctccctagtagctgggactacaggtgtgcaccaacacacccagcttattttttattttttgtagaggtgaggtttcaccatgttgcccaggctggccttgaactcttgggctcaaaatatagccttggcctcccaa

SEQ ID NO: 29100 - DNA, 486 bp, Homo sapiens
aaactttattaaacaatcctgatttagaatacatttcttcccccactttcccgtaacttacctcctgcaccgagcagccctaaacttcttttctttggctagtctaagatatacaccccaaatcctaattgcctctttgcatcacatttctttgtgaatttccatgtgtatgtacataattaattgttatttttcttgttaacttgtctgtgatcagtttaatttgtagggtcccagacactgaacctaggatggaagagaaaaagtgtttctgctttcctatggcttaggcaaccatgaatggacaggcagggcatcccacttgctccagaggctgcagctcaattgagatctgacaaagctgatgtgaaaactttactgaaccagatcctggaattttgcctacaaaaatacaaatacagaactctgttttttcttttccaaattcagatttgcacgagaataaaattataagaattaaaaaaa

SEQ ID NO: 29101 - DNA, 523 bp, Homo sapiens
agcgagttcttttcggctggaatggggaatttgtgaggtaggccggaagtggtgttgcggagggaagtgtggggagagcagaggcgcagctctgctggagagacctgaggcttgcagcgctgggcccggccgggtcgctgcggctgggctggaggtcaaggatgcattccaggaaagttctataaaaatataccatcaactccaacctgatatttgacctagccatggaaaacctcattggctcctcactggatcagaccataaaaatgatccaggaatgaaaatctaagataaattcccaccacttcaagatgttcttatacaagtcaacagtctagcagatcagccagtctctttcatcatcaagcagacatactcaaggtaccaacacagcaaaggcacaaaatgtctctatatcagtatttttcatggtatatgtgagacccattagtgaggcatgaaatcaattctgtgagtcacaatgaacatttgtctaaaaaacaaaataaaatgtaaaatacca

SEQ ID NO: 29102 - DNA, 406 bp, Homo sapiens
agcgagttcttttcggctggaatggggaatttgtgaggtcaaggatgcattccaggaaagttctataaaaatataccatcaactccaacctgatatttgacctagccatggaaaacctcattggctcctcactggatcagaccataaaaatgatccaggaatgaaaatctaagataaattcccaccacttcaagatgttcttatacaagtcaacagtctagcagatcagccagtctctttcatcatcaagcagacatactcaaggtaccaacacagcaaaggcacaaaatgtctctatatcagtatttttcatggtatatgtgagacccattagtgaggcatgaaatcaattctgtgagtcacaatgaacatttgtctaaaaaacaaaataaaatgtaaaatacca

SEQ ID NO: 29103 - DNA, 918 bp, Homo sapiens
agcgagttcttttcggctggaatggggaatttgtgaggtcaaggatgcattccaggaaagttctataaaaatataccatcaactccaacctgatatttgacctagccatggaaaacctcattggctcctcactggatcagaccataaaaatgatccaggaatgaaaatctaagataaattcccaccacttcaagatgttcttatacaagtcaacagtctagcagatcagccagtctctttcatcatcaagcagacatactcaagtgccaattataacattttaatcaaactggaacaaattgctattaaaatggatcatttctttattaaaagaaagaggaatagtgaagtgaaatatacagaagcatgttcaagttcatctgttgaatctggaattgtgaatagtgacaatattgagaaaaatactgactccaatctgcaaacttcaacttcatttgagccacatttcaaaaagaaaaaagtaagtgcaagacgttataatgaagattacttaaaatatggctttatcaaatgtgaaaaaccctttgaaaatgacagacctcagtgtgttatttgtaataatattcttgcgaatgaaagcttaaaaccttcgaaattaaaaaggcacttagaaactcagcatgctgaacttattgataagcctcttgaatattttcaaagaaagaaaaaagacataaagttatcaacacaatttcttagttgttctactgctgttagtgagaaagccttattatcatcatatttagttgcatatcgtgtggcaaaagagaaaatagctaacacagctgctgaaaaaattattcttccagcatgtttggatatggtgcgtacaatatttgatgataaatcagctgataaattaaaaactatacctaatgataacacagtatctcttcg

SEQ ID NO: 29104 - DNA, 2968 bp, Homo sapiens
agcgagttcttttcggctggaatggggaatttgtgaggtaggccggaagtggtgttgcggagggaagtgtggggagagcagaggcgcagctctgctggagagacctgaggcttgcagcgctgggcccggccgggtcgctgcggctgggctggaggtcaaggatgcattccaggaaagttctataaaaatataccatcaactccaacctgatatttgacctagccatggaaaacctcattggctcctcactggatcagaccataaaaatgatccaggaatgaaaatctaagataaattcccaccacttcaagatgttcttatacaagtcaacagtctagcagatcagccagtctctttcatcatcaagcagacatactcaaggtaccaacacagcaaaggcacaaaatgtctctatatcagtatttttcatggtatatgtgagacccattagtgaggcatgaaatcaattctgtgagtcacaatgaacatttgtctaaaaaacaaaataaaatgtaaaataccaaagtgttttgcatgaatcctttgcctgaattgtgcacattgcaaggaatgctgaggtcaatttcaatatgcgagaggggtatttgatggaggagatatgatgaatagaatgtatattggctaagaaatggttttcagtcattgattcctgggtgtcttgcttgattttcataatagcacggttaatgttctatagtcaagttttatattacaattacttgcaactagttgtgaagtctgaaatattcgattcaattgcaaactttgagtgtagtttttgaaaagatgttatttagactgtatatttttttcttcttttttgagttagtgccaattataacattttaatcaaactggaacaaattgctattaaaatggatcatttctttattaaaagaaagaggaatagtgaagtgaaatatacagaagcatgttcaagttcatctgttgaatctggaattgtgaatagtgacaatattgagaaaaatactgactccaatctgcaaacttcaacttcatttgagccacatttcaaaaagaaaaaaaagaaaaatttgaaacattaagggaaaacagttgggtaaaagatccatttgcttttcgaaaccctgaatcaataattgagctaaacttggtgcctgaagaagagaatgaattattgcagcttagttcttcatatacattgaagaatgattatgaaaccttaagtttatcagcattttggatgaaggtaaaggaagactttccattgttaagtagaaagagtgtcctgctattgctaccattcacaacaactagtttgtgtgaactagggttttccatcttaacgcagttaaaaacaaaggaaagaaatgggctgaattgtgcagcagttatgcgggtagcattatcttcctgtgttccagactggaatgaacttatgaacaggcaagcacacccatcatagtaaataaaaatcttacctagcttttgtctttgtatttcttattttgtagtatttttctatgttatatttaaatggtactataatactgtgatacttttgttatgttttaatttttgttatatttaataaaattattttatgttcattgaacaaaaatttaatgaatttctgttagaggccaggaactattctagagacatttgggatacaaaagtgaacaaaacaggtaattccctagtagagtttatatcctggcaaggagaaattgacaataaacctaataaataaggtttataatatttagaagctattaagtgctatggaaagagtagtaagaaggaaggtcagggaagtactggggaaccaaaccatgaagggttctgtagaccattattgggcctctggcttttgtcagtggactagagaacagttgaagggtttaagcgaaggagagaaatgatctgagctaggttttaaaagacactctggtcactattttaaattcttagggtaagtctgaattaaatgttactttcccctcactgggcatggtggctcagacctgtaatccccgcactttggcaggccatggcagaaggctctgttgagcccaggagttcaagaccatcctgggcaacatagtgagaccttatttctactaaaaatattttaaaaataagtcaggtgtggtggtgcacacctatagtcccagctactcaggaggctgtggcaggagggtcgcttgacctcaggagtttgaagttgcagtcatctatgattgcaccactgcagtccagcctgagcaacagagtgaaaccctgtctcgagaaaattaaatgttacttccctaaaaaaaccttttctaaccaccctagggtaaatcctccattattcctttatttctttgttttccttgtagtatataatttgtaataattttgattactgattgtcattctgccaccctggagtatataatttttaattatctgattactgttattcttccatagtaggggaggtgatatccatttgcctgatacatagtatgtgttcaatacacatttgctaaagaataaatgaatcaataatacctaacatctctaatttgcagtcattcccaagagtaattattaaatatgtggcaaatttctttgcctttttacttttaaaaatctaattttgacataactgctgtaaccatccagaaacggcattgatgttgcttcacgttgctgatgcttaagcaatgtatattgtgtaatatacaatgtagtcttcaaactaatttcaacttctgcctttctgtgtactcccttatcccactgggtgatattatttggcatggtcattgtcattaaaatcatacaggatagtaattcctttccatctgctaccatgcctagccttatttaatttttcagattttctgttctattgaaggtaattgattttttctttttttttaatgcttgaaataaagtgttgaaaaacaaaaaa

SEQ ID NO: 29105 - DNA, 2619 bp, Homo sapiens
agcgagttcttttcggctggaatggggaatttgtgaggtaggccggaagtggtgttgcggagggaagtgtggggagagcagaggcgcagctctgctggagagacctgaggcttgcagcgctgggcccggccgggtcgctgcggctgggctggaggtcaaggatgcattccaggaaagttctataaaaatataccatcaactccaacctgatatttgacctagccatggaaaacctcattggctcctcactggatcagaccataaaaatgatccaggaatgaaaatctaagataaattcccaccacttcaagatgttcttatacaagtcaacagtctagcagatcagccagtctctttcatcatcaagcagacatactcaaggtaccaacacagcaaaggcacaaaatgtctctatatcagtatttttcatggtatatgtgagacccattagtgaggcatgaaatcaattctgtgagtcacaatgaacatttgtctaaaaaacaaaataaaatgtaaaataccaaagtgttttgcatgaatcctttgcctgaattgtgcacattgcaaggaatgctgaggtcaatttcaatatgcgagaggggtatttgatggaggagatatgatgaatagaatgtatattggctaagaaatggttttcagtcattgattcctgggtgtcttgcttgattttcataatagcacggttaatgttctatagtcaagttttatattacaattacttgcaactagttgtgaagtctgaaatattcgattcaattgcaaactttgagtgtagtttttgaaaagatgttatttagactgtatatttttttcttcttttttgagttagtgccaattataacattttaatcaaactggaacaaattgctattaaaatggatcatttctttattaaaagaaagaggaatagtgaagtgaaatatacagaagcatgttcaagttcatctgttgaatctggaattgtgaatagtgacaatattgagaaaaatactgactccaatctgcaaacttcaacttcatttgagccacatttcaaaaagaaaaaaaagaaaaatttgaaacattaagggaaaacagttgggtaaaagatccatttgcttttcgaaaccctgaatcaataattgagctaaacttggtgcctgaagaagagaatgaattattgcagcttagttcttcatatacattgaagaatgattatgaaaccttaagtttatcagcattttggatgaaggtaaaggaagactttccattgttaagtagaaagagtgtcctgctattgctaccattcacaacaactagtttgtgtgaactagggttttccatcttaacgcagttaaaaacaaaggaaagaaatgggctgaattgtgcagcagttatgcgggtagcattatcttcctgtgttccagactggaatgaacttatgaacaggcaagcacacccatcatagtaaataaaaatcttacctagcttttgtctttgtatttcttattttgtagtatttttctatgttatatttaaatggtactataatactgtgatacttttgttatgttttaatttttgttatatttaataaaattattttatgttcattgaacaaaaatttaatgaatttctgttagaggccaggaactattctagagacatttgggatacaaaagtgaacaaaacaggtaattccctagtagagtttatatcctggcaaggagaaattgacaataaacctaataaataaggtttataatatttagaagctattaagtgctatggaaagagtagtaagaaggaaggtcagggaagtactggggaaccaaaccatgaagggttctgtagaccattattgggcctctggcttttgtcagtggactagagaacagttgaagggtttaagcgaaggagagaaatgatctgagctaggttttaaaagacactctggtcactattttaaaaaaaaccttttctaaccaccctagggtaaatcctccattattcctttatttctttgttttccttgtagtatataatttgtaataattttgattactgattgtcattctgccaccctggagtatataatttttaattatctgattactgttattcttccatagtaggggaggtgatatccatttgcctgatacatagtatgtgttcaatacacatttgctaaagaataaatgaatcaataatacctaacatctctaatttgcagtcattcccaagagtaattattaaatatgtggcaaatttctttgcctttttacttttaaaaatctaattttgacataactgctgtaaccatccagaaacggcattgatgttgcttcacgttgctgatgcttaagcaatgtatattgtgtaatatacaatgtagtcttcaaactaatttcaacttctgcctttctgtgtactcccttatcccactgggtgatattatttggcatggtcattgtcattaaaatcatacaggatagtaattcctttccatctgctaccatgcctagccttatttaatttttcagattttctgttctattgaaggtaattgattttttctttttttttaatgcttgaaataaagtgttgaaaaacaaaaaa

SEQ ID NO: 29106 - DNA, 2236 bp, Homo sapiens
agcgagttcttttcggctggaatggggaatttgtgaggtaggccggaagtggtgttgcggagggaagtgtggggagagcagaggcgcagctctgctggagagacctgaggcttgcagcgctgggcccggccgggtcgctgcggctgggctggaggtcaaggatgcattccaggaaagttctataaaaatataccatcaactccaacctgatatttgacctagccatggaaaacctcattggctcctcactggatcagaccataaaaatgatccaggaatgaaaatctaagataaattcccaccacttcaagatgttcttatacaagtcaacagtctagcagatcagccagtctctttcatcatcaagcagacatactcaaggtaccaacacagcaaaggcacaaaatgtctctatatcagtatttttcatggtatatgtgagacccattagtgaggcatgaaatcaattctgtgagtcacaatgaacatttgtctaaaaaacaaaataaaatgtaaaataccaaagtgttttgcatgaatcctttgcctgaattgtgcacattgcaaggaatgctgaggtcaatttcaatatgcgagaggggtatttgatggaggagatatgatgaatagaatgtatattggctaagaaatggttttcagtcattgattcctgggtgtcttgcttgattttcataatagcacggttaatgttctatagtcaagttttatattacaattacttgcaactagttgtgaagtctgaaatattcgattcaattgcaaactttgagtgtagtttttgaaaagatgttatttagactgtatatttttttcttcttttttgagttagtgccaattataacattttaatcaaactggaacaaattgctattaaaatggatcatttctttattaaaagaaagaggaatagtgaagtgaaatatacagaagcatgttcaagttcatctgttgaatctggaattgtgaatagtgacaatattgagaaaaatactgactccaatctgcaaacttcaacttcatttgagccacatttcaaaaagaaaaaaaagaaaaatttgaaacattaagggaaaacagttgggtaaaagatccatttgcttttcgaaaccctgaatcaataattgagctaaacttggtgcctgaagaagagaatgaattattgcagcttagttcttcatatacattgaagaatgattatgaaaccttaagtttatcagcattttggatgaaggtaaaggaagactttccattgttaagtagaaagagtgtcctgctattgctaccattcacaacaactagtttgtgtgaactagggttttccatcttaacgcagttaaaaacaaaggaaagaaatgggctgaattgtgcagcagttatgcgggtagcattatcttcctgtgttccagactggaatgaacttatgaacaggcaagcacacccatcatagtaaataaaaatcttacctagcttttgtctttgtatttcttattttgtagtatttttctatgttatatttaaatggtactataatactgtgatacttttgttatgttttaatttttgttatatttaataaaattattttatgttcattgaaaaacaacacaacaaaaaaacaaaaaaaaaaaaaaaaaagaaaaaagacaaaaaacaaaaaaaaaacaagagacacacacacaagcgaccgacgaactccaacaccaacgacaccacacacacacgagcgacccaaaagggagacagcagcaagcacaccaccctcagtcgcaacgaaaaagaagaaaagaaacaatcgacgacgacaaacaagtgaataaacaaatcaggatagctgtgactgcagactctaatagacaaaagagatagaagctgagtacaggaggctgcacgaacaatcgaagggaacacaagccgctaaagaacaggtattgagacgaaaaagaggacggtaacacaatgcggcgagacaagagatgcgcggggaaagaatcacgagcgggacagagacacagacggatagacagagaacaagacaagccgcgcactgaggggcacaccaccgaagagggctggcgagcagagacgggggcaggctataagtcatgaacaagaaaaacgaaggcggacaacaagcagaagagaaagagaagaaagtgagcagagaggaaagagaaggcagccgtctcggaggcaggcggagcatgaggggcagggg

SEQ ID NO: 29107 - DNA, 3035 bp, Homo sapiens
agcgagttcttttcggctggaatggggaatttgtgaggtaggccggaagtggtgttgcggagggaagtgtggggagagcagaggcgcagctctgctggagagacctgaggcttgcagcgctgggcccggccgggtcgctgcggctgggctggaggtgaggcgaaagaagggcatcctctgatgggagtggaccggagtccgctaaagcgaagcattccagggtcaaggatgcattccaggaaagttctataaaaatataccatcaactccaacctgatatttgacctagccatggaaaacctcattggctcctcactggatcagaccataaaaatgatccaggaatgaaaatctaagataaattcccaccacttcaagatgttcttatacaagtcaacagtctagcagatcagccagtctctttcatcatcaagcagacatactcaaggtaccaacacagcaaaggcacaaaatgtctctatatcagtatttttcatggtatatgtgagacccattagtgaggcatgaaatcaattctgtgagtcacaatgaacatttgtctaaaaaacaaaataaaatgtaaaataccaaagtgttttgcatgaatcctttgcctgaattgtgcacattgcaaggaatgctgaggtcaatttcaatatgcgagaggggtatttgatggaggagatatgatgaatagaatgtatattggctaagaaatggttttcagtcattgattcctgggtgtcttgcttgattttcataatagcacggttaatgttctatagtcaagttttatattacaattacttgcaactagttgtgaagtctgaaatattcgattcaattgcaaactttgagtgtagtttttgaaaagatgttatttagactgtatatttttttcttcttttttgagttagtgccaattataacattttaatcaaactggaacaaattgctattaaaatggatcatttctttattaaaagaaagaggaatagtgaagtgaaatatacagaagcatgttcaagttcatctgttgaatctggaattgtgaatagtgacaatattgagaaaaatactgactccaatctgcaaacttcaacttcatttgagccacatttcaaaaagaaaaaaaagaaaaatttgaaacattaagggaaaacagttgggtaaaagatccatttgcttttcgaaaccctgaatcaataattgagctaaacttggtgcctgaagaagagaatgaattattgcagcttagttcttcatatacattgaagaatgattatgaaaccttaagtttatcagcattttggatgaaggtaaaggaagactttccattgttaagtagaaagagtgtcctgctattgctaccattcacaacaactagtttgtgtgaactagggttttccatcttaacgcagttaaaaacaaaggaaagaaatgggctgaattgtgcagcagttatgcgggtagcattatcttcctgtgttccagactggaatgaacttatgaacaggcaagcacacccatcatagtaaataaaaatcttacctagcttttgtctttgtatttcttattttgtagtatttttctatgttatatttaaatggtactataatactgtgatacttttgttatgttttaatttttgttatatttaataaaattattttatgttcattgaacaaaaatttaatgaatttctgttagaggccaggaactattctagagacatttgggatacaaaagtgaacaaaacaggtaattccctagtagagtttatatcctggcaaggagaaattgacaataaacctaataaataaggtttataatatttagaagctattaagtgctatggaaagagtagtaagaaggaaggtcagggaagtactggggaaccaaaccatgaagggttctgtagaccattattgggcctctggcttttgtcagtggactagagaacagttgaagggtttaagcgaaggagagaaatgatctgagctaggttttaaaagacactctggtcactattttaaattcttagggtaagtctgaattaaatgttactttcccctcactgggcatggtggctcagacctgtaatccccgcactttggcaggccatggcagaaggctctgttgagcccaggagttcaagaccatcctgggcaacatagtgagaccttatttctactaaaaatattttaaaaataagtcaggtgtggtggtgcacacctatagtcccagctactcaggaggctgtggcaggagggtcgcttgacctcaggagtttgaagttgcagtcatctatgattgcaccactgcagtccagcctgagcaacagagtgaaaccctgtctcgagaaaattaaatgttacttccctaaaaaaaccttttctaaccaccctagggtaaatcctccattattcctttatttctttgttttccttgtagtatataatttgtaataattttgattactgattgtcattctgccaccctggagtatataatttttaattatctgattactgttattcttccatagtaggggaggtgatatccatttgcctgatacatagtatgtgttcaatacacatttgctaaagaataaatgaatcaataatacctaacatctctaatttgcagtcattcccaagagtaattattaaatatgtggcaaatttctttgcctttttacttttaaaaatctaattttgacataactgctgtaaccatccagaaacggcattgatgttgcttcacgttgctgatgcttaagcaatgtatattgtgtaatatacaatgtagtcttcaaactaatttcaacttctgcctttctgtgtactcccttatcccactgggtgatattatttggcatggtcattgtcattaaaatcatacaggatagtaattcctttccatctgctaccatgcctagccttatttaatttttcagattttctgttctattgaaggtaattgattttttctttttttttaatgcttgaaataaagtgttgaaaaacaaaaaa

SEQ ID NO: 29108 - DNA, 2851 bp, Homo sapiens
agcgagttcttttcggctggaatggggaatttgtgaggtcaaggatgcattccaggaaagttctataaaaatataccatcaactccaacctgatatttgacctagccatggaaaacctcattggctcctcactggatcagaccataaaaatgatccaggaatgaaaatctaagataaattcccaccacttcaagatgttcttatacaagtcaacagtctagcagatcagccagtctctttcatcatcaagcagacatactcaaggtaccaacacagcaaaggcacaaaatgtctctatatcagtatttttcatggtatatgtgagacccattagtgaggcatgaaatcaattctgtgagtcacaatgaacatttgtctaaaaaacaaaataaaatgtaaaataccaaagtgttttgcatgaatcctttgcctgaattgtgcacattgcaaggaatgctgaggtcaatttcaatatgcgagaggggtatttgatggaggagatatgatgaatagaatgtatattggctaagaaatggttttcagtcattgattcctgggtgtcttgcttgattttcataatagcacggttaatgttctatagtcaagttttatattacaattacttgcaactagttgtgaagtctgaaatattcgattcaattgcaaactttgagtgtagtttttgaaaagatgttatttagactgtatatttttttcttcttttttgagttagtgccaattataacattttaatcaaactggaacaaattgctattaaaatggatcatttctttattaaaagaaagaggaatagtgaagtgaaatatacagaagcatgttcaagttcatctgttgaatctggaattgtgaatagtgacaatattgagaaaaatactgactccaatctgcaaacttcaacttcatttgagccacatttcaaaaagaaaaaaaagaaaaatttgaaacattaagggaaaacagttgggtaaaagatccatttgcttttcgaaaccctgaatcaataattgagctaaacttggtgcctgaagaagagaatgaattattgcagcttagttcttcatatacattgaagaatgattatgaaaccttaagtttatcagcattttggatgaaggtaaaggaagactttccattgttaagtagaaagagtgtcctgctattgctaccattcacaacaactagtttgtgtgaactagggttttccatcttaacgcagttaaaaacaaaggaaagaaatgggctgaattgtgcagcagttatgcgggtagcattatcttcctgtgttccagactggaatgaacttatgaacaggcaagcacacccatcatagtaaataaaaatcttacctagcttttgtctttgtatttcttattttgtagtatttttctatgttatatttaaatggtactataatactgtgatacttttgttatgttttaatttttgttatatttaataaaattattttatgttcattgaacaaaaatttaatgaatttctgttagaggccaggaactattctagagacatttgggatacaaaagtgaacaaaacaggtaattccctagtagagtttatatcctggcaaggagaaattgacaataaacctaataaataaggtttataatatttagaagctattaagtgctatggaaagagtagtaagaaggaaggtcagggaagtactggggaaccaaaccatgaagggttctgtagaccattattgggcctctggcttttgtcagtggactagagaacagttgaagggtttaagcgaaggagagaaatgatctgagctaggttttaaaagacactctggtcactattttaaattcttagggtaagtctgaattaaatgttactttcccctcactgggcatggtggctcagacctgtaatccccgcactttggcaggccatggcagaaggctctgttgagcccaggagttcaagaccatcctgggcaacatagtgagaccttatttctactaaaaatattttaaaaataagtcaggtgtggtggtgcacacctatagtcccagctactcaggaggctgtggcaggagggtcgcttgacctcaggagtttgaagttgcagtcatctatgattgcaccactgcagtccagcctgagcaacagagtgaaaccctgtctcgagaaaattaaatgttacttccctaaaaaaaccttttctaaccaccctagggtaaatcctccattattcctttatttctttgttttccttgtagtatataatttgtaataattttgattactgattgtcattctgccaccctggagtatataatttttaattatctgattactgttattcttccatagtaggggaggtgatatccatttgcctgatacatagtatgtgttcaatacacatttgctaaagaataaatgaatcaataatacctaacatctctaatttgcagtcattcccaagagtaattattaaatatgtggcaaatttctttgcctttttacttttaaaaatctaattttgacataactgctgtaaccatccagaaacggcattgatgttgcttcacgttgctgatgcttaagcaatgtatattgtgtaatatacaatgtagtcttcaaactaatttcaacttctgcctttctgtgtactcccttatcccactgggtgatattatttggcatggtcattgtcattaaaatcatacaggatagtaattcctttccatctgctaccatgcctagccttatttaatttttcagattttctgttctattgaaggtaattgattttttctttttttttaatgcttgaaataaagtgttgaaaaacaaaaaa

SEQ ID NO: 29109 - DNA, 3145 bp, Homo sapiens
agcgagttcttttcggctggaatggggaatttgtgaggtaggccggaagtggtgttgcggagggaagtgtggggagagcagaggcgcagctctgctggagagacctgaggcttgcagcgctgggcccggccgggtcgctgcggctgggctggaggtgaggcgaaagaagggcatcctctgatgggagtggaccggagtccgctaaagcgaagcattccaggccaaggttaactatttgtaacatgtcatctttcaaggaagcatctaaccaagattaagtcaaaggcatctaccaggtcctgaattctctcccagatgcacaccttttaaggtcaaggatgcattccaggaaagttctataaaaatataccatcaactccaacctgatatttgacctagccatggaaaacctcattggctcctcactggatcagaccataaaaatgatccaggaatgaaaatctaagataaattcccaccacttcaagatgttcttatacaagtcaacagtctagcagatcagccagtctctttcatcatcaagcagacatactcaaggtaccaacacagcaaaggcacaaaatgtctctatatcagtatttttcatggtatatgtgagacccattagtgaggcatgaaatcaattctgtgagtcacaatgaacatttgtctaaaaaacaaaataaaatgtaaaataccaaagtgttttgcatgaatcctttgcctgaattgtgcacattgcaaggaatgctgaggtcaatttcaatatgcgagaggggtatttgatggaggagatatgatgaatagaatgtatattggctaagaaatggttttcagtcattgattcctgggtgtcttgcttgattttcataatagcacggttaatgttctatagtcaagttttatattacaattacttgcaactagttgtgaagtctgaaatattcgattcaattgcaaactttgagtgtagtttttgaaaagatgttatttagactgtatatttttttcttcttttttgagttagtgccaattataacattttaatcaaactggaacaaattgctattaaaatggatcatttctttattaaaagaaagaggaatagtgaagtgaaatatacagaagcatgttcaagttcatctgttgaatctggaattgtgaatagtgacaatattgagaaaaatactgactccaatctgcaaacttcaacttcatttgagccacatttcaaaaagaaaaaaaagaaaaatttgaaacattaagggaaaacagttgggtaaaagatccatttgcttttcgaaaccctgaatcaataattgagctaaacttggtgcctgaagaagagaatgaattattgcagcttagttcttcatatacattgaagaatgattatgaaaccttaagtttatcagcattttggatgaaggtaaaggaagactttccattgttaagtagaaagagtgtcctgctattgctaccattcacaacaactagtttgtgtgaactagggttttccatcttaacgcagttaaaaacaaaggaaagaaatgggctgaattgtgcagcagttatgcgggtagcattatcttcctgtgttccagactggaatgaacttatgaacaggcaagcacacccatcatagtaaataaaaatcttacctagcttttgtctttgtatttcttattttgtagtatttttctatgttatatttaaatggtactataatactgtgatacttttgttatgttttaatttttgttatatttaataaaattattttatgttcattgaacaaaaatttaatgaatttctgttagaggccaggaactattctagagacatttgggatacaaaagtgaacaaaacaggtaattccctagtagagtttatatcctggcaaggagaaattgacaataaacctaataaataaggtttataatatttagaagctattaagtgctatggaaagagtagtaagaaggaaggtcagggaagtactggggaaccaaaccatgaagggttctgtagaccattattgggcctctggcttttgtcagtggactagagaacagttgaagggtttaagcgaaggagagaaatgatctgagctaggttttaaaagacactctggtcactattttaaattcttagggtaagtctgaattaaatgttactttcccctcactgggcatggtggctcagacctgtaatccccgcactttggcaggccatggcagaaggctctgttgagcccaggagttcaagaccatcctgggcaacatagtgagaccttatttctactaaaaatattttaaaaataagtcaggtgtggtggtgcacacctatagtcccagctactcaggaggctgtggcaggagggtcgcttgacctcaggagtttgaagttgcagtcatctatgattgcaccactgcagtccagcctgagcaacagagtgaaaccctgtctcgagaaaattaaatgttacttccctaaaaaaaccttttctaaccaccctagggtaaatcctccattattcctttatttctttgttttccttgtagtatataatttgtaataattttgattactgattgtcattctgccaccctggagtatataatttttaattatctgattactgttattcttccatagtaggggaggtgatatccatttgcctgatacatagtatgtgttcaatacacatttgctaaagaataaatgaatcaataatacctaacatctctaatttgcagtcattcccaagagtaattattaaatatgtggcaaatttctttgcctttttacttttaaaaatctaattttgacataactgctgtaaccatccagaaacggcattgatgttgcttcacgttgctgatgcttaagcaatgtatattgtgtaatatacaatgtagtcttcaaactaatttcaacttctgcctttctgtgtactcccttatcccactgggtgatattatttggcatggtcattgtcattaaaatcatacaggatagtaattcctttccatctgctaccatgcctagccttatttaatttttcagattttctgttctattgaaggtaattgattttttctttttttttaatgcttgaaataaagtgttgaaaaacaaaaaa

SEQ ID NO: 29110 - DNA, 2313 bp, Homo sapiens
agcgagttcttttcggctggaatggggaatttgtgaggtcaaggatgcattccaggaaagttctataaaaatataccatcaactccaacctgatatttgacctagccatggaaaacctcattggctcctcactggatcagaccataaaaatgatccaggaatgaaaatctaagataaattcccaccacttcaagatgttcttatacaagtcaacagtctagcagatcagccagtctctttcatcatcaagcagacatactcaagaaagaggaatagtgaagtgaaatatacagaagcatgttcaagttcatctgttgaatctggaattgtgaatagtgacaatattgagaaaaatactgactccaatctgcaaacttcaacttcatttgagccacatttcaaaaagaaaaaaaagaaaaatttgaaacattaagggaaaacagttgggtaaaagatccatttgcttttcgaaaccctgaatcaataattgagctaaacttggtgcctgaagaagagaatgaattattgcagcttagttcttcatatacattgaagaatgattatgaaaccttaagtttatcagcattttggatgaaggtaaaggaagactttccattgttaagtagaaagagtgtcctgctattgctaccattcacaacaactagtttgtgtgaactagggttttccatcttaacgcagttaaaaacaaaggaaagaaatgggctgaattgtgcagcagttatgcgggtagcattatcttcctgtgttccagactggaatgaacttatgaacaggcaagcacacccatcatagtaaataaaaatcttacctagcttttgtctttgtatttcttattttgtagtatttttctatgttatatttaaatggtactataatactgtgatacttttgttatgttttaatttttgttatatttaataaaattattttatgttcattgaacaaaaatttaatgaatttctgttagaggccaggaactattctagagacatttgggatacaaaagtgaacaaaacaggtaattccctagtagagtttatatcctggcaaggagaaattgacaataaacctaataaataaggtttataatatttagaagctattaagtgctatggaaagagtagtaagaaggaaggtcagggaagtactggggaaccaaaccatgaagggttctgtagaccattattgggcctctggcttttgtcagtggactagagaacagttgaagggtttaagcgaaggagagaaatgatctgagctaggttttaaaagacactctggtcactattttaaattcttagggtaagtctgaattaaatgttactttcccctcactgggcatggtggctcagacctgtaatccccgcactttggcaggccatggcagaaggctctgttgagcccaggagttcaagaccatcctgggcaacatagtgagaccttatttctactaaaaatattttaaaaataagtcaggtgtggtggtgcacacctatagtcccagctactcaggaggctgtggcaggagggtcgcttgacctcaggagtttgaagttgcagtcatctatgattgcaccactgcagtccagcctgagcaacagagtgaaaccctgtctcgagaaaattaaatgttacttccctaaaaaaaccttttctaaccaccctagggtaaatcctccattattcctttatttctttgttttccttgtagtatataatttgtaataattttgattactgattgtcattctgccaccctggagtatataatttttaattatctgattactgttattcttccatagtaggggaggtgatatccatttgcctgatacatagtatgtgttcaatacacatttgctaaagaataaatgaatcaataatacctaacatctctaatttgcagtcattcccaagagtaattattaaatatgtggcaaatttctttgcctttttacttttaaaaatctaattttgacataactgctgtaaccatccagaaacggcattgatgttgcttcacgttgctgatgcttaagcaatgtatattgtgtaatatacaatgtagtcttcaaactaatttcaacttctgcctttctgtgtactcccttatcccactgggtgatattatttggcatggtcattgtcattaaaatcatacaggatagtaattcctttccatctgctaccatgcctagccttatttaatttttcagattttctgttctattgaaggtaattgattttttctttttttttaatgcttgaaataaagtgttgaaaaacaaaaaa

SEQ ID NO: 29111 - DNA, 2550 bp, Homo sapiens
agcgagttcttttcggctggaatggggaatttgtgaggtaggccggaagtggtgttgcggagggaagtgtggggagagcagaggcgcagctctgctggagagacctgaggcttgcagcgctgggcccggccgggtcgctgcggctgggctggaggtgaggcgaaagaagggcatcctctgatgggagtggaccggagtccgctaaagcgaagcattccagggttcgttgcgggaaatacagtctggttttgccccccgtatgaattgagggaaggtcaaggatgcattccaggaaagttctataaaaatataccatcaactccaacctgatatttgacctagccatggaaaacctcattggctcctcactggatcagaccataaaaatgatccaggaatgaaaatctaagataaattcccaccacttcaagatgttcttatacaagtcaacagtctagcagatcagccagtctctttcatcatcaagcagacatactcaagaaagaggaatagtgaagtgaaatatacagaagcatgttcaagttcatctgttgaatctggaattgtgaatagtgacaatattgagaaaaatactgactccaatctgcaaacttcaacttcatttgagccacatttcaaaaagaaaaaaaagaaaaatttgaaacattaagggaaaacagttgggtaaaagatccatttgcttttcgaaaccctgaatcaataattgagctaaacttggtgcctgaagaagagaatgaattattgcagcttagttcttcatatacattgaagaatgattatgaaaccttaagtttatcagcattttggatgaaggtaaaggaagactttccattgttaagtagaaagagtgtcctgctattgctaccattcacaacaactagtttgtgtgaactagggttttccatcttaacgcagttaaaaacaaaggaaagaaatgggctgaattgtgcagcagttatgcgggtagcattatcttcctgtgttccagactggaatgaacttatgaacaggcaagcacacccatcatagtaaataaaaatcttacctagcttttgtctttgtatttcttattttgtagtatttttctatgttatatttaaatggtactataatactgtgatacttttgttatgttttaatttttgttatatttaataaaattattttatgttcattgaacaaaaatttaatgaatttctgttagaggccaggaactattctagagacatttgggatacaaaagtgaacaaaacaggtaattccctagtagagtttatatcctggcaaggagaaattgacaataaacctaataaataaggtttataatatttagaagctattaagtgctatggaaagagtagtaagaaggaaggtcagggaagtactggggaaccaaaccatgaagggttctgtagaccattattgggcctctggcttttgtcagtggactagagaacagttgaagggtttaagcgaaggagagaaatgatctgagctaggttttaaaagacactctggtcactattttaaattcttagggtaagtctgaattaaatgttactttcccctcactgggcatggtggctcagacctgtaatccccgcactttggcaggccatggcagaaggctctgttgagcccaggagttcaagaccatcctgggcaacatagtgagaccttatttctactaaaaatattttaaaaataagtcaggtgtggtggtgcacacctatagtcccagctactcaggaggctgtggcaggagggtcgcttgacctcaggagtttgaagttgcagtcatctatgattgcaccactgcagtccagcctgagcaacagagtgaaaccctgtctcgagaaaattaaatgttacttccctaaaaaaaccttttctaaccaccctagggtaaatcctccattattcctttatttctttgttttccttgtagtatataatttgtaataattttgattactgattgtcattctgccaccctggagtatataatttttaattatctgattactgttattcttccatagtaggggaggtgatatccatttgcctgatacatagtatgtgttcaatacacatttgctaaagaataaatgaatcaataatacctaacatctctaatttgcagtcattcccaagagtaattattaaatatgtggcaaatttctttgcctttttacttttaaaaatctaattttgacataactgctgtaaccatccagaaacggcattgatgttgcttcacgttgctgatgcttaagcaatgtatattgtgtaatatacaatgtagtcttcaaactaatttcaacttctgcctttctgtgtactcccttatcccactgggtgatattatttggcatggtcattgtcattaaaatcatacaggatagtaattcctttccatctgctaccatgcctagccttatttaatttttcagattttctgttctattgaaggtaattgattttttctttttttttaatgcttgaaataaagtgttgaaaaacaaaaaa

SEQ ID NO: 29112 - DNA, 2493 bp, Homo sapiens
atacatcgtgaaggtttagcatccagagaaattccacagaatctcatggaagtattgaaaaatgcagtgaaagttgttaattttattaaaggaagctcattgaatagccggcttcttgaaacattttgttcagagattggaactaatcatacccacttactatatcataccaaaattcgttggttgtctcaagggaaaatactaagcagggtttatgagctcaggaatgagattcacttttttctcattgaaaaaaaatctcatttggcaagtatttttgaagatgatacttgggtaacaaaattggcatatttaactgatatttttagcattcttaatgaactgagtttaaaactacaggggaaaaacagtgatgtattccaacatgttgaacgtatccagggatttcgaaagacattattgttatggcaagtaagacttaaaagtaatcgtcctagctattacatgtttccaagatttttgcagcatattgaagagaatattattaatgaaaacattttgaaagaaataaaattagagatattgttgcatctcacttctctgtctcaaacttttaaccatttctttccagaagaaaaatttgaaacattaagggaaaacagttgggtaaaagatccatttgcttttcgaaaccctgaatcaataattgagctaaacttggtgcctgaagaagagaatgaattattgcagcttagttcttcatatacattgaagaatgattatgaaaccttaagtttatcagcattttggatgaaggtaaaggaagactttccattgttaagtagaaagagtgtcctgctattgctaccattcacaacaactagtttgtgtgaactagggttttccatcttaacgcagttaaaaacaaaggaaagaaatgggctgaattgtgcagcagttatgcgggtagcattatcttcctgtgttccagactggaatgaacttatgaacaggcaagcacacccatcatagtaaataaaaatcttacctagcttttgtctttgtatttcttattttgtagtatttttctatgttatatttaaatggtactataatactgtgatacttttgttatgttttaatttttgttatatttaataaaattattttatgttcattgaacaaaaatttaatgaatttctgttagaggccaggaactattctagagacatttgggatacaaaagtgaacaaaacaggtaattccctagtagagtttatatcctggcaaggagaaattgacaataaacctaataaataaggtttataatatttagaagctattaagtgctatggaaagagtagtaagaaggaaggtcagggaagtactggggaaccaaaccatgaagggttctgtagaccattattgggcctctggcttttgtcagtggactagagaacagttgaagggtttaagcgaaggagagaaatgatctgagctaggttttaaaagacactctggtcactattttaaattcttagggtaagtctgaattaaatgttactttcccctcactgggcatggtggctcagacctgtaatccccgcactttggcaggccatggcagaaggctctgttgagcccaggagttcaagaccatcctgggcaacatagtgagaccttatttctactaaaaatattttaaaaataagtcaggtgtggtggtgcacacctatagtcccagctactcaggaggctgtggcaggagggtcgcttgacctcaggagtttgaagttgcagtcatctatgattgcaccactgcagtccagcctgagcaacagagtgaaaccctgtctcgagaaaattaaatgttacttccctaaaaaaaccttttctaaccaccctagggtaaatcctccattattcctttatttctttgttttccttgtagtatataatttgtaataattttgattactgattgtcattctgccaccctggagtatataatttttaattatctgattactgttattcttccatagtaggggaggtgatatccatttgcctgatacatagtatgtgttcaatacacatttgctaaagaataaatgaatcaataatacctaacatctctaatttgcagtcattcccaagagtaattattaaatatgtggcaaatttctttgcctttttacttttaaaaatctaattttgacataactgctgtaaccatccagaaacggcattgatgttgcttcacgttgctgatgcttaagcaatgtatattgtgtaatatacaatgtagtcttcaaactaatttcaacttctgcctttctgtgtactcccttatcccactgggtgatattatttggcatggtcattgtcattaaaatcatacaggatagtaattcctttccatctgctaccatgcctagccttatttaatttttcagattttctgttctattgaaggtaattgattttttctttttttttaatgcttgaaataaagtgttgaaaaacaaaaaa

SEQ ID NO: 29113 - DNA, 2497 bp, Homo sapiens
agcgagttcttttcggctggaatggggaatttgtgaggtaggccggaagtggtgttgcggagggaagtgtggggagagcagaggcgcagctctgctggagagacctgaggcttgcagcgctgggcccggccgggtcgctgcggctgggctggaggtgaggcgaaagaagggcatcctctgatgggagtggaccggagtccgctaaagcgaagcattccagggtcaaggatgcattccaggaaagttctataaaaatataccatcaactccaacctgatatttgacctagccatggaaaacctcattggctcctcactggatcagaccataaaaatgatccaggaatgaaaatctaagataaattcccaccacttcaagatgttcttatacaagtcaacagtctagcagatcagccagtctctttcatcatcaagcagacatactcaagaaagaggaatagtgaagtgaaatatacagaagcatgttcaagttcatctgttgaatctggaattgtgaatagtgacaatattgagaaaaatactgactccaatctgcaaacttcaacttcatttgagccacatttcaaaaagaaaaaaaagaaaaatttgaaacattaagggaaaacagttgggtaaaagatccatttgcttttcgaaaccctgaatcaataattgagctaaacttggtgcctgaagaagagaatgaattattgcagcttagttcttcatatacattgaagaatgattatgaaaccttaagtttatcagcattttggatgaaggtaaaggaagactttccattgttaagtagaaagagtgtcctgctattgctaccattcacaacaactagtttgtgtgaactagggttttccatcttaacgcagttaaaaacaaaggaaagaaatgggctgaattgtgcagcagttatgcgggtagcattatcttcctgtgttccagactggaatgaacttatgaacaggcaagcacacccatcatagtaaataaaaatcttacctagcttttgtctttgtatttcttattttgtagtatttttctatgttatatttaaatggtactataatactgtgatacttttgttatgttttaatttttgttatatttaataaaattattttatgttcattgaacaaaaatttaatgaatttctgttagaggccaggaactattctagagacatttgggatacaaaagtgaacaaaacaggtaattccctagtagagtttatatcctggcaaggagaaattgacaataaacctaataaataaggtttataatatttagaagctattaagtgctatggaaagagtagtaagaaggaaggtcagggaagtactggggaaccaaaccatgaagggttctgtagaccattattgggcctctggcttttgtcagtggactagagaacagttgaagggtttaagcgaaggagagaaatgatctgagctaggttttaaaagacactctggtcactattttaaattcttagggtaagtctgaattaaatgttactttcccctcactgggcatggtggctcagacctgtaatccccgcactttggcaggccatggcagaaggctctgttgagcccaggagttcaagaccatcctgggcaacatagtgagaccttatttctactaaaaatattttaaaaataagtcaggtgtggtggtgcacacctatagtcccagctactcaggaggctgtggcaggagggtcgcttgacctcaggagtttgaagttgcagtcatctatgattgcaccactgcagtccagcctgagcaacagagtgaaaccctgtctcgagaaaattaaatgttacttccctaaaaaaaccttttctaaccaccctagggtaaatcctccattattcctttatttctttgttttccttgtagtatataatttgtaataattttgattactgattgtcattctgccaccctggagtatataatttttaattatctgattactgttattcttccatagtaggggaggtgatatccatttgcctgatacatagtatgtgttcaatacacatttgctaaagaataaatgaatcaataatacctaacatctctaatttgcagtcattcccaagagtaattattaaatatgtggcaaatttctttgcctttttacttttaaaaatctaattttgacataactgctgtaaccatccagaaacggcattgatgttgcttcacgttgctgatgcttaagcaatgtatattgtgtaatatacaatgtagtcttcaaactaatttcaacttctgcctttctgtgtactcccttatcccactgggtgatattatttggcatggtcattgtcattaaaatcatacaggatagtaattcctttccatctgctaccatgcctagccttatttaatttttcagattttctgttctattgaaggtaattgattttttctttttttttaatgcttgaaataaagtgttgaaaaacaaaaaa

SEQ ID NO: 29114 - DNA, 3088 bp, Homo sapiens
agcgagttcttttcggctggaatggggaatttgtgaggtaggccggaagtggtgttgcggagggaagtgtggggagagcagaggcgcagctctgctggagagacctgaggcttgcagcgctgggcccggccgggtcgctgcggctgggctggaggtgaggcgaaagaagggcatcctctgatgggagtggaccggagtccgctaaagcgaagcattccagggttcgttgcgggaaatacagtctggttttgccccccgtatgaattgagggaaggtcaaggatgcattccaggaaagttctataaaaatataccatcaactccaacctgatatttgacctagccatggaaaacctcattggctcctcactggatcagaccataaaaatgatccaggaatgaaaatctaagataaattcccaccacttcaagatgttcttatacaagtcaacagtctagcagatcagccagtctctttcatcatcaagcagacatactcaaggtaccaacacagcaaaggcacaaaatgtctctatatcagtatttttcatggtatatgtgagacccattagtgaggcatgaaatcaattctgtgagtcacaatgaacatttgtctaaaaaacaaaataaaatgtaaaataccaaagtgttttgcatgaatcctttgcctgaattgtgcacattgcaaggaatgctgaggtcaatttcaatatgcgagaggggtatttgatggaggagatatgatgaatagaatgtatattggctaagaaatggttttcagtcattgattcctgggtgtcttgcttgattttcataatagcacggttaatgttctatagtcaagttttatattacaattacttgcaactagttgtgaagtctgaaatattcgattcaattgcaaactttgagtgtagtttttgaaaagatgttatttagactgtatatttttttcttcttttttgagttagtgccaattataacattttaatcaaactggaacaaattgctattaaaatggatcatttctttattaaaagaaagaggaatagtgaagtgaaatatacagaagcatgttcaagttcatctgttgaatctggaattgtgaatagtgacaatattgagaaaaatactgactccaatctgcaaacttcaacttcatttgagccacatttcaaaaagaaaaaaaagaaaaatttgaaacattaagggaaaacagttgggtaaaagatccatttgcttttcgaaaccctgaatcaataattgagctaaacttggtgcctgaagaagagaatgaattattgcagcttagttcttcatatacattgaagaatgattatgaaaccttaagtttatcagcattttggatgaaggtaaaggaagactttccattgttaagtagaaagagtgtcctgctattgctaccattcacaacaactagtttgtgtgaactagggttttccatcttaacgcagttaaaaacaaaggaaagaaatgggctgaattgtgcagcagttatgcgggtagcattatcttcctgtgttccagactggaatgaacttatgaacaggcaagcacacccatcatagtaaataaaaatcttacctagcttttgtctttgtatttcttattttgtagtatttttctatgttatatttaaatggtactataatactgtgatacttttgttatgttttaatttttgttatatttaataaaattattttatgttcattgaacaaaaatttaatgaatttctgttagaggccaggaactattctagagacatttgggatacaaaagtgaacaaaacaggtaattccctagtagagtttatatcctggcaaggagaaattgacaataaacctaataaataaggtttataatatttagaagctattaagtgctatggaaagagtagtaagaaggaaggtcagggaagtactggggaaccaaaccatgaagggttctgtagaccattattgggcctctggcttttgtcagtggactagagaacagttgaagggtttaagcgaaggagagaaatgatctgagctaggttttaaaagacactctggtcactattttaaattcttagggtaagtctgaattaaatgttactttcccctcactgggcatggtggctcagacctgtaatccccgcactttggcaggccatggcagaaggctctgttgagcccaggagttcaagaccatcctgggcaacatagtgagaccttatttctactaaaaatattttaaaaataagtcaggtgtggtggtgcacacctatagtcccagctactcaggaggctgtggcaggagggtcgcttgacctcaggagtttgaagttgcagtcatctatgattgcaccactgcagtccagcctgagcaacagagtgaaaccctgtctcgagaaaattaaatgttacttccctaaaaaaaccttttctaaccaccctagggtaaatcctccattattcctttatttctttgttttccttgtagtatataatttgtaataattttgattactgattgtcattctgccaccctggagtatataatttttaattatctgattactgttattcttccatagtaggggaggtgatatccatttgcctgatacatagtatgtgttcaatacacatttgctaaagaataaatgaatcaataatacctaacatctctaatttgcagtcattcccaagagtaattattaaatatgtggcaaatttctttgcctttttacttttaaaaatctaattttgacataactgctgtaaccatccagaaacggcattgatgttgcttcacgttgctgatgcttaagcaatgtatattgtgtaatatacaatgtagtcttcaaactaatttcaacttctgcctttctgtgtactcccttatcccactgggtgatattatttggcatggtcattgtcattaaaatcatacaggatagtaattcctttccatctgctaccatgcctagccttatttaatttttcagattttctgttctattgaaggtaattgattttttctttttttttaatgcttgaaataaagtgttgaaaaacaaaaaa

SEQ ID NO: 29115 - DNA, 1504 bp, Homo sapiens
agcgagttcttttcggctggaatggggaatttgtgaggtaggccggaagtggtgttgcggagggaagtgtggggagagcagaggcgcagctctgctggagagacctgaggcttgcagcgctgggcccggccgggtcgctgcggctgggctggaggtcaaggatgcattccaggaaagttctataaaaatataccatcaactccaacctgatatttgacctagccatggaaaacctcattggctcctcactggatcagaccataaaaatgatccaggaatgaaaatctaagataaattcccaccacttcaagatgttcttatacaagtcaacagtctagcagatcagccagtctctttcatcatcaagcagacatactcaaggtaccaacacagcaaaggcacaaaatgtctctatatcagtatttttcatggtatatgtgagacccattagtgaggcatgaaatcaattctgtgagtcacaatgaacatttgtctaaaaaacaaaataaaatgtaaaataccaaagtgttttgcatgaatcctttgcctgaattgtgcacattgcaaggaatgctgaggtcaatttcaatatgcgagaggggtatttgatggaggagatatgatgaatagaatgtatattggctaagaaatggttttcagtcattgattcctgggtgtcttgcttgattttcataatagcacggttaatgttctatagtcaagttttatattacaattacttgcaactagttgtgaagtctgaaatattcgattcaattgcaaactttgagtgtagtttttgaaaagatgttatttagactgtatatttttttcttcttttttgagttagtgccaattataacattttaatcaaactggaacaaattgctattaaaatggatcatttctttattaaaagaaagaggaatagtgaagtgaaatatacagaagcatgttcaagttcatctgttgaatctggaattgtgaatagtgacaatattgagaaaaatactgactccaatctgcaaacttcaacttcatttgagccacatttcaaaaagaaaaaagtaagtgcaagacgttataatgaagattacttaaaatatggctttatcaaatgtgaaaaaccctttgaaaatgacagacctcagtgtgttatttgtaataatattcttgcgaatgaaagcttaaaaccttcgaaattaaaaaggcacttagaaactcagcatgctgaacttattgataagcctcttgaatattttcaaagaaagaaaaaagacataaagttatcaacacaatttcttagttgttctactgctgttagtgagaaagccttattatcatcatatttagttgcatatcgtgtggcaaaagagaaaatagctaacacagctgctgaaaaaattattcttccagcatgtttggatatggtgcgtacaatatttgatgataaatcagctgataaattaaaaactatacctaatgataacacagtatctcttcg

SEQ ID NO: 29116 - DNA, 2566 bp, Homo sapiens
agcgagttcttttcggctggaatggggaatttgtgaggtaggccggaagtggtgttgcggagggaagtgtggggagagcagaggcgcagctctgctggagagacctgaggcttgcagcgctgggcccggccgggtcgctgcggctgggctggaggtgaggcgaaagaagggcatcctctgatgggagtggaccggagtccgctaaagcgaagcattccagggtcaaggatgcattccaggaaagttctataaaaatataccatcaactccaacctgatatttgacctagccatggaaaacctcattggctcctcactggatcagaccataaaaatgatccaggaatgaaaatctaagataaattcccaccacttcaagatgttcttatacaagtcaacagtctagcagatcagccagtctctttcatcatcaagcagacatactcaagtgccaattataacattttaatcaaactggaacaaattgctattaaaatggatcatttctttattaaaagaaagaggaatagtgaagtgaaatatacagaagcatgttcaagttcatctgttgaatctggaattgtgaatagtgacaatattgagaaaaatactgactccaatctgcaaacttcaacttcatttgagccacatttcaaaaagaaaaaaaagaaaaatttgaaacattaagggaaaacagttgggtaaaagatccatttgcttttcgaaaccctgaatcaataattgagctaaacttggtgcctgaagaagagaatgaattattgcagcttagttcttcatatacattgaagaatgattatgaaaccttaagtttatcagcattttggatgaaggtaaaggaagactttccattgttaagtagaaagagtgtcctgctattgctaccattcacaacaactagtttgtgtgaactagggttttccatcttaacgcagttaaaaacaaaggaaagaaatgggctgaattgtgcagcagttatgcgggtagcattatcttcctgtgttccagactggaatgaacttatgaacaggcaagcacacccatcatagtaaataaaaatcttacctagcttttgtctttgtatttcttattttgtagtatttttctatgttatatttaaatggtactataatactgtgatacttttgttatgttttaatttttgttatatttaataaaattattttatgttcattgaacaaaaatttaatgaatttctgttagaggccaggaactattctagagacatttgggatacaaaagtgaacaaaacaggtaattccctagtagagtttatatcctggcaaggagaaattgacaataaacctaataaataaggtttataatatttagaagctattaagtgctatggaaagagtagtaagaaggaaggtcagggaagtactggggaaccaaaccatgaagggttctgtagaccattattgggcctctggcttttgtcagtggactagagaacagttgaagggtttaagcgaaggagagaaatgatctgagctaggttttaaaagacactctggtcactattttaaattcttagggtaagtctgaattaaatgttactttcccctcactgggcatggtggctcagacctgtaatccccgcactttggcaggccatggcagaaggctctgttgagcccaggagttcaagaccatcctgggcaacatagtgagaccttatttctactaaaaatattttaaaaataagtcaggtgtggtggtgcacacctatagtcccagctactcaggaggctgtggcaggagggtcgcttgacctcaggagtttgaagttgcagtcatctatgattgcaccactgcagtccagcctgagcaacagagtgaaaccctgtctcgagaaaattaaatgttacttccctaaaaaaaccttttctaaccaccctagggtaaatcctccattattcctttatttctttgttttccttgtagtatataatttgtaataattttgattactgattgtcattctgccaccctggagtatataatttttaattatctgattactgttattcttccatagtaggggaggtgatatccatttgcctgatacatagtatgtgttcaatacacatttgctaaagaataaatgaatcaataatacctaacatctctaatttgcagtcattcccaagagtaattattaaatatgtggcaaatttctttgcctttttacttttaaaaatctaattttgacataactgctgtaaccatccagaaacggcattgatgttgcttcacgttgctgatgcttaagcaatgtatattgtgtaatatacaatgtagtcttcaaactaatttcaacttctgcctttctgtgtactcccttatcccactgggtgatattatttggcatggtcattgtcattaaaatcatacaggatagtaattcctttccatctgctaccatgcctagccttatttaatttttcagattttctgttctattgaaggtaattgattttttctttttttttaatgcttgaaataaagtgttgaaaaacaaaaaa

SEQ ID NO: 29117 - DNA, 966 bp, Homo sapiens
agcgagttcttttcggctggaatggggaatttgtgaggtaggccggaagtggtgttgcggagggaagtgtggggagagcagaggcgcagctctgctggagagacctgaggcttgcagcgctgggcccggccgggtcgctgcggctgggctggaggtcaaggatgcattccaggaaagttctataaaaatataccatcaactccaacctgatatttgacctagccatggaaaacctcattggctcctcactggatcagaccataaaaatgatccaggaatgaaaatctaagataaattcccaccacttcaagatgttcttatacaagtcaacagtctagcagatcagccagtctctttcatcatcaagcagacatactcaagaaagaggaatagtgaagtgaaatatacagaagcatgttcaagttcatctgttgaatctggaattgtgaatagtgacaatattgagaaaaatactgactccaatctgcaaacttcaacttcatttgagccacatttcaaaaagaaaaaagtaagtgcaagacgttataatgaagattacttaaaatatggctttatcaaatgtgaaaaaccctttgaaaatgacagacctcagtgtgttatttgtaataatattcttgcgaatgaaagcttaaaaccttcgaaattaaaaaggcacttagaaactcagcatgctgaacttattgataagcctcttgaatattttcaaagaaagaaaaaagacataaagttatcaacacaatttcttagttgttctactgctgttagtgagaaagccttattatcatcatatttagttgcatatcgtgtggcaaaagagaaaatagctaacacagctgctgaaaaaattattcttccagcatgtttggatatggtgcgtacaatatttgatgataaatcagctgataaattaaaaactatacctaatgataacacagtatctcttcg

SEQ ID NO: 29118 - DNA, 590 bp, Homo sapiens
agcgagttcttttcggctggaatggggaatttgtgaggtaggccggaagtggtgttgcggagggaagtgtggggagagcagaggcgcagctctgctggagagacctgaggcttgcagcgctgggcccggccgggtcgctgcggctgggctggaggtgaggcgaaagaagggcatcctctgatgggagtggaccggagtccgctaaagcgaagcattccagggtcaaggatgcattccaggaaagttctataaaaatataccatcaactccaacctgatatttgacctagccatggaaaacctcattggctcctcactggatcagaccataaaaatgatccaggaatgaaaatctaagataaattcccaccacttcaagatgttcttatacaagtcaacagtctagcagatcagccagtctctttcatcatcaagcagacatactcaaggtaccaacacagcaaaggcacaaaatgtctctatatcagtatttttcatggtatatgtgagacccattagtgaggcatgaaatcaattctgtgagtcacaatgaacatttgtctaaaaaacaaaataaaatgtaaaatacca

SEQ ID NO: 29119 - DNA, 643 bp, Homo sapiens
agcgagttcttttcggctggaatggggaatttgtgaggtaggccggaagtggtgttgcggagggaagtgtggggagagcagaggcgcagctctgctggagagacctgaggcttgcagcgctgggcccggccgggtcgctgcggctgggctggaggtgaggcgaaagaagggcatcctctgatgggagtggaccggagtccgctaaagcgaagcattccagggttcgttgcgggaaatacagtctggttttgccccccgtatgaattgagggaaggtcaaggatgcattccaggaaagttctataaaaatataccatcaactccaacctgatatttgacctagccatggaaaacctcattggctcctcactggatcagaccataaaaatgatccaggaatgaaaatctaagataaattcccaccacttcaagatgttcttatacaagtcaacagtctagcagatcagccagtctctttcatcatcaagcagacatactcaaggtaccaacacagcaaaggcacaaaatgtctctatatcagtatttttcatggtatatgtgagacccattagtgaggcatgaaatcaattctgtgagtcacaatgaacatttgtctaaaaaacaaaataaaatgtaaaatacca

SEQ ID NO: 29120 - DNA, 737 bp, Homo sapiens
atacatcgtgaaggtttagcatccagagaaattccacagaatctcatggaagtattgaaaaatgcagtgaaagttgttaattttattaaaggaagctcattgaatagccggcttcttgaaacattttgttcagagattggaactaatcatacccacttactatatcataccaaaattcgttggttgtctcaagggaaaatactaagcagggtttatgagctcaggaatgagattcacttttttctcattgaaaaaaaatctcatttggcaagtatttttgaagatgatacttgggtaacaaaattggcatatttaactgatatttttagcattcttaatgaactgagtttaaaactacaggggaaaaacagtgatgtattccaacatgttgaacgtatccagggatttcgaaagacattattgttatggcaagtaagacttaaaagtaatcgtcctagctattacatgtttccaagatttttgcagcatattgaagagaatattattaatgaaaacattttgaaagaaataaaattagagatattgttgcatctcacttctctgtctcaaacttttaaccatttctttccagaagaaaaatttgaaacattaagggaaaacagttgggtaaaagatccatttgcttttcgaaaccctgaatcaataattgagctaaacttggtgcctgaagaagagaatgagctgaaatgagccgtgtatcctctagagtcagctag

SEQ ID NO: 29121 - DNA, 453 bp, Homo sapiens
agacactgtgcagaataattatgatagctgatatttacatagcccttactctgggccagtcaccagaaggcaggcattgttatttttgtccctagtttatagtgatgaaactgagacatggagtggtcatttcatttgcctaagaaaatagcaggctgggtttgttggctcacacctgtaatcccagcactttgggaggccaaggtgggtggatcacttgaggtgaggagtttgagaccagccttgccaacttagtgaaaccctatctgtactaaaaatacaaaaatgagccaggcatagtggcatgcacttgtagtcccagctgtttgggagactgaggcaggaggttcgcttgaaccagggagtcagaggttgcagtgagccaagattgcaccactgtactccacatcctgggtgacagagtgagactccgtctccaagaaaaaaaaaaaa

SEQ ID NO: 29122 - DNA, 417 bp, Homo sapiens
gataggatttaagatgcagaaagcaaagctgcgactctaaacaataataacaaatatttttttagaacttgataggacaatggtagtaggtgttttacaagcatttccacagttaataaacaaacctcttggtaaagaaggtaagattactctttattttatagaccagcaaaaggtggagttcacagaaactaatttgagaggcaagactttgtctgcatcagcctggttaaaaaaagcactctctacgattttatagtatgctcttacatgtttgaaaaatcttccagactacagacgaactgactaggagaataaagcaacgaagatcagagagccagataaaaatgtaattagtttgtgtttattaataaaccaggagaagtaagcaagtacaataacaaagatactgtaagg

SEQ ID NO: 29123 - DNA, 360 bp, Homo sapiens
catattttgggtagagatggggtttcaccatgttggccaggctggtcttgaactcctgcccttccctaatgtgtggtgcatgttcatgccacccatttgcttctcttcctggggcctagcattccttccgtgggctgctttccttcaactcttcttccttcaggactcagttgagatcgcacctccccaccagacattcttcattgactgtccccatcatagcactgtgcttctacctgtcatttcagagccaagcacggtggcgcacacctgttgtcctagctacttgggaggctgaggcaggaggattgcttgagcctgggaagctgagcctaatctaggcaacagagcaagctcctg

SEQ ID NO: 29124 - DNA, 439 bp, Homo sapiens
taatttgctttccttctcaaaatctgaaatgccttccaagtaaaacttttcacctaacatttaaagctggctgtagtcaggtcagttaccctttcagatcacatctgctgctactcttgcacgcttgcctaatgctccaagcaaacaactacatatacactttcccagaacactcttacctgcatgcttttaaatattcttttttctccttaaattctctccctcattctgaccaatctctaccagataaattctactcatatttcaaaacccagctggaactttacctccctggatgtttttgtgagtcccctgtgtagctgtgatgtctcactgcagcatatatgtcttttatgttgtacttatatttgctttgctcatttgttattgagcacttgtctgttgaaactgattctgtgttgggttttggcagtaacga

SEQ ID NO: 29125 - DNA, 279 bp, Homo sapiens
ttgcattcgatgatgatttcaattgagtgcattcaaatattacattcgattccaatcgatcatgactccattcgtgtccattcgatgattctattccattccattcccatgatgattccattcgatgccattcaatgattccatttgattccattcgttgatgattccattcgagtccattctcagattccattagattccatttgatgatgatttcatttgagtccatttgatgattccagtcgattctattcattgatgagtccattcaagtcccat

SEQ ID NO: 29126 - DNA, 483 bp, Homo sapiens
aagcagaatgcaggaactatatcatctgtgaacccaccattattcagtcataatcactgcaaatattttggagtatatatcttttaaaataaaaacacttaaaaactaggtcacacaggatatataattttgaacctgcttttatgttccttaacattttcaatgagaataatctataatgtaataatttttaatggttgcagagtagtattattatttgctattgaagattcaagttttatctagttttttactgttataaataacattgcaataaagactcttacgctaaaataacattgcaataaagactcttacgccaaaaaaaaaaaaaaaaaaaaagcctggcgtggcatgtgcctatagtcccagctacttgggaggctgaggtgggaggattgcttgagcctgggaggttgaggctttagtgagtcatgaccatgccactgccctccaggctggtgacagagtgagcgcctgtca

SEQ ID NO: 29127 - DNA, 761 bp, Homo sapiens
tcaagctcctggcctcaagtgatttgccaccttggcctcacacgttgctgagattacaggcatgagcaccacacctggccaatggggcgtttcttaaaatagctactagactatgacgtttatcctaaggtttgaagtctatcatcttccttacatatccttcattgtggtatctgggaatgaatcaacaagatgagagagcctccttcattcagtgtggctccttcatttccatgcttcctgaagattaaggtcactgaattttaaaattcaatattctgtgagttacacaccatggagtaactgggagaataatgtaagtttatgatgtaagttgtgcttgtgttccaggtgtccatgaacacgtagagtgccactttgggttgtagaaaataattgcacaaccaactgactgaaataccagtgaggacattgatggaatattaagggtattcatgagaggcaagtgataggttactagggatggattgtgtgggagaaataatgcagaggaaatgatgatcatctccattgaatgacagctgttatatagcaaagataaatgtaaaattagtcttattcttggaagtggaagacagcagttatcagagaggagaatttaatcaaaagaatcagaatagcatggtcacaggccagattcacattgaagtatttactctatattttactgctgttacattcaaaatgtatcagaagtctcatggttcaattaataaaatgttattcgttttcgtaactca

SEQ ID NO: 29128 - DNA, 675 bp, Homo sapiens
cagacataacagataacacatacaaagtgcctaccacatgctaaccactgctgcaggcactttctatagaagaactaatttaatcatcaccataaccctatggggtagatgatatttttacaacctccattttacagatgaagaaactgaagcatagacctgcttatgtgagaagaaacgcagggagacagttcagtcactgcaatcttcatgcccatcagtttcttgtgagaagaaaacaagaaaacaaggactgaaatccacacaggaaggtggcagtgaactccacagacggacctggacgcctcaacactcctggccttacctcccttgctgaacgtctcaagtttctctgcgttcaggactgggcaacgcctgcttcctcctctgagctgtcaagtaggaagtccgggctgctctgctagaaagagaagtcatgtgcaggagcactgaggcatcccaggtgtgacactcttccacctagagcattccgtctctcatcctctgccatgtgacgctgggcttctttaacaaattaatcccaagtgcaagacatttatttcttctgtacctaatgacctgagcaatccttctctgctgaacctggtagtgtcatctttagaagtgaagacacaattaacacatggtcatttcttcattatatcgttgttacta

SEQ ID NO: 29129 - DNA, 414 bp, Homo sapiens
cagacataacagataacacatacaaagtgcctaccacatgctaaccactgctgcaggcactttctatagaagaactaatttaatcatcaccataaccctatggggtagatgatatttttacaacctccattttacagatgaagaaactgaagcatagacctgcttatgtgagaagaaacgcagggagacagttcagtcactgcaatcttcatgcccatcagtttcttgtgagaagaaaacaagactgggcaacgcctgcttcctcctctgagctgtcaagtaggaagtccgggctgctctgctagaaagagaagtcatgtgcaggagcactgaggcatcccaggtgtgacactcttccacctagagcattccgtctctcatcctctgccatgtgtaagtcttctgccttagctg

SEQ ID NO: 29130 - DNA, 807 bp, Homo sapiens
actgtgaggacacagagaagaccactcccacctccccgagtgcaaggtgtgaagggacagatcttttaaccatgcctgcccccttatacttgctgttcatagaattgcaactgaaagtgaccatgaggatccactggatggagttacttctttcttaagtgaggaggctaagacctggagtgacttctccccagatttttgtatacctgactctgtttcagcatccgcttcccaaagaatgcagtgtgaagcaggagcttatgtgagaagaaacgcagggagacagttcagtcactgcaatcttcatgcccatcagtttcttgtgagaagaaaacaagagctccaatctgttagatggtattttgaagcaggtctttgggtaaaggacacctagacccagtgaaggtcatggtgattattattggacaatgggacatcactctgctatttgaacaaataagactttttcctgacatgcatctggaggcaggtcaaagctccaggccaactccaagtttctgatggggtctctagccaatggaaggcttcttctccttcaattgcctgactcttcaggactcttaaatactgcaaagtgagaaaatgagacaggttgcactgagggctgttagccagacagagtctcgaactggaagtccatctagatgttttgcataagagaatggaaacaatctgtctgtgatttagggacatactctggcagcaatatgggaatacagtttcaatcctcattaacaaaacaggtatgaaatacatatttatttagtaaggtgccagctgtatgaa

SEQ ID NO: 29131 - DNA, 369 bp, Homo sapiens
gctttcagaagaatcttatatacatgcaggagtggtgaggctgatggtggaaggagaatgagtctctgatgactttggacttgatgctggaaagacttaagactttgggggactactggaaaggagtgacttctccccagatttttgtatacctgactctgtttcagcatccgcttcccaaagaatgcagtgtgaagcaggagcttatgtgagaagaaacgcagggagacagttcagtcactgcaatcttcatgcccatcagtttcttgtgagaagaaaacaagtggatatacactgttccaagcagcatgtgttgaaaagatttgtcttttccccattaaatggtcttggtacctttctcaaaaattg

SEQ ID NO: 29132 - DNA, 347 bp, Homo sapiens
cctgaagcctttgaagtagaatatggctccctcactcatatttgtatacatatttaggcacaggataaatatggataagcacattaaggctgtttcctgatgtctgagaaaaactccagtcaagattttgcttcctccacaaagcactgaagcacttggctggtggcatgggtagtgtttgcatttttttctgcagaaggatcaggaagggaacacagtggtctgccaccttttgacacttcagggcctcaacccatcctgttttccagagttaggcctgtcccggccaaacgaataccttctgttatgaaaatcatgtgaaaatctgaaaatcttgttctttttcc

SEQ ID NO: 29133 - DNA, 355 bp, Homo sapiens
  misc_feature (16)..(16): n is a, c, g, or t
aggccaaagaaattcnggcacgaagaactggacgcaacctaaacacaaatgagggaggtactggcttctgcctcagggcttctgcacatgctctcttcccttgcactgaacactgccctcaccccctgcccacatcttcacggttcttaagttgttgctctaacgccacctcctctgcgaggcccgcccctaaccactctacttaaaaacagcaccagactgggcatggtggctcatgcctgtaatcccagcactttgggaggccaaggcgggcagatcacttgagattaggagttcgagaccagcctggccaacatgacaaaaccccatctttactaaagatacaaaaaaaaaa

SEQ ID NO: 29134 - DNA, 485 bp, Homo sapiens
ctactcttggtcttgatgcttggggcctccaggatgcctacagtatagaagagactcgttctgaaatccctccaactccttgagccattgatttctcattgaccaagcatgatggaaaaaagcaagcacacatgctcataggcggaagggacttgccttgtcttggatgagacttgagactgtggacttttgagttaatgctgaagacgggacttgctcctctctgccttctgccatgattgtgaggccttcccagccaagtagaactgctatttgcttttgagctactccgggagaggagcagagtcggtttgagttgcatgactgacatcttctggctacagtggatattacagaaagactgaaactccgcaaaagactctagacatgtgacctggagatgcagcatccatcttgtgaccatgaagcaatagggataagggtaaaagtctacacattgcagattgcagataaaaacatgaaaa

SEQ ID NO: 29135 - DNA, 418 bp, Homo sapiens
aactactgacatttaaaatcagtgaataattagtttttatatgaacaaatataacctaaatgcaatggattccttgaaagacccaaactatcaaagctcactcaagaaggaataaacttgaatggctctatattatttaagtttgaagtcattgttaaaaaaacctttacacatacacacacacacacgtgcaccaatgcacacacataattaaacacgacctgcatgttaagatgtcttcactggtgaattctctcaaacattaacggaagaaataataaagccaggaacagtggcatacacctattgtcccagcctcacaggaggctaaggcgggaggactgcttgagcccaagagttttaagtccaacctgggcaagacagcaagactgtgtctctaaaaaaaaatagtaatacg

SEQ ID NO: 29136 - DNA, 413 bp, Homo sapiens
ttttccacatagacgtataagtttattttgtagtaattttccttattcatctcagagaatatgatttatatgtttcggtcttgtggaagtaaaagagaatgatttcctagtggataaaaagaaaccagtctcctttaaggcattctgtctccatgcactccaccatcctcactctggaacccattgcagaggagctcttcaagggggtgttagctttttcctcttttacctcgccttgggcaggctgagacacctcctgctcctcaaataggtgtggcccagtgcttctttacatgtccaaggaggatgtttcagaaggcttgaagagaggaacactcatccaggtgcttaaaatctactggaaggctattctctgaatatgtagaatccaaaacaatctattaaactgtttc

SEQ ID NO: 29137 - DNA, 3185 bp, Homo sapiens
agcggagaacgccgcgcccgtgacccggaagagcattctccttagcaactgcgggactgcggcggcgccggcctccggggagaaacgcgaatgacaacagagctgctcaaggcgggaactctgagctaagcagtggaggtttctctggatctggagagaagagtgaccttggagccaataatgagccatcctgactacagaatgaacctccggcccctggggacccccagaggtgtgtctgctgtggctggtccacatgacattggtgcttcgccaggtgacaaaaagtcaaagaacaggtccacacgagggaagaaaaagagcatatttgaaacttacatgtccaaggaggatgtttcagaaggcttgaagagaggaacactcatccagggtgtattgagaattaatccaaagaagtttcatgaagccttcattccttccccggatggtgatcgagacatttttattgatggggttgttgctcgtaatagagccttaaatggggatctggtggtcgtgaaactgcttcccgaggagcattggaaggtagttaaaccagagagcaatgacaaagaaacagaagctgcgtatgaatcagatatccccgaggagctctgtggacaccatctcccgcaacagtccctgaaaagctataatgacagtcctgatgtcattgtagaggctcagtttgatggcagcgactcagaagatggacatggcatcacacaaaatgtgctggttgatggtgttaagaaactctcagtttgtgtttctgagaaaggaagagaggatggtgatgcaccggttacaaaagatgagaccacctgcatttcacaagacacaagagctttatcggagaaatccctgcaaagatcagcaaaggtggtttacatcttggagaaaaaacattctcgagcagcaaccggcttcctcaaactcttggctgataagaacagcgaactgtttaggaaatacgccctgttttctccctcagaccaccgagtgcctagaatttatgtgcctctcaaggactgtccccaggactttgtggcacggcctaaagattatgccaacacactgttcatctgccgcattgtggactggaaggaggactgcaattttgccctggggcagctggctaagagtcttgggcaggctggtgaaattgagcctgaaacagaaggaatactaacagagtatggcgtggatttctctgatttctcttcagaagttctagaatgtcttcctcaaggcctgccatggacaattccaccagaggagttcagcaagagaagggatttaagaaaagactgtatcttcaccattgacccatcaaccgcccgagacctcgatgatgccctctcctgcaagccactcgctgacggcaacttcaaagtgggagttcacattgctgacgtgagttactttgttccggagggatctgatctggataaagtggctgccgagagggctacaagcgtctacttggttcaaaaggtggtccccatgcttcccaggctgctgtgtgaggagctgtgcagcctcaaccccatgtccgacaagctgaccttctctgtgatctggacactgactccagagggcaagatccttgatgaatggtttggccggaccatcatccgctcctgcaccaaacttagctacgagcatgcacagagcatgattgaaagcccaactgagaaaatccctgcgaaagagctgccccccatttccccagagcatagcagcgaggaggtacaccaggccgtcttgaatctccacggaattgccaagcagttacgccagcagcgctttgtggacggcgcacttcgtttggatcagctaaagcttgctttcactctggaccacgagaccggattgcctcaaggatgtcatatctatgagtaccgcgagagcaacaagctcgtggaggagttcatgctcttggccaacatggcagtggcccacaagatccaccgcgccttccccgagcaggccctgctgcgccggcaccccccgccccaaacaaggatgctcagtgacctggtggaattctgcgaccagatggggctgcccgtggacttcagctccgcaggagccctcaataaaagcctgacccaaacatttggagatgacaagtactcactggcccgcaaggaggtgctcaccaacatgtgctcccggcccatgcagatggcactgtacttctgctcggggctgctgcaggacccagcgcagttccggcactacgcgctcaatgtgcccctgtacacacacttcacctcgcccatccgccgctttgccgacgtcctggtgcaccgcctcctggctgccgcgttaggctatagggagcgactagacatggcgcccgataccctgcagaaacaggcggaccactgtaacgaccgccgcatggcgtccaagcgcgtgcaggagctcagtaccagtctcttctttgctgttctggtcaaggagagtggccccctggagtcagaagccatggtgatgggcatcctgaagcaagccttcgacgtgctggtgctgcgctacggcgtgcagaagcgcatctactgcaacgcactggccctgcggtcccaccacttccagaaggtgggcaagaagccggaactcacgctggtctgggagcctgaggacatggagcaggagccagcacagcaggtcatcaccatcttcagcctggtggaggtggtcctgcaggcagagtccacagccctcaagtacagcgccatcctgaagcggccaggcacccagggccacctgggccctgagaaggaggaggaggagtctgacggtgagcccgaggactcaagcaccagctgagctccaccagccgcctgccccgcctgccccgcctgcctgtcccgccacactggctttaggacctgttgacacggaggggggtttttaatttggtttttaacaactcaggggtttgtttttatttttatttaatttttgcagctcaacttttaaacaaactgcaggggagagggtggggctggaaggaaggctgaggcctggtcagcagtgaccccagcagagcaggccccagtcctcctgggaggctggccccccttttttctgggccctactgccctcctctgcccaggaaatgggggggtttcagcaactcagtgtcacagaataaaatcaagtgtggagtgcca

SEQ ID NO: 29138 - DNA, 3739 bp, Homo sapiens
agcggagaacgccgcgcccgtgacccggaagagcattctccttagcaactgcgggactgcggcggcgccggcctccggggagaaacgcgaatgacaacagagctgctcaaggcgggaactctgagctaagcagtggaggtttctctggatctggagagaagagtgaccttggagccaataatgagccatcctgactacagaatgaacctccggcccctggggacccccagaggtgtgtctgctgtggctggtccacatgacattggtgcttcgccaggtgacaaaaagtcaaagaacaggtccacacgagggaagaaaaagagcatatttgaaacttacatgtccaaggaggatgtttcagaaggcttgaagagaggaacactcatccagggtgtattgagaattaatccaaagaagtttcatgaagccttcattccttccccggatggtgatcgagacatttttattgatggggttgttgctcgtaatagagccttaaatggggatctggtggtcgtgaaactgcttcccgaggagcattggaaggtagttaaaccagagagcaatgacaaagaaacagaagctgcgtatgaatcagatatccccgaggagctctgtggacaccatctcccgcaacagtccctgaaaagctataatgacagtcctgatgtcattgtagaggctcagtttgatggcagcgactcagaagatggacatggcatcacacaaaatgtgctggttgatggtgttaagaaactctcagtttgtgtttctgagaaaggaagagaggatggtgatgcaccggttacaaaagatgagaccacctgcatttcacaagacacaagagctttatcggagaaatccctgcaaagatcagcaaaggtggtttacatcttggagaaaaaacattctcgagcagcaaccggcttcctcaaactcttggctgataagaacagcgaactgtttaggaaatacgccctgttttctccctcagaccaccgagtgcctagaatttatgtgcctctcaaggactgtccccaggactttgtggcacggcctaaagattatgccaacacactgttcatctgccgcattgtggactggaaggaggactgcaattttgccctggggcagctggctaagagtcttgggcaggctggtgaaattgagcctgaaacagaaggaatactaacagagtatggcgtggatttctctgatttctcttcagaagttctagaatgtcttcctcaaggcctgccatggacaattccaccagaggagttcagcaagagaagggatttaagaaaagactgtatcttcaccattgacccatcaaccgcccgagacctcgatgatgccctctcctgcaagccactcgctgacggcaacttcaaagtgggagttcacattgctgacgtgagttactttgttccggagggatctgatctggataaagtggctgccgagagggctacaagcgtctacttggttcaaaaggtggtccccatgcttcccaggctgctgtgtgaggagctgtgcagcctcaaccccatgtccgacaagctgaccttctctgtgatctggacactgactccagagggcaagatccttgatgaatggtttggccggaccatcatccgctcctgcaccaaacttagctacgagcatgcacagagcatgattgaaagcccaactgagaaaatccctgcgaaagagctgccccccatttccccagagcatagcagcgaggaggtacaccaggccgtcttgaatctccacggaattgccaagcagttacgccagcagcgctttgtggacggcgcacttcgtttggatcagctaaagcttgctttcactctggaccacgagaccggattgcctcaaggatgtcatatctatgagtaccgcgagagcaacaagctcgtggaggagttcatgctcttggccaacatggcagtggcccacaagatccaccgcgccttccccgagcaggccctgctgcgccggcaccccccgccccaaacaaggatgctcagtgacctggtggaattctgcgaccagatggggctgcccgtggacttcagctccgcaggagccctcaataaaagcctgacccaaacatttggagatgacaagtactcactggcccgcaaggaggtgctcaccaacatgtgctcccggcccatgcagatggcactgtacttctgctcggggctgctgcaggacccagcgcagttccggcactacgcgctcaatgtgcccctgtacacacacttcacctcgcccatccgccgctttgccgacgtcctggtgcaccgcctcctggctgccgcgttaggctatagggagcgactagacatggcgcccgataccctgcagaaacaggcggaccactgtaacgaccgccgcatggcgtccaagcgcgtgcaggagctcagtaccagtctcttctttgctgttctggtcaaggagagtggccccctggagtcagaagccatggtgatgggcatcctgaagcaagccttcgacgtgctggtgctgcgctacggcgtgcagaagcgcatctactgcaacgcactggccctgcggtcccaccacttccagaaggtgggcaagaagccggaactcacgctggtctgggagcctgaggacatggagcaggagccagcacagcagggtcctttagagaacctgatgaaagctatgagtttacacccaagaaattgtctggaaccgttttcaccaacagtgtgccctgaacgcggacccaggccctcaggttgtgtttcataagccttgggagcgctcaggatgcatctgactccccaactctgccctgacccagggcattcttcctggagggggcccccattacagacaggcgagcagaggcttccagaggccgaaggaggggccaggggtcctgctgcagggatggaggcagagctgcgcctcgacatcaggccctgccatccttgtcccctcacggctgggctctgcacaggtcatcaccatcttcagcctggtggaggtggtcctgcaggcagagtccacagccctcaagtacagcgccatcctgaagcggccaggcacccagggccacctgggccctgagaaggaggaggaggagtctgacggtgagcccgaggactcaagcaccagctgagctccaccagccgcctgccccgcctgccccgcctgcctgtcccgccacactggctttaggacctgttgacacggaggggggtttttaatttggtttttaacaactcaggggtttgtttttatttttatttaatttttgcagctcaacttttaaacaaactgcaggggagagggtggggctggaaggaaggctgaggcctggtcagcagtgaccccagcagagcaggccccagtcctcctgggaggctggccccccttttttctgggccctactgccctcctctgcccaggaaatgggggggtttcagcaactcagtgtcacagaataaaatcaagtgtggagtgccatctggtgtgtagggcgcctctgggaagcctgggcagcagaatgccccttgcacccagggcaagggacccagttcaggcttcacccctcgctgctgagccgatgtcaacacctggaactttcctgtcagttccaacacgattcagagctggctgcctggcagatgattgatactggagtctcattctgcctgattaaaaatggaattagtatgcaacactgagagcg

SEQ ID NO: 29139 - DNA, 2481 bp, Homo sapiens
aacgtaggctagtacgaggcttggtgttaattcggccgagggtgttacgaaactctcagtttgtgtttctgagaaaggaagagaggatggtgatgcaccggttacaaaagatgagaccacctgcatttcacaagacacaagagctttatcggagaaatccctgcaaagatcagcaaaggtggtttacatcttggagaaaaaacattctcgagcagcaaccggcttcctcaaactcttggctgataagaacagcgaactgtttaggaaatacgccctgttttctccctcagaccaccgagtgcctagaatttatgtgcctctcaaggactgtccccaggactttgtggcacggcctaaagattatgccaacacactgttcatctgccgcattgtggactggaaggaggactgcaattttgccctggggcagctggctaagagtcttgggcaggctggtgaaattgagcctgaaacagaaggaatactaacagagtatggcgtggatttctctgatttctcttcagaagttctagaatgtcttcctcaaggcctgccatggacaattccaccagaggagttcagcaagagaagggatttaagaaaagactgtatcttcaccattgacccatcaaccgcccgagacctcgatgatgccctctcctgcaagccactcgctgacggcaacttcaaagtgggagttcacattgctgacgtgagttactttgttccggagggatctgatctggataaagtggctgccgagagggctacaagcgtctacttggttcaaaaggtggtccccatgcttcccaggctgctgtgtgaggagctgtgcagcctcaaccccatgtccgacaagctgaccttctctgtgatctggacactgactccagagggcaagatccttgatgaatggtttggccggaccatcatccgctcctgcaccaaacttagctacgagcatgcacagagcatgattgaaagcccaactgagaaaatccctgcgaaagagctgccccccatttccccagagcatagcagcgaggaggtacaccaggccgtcttgaatctccacggaattgccaagcagttacgccagcagcgctttgtggacggcgcacttcgtttggatcagctaaagcttgctttcactctggaccacgagaccggattgcctcaaggatgtcatatctatgagtaccgcgagagcaacaagctcgtggaggagttcatgctcttggccaacatggcagtggcccacaagatccaccgcgccttccccgagcaggccctgctgcgccggcaccccccgccccaaacaaggatgctcagtgacctggtggaattctgcgaccagatggggctgcccgtggacttcagctccgcaggagccctcaataaaagcctgacccaaacatttggagatgacaagtactcactggcccgcaaggaggtgctcaccaacatgtgctcccggcccatgcagatggcactgtacttctgctcggggctgctgcaggacccagcgcagttccggcactacgcgctcaatgtgcccctgtacacacacttcacctcgcccatccgccgctttgccgacgtcctggtgcaccgcctcctggctgccgcgttaggctatagggagcgactagacatggcgcccgataccctgcagaaacaggcggaccactgtaacgaccgccgcatggcgtccaagcgcgtgcaggagctcagtaccagtctcttctttgctgttctggtcaaggagagtggccccctggagtcagaagccatggtgatgggcatcctgaagcaagccttcgacgtgctggtgctgcgctacggcgtgcagaagcgcatctactgcaacgcactggccctgcggtcccaccacttccagaaggtgggcaagaagccggaactcacgctggtctgggagcctgaggacatggagcaggagccagcacagcaggtcatcaccatcttcagcctggtggaggtggtcctgcaggcagagtccacagccctcaagtacagcgccatcctgaagcggccaggcacccagggccacctgggccctgagaaggaggaggaggagtctgacggtgagcccgaggactcaagcaccagctgagctccaccagccgcctgccccgcctgccccgcctgcctgtcccgccacactggctttaggacctgttgacacggaggggggtttttaatttggtttttaacaactcaggggtttgtttttatttttatttaatttttgcagctcaacttttaaacaaactgcaggggagagggtggggctggaaggaaggctgaggcctggtcagcagtgaccccagcagagcaggccccagtcctcctgggaggctggccccccttttttctgggccctactgccctcctctgcccaggaaatgggggggtttcagcaactcagtgtcacagaataaaatcaagtgtggagtgcca

SEQ ID NO: 29140 - DNA, 1493 bp, Homo sapiens
agcggagaacgccgcgcccgtgacccggaagagcattctccttagcaactgcgggactgcggcggcgccggcctccggggagaaacgcgaatgacaacagagctgctcaaggcgggaactctgagctaagcagtggaggtttctctggatctggagagaagagtgaccttggagccaataatgagccatcctgactacagaatgaacctccggcccctggggacccccagaggtgtgtctgctgtggctggtccacatgacattggtgcttcgccaggtgacaaaaagtcaaagaacaggtccacacgagggaagaaaaagagcatatttgaaacttacatgtccaaggaggatgtttcagaaggcttgaagagaggaacactcatccagggtgtattgagaattaatccaaagaagtttcatgaagccttcattccttccccggatggtgatcgagacatttttattgatggggttgttgctcgtaatagagccttaaatggggatctggtggtcgtgaaactgcttcccgaggagcattggaaggtagttaaaccagagagcaatgacaaagaaacagaagctgcgtatgaatcagatatccccgaggagctctgtggacaccatctcccgcaacagtccctgaaaagctataatgacagtcctgatgtcattgtagaggctcagtttgatggcagcgactcagaagatggacatggcatcacacaaaatgtgctggttgatggtgttaagaaactctcagtttgtgtttctgagaaaggaagagaggatggtgatgcaccggttacaaaagatgagaccacctgcatttcacaagacacaagagctttatcggagaaatccctgcaaagatcagcaaaggtcattgcctacagattttctccacgtgtccaaatggctttcacctgagctacttgttgaagatctcgtgtgattcagtcaggactgtatttggtcatttaatcagaaaagttagagcagagaatcataaaaagtgaattaaaaaaaaaaactttaaacatataaatacgaatccatcttcctgcctttggataaggggtcaaggccttttctttgagtgtgggtatgttgattggagttctgtgttatctttcttgcttaaaccacacttgtaatgcagcatttatcactttgagttttggtggagtgagaatttagacagtggagaagcagtatgaatatagactctcttcagatttgtacagtttttgctccaatttttttgttgttaccatgcccatacctaatttaaaaataattttaatgtcttttttagtttttccaaagtattcaatttagttatagaaacaattgtttttatattcctatttcaccattttggcagtgagccaagatcacaccactgcacttcagcctgggtgacagagcaaggtctccaagaaaaaaaaaagtgtgcatgtggtattggtattgtgtgtgcgcacacacac

SEQ ID NO: 29141 - DNA, 950 bp, Homo sapiens
agcggagaacgccgcgcccgtgacccggaagagcattctccttagcaactgcgggactgcggcggcgccggcctccggggagaaacgcgaatgacaacagagctgctcaaggcgggaactctgagctaagcagtggaggtttctctggatctggagagaagagtgaccttggagccaataatgagccatcctgactacagaatgaacctccggcccctggggacccccagaggtgtgtctgctgtggctggtccacatgacattggtgcttcgccaggtgacaaaaagtcaaagaacaggtccacacgagggaagaaaaagagcatatttgaaacttacatgtccaaggaggatgtttcagaaggcttgaagagaggaacactcatccagggtgtattgagaattaatccaaagaagtttcatgaagccttcattccttccccggatggtgatcgagacatttttattgatggggttgttgctcgtaatagagccttaaatggggatctggtggtcgtgaaactgcttcccgaggagcattggaaggtagttaaaccagagagcaatgacaaagaaacagaagctgcgtatgaatcagatatccccgaggagctctgtggacaccatctcccgcaacagtccctgaaaagctataatgacagtcctgatgtcattgtagaggctcagtttgatggcagcgactcagaagatggacatggcatcacacaaaatgtgctggttgatggtgttaagaaactctcagtttgtgtttctgagaaaggtgagtactagactattgtcttactttttttttaagtacactgattaagtattggaattccctctctgctgcagagtaaataacacaatgccattgatatagtcctaaaaatcttgaaatggggcctgtatttaccttatagcgccccctctaccccctttagagcaaa

SEQ ID NO: 29142 - DNA, 118 bp, Homo sapiens
ctgatctggataaagtggctgccgagagggctacaagcgtctacttggttcaaaaggtaaaaatccatctctagtttcttttttcttgctttgtttatttgtttgtttccctggaaga

SEQ ID NO: 29143 - DNA, 417 bp, Homo sapiens
actagacatggcgcccgataccctgcagaaacaggcggaccactgtaacgaccgccgcatggcgtccaagcgcgtgcaggagctcagtaccagtctcttctttgctgttctggtcaaggtgagccctccagcctggtgcccctcacctccctctggctcccgaccctcctgggcacctgctcaccaggaggcctcgaggagcccagggcagtgccaggaggtgccatggctgcagcactgtccctgcaggagagtggccccctggagtcagaagccatggtgatgggcatcctgaagcaagccttcgacgtgctggtgctgcgctacggcgtgcagaagcgcatctactgcaacgtgagtgccctgggagagcccgggggcgggcagggcagcccaagccatcccgcactggagggg

SEQ ID NO: 29144 - DNA, 682 bp, Homo sapiens
agaaaggaaattaaacattaaaagactttaagtactttactctttatataatgtcactaagaaaaagccaggaaaatcagggttgggtttttaaatttatttatttaataaatataatctattttccaccattttgtttgttatggctggtaccaaagtacttttaaaagttaacatttattatgattttgttttatttcagcagatgtgcataataaattaacctatctctattcttcattttgggctggggcagcatttaacatctagttttttggaatttcgacacacaggctatttagtttaattcaacatagtttgatgctctccagttgtatgatatttatgatagtatgtgaataatgttaagtagataaaatgtggtctgctgaggctgagtgctcagcctgagtataatactggtatgtgacaggtccactggcggcctggggttcttctgtaaagtgagtagtttggggtaactggtatccaggcatctttctagattgaattttaaaatcccactaattgatatgcatctggttgatgactcctcttctctctttatctttttaatgtaggaagagaggatggtgatgcaccggttacaaaagatgagaccacctgcatttcacaagacacaagagctttatcggagaaatccctgcaaagatcagcaaag

SEQ ID NO: 29145 - DNA, 663 bp, Homo sapiens
cctcgcttagtgctccctttggacccccagaggtgtgtctgctgtggctggtccacatgacattggtgcttcgccaggtgacaaaaagtcaaagaacaggtccacacgagggaagaaaaagagcatatttgaaacttacatgtccaaggaggatgtttcagaaggcttgaagagaggaacactcatccagggtgtattgagaattaatccaaagaagtttcatgaagccttcattccttccccggatggtgatcgagacatttttattgatggggttgttgctcgtaatagagccttaaatggggatctggtggtcgtgaaactgcttcccgaggagcattggaaggtagttaaaccagggaagcacttatcctagggtctttccttttatattttcctcatgggtggttaccgcccctaatatttcaatttattcttatatctaatctcattttttttaaataaggtcttttaaaagttatcgcctgttattttaatttttgcctttttaaataaaattcaagtcgccttattattgttctatgatcctgttccattttttcttttcataattaatgtccactgggtgcattttatatagggtgtccccgtctctctatttccttatttttggtaatttacctcatttttcttgtgaaaaac

SEQ ID NO: 29146 - DNA, 3411 bp, Homo sapiens
agcggagaacgccgcgcccgtgacccggaagagcattctccttagcaactgcgggactgcggcggcgccggcctccggggagaaacgcgaatgacaacagagctgctcaaggcgggaactctgagctaagcagtggaggtttctctggatctggagagaagagtgaccttggagccaataatgagccatcctgactacagaatgaacctccggcccctggggacccccagaggtgtgtctgctgtggctggtccacatgacattggtgcttcgccaggtgacaaaaagtcaaagaacaggtccacacgagggaagaaaaagagcatatttgaaacttacatgtccaaggaggatgtttcagaaggcttgaagagaggaacactcatccagggtgtattgagaattaatccaaagaagtttcatgaagccttcattccttccccggatggtgatcgagacatttttattgatggggttgttgctcgtaatagagccttaaatggggatctggtggtcgtgaaactgcttcccgaggagcattggaaggtagttaaaccagagagcaatgacaaagaaacagaagctgcgtatgaatcagatatccccgaggagctctgtggacaccatctcccgcaacagtccctgaaaagctataatgacagtcctgatgtcattgtagaggctcagtttgatggcagcgactcagaagatggacatggcatcacacaaaatgtgctggttgatggtgttaagaaactctcagtttgtgtttctgagaaaggaagagaggatggtgatgcaccggttacaaaagatgagaccacctgcatttcacaagacacaagagctttatcggagaaatccctgcaaagatcagcaaaggtggtttacatcttggagaaaaaacattctcgagcagcaaccggcttcctcaaactcttggctgataagaacagcgaactgtttaggaaatacgccctgttttctccctcagaccaccgagtgcctagaatttatgtgcctctcaaggactgtccccaggactttgtggcacggcctaaagattatgccaacacactgttcatctgccgcattgtggactggaaggaggactgcaattttgccctggggcagctggctaagagtcttgggcaggctggtgaaattgagcctgaaacagaaggaatactaacagagtatggcgtggatttctctgatttctcttcagaagttctagaatgtcttcctcaaggcctgccatggacaattccaccagaggagttcagcaagagaagggatttaagaaaagactgtatcttcaccattgacccatcaaccgcccgagacctcgatgatgccctctcctgcaagccactcgctgacggcaacttcaaagtgggagttcacattgctgacgtgagttactttgttccggagggatctgatctggataaagtggctgccgagagggctacaagcgtctacttggttcaaaaggtggtccccatgcttcccaggctgctgtgtgaggagctgtgcagcctcaaccccatgtccgacaagctgaccttctctgtgatctggacactgactccagagggcaagatccttgatgaatggtttggccggaccatcatccgctcctgcaccaaacttagctacgagcatgcacagagcatgattgaaagcccaactgagaaaatccctgcgaaagagctgccccccatttccccagagcatagcagcgaggaggtacaccaggccgtcttgaatctccacggaattgccaagcagttacgccagcagcgctttgtggacggcgcacttcgtttggatcagctaaagcttgctttcactctggaccacgagaccggattgcctcaaggatgtcatatctatgagtaccgcgagagcaacaagctcgtggaggagttcatgctcttggccaacatggcagtggcccacaagatccaccgcgccttccccgagcaggccctgctgcgccggcaccccccgccccaaacaaggatgctcagtgacctggtggaattctgcgaccagatggggctgcccgtggacttcagctccgcaggagccctcaataaaagcctgacccaaacatttggagatgacaagtactcactggcccgcaaggaggtgctcaccaacatgtgctcccggcccatgcagatggcactgtacttctgctcggggctgctgcaggacccagcgcagttccggcactacgcgctcaatgtgcccctgtacacacacttcacctcgcccatccgccgctttgccgacgtcctggtgcaccgcctcctggctgccgcgttaggctatagggagcgactagacatggcgcccgataccctgcagaaacaggcggaccactgtaacgaccgccgcatggcgtccaagcgcgtgcaggagctcagtaccagtctcttctttgctgttctggtcaaggagagtggccccctggagtcagaagccatggtgatgggcatcctgaagcaagccttcgacgtgctggtgctgcgctacggcgtgcagaagcgcatctactgcaacgcactggccctgcggtcccaccacttccagaaggtgggcaagaagccggaactcacgctggtctgggagcctgaggacatggagcaggagccagcacagcaggtcatcaccatcttcagcctggtggaggtggtcctgcaggcagagtccacagccctcaagtacagcgccatcctgaagcggccaggcacccagggccacctgggccctgagaaggaggaggaggagtctgacggtgagcccgaggactcaagcaccagctgagctccaccagccgcctgccccgcctgccccgcctgcctgtcccgccacactggctttaggacctgttgacacggaggggggtttttaatttggtttttaacaactcaggggtttgtttttatttttatttaatttttgcagctcaacttttaaacaaactgcaggggagagggtggggctggaaggaaggctgaggcctggtcagcagtgaccccagcagagcaggccccagtcctcctgggaggctggccccccttttttctgggccctactgccctcctctgcccaggaaatgggggggtttcagcaactcagtgtcacagaataaaatcaagtgtggagtgccatctggtgtgtagggcgcctctgggaagcctgggcagcagaatgccccttgcacccagggcaagggacccagttcaggcttcacccctcgctgctgagccgatgtcaacacctggaactttcctgtcagttccaacacgattcagagctggctgcctggcagatgattgatactggagtctcattctgcctgattaaaaatggaattagtatgcaacactgagagcg

SEQ ID NO: 29147 - DNA, 2528 bp, Homo sapiens
agcggagaacgccgcgcccgtgacccggaagagcattctccttagcaactgcgggactgcggcggcgccggcctccggggagaaacgcgaatgacaacagagctgctcaaggcgggaactctgagctaagcagtggaggtttctctggatctggagagaagagtgaccttggagccaataatgagccatcctgactacagaatgaacctccggcccctggggacccccagaggtgtgtctgctgtggctggtccacatgacattggtgcttcgccaggtgacaaaaagtcaaagaacaggtccacacgagggaagaaaaagagcatatttgaaacttacatgtccaaggaggatgtttcagaaggcttgaagagaggaacactcatccagggtgtattgagaattaatccaaagaagtttcatgaagccttcattccttccccggatggtgatcgagacatttttattgatggggttgttgctcgtaatagagccttaaatggggatctggtggtcgtgaaactgcttcccgaggagcattggaaggtagttaaaccagagagcaatgacaaagaaacagaagctgcgtatgaatcagatatccccgaggagctctgtggacaccatctcccgcaacagtccctgaaaagctataatgacagtcctgatgtcattgtagaggctcagtttgatggcagcgactcagaagatggacatggcatcacacaaaatgtgctggttgatggtgttaagaaactctcagtttgtgtttctgagaaaggaagagaggatggtgatgcaccggttacaaaagatgagaccacctgcatttcacaagacacaagagctttatcggagaaatccctgcaaagatcagcaaaggtggtttacatcttggagaaaaaacattctcgagcagcaaccggcttcctcaaactcttggctgataagaacagcgaactgtttaggaaatacgccctgttttctccctcagaccaccgagtgcctagaatttatgtgcctctcaaggactgtccccaggactttgtggcacggcctaaagattatgccaacacactgttcatctgccgcattgtggactggaaggaggactgcaattttgccctggggcagctggctaagagtcttgggcaggctggtgaaattgagcctgaaacagaaggaatactaacagagtatggcgtggatttctctgatttctcttcagaagttctagaatgtcttcctcaaggcctgccatggacaattccaccagaggagttcagcaagagaagggatttaagaaaagactgtatcttcaccattgacccatcaaccgcccgagacctcgatgatgccctctcctgcaagccactcgctgacggcaacttcaaagtgggagttcacattgctgacgtgagttactttgttccggagggatctgatctggataaagtggctgccgagagggctacaagcgtctacttggttcaaaaggtggtccccatgcttcccaggctgctgtgtgaggagctgtgcagcctcaaccccatgtccgacaagctgaccttctctgtgatctggacactgactccagagggcaagatccttgatgaatggtttggccggaccatcatccgctcctgcaccaaacttagctacgagcatgcacagagcatgattgaaagcccaactgagaaaatccctgcgaaagagctgccccccatttccccagagcatagcagcgaggaggtacaccaggccgtcttgaatctccacggaattgccaagcagttacgccagcagcgctttgtggacggcgcacttcgtttggatcagctaaagcttgctttcactctggaccacgagaccggattgcctcaaggatgtcatatctatgagtaccgcgagagcaacaagctcgtggaggagttcatgctcttggccaacatggcagtggcccacaagatccaccgcgccttccccgagcaggccctgctgcgccggcaccccccgccccaaacaaggatgctcagtgacctggtggaattctgcgaccagatggggctgcccgtggacttcagctccgcaggagccctcaataaaagcctgacccaaacatttggagatgacaagtactcactggcccgcaaggaggtgctcaccaacatgtgctcccggcccatgcagatggcactgtacttctgctcggggctgctgcaggacccagcgcagttccggcactacgcgctcaatgtgcccctgtacacacacttcacctcgcccatccgccgctttgccgacgtcctggtgcaccgcctcctggctgccgcgttaggctatagggagcgactagacatggcgcccgataccctgcagaaacaggcggaccactgtaacgaccgccgcatggcgtccaagcgcgtgcaggagctcagtaccagtctcttctttgctgttctggtcaaggtgagccctccagcctggtgcccctcacctccctctggctcccgaccctcctgggcacc

SEQ ID NO: 29148 - DNA, 1313 bp, Homo sapiens
acagtacatttagaggtaataagcaccacaagacaggaacaggaaaagtgctctgagatttgagaggagggaaccactatttcccattaggattgtctagagatgctttattggaagtgacatgtttgagccaggccatggattggtgcagtttgagactaggtcagataccatctctgaagcctcttctggtgcccgtcgctgtgacaaggtgtattgagaattaatccaaagaagtttcatgaagccttcattccttccccggatggtgatcgagacatttttattgatggggttgttgctcgtaatagagccttaaatggggatctggtggtcgtgaaactgcttcccgaggagcattggaaggtagttaaaccagagagcaatgacaaagaaacagaagctgcgtatgaatcagatatccccgaggagctctgtggacaccatctcccgcaacagtccctgaaaagctataatgacagtcctgatgtcattgtagaggctcagtttgatggcagcgactcagaagatggacatggcatcacacaaaatgtgctggttgatggtgttaagaaactctcagtttgtgtttctgagaaaggaagagaggatggtgatgcaccggttacaaaagatgagaccacctgcatttcacaagacacaagagctttatcggagaaatccctgcaaagatcagcaaaggtcattgcctacagattttctccacgtgtccaaatggctttcacctgagctacttgttgaagatctcgtgtgattcagtcaggactgtatttggtcatttaatcagaaaagttagagcagagaatcataaaaagtgaattaaaaaaaaaaactttaaacatataaatacgaatccatcttcctgcctttggataaggggtcaaggccttttctttgagtgtgggtatgttgattggagttctgtgttatctttcttgcttaaaccacacttgtaatgcagcatttatcactttgagttttggtggagtgagaatttagacagtggagaagcagtatgaatatagactctcttcagatttgtacagtttttgctccaatttttttgttgttaccatgcccatacctaatttaaaaataattttaatgtcttttttagtttttccaaagtattcaatttagttatagaaacaattgtttttatattcctatttcaccattttggcagtgagccaagatcacaccactgcacttcagcctgggtgacagagcaaggtctccaagaaaaaaaaaagtgtgcatgtggtattggtattgtgtgtgcgcacacacac

SEQ ID NO: 29149 - DNA, 936 bp, Homo sapiens
  misc_feature (18)..(18): n is a, c, g, or t
  misc_feature (38)..(38): n is a, c, g, or t
cccgggccttgataccangacttccgtgccagatgatncagaggctcattccagctcgtgccgaattgggcaccagcggcacgagctgaaaagctataatgacagtcctgatgtcattgtagaggctcagtttgatggcagcgactcagaagatggacatggcatcacacaaaatgtgctggttgatggtgttaagaaactctcagtttgtgtttctgagaaaggaagagaggatggtgatgcaccggttacaaaagatgagaccacctgcatttcacaagacacaagagctttatcggagaaatccctgcaaagatcagcaaaggtcattgcctacagattttctccacgtgtccaaatggctttcacctgagctacttgttgaagatctcgtgtgattcagtcaggactgtatttggtcatttaatcagaaaagttagagcagagaatcataaaaagtgaattaaaaaaaaaaactttaaacatataaatacgaatccatcttcctgcctttggataaggggtcaaggccttttctttgagtgtgggtatgttgattggagttctgtgttatctttcttgcttaaaccacacttgtaatgcagcatttatcactttgagttttggtggagtgagaatttagacagtggagaagcagtatgaatatagactctcttcagatttgtacagtttttgctccaatttttttgttgttaccatgcccatacctaatttaaaaataattttaatgtcttttttagtttttccaaagtattcaatttagttatagaaacaattgtttttatattcctatttcaccattttggcagtgagccaagatcacaccactgcacttcagcctgggtgacagagcaaggtctccaagaaaaaaaaaagtgtgcatgtggtattggtattgtgtgtgcgcacacacac

SEQ ID NO: 29150 - DNA, 472 bp, Homo sapiens
tcacatatggctttctatggcaataacagtagttcacatccttgttttaaagggctagatagtattgtattgtgtggatcttccataatttaatgacattttctcccgttgatagatgtgtgtttggttgcttccatgtttttccctgctctgtgcaatgctaggatggacatccttgaactccatccttgtgcatttgcttggtcctttctttaagataagttcttaggaaaggagctgctgagtgtgtgcattttcatcattgccgttctgctctctagaggggagaatctttcccatctcacaactctctccctctatggccccacggctctcctttccagcgaggcaggcagctgaaggacttccctcttctctgagcacagggccacctcattctggtcccatgggacaaagcagccatatccaggccacagaaagcaaagccaggagagagaacaacgagcggtgt

SEQ ID NO: 29151 - DNA, 839 bp, Homo sapiens
tctagctatctatgtcattttgtttgtgtgatagcttttcaggaccatggtgactggataaatcaggttctgcgctccgtctccccatttccaggtggcttctgcctgttcagtcctgacactgttataatgccattttatcgtttagacatttgtatgtaaacaaatcttgaccactggaatagtggaagggggttctcttctggggagaaggaggaggcattcaacctgtcagcaagcaaaggagctgggcagggcctggaaagcaggagaccaggttttgggagacccagggcacagggtagccagagcagggacccccaggcctgagtgctcctccagtcccttatgtgagcagggctcacaaggcctgccctcccactgcctctcatactccatggggacaaaaagacatatctaggggtgcttgtttgcaatttctgaatttgaagactgagtaacgaatgtcagagtcctgcgttatgccctcttggggtcttgctgcccaaagtgagatcagaggagcactttgggggcttgttggaaatgcagaatcttaccctcccatactggctgtatctgacaaggttttcagtgattcccgtgcacttgtggagaatcacaggtctaatgtgtaccaacggggaaaaagaagggaaatttacaggggcaggagcgcaggatgctctcctgggactgcagagaagttctgaggacctggctttgcggtcctctcatggattcatgggtttgttctctgggctcaaaattatatcccaggattgggagagcaattttacagtagggacttctgcttctggatcatccttgggtcagaa

SEQ ID NO: 29152 - DNA, 315 bp, Homo sapiens
gccctctttgaatgttacagtcaccaggaagaggggtttaaatctctcaaatgggtcaagtcctgttctaagacctttatgacttgccatacagtatatttgtcaagcaagggtaacgttatgattgtgaagaacaggcactgggggagatgaatgagagatctcttcagcagcaactccattcttgtaaacttggctcacatttttagtgacgtgttcttttagtgtcctagctagtctgttgttcagatcatcatgcagccccagccctgttcaatggtggtatatcattcctttgagctttagcttttacca

SEQ ID NO: 29153 - DNA, 841 bp, Homo sapiens
caagatcttccagggtaagttcatggagaaaaaagagaaaggatgaaaagaaagtgaagaacttcagaaaatttaatagatttcagagacagagtcccaattcaagacgaaaagcaaagtgacaagaaaaaaagttaacagtagtttagaaacgaggttatttgtgcttgaactaggaaagaggcaggtggaaggaaaaggaaattaattatagagaatatttaggaggtatcaataagtcttggtggctgagtgtacagaagataagatagaaggaggaaaataggggaatctcaagttctagtttgggcagatacgtggatagcaacatcacatccattacaatgaaatggttctgttggcaaaatggtggccacagacagctttgaggacataaaggttcttgagttataaaggataaagaaacagttaaatcaagcaggagacaactcagcatgcttccagagatgcaggtttctctggtcctagtagagctgacaatgtaactgggaaaatgggatttgaaggggaattctccttgggcattctcacagtgatctccatggcccctaaccccaccagctgcactgttctagaggctcttatcaccagtcggcctgctccccaggtacaagtaactaatgcataataaatcagcacatttcagagcacagggacaaaggctgaaccaaatgtaaatttctcaggtgtggcatttcttggaaggcttaggcttcaaatctacaatctattttctaacctttcagtgtatttgctctattaaactagcaggtctaatcttcttgtttatctaaagcaatttcttacattttatcaggaa

SEQ ID NO: 29154 - DNA, 381 bp, Homo sapiens
gcacgaaagttccttcccttcaatccctgcgctgggacccggggaccctggcgttcctgattccaacccagggagggcctcgggccagctaggggtatcgcaaagtgggcagaaggccctgaggggaaggttaggtttgagggaggggatgtgaggcacctgtggcaggaaaaaaaaaaatcgcgccgccgagaagcgggcctggtcccccatgcacgaaactgccttcccttcaacccctgctctgggtcccagggaacctggcgcccctgattcgaacccatggagcttctcgggcccgctagggtaccccaatagcggcagaaggcccctgaggtgaaggtaagatttgagggaggggaggtgaagcacctgtgtcag

SEQ ID NO: 29155 - DNA, 523 bp, Homo sapiens
gttggcacgaggagccactttgagttcaggggacatggttttctccagcttcactagtgttgcatctggtacaaggggttaagtgctaaacccctgtaggattgtcacagtgaagccagataacagagtaaccgcaaagagatttaattctgtagtcccacaaaggagggtgtgtaaagagtgtacaacagtgtcagagtttggaaaccaagggttgacaaagttggttctctggaatctgggggtaccagttaaaaggttaaaaggagtcattgttttctgaaactatccaagagttacagccatgtttttttgtttttgtttttgtttttaagatttcgggggaatcttattttctcacatgtttctggaatttttcttttttttttaatttaagttccagggtacatgtgcaggatgtgcaggtttgttacataggtaaatgtgtgctatggtggtgtgctgcacctatcaacccatgaccaaggtattaagctcagcaagcattagctatttttcctaa

SEQ ID NO: 29156 - DNA, 388 bp, Homo sapiens
agagcttctggaggtgggggagatgtaactgagtgttgcagagctagctttagttctcggtgggctaactcaccttactgttggcattaccaaaggcttcccaagtttcatagaccatgcactgcacttatgaccttgtgggaacgtagtatgaacaggatttatatcattggttttcatagaaacagaatagctactcttgtttttgttttagtggctgtactataaggaaaagcatagttaagaaagggccttggtcaactagagcaataacgttttcatgcttcatatggttgttatgccagtttttattagggaatttttttccttttgtttttgatttctttgacctatatggctgtacttttaggaatattgtcatctattg

SEQ ID NO: 29157 - DNA, 359 bp, Homo sapiens
cttatataggattacatatttttattgaacctgagctgcttcaagtaacaatcatttgctctttaatagtcataagtttatacctcttaagttttaatattttccccctacccccaccatcttccaaactaaaaataggtttctgctatctttaaaaggttaataagaaattaaaaagaattggaacaatatgcagacataatcatggcctagaaatggaggtggtcaacaaaatagtttatggcacagattcagagtgagactttgtgggtttgaatgcagattctaccactttctagctgagtgggcctcagcaagctacttactttctctaagcctgtttccttatctgtaaatat

SEQ ID NO: 29158 - DNA, 93 bp, Homo sapiens
gcaagatctgcacaagtcagttttgagtgactaatagaccctctcctcttgatcctgctgcatttcattttcacaacatcttccaatgaagta

SEQ ID NO: 29159 - DNA, 139 bp, Homo sapiens
tacctcatttgacttctcagaagcattaaacacttccttctcttggcctctgggagaccactgtccttgttttcttcctacttcccttggtctcctttgctggctcctcctcctctgattggaaaatacagtattgaac

SEQ ID NO: 29160 - DNA, 477 bp, Homo sapiens
tatggtcatatgcacataaaaagtaatatgtattactcttcccatatacttagtcgttacccctctattttaccatatgctcactactgttgagggcttgcctactcactcctgtggttggagtcaggaccacataagatggtctataatatgagcttgagggatggctaggaaagattctctgatttaaaacacctctgctgagattctgtcttccatgattcaattatttgggttattaagcaaactgcattagcatacaatacagttggaacggttagcatgtaataataataatgcaaactaacatttgtacagctttccaattataaagtactttctcatttttcatgttaatactttagatctagattatttttcactttgtagatgatgcaagagtccagaataattatgtaccttgtccaaattcatgtaaataacacatcttagaaccagccaaacaatgtaggtaaa

SEQ ID NO: 29161 - DNA, 452 bp, Homo sapiens
taatttaaattggtcatttgggttaatcacatagaaggtgacgttccattttgtttttgtatgacttgcattcttcaacatttttcatccacagtgcgataaaataatatcatgttcattctcttctatacctttacatttgtgtttccctatggcctttataaataaaacaaacaatttcaatagcaaatccttgcgtgaagtgagttagtgcatctggctcctcccattttcctgttgcaacccaaggactttgagggtcatcatcatatctacctataggccagcaataattttcatgattgggtaactctagtactatggatatgaaaatgtaatactacatttcttaaaaaattacttctattttagtagatctctatataactaccttctggaataacaatattatgtggattattttttctaattaaaatattaaatctttattt

SEQ ID NO: 29162 - DNA, 202 bp, Homo sapiens
ccacatttggcccatcagccatagtttcccaacctctgctttggaaggcctaactcagttaaacattacaagttcatgcagcacggtgtgatggctcacgcctgtgatcctagcacttttggaggcttatgtgggtggatcgcttgagctgaggagtttgagactgggcaacatggtgaagccgtgtttctacaaaaaatac

SEQ ID NO: 29163 - DNA, 1412 bp, Homo sapiens
ggaaggctcaatgaaaagcagaaagtccaatttggactgacagcaaatcccaaagcaatgattttaccttaaaatccagggctcctaggccagtctgtgaacagctcatttccagaatttttgtttatgagagggcaaaatggagaactctgtctttcaagcttttctttcaacagatgatttgaaacaaaagcagcacactcatgaaggcgtatgtctgctaaatggttgctatcttaatctttagccacagtttatcaaaacatgtaggaatgggttgagaaattaactggtgctaagattatcagcatggacaagttcctggggagggcctggcgacatgatcaaagctaatggtccctctcccaggagcaaagagcctactatttcatgcatgatgatgttgggctctggcactggaaatctttgctcaggtccattctaagtgtcgaaatggtgtaattaatggttagcctgggtatgcactattcaatcaggcaatttttttttttttttttttttttttactaaatccgaacattaatgctttctcattgtgggaaatgagagctgggataaagacatgctcaactcaacagaacaaacacaacctatatgtgactttatgttagtctaggaactgtgcactgatgcacacccaggaggcactaagttaacacacatgcatgcatacctgcctgcctgctgggtaaggagggctgggcaggggaggggggccgccctggctgggggacacggctggggccattgttgccactttctcctctttgtagacatcaatttttacaaagggccgaatgataaaggtccacaagacctcacccagaacggctgttgcaggaagcagaggcctgagcagcctatagccagaagcccaggcagggggtgtgccaactacacaggcccacatgaagagcctccatgaggaagacgttatggcaagaatcctctaagtctccaagggacgagatcagaacaatgtatggaaggtgaagtgatacagatttcagcttaataaaaggaaggcggcccgaaaaatggaactgttcaaaaccacaatggcttcatttaatgggttcgatgtccccagtctgcaggaatgctgtagaagattcaggtagtgagaaatacctcaacagacaagaaagctacttcaaggacttccttcggcaaggcctttcaaacaagttttaacattgaaaacacccatccttcaaagagcttgaagccccaagtgtccatcttccaggatgcacaagactccccaagccttcatcctcccattactatttaatatccacactacattgttcggcacttggtttccctccagtatgcaccgtggcagccagtaagacacccccagggagcacaaccgcagctcactattt

SEQ ID NO: 29164 - DNA, 870 bp, Homo sapiens
  misc_feature (25)..(25): n is a, c, g, or t
tgtggcgttctagaggatccctgcngtgctgggataaagacatgctcaactcaacagaacaaacacaacctatatgtgactttatgttagtctaggaactgtgcactgatgcacacccaggaggcactaagttaacacacatgcatgcatacctgcctgcctgctgggtaaggagggctgggcaggggaggggggccgccctggctgggggacacggctggggccattgttgccactttctcctctttgtagacatcaatttttacaaagggccgaatgataaaggtccacaagacctcacccagaacggctgttgcaggaagcagaggcctgagcagcctatagccagaagcccaggcagggggtgtgccaactacacaggcccacatgaagagcctccatgaggaagacgttatggcaagaatcctctaagtctccaagggacgagatcagaacaatgtatggaaggtgaagtgatacagatttcagcttaataaaaggaaggcggcccgaaaaatggaactgttcaaaaccacaatggcttcatttaatgggttcgatgtccccagtctgcaggaatgctgtagaagattcaggtagtgagaaatacctcaacagacaagaaagctacttcaaggacttccttcggcaaggcctttcaaacaagttttaacattgaaaacacccatccttcaaagagcttgaagccccaagtgtccatcttccaggatgcacaagactccccaagccttcatcctcccattactatttaatatccacactacattgttcggcacttggtttccctccagtatgcaccgtggcagccagtaagacacccccagggagcacaaccgcagctcactattt

SEQ ID NO: 29165 - DNA, 1359 bp, Homo sapiens
ggaaggctcaatgaaaagcagaaagtccaatttggactgacagcaaatcccaaagcaatgattttaccttaaaatccagggctcctaggccagtctgtgaacagctcatttccagaatttttgtttatgagagggcaaaatggagaactctgtctttcaagcttttctttcaacagatgatttgaaacaaaagcagcacactcatgaaggcgtatgtctgctaaatggttgctatcttaatctttagccacagtttatcaaaacatgtaggaatgggttgagaaattaactggtgctaagattatcagcatggacaagttcctggggagggcctggcgacatgatcaaagctaatggtccctctcccaggagcaaagagcctactatttcatgcatgatgatgttgggctctggcactggaaatctttgctcaggtccattctaagtgtcgaaatggtgtaattaatggttagcctgggtatgcactattcaatcaggcaatttttttttttttttttttttttttactaaatccgaacattaatgctttctcattgtgggaaatgagagctgggataaagacatgctcaactcaacagaacaaacacaacctatatgtgactttatgttagtctaggaactgtgcactgatgcacacccaggaggcactaagttaacacacatgcatgcatacctgcctgcctgctgggtaaggagggctgggcaggggaggggggccgccctggctgggggacacggctggggccattgttgccactttctcctctttgtagacatcaatttttacaaagggccgaatgataaaggtccacaagacctcacccagaacggctgttgcaggaagcagaggcctgagcagcctatagccagaagcccaggcagggggtgtgccaactacacaggcccacatgaagagcctccatgaggaagacgttatggcaagaatcctctaagtctccaagggacgagatcagaacaatgtatggaaggtgaagtgatacagatttcagcttaataaaaggaaggcggcccgaaaaatggaactgttcaaaaccacaatggcttcatttaatgggttcgatgtccccagtctgcaggaatgctgtagaagattcaggtagtgagaaatacctcaacagaacattgaaaacacccatccttcaaagagcttgaagccccaagtgtccatcttccaggatgcacaagactccccaagccttcatcctcccattactatttaatatccacactacattgttcggcacttggtttccctccagtatgcaccgtggcagccagtaagacacccccagggagcacaaccgcagctcactattt

SEQ ID NO: 29166 - DNA, 294 bp, Homo sapiens
caacgtggcagcctcagatagcatttcaagagaggtaggcctcggctctggaatttgaataatatcacttctgacaccttctattggtcaaagcaagtcatgaagccagccgtattcatgaggttctggagtaggctttgcctcttgataggaggagctgcaaaacatttgtcaccacatttaatctaccacaggatacaaggcttctcaagatcttgtcccagactgtcacttctccaacctcatttccttgctcaaactctttgcaatagccattctgaactatgtgcactt

SEQ ID NO: 29167 - DNA, 789 bp, Homo sapiens
agagttttcagagtaccctgctgtggccttggaaacagaaaacccacacagaggtcaaacgcagttctcgtggagtcaccttgtcatcctgctttgttttggaaggaactgggtcggaggcagcacagtaggactacagcatctttaacccttgtgcctagcagagttccacatacatgaaataagatgctttgggaaatcattcttctttttgcaacgtcagtgacttgaaccagaaactgatattgactcacttgggctctgactctttccaagttacacatctgggggcctaaggaactgccccatgagttcccggagctgcgatgggcatgggacgggaagctttgtaagcaattaatcacacagttagcctcatctgatcaccactggccacgatcaggccctctgaaagtgcctagttggatgcttgccaatctgctatgccttggaggaaaaaatcatttcaatttaagaaaatagacacagaagcaaaaaaccaaagtgagcctggaaggtttgcctgtctgtgacagtctacagagcagctgtttgtgcctgtcacctgctcaggctctcacggtgactgcatggggagggcagggtgtgtgcattgatacctgccgtgcccagtgtacaccgaggtttgcccatgctgcagctggaaggctgcagaacaaaggttcgttccaacctctacacttgaattgcattctgcgtcatcatcctgccttctagaacaacatccaactccgtgggctgccttttaaaatcttgatggagggggag

SEQ ID NO: 29168 - DNA, 720 bp, Homo sapiens
ccacatcctgcatctccctccagcttcagggaggattccaggagtggcgtggggctagagtggcctgagagacttcagggacaagtgcctagcagagttccacatacatgaaataagatgctttgggaaatcattcttctttttgcaacgtcagtgacttgaaccagaaactgatattgactcacttgggctctgactctttccaagttacacatctgggggcctaaggaactgccccatgagttcccggagctgcgatgggcatgggacgggaagctttgtaagcaattaatcacacagttagcctcatctgatcaccactggccacgatcaggccctctgaaagtgcctagttggatgcttgccaatctgctatgccttggaggaaaaaatcatttcaatttaagaaaatagacacagaagcaaaaaaccaaagtgagcctggaaggtttgcctgtctgtgacagtctacagagcagctgtttgtgcctgtcacctgctcaggctctcacggtgactgcatggggagggcagggtgtgtgcattgatacctgccgtgcccagtgtacaccgaggtttgcccatgctgcagctggaaggctgcagaacaaaggttcgttccaacctctacacttgaattgcattctgcgtcatcatcctgccttctagaacaacatccaactccgtgggctgccttttaaaatcttgatggagggggag

SEQ ID NO: 29169 - DNA, 847 bp, Homo sapiens
cccggtttccatggtgacggggcgccaggctagggcggcctggccactgagccggggtgcagtggcagcgggagagtacctggcgatggcgatatgagcggtgcgggggtggcggctgggacgcggccccccagctcgccgaccccgggctctcggcgccggcgccagcgcccctctgtgggcgtccagtccttgaggccgcagagcccgcagctcaggcagagcgacccgcagaaacggaacctggacctggagaaaagcctgcagttcctgcagcagcagcactcggagatgctggccaagctccatgaggagatcgagcatctgaagcgggaaaacaagggtgagccggcgcggggccctaggccggccctgcctccccaggcacactcaacactgccgctcccgcagcacagaaacacagccatcaactccagcacacgcctgggctcagggggaacacaggacgatctccattacaagctcataatgaatcagacatcacagaagaaagacagcctctccatgtcaagcttccagtctgtcaagtccatctctaattcaggcaaggccaggccccagcccggctccttcaacaagcaagattcaaaagctgacgtctcccagaaggcggacctggaagaggagcccctacttcacaacagcaagctggacaaagttcctggggtacaagggcaggccaggtaaggcttgggtgttcctggggtgcaagggcaggccaggtaagtcttgcctgcaccctaagggccccatgactacatttactaggctcacgccctgcagtcagccaactgctctgcccctagctccaggggcctgtctcctg

SEQ ID NO: 29170 - DNA, 1498 bp, Homo sapiens
cccggtttccatggtgacggggcgccaggctagggcggcctggccactgagccggggtgcagtggcagcgggagagtacctggcgatggcgatatgagcggtgcgggggtggcggctgggacgcggccccccagctcgccgaccccgggctctcggcgccggcgccagcgcccctctgtgggcgtccagtccttgaggccgcagagcccgcagctcaggcagagcgacccgcagaaacggaacctggacctggagaaaagcctgcagttcctgcagcagcagcactcggagatgctggccaagctccatgaggagatcgagcatctgaagcgggaaaacaaggatctccattacaagctcataatgaatcagacatcacagaagaaagatggcccctcaggaaaccacctttccagggcctctgctcccttgggcgctcgctgggtctgcatcaacggagtgtgggtagagccgggaggacccagccctgccaggctgaaggagggctcctcacggacacacaggccaggaggcaagcgtgggcgtcttgcgggcggtagcgccgacactgtgcgctctcctgcagacagcctctccatgtcaagcttccagtctgtcaagtccatctctaattcaggcaaggccaggccccagcccggctccttcaacaagcaagattcaaaagctgacgtctcccagaaggcggacctggaagaggagcccctacttcacaacagcaagctggacaaagttcctggggtacaagggcaggccagaaaggagaaagcagaggcctctaatgcaggagctgcctgtatggggaacagccagcaccagggcaggcagatgggggcgggggcacaccccccaatgatcctgccccttcccctgcgaaagcccaccacacttaggcagtgcgaagtgctcatccgcgagctgtggaataccaacctcctgcagacccaagagctgcggcacctcaagtccctcctggaagggagccagaggccccaggcagccccggaggaagctagctttcccagggaccaagaagccacgcatttccccaaggtctccaccaagagcctctccaagaaatgcctgagcccacctgtggcggagcgtgccatcctgcccgcactgaagcagaccccgaagaacaactttgccgagaggcagaagaggctgcaggcaatgcagaaacggcgcctgcatcgctcagtgctttgagccaccccaatctggtcagtgccaggcccaccaacctgcagctggagactggctctctatagcatttcctgatacttccgctacttttaggcctggctaaattccaagacagataacactcaagatagataaagtacttgatctccaaactgacaaactgtttattttctagctgttattttgctatttggcatttacataaaagcacacgatgaagcaggtatcgccttacctgttgaaactgaaaataaagcttgtttatttccaa

SEQ ID NO: 29171 - DNA, 1759 bp, Homo sapiens
cccggtttccatggtgacggggcgccaggctagggcggcctggccactgagccggggtgcagtggcagcgggagagtacctggcgatggcgatatgagcggtgcgggggtggcggctgggacgcggccccccagctcgccgaccccgggctctcggcgccggcgccagcgcccctctgtgggcgtccagtccttgaggccgcagagcccgcagctcaggcagagcgacccgcagaaacggaacctggacctggagaaaagcctgcagttcctgcagcagcagcactcggagatgctggccaagctccatgaggagatcgagcatctgaagcgggaaaacaagggtgagccggcgcggggccctaggccggccctgcctccccaggcacactcaacactgccgctcccgcagcacagaaacacagccatcaactccagcacacgcctgggctcagggggaacacaggacgggtcagacacacctctgttaaaaactttatagaggggcccgggcgcggcggctcacgcctgtaattccagcactttgggaggccgagacgggcggatcacgaggtcaggagatcgagaccatcctggctaacacgatctccattacaagctcataatgaatcagacatcacagaagaaagatggcccctcaggaaaccacctttccagggcctctgctcccttgggcgctcgctgggtctgcatcaacggagtgtgggtagagccgggaggacccagccctgccaggctgaaggagggctcctcacggacacacaggccaggaggcaagcgtgggcgtcttgcgggcggtagcgccgacactgtgcgctctcctgcagacagcctctccatgtcaagcttccagtctgtcaagtccatctctaattcaggcaaggccaggccccagcccggctccttcaacaagcaagattcaaaagctgacgtctcccagaaggcggacctggaagaggagcccctacttcacaacagcaagctggacaaagttcctggggtacaagggcaggccagaaaggagaaagcagaggcctctaatgcaggagctgcctgtatggggaacagccagcaccagggcaggcagatgggggcgggggcacaccccccaatgatcctgccccttcccctgcgaaagcccaccacacttaggcagtgcgaagtgctcatccgcgagctgtggaataccaacctcctgcagacccaagagctgcggcacctcaagtccctcctggaagggagccagaggccccaggcagccccggaggaagctagctttcccagggaccaagaagccacgcatttccccaaggtctccaccaagagcctctccaagaaatgcctgagcccacctgtggcggagcgtgccatcctgcccgcactgaagcagaccccgaagaacaactttgccgagaggcagaagaggctgcaggcaatgcagaaacggcgcctgcatcgctcagtgctttgagccaccccaatctggtcagtgccaggcccaccaacctgcagctggagactggctctctatagcatttcctgatacttccgctacttttaggcctggctaaattccaagacagataacactcaagatagataaagtacttgatctccaaactgacaaactgtttattttctagctgttattttgctatttggcatttacataaaagcacacgatgaagcaggtatcgccttacctgttgaaactgaaaataaagcttgtttatttccaa

SEQ ID NO: 29172 - DNA, 937 bp, Homo sapiens
gcggccgcctactactactaaattgtcggccgctcgacgggacaggccccagtcccagagacccccacctggtgcccagagcacctgctcagtgggagaggggaaccaggccctcttccccacattggcctgggcgctgcctggggaggtatgctgggtgggtggttagacgcacctgggcaggtcacctctggctgctgcaatgactgtttcagaaaggagaaagcagaggcctctaatgcaggagctgcctgtatggggaacagccagcaccagggcaggcagatgggggcgggggcacaccccccaatgatcctgccccttcccctgcgaaagcccaccacacttaggcagtgcgaagtgctcatccgcgagctgtggaataccaacctcctgcagacccaagagctgcggcacctcaagtccctcctggaagggagccagaggccccaggcagccccggaggaagctagctttcccagggaccaagaagccacgcatttccccaaggtctccaccaagagcctctccaagaaatgcctgagcccacctgtggcggagcgtgccatcctgcccgcactgaagcagaccccgaagaacaactttgccgagaggcagaagaggctgcaggcaatgcagaaacggcgcctgcatcgctcagtgctttgagccaccccaatctggtcagtgccaggcccaccaacctgcagctggagactggctctctatagcatttcctgatacttccgctacttttaggcctggctaaattccaagacagataacactcaagatagataaagtacttgatctccaaactgacaaactgtttattttctagctgttattttgctatttggcatttacataaaagcacacgatgaagcaggtatcgccttacctgttgaaactgaaaataaagcttgtttatttccaa

SEQ ID NO: 29173 - DNA, 1481 bp, Homo sapiens
cccggtttccatggtgacggggcgccaggctagggcggcctggccactgagccggggtgcagtggcagcgggagagtacctggcgatggcgatatgagcggtgcgggggtggcggctgggacgcggccccccagctcgccgaccccgggctctcggcgccggcgccagcgcccctctgtgggcgtccagtccttgaggccgcagagcccgcagctcaggcagagcgacccgcagaaacggaacctggacctggagaaaagcctgcagttcctgcagcagcagcactcggagatgctggccaagctccatgaggagatcgagcatctgaagcgggaaaacaagggtgagccggcgcggggccctaggccggccctgcctccccaggcacactcaacactgccgctcccgcagcacagaaacacagccatcaactccagcacacgcctgggctcagggggaacacaggacgggtcagacacacctctgttaaaaactttatagaggggcccgggcgcggcggctcacgcctgtaattccagcactttgggaggccgagacgggcggatcacgaggtcaggagatcgagaccatcctggctaacacgatctccattacaagctcataatgaatcagacatcacagaagaaagatggcccctcaggaaaccacctttccagggcctctgctcccttgggcgctcgctgggtctgcatcaacggagtgtgggtagagccgggaggacccagccctgccaggctgaaggagggctcctcacggacacacaggccaggaggcaagcgtgggcgtcttgcgggcggtagcgccgacactgtgcgctctcctgcagacagcctctccatgtcaagcttccagtctgtcaagtccatctctaattcaggtgagcaggctggcgtccatgtgctcacaggggtgagtgccccacggggaccccagcctgggtggcctctaggggtgctgaccaggcgccctctgctgggccaagctccaggatttggggatgaaggtgcagctgaaaagagccctgcaagctgaagccaccgggaggggattaagggggggtgggcaggaccagggaccagtcacagggcagtaaggcctcacagcaggcaccccagggcggggcagcaagcaggcaggaggggcctccccgggtggccttctagggaggatgtaccctggctgcccagcagcagccctgcttggccgtgtccctgccacaagcaggcaggacacaggagggatggcactgcccacggagccctgggctcatggcaccttctgcagagtgagccgggagcagagagcctcttttccccactctgtgaggccgggcattttcctcagccctgccctaacccccaccattcctgtgatgggcccaggtgctagacgggccttgtccttgccgaggaaacccatgcaggctgggtcccaagcctctcatgcagtttcattttacc

SEQ ID NO: 29174 - DNA, 1300 bp, Homo sapiens
cccggtttccatggtgacggggcgccaggctagggcggcctggccactgagccggggtgcagtggcagcgggagagtacctggcgatggcgatatgagcggtgcgggggtggcggctgggacgcggccccccagctcgccgaccccgggctctcggcgccggcgccagcgcccctctgtgggcgtccagtccttgaggccgcagagcccgcagctcaggcagagcgacccgcagaaacggaacctggacctggagaaaagcctgcagttcctgcagcagcagcactcggagatgctggccaagctccatgaggagatcgagcatctgaagcgggaaaacaaggatctccattacaagctcataatgaatcagacatcacagaagaaagacagcctctccatgtcaagcttccagtctgtcaagtccatctctaattcaggcaaggccaggccccagcccggctccttcaacaagcaagattcaaaagctgacgtctcccagaaggcggacctggaagaggagcccctacttcacaacagcaagctggacaaagttcctggggtacaagggcaggccagaaaggagaaagcagaggcctctaatgcaggagctgcctgtatggggaacagccagcaccagggcaggcagatgggggcgggggcacaccccccaatgatcctgccccttcccctgcgaaagcccaccacacttaggcagtgcgaagtgctcatccgcgagctgtggaataccaacctcctgcagacccaagagctgcggcacctcaagtccctcctggaagggagccagaggccccaggcagccccggaggaagctagctttcccagggaccaagaagccacgcatttccccaaggtctccaccaagagcctctccaagaaatgcctgagcccacctgtggcggagcgtgccatcctgcccgcactgaagcagaccccgaagaacaactttgccgagaggcagaagaggctgcaggcaatgcagaaacggcgcctgcatcgctcagtgctttgagccaccccaatctggtcagtgccaggcccaccaacctgcagctggagactggctctctatagcatttcctgatacttccgctacttttaggcctggctaaattccaagacagataacactcaagatagataaagtacttgatctccaaactgacaaactgtttattttctagctgttattttgctatttggcatttacataaaagcacacgatgaagcaggtatcgccttacctgttgaaactgaaaataaagcttgtttatttccaa

SEQ ID NO: 29175 - DNA, 1905 bp, Homo sapiens
cccggtttccatggtgacggggcgccaggctagggcggcctggccactgagccggggtgcagtggcagcgggagagtacctggcgatggcgatatgagcggtgcgggggtggcggctgggacgcggccccccagctcgccgaccccgggctctcggcgccggcgccagcgcccctctgtgggcgtccagtccttgaggccgcagagcccgcagctcaggcagagcgacccgcagaaacggaacctggacctggagaaaagcctgcagttcctgcagcagcagcactcggagatgctggccaagctccatgaggagatcgagcatctgaagcgggaaaacaagggtgagccggcgcggggccctaggccggccctgcctccccaggcacactcaacactgccgctcccgcagcacagaaacacagccatcaactccagcacacgcctgggctcagggggaacacaggacggtaagcccgccctgccacgctgagctgtcccctcctcccagagggagacccgcgtggcccccgggcagtgccgaccctgtctgcctgtctcgtagggcagcagcatttcagatgctgactccgccaatcctctcctctccaagcagggtcagacacacctctgttaaaaactttatagaggggcccgggcgcggcggctcacgcctgtaattccagcactttgggaggccgagacgggcggatcacgaggtcaggagatcgagaccatcctggctaacacgatctccattacaagctcataatgaatcagacatcacagaagaaagatggcccctcaggaaaccacctttccagggcctctgctcccttgggcgctcgctgggtctgcatcaacggagtgtgggtagagccgggaggacccagccctgccaggctgaaggagggctcctcacggacacacaggccaggaggcaagcgtgggcgtcttgcgggcggtagcgccgacactgtgcgctctcctgcagacagcctctccatgtcaagcttccagtctgtcaagtccatctctaattcaggcaaggccaggccccagcccggctccttcaacaagcaagattcaaaagctgacgtctcccagaaggcggacctggaagaggagcccctacttcacaacagcaagctggacaaagttcctggggtacaagggcaggccagaaaggagaaagcagaggcctctaatgcaggagctgcctgtatggggaacagccagcaccagggcaggcagatgggggcgggggcacaccccccaatgatcctgccccttcccctgcgaaagcccaccacacttaggcagtgcgaagtgctcatccgcgagctgtggaataccaacctcctgcagacccaagagctgcggcacctcaagtccctcctggaagggagccagaggccccaggcagccccggaggaagctagctttcccagggaccaagaagccacgcatttccccaaggtctccaccaagagcctctccaagaaatgcctgagcccacctgtggcggagcgtgccatcctgcccgcactgaagcagaccccgaagaacaactttgccgagaggcagaagaggctgcaggcaatgcagaaacggcgcctgcatcgctcagtgctttgagccaccccaatctggtcagtgccaggcccaccaacctgcagctggagactggctctctatagcatttcctgatacttccgctacttttaggcctggctaaattccaagacagataacactcaagatagataaagtacttgatctccaaactgacaaactgtttattttctagctgttattttgctatttggcatttacataaaagcacacgatgaagcaggtatcgccttacctgttgaaactgaaaataaagcttgtttatttccaa

SEQ ID NO: 29176 - DNA, 1179 bp, Homo sapiens
cccggtttccatggtgacggggcgccaggctagggcggcctggccactgagccggggtgcagtggcagcgggagagtacctggcgatggcgatatgagcggtgcgggggtggcggctgggacgcggccccccagctcgccgaccccgggctctcggcgccggcgccagcgcccctctgtgggcgtccagtccttgaggccgcagagcccgcagctcaggcagagcgacccgcagaaacggaacctggacctggagaaaagcctgcagttcctgcagcagcagcactcggagatgctggccaagctccatgaggagatcgagcatctgaagcgggaaaacaaggatctccattacaagctcataatgaatcagacatcacagaagaaagacagcctctccatgtcaagcttccagtctgtcaagtccatctctaattcaggcaaggccaggccccagcccggctccttcaacaagcaagattcaaaagctgacgtctcccagaaggcggacctggaagaggagcccctacttcacaacagcaagctggacaaagttcctggggtacaagggcaggccagcccaccacacttaggcagtgcgaagtgctcatccgcgagctgtggaataccaacctcctgcagacccaagagctgcggcacctcaagtccctcctggaagggagccagaggccccaggcagccccggaggaagctagctttcccagggaccaagaagccacgcatttccccaaggtctccaccaagagcctctccaagaaatgcctgagcccacctgtggcggagcgtgccatcctgcccgcactgaagcagaccccgaagaacaactttgccgagaggcagaagaggctgcaggcaatgcagaaacggcgcctgcatcgctcagtgctttgagccaccccaatctggtcagtgccaggcccaccaacctgcagctggagactggctctctatagcatttcctgatacttccgctacttttaggcctggctaaattccaagacagataacactcaagatagataaagtacttgatctccaaactgacaaactgtttattttctagctgttattttgctatttggcatttacataaaagcacacgatgaagcaggtatcgccttacctgttgaaactgaaaataaagcttgtttatttccaa

SEQ ID NO: 29177 - DNA, 722 bp, Homo sapiens
tggggaggtatgctgggtgggtggttagacgcacctgggcaggtcacctctggctgctgcaatgactgtttcagaaaggagaaagcagaggcctctaatgcaggagctgcctgtatggggaacagccagcaccagggcaggcagatgggggcgggggcacaccccccaatgatcctgccccttcccctgcgaaagcccaccacacttaggcagtgcgaagtgctcatccgcgagctgtggaataccaacctcctgcagacccaagaggtgaggccctgggtggtgggggtggccctgggcagtctggcaccgccacaggccccaccatgcccctgcccctgcctttcagctgcggcacctcaagtccctcctggaagggagccagaggccccaggcagccccggaggaagctagctttcccaggtgagtgcctggtgcacccctgccccatccctggggtcctatccacagctcactgctgactcttccttcacccagggaccaagaagccacgcatttccccaaggtctccaccaagagcctctccaagaaatggtaagtcccacaggcatggggacagtggggcagccctgcagcctgggccccagggagggagtggggaagggagggtggcagcgcagaagcagagctcgctgaggcctctctgtgcccccgtgagggccatgcaggccgcactccccacacactccactcccggggat

SEQ ID NO: 29178 - DNA, 1873 bp, Homo sapiens
atgacaggaagtgacccgttaaggaagcagcacatcgctgcattcggctggttttcagggtcttgttcccaatcagtttccagccaacaccagggtgtcctagtccgcagaggtgtgggggacacactccataatctctacttttctttttgtgcagctgagtcatggagctttcagccccagcacatggctcctccttaactgcgtctgctcaacctccctcagccctgtgaacagcatccccgcacacagacgcagagcaggactctctctgctgccacttcaccttcctgagagaggaccagcggccagagcctcagtgactgccaccctggaggacagggcacaacaaccgtttctggagagaatgggaggattccagaggggcaaatatggaactatggctgaaggtagatcagaagataacttgtctgcaacaccaccggcattgaggattatcctagtgggcaaaacaggctgcgggaaaagtgccacagggaacagcatccttggccagcccgtgtttgagtccaagctgagggcccagtcagtgaccaggacgtgccaggtgaaaacaggaacatggaacgggaggaaagtcctggtggttgacacgccctccatctttgagtcacaggccgatacccaagagctgtacaagaacatcggggactgctacctgctctctgccccggggccccacgtcctgcttctggtgatccagctggggcgtttcactgctcaggacacagtggccatcaggaaggtgaaagaggtctttgggacaggggccatgagacatgtggtcatcctcttcacccacaaagaggacttagggggccaggccctggatgactatgtagcaaacacggacaactgcagcctgaaagacctggtgcgggagtgtgagagaaggtactgtgccttcaacaactggggctctgtggaggagcagaggcagcagcaggcagagctcctggctgtgattgagaggctggggagggagcgagagggctccttccacagcaatgacctcttcttggatgcccagctgctccaaagaactggagctggggcctgccaggaagactacaggcagtaccaggccaaagtggaatggcaggtggagaagcacaagcaagagctgagggagaacgagagtaactgggcatacaaggcgctcctcagagtcaaacacttgatgcttttgcattatgagatttttgtttttctattgttgtgcagcatactttttttcattatttttctgttcatctttcattacatttaaatctctggaccctggagcacttctaatgtatcaccccatggagtcattgttctaataatcaccaattcagactcagatcctcgtggtctatggagcatgctgcttgctgtctgtgcagctcccatttccccttcttcctgatagacttggagctgtgtgcctccactccaaggctgcctgcctgctgtaaacactattccactctgtctgccaacaactgcttcaggaatgggcctgagatcccatgcaggtccctgagaagtgagtaaaagtccgcagaggtggggatggaagatctctccttagatagaacctgtcttcctccctggcattgtggggtctgggcgtgacactgggactctcagcagctttgtgctgccaacctgagattgaaggcagtgcctcagagcagcacagagagttggggccccctgagccctgagccaccagccctgcagcctgccctatctccgcatttccagttgtattagccaatagatttcctacttatttaagctatttgagctccgggtctcttctacctgcattctaaaacattcaaagtaataaaaatttctccac

SEQ ID NO: 29179 - DNA, 1829 bp, Homo sapiens
ttctgcactcacagccgaagggaaagcagcaggttggggcttcttgtggccaacttcagagcctgtcaccaggaaaggtaagcatgggaggaaggaagatggcgacagatgaagaaaatgtctatggtttagaagagaacgctcagtcccggcaggagtccacgcggaggctcatccttgttgggagaacaggggccgggaagagcgccactgggaacagcatcctgggccagagacggttcttctccaggctgggggccacgtctgtgaccagggcctgcaccacgggcagccgcaggtgggacaagtgccacgtggaagtcgtggacactccggacattttcagctcccaagtgtccaagacagatcctggctgtgaggagagaggtcactgctacctgctctcggcccccggaccccacgcgctgctcctggtgacccagttgggtcggttcaccgcccaggaccagcaggcggtgaggcaggtgagggacatgttcggggaggacgtcctaaaatggatggtcatcgtcttcaccaggaaggaggacctggccgggggctccctgcacgattacgtgagcaacacagagaaccgggccttgcgcgagctggtggccgagtgcgggggccgggtctgtgcctttgataaccgggccaccggccgggagcaggaagcccaggtggagcagctgctggggatggtcgagggcttggtgctggagcacaagggcgcccattactccaacgaggtgtatgagctggcgcaggtgctgcgctgggcaggccctgaggagcggctccggcgggtggcggagcgcgtggcagccaggtgcagaggaggccatggggcgcctggctgtcggcccggctgtggaagtggctgaagtcccccaggagctggaggctgggcctggccctgctgctggggggcgcgctcctgttctgggtgctgctccacaggcggtggtcggaggccgttgcggaggtcgggcctgactgacagcgcaggtcctaaaactgaaggcaacttggttaagggaggctgaattcttggagctgaagggaaaacttcattccaacggaaggaatcctgtagtttcaggcatagttttaatgacacagaaaactttgctgcatcacctttgcaactttgccaaagctcagagttcactttttaagtttttaactcattttaaatgatgtgtatgcagagttttaaaataaattcgtctaacaataacttcctttggtagttttggtagtctaatgtcaagtagcttgtagtggggacaaacgcatggcacagggaaaacaagtgccattattttcgagctttttaaaaaatttagactgcccctccttgataattttctagttcttatacatgggtagataggttcctttgtgatccttgtagacttttagcatcaataaaagaaatgtgggggttacacacgtgaatgttacttctgagacatcagtttatagtacaatgatttactaccaaaaagatgaatgtaactgtactgttacaaagtggaaaataacagtttccacttttctagaacatattatggttcatggcattccaaaatgaagtaagggccgggcgaggtggctcacgcctgtaatcccaacactttgggaggtcgaggcaggtggatcacctgaggtcaggagttcgagaccagcctgaccaacatggcgaaaccccatctctactaaaaatacaaaaattagccaggcgtgatagcactcgcctgtaatcccagccattcaggaggctgaggcgggagaatcacttgatgcagtgagccgagatcgtg

SEQ ID NO: 29180 - DNA, 1810 bp, Homo sapiens
atgacaggaagtgacccgttaaggaagcagcacatcgctgcattcggctggttttcagggtcttgttcccaatcagtttccagccaacaccagggtgtcctagtccgcagaggtgtgggggacacactccataatctctacttttctttttgtgcagctgagtcatggagctttcagccccagcacatggctcctccttaactgcgtctgctcaacctccctcagccctgtgaacagcatccccgcacacagacgcagagcaggactctctctgctgccacttcaccttcctgagagaggaccagcggccagagcctcagtgactgccaccctggaggacagggcacaacaaccgtttctggagagaatgggaggattccagaggggcaaatatggaactatggctgaaggtagatcagaagataacttgtctgcaacaccaccggcattgaggattatcctagtgggcaaaacaggctgcgggaaaagtgccacagggaacagcatccttggccagcccgtgtttgagtccaagctgagggcccagtcagtgaccaggacgtgccaggtgaaaacaggaacatggaacgggaggaaagtcctggtggttgacacgccctccatctttgagtcacaggccgatacccaagagctgtacaagaacatcggggactgctacctgctctctgccccggggccccacgtcctgcttctggtgatccagctggggcgtttcactgctcaggacacagtggccatcaggaaggtgaaagaggtctttgggacaggggccatgagacatgtggtcatcctcttcacccacaaagaggacttagggggccaggccctggatgactatgtagcaaacacggacaactgcagcctgaaagacctggtgcgggagtgtgagagaaggtactgtgccttcaacaactggggctctgtggaggagcagaggcagcagcaggcagagctcctggctgtgattgagaggctggggagggagcgagagggctccttccacagcaatgacctcttcttggatgcccagctgctccaaagaactggagctggggcctgccaggaagactacaggcagtaccaggccaaagtggaatggcaggtggagaagcacaagcaagagctgagggagaacgagagtaactgggcatacaaggcgctcctcagagtcaaacacttgatgcttttgcattatgagatttttgtttttctattgttgtgcagcatactttttttcattatttttctgttcatctttcattacatttaaatctctggaccctggagcacttctaatgtatcaccccatggagtcattgttctaataatcaccaattcagactcagatcctcgtggtctatggagcatgctgcttgctgtctgtgcagctcccatttccccttcttcctgatagacttggagctgtgtgcctccactccaaggctgcctgcctgctgtaaacactattccactctgtctgccaacaactgcttcaggaatgggcctgagatcccatgcaggtccctgagaagtgagtaaaagtccgcagaggtggggatggaagatctctccttagatagaacctgtcttcctccctggcattgtggggtctgggcgtgacactgggactctcagcagctttgtgctgccaacctgagattgaaggcagtgcctcagagcagcacagagagttggggccccctgagccctgagccaccagccctgcagcctgccctatctccgcatttccagttgtattagccaatagatttcctacttatttaagcta

SEQ ID NO: 29181 - DNA, 2092 bp, Homo sapiens
ttctgcactcacagccgaagggaaagcagcaggttggggcttcttgtggccaacttcagagcctgtcaccaggaaaggtaagcatgggaggaaggaagatggcgacagatgaagaaaatgtctatgacggttcttctccaggctgggggccacgtctgtgaccagggcctgcaccacgggcagccgcaggtgggacaagtgccacgtggaagtcgtggacactccggacattttcagctcccaagtgtccaagacagatcctggctgtgaggagagaggtcactgctacctgctctcggcccccggaccccacgcgctgctcctggtgacccagttgggtcggttcaccgcccaggaccagcaggcggtgaggcagctgagtcatggagctttcagccccagcacatggctcctccttaactgcgtctgctcaacctccctcagccctgtgaacagcatccccgcacacagacgcagagcaggactctctctgctgccacttcaccttcctgagagaggaccagcggccagagcctcagtgactgccaccctggaggacagggcacaacaaccgtttctggagagaatgggaggattccagaggggcaaatatggaactatggctgaaggtagatcagaagataacttgtctgcaacaccaccggcattgaggattatcctagtgggcaaaacaggctgcgggaaaagtgccacagggaacagcatccttggccagcccgtgtttgagtccaagctgagggcccagtcagtgaccaggacgtgccaggtgaaaacaggaacatggaacgggaggaaagtcctggtggttgacacgccctccatctttgagtcacaggccgatacccaagagctgtacaagaacatcggggactgctacctgctctctgccccggggccccacgtcctgcttctggtgatccagctggggcgtttcactgctcaggacacagtggccatcaggaaggtgaaagaggtctttgggacaggggccatgagacatgtggtcatcctcttcacccacaaagaggacttagggggccaggccctggatgactatgtagcaaacacggacaactgcagcctgaaagacctggtgcgggagtgtgagagaaggtactgtgccttcaacaactggggctctgtggaggagcagaggcagcagcaggcagagctcctggctgtgattgagaggctggggagggagcgagagggctccttccacagcaatgacctcttcttggatgcccagctgctccaaagaactggagctggggcctgccaggaagactacaggcagtaccaggccaaagtggaatggcaggtggagaagcacaagcaagagctgagggagaacgagagtaactgggcatacaaggcgctcctcagagtcaaacacttgatgcttttgcattatgagatttttgtttttctattgttgtgcagcatactttttttcattatttttctgttcatctttcattacatttaaatctctggaccctggagcacttctaatgtatcaccccatggagtcattgttctaataatcaccaattcagactcagatcctcgtggtctatggagcatgctgcttgctgtctgtgcagctcccatttccccttcttcctgatagacttggagctgtgtgcctccactccaaggctgcctgcctgctgtaaacactattccactctgtctgccaacaactgcttcaggaatgggcctgagatcccatgcaggtccctgagaagtgagtaaaagtccgcagaggtggggatggaagatctctccttagatagaacctgtcttcctccctggcattgtggggtctgggcgtgacactgggactctcagcagctttgtgctgccaacctgagattgaaggcagtgcctcagagcagcacagagagttggggccccctgagccctgagccaccagccctgcagcctgccctatctccgcatttccagttgtattagccaatagatttcctacttatttaagctatttgagctccgggtctcttctacctgcattctaaaacattcaaagtaataaaaatttctccac

SEQ ID NO: 29182 - DNA, 1709 bp, Homo sapiens
atgacaggaagtgacccgttaaggaagcagcacatcgctgcattcggctggttttcagggtcttgttcccaatcagtttccagccaacaccagggtgtcctagtccgcagaggtgtgggggacacactccataatctctacttttctttttgtgcagctgagtcatggagctttcagccccagcacatggctcctccttaactgcgtctgctcaacctccctcagccctgtgaacagcatccccgcacacagacgcagagcaggactctctctgctgccacttcaccttcctgagagaggaccagcggccagagcctcagtgactgccaccctggaggacagggcacaacaaccgtttctggagagaatgggaggattccagaggggcaaatatggaactatggctgaaggtagatcagaagataacttgtctgcaacaccaccggcattgaggattatcctagtgggcaaaacaggctgcgggaaaagtgccacagggaacagcatccttggccagcccgtgtttgagtccaagctgagggcccagtcagtgaccaggacgtgccaggtgaaaacaggaacatggaacgggaggaaagtcctggtggttgacacgccctccatctttgagtcacaggccgatacccaagagctgtacaagaacatcggggactgctacctgctctctgccccggggccccacgtcctgcttctggtgatccagctggggcgtttcactgctcaggacacagtggccatcaggaaggtgaaagaggtctttgggacaggggccatgagacatgtggtcatcctcttcacccacaaagaggacttagggggccaggccctggatgactatgtagcaaacacggacaactgcagcctgaaagacctggtgcgggagtgtgagagaaggtactgtgccttcaacaactggggctctgtggaggagcagaggcagcagcaggcagagctcctggctgtgattgagaggctggggagggagcgagagggctccttccacagcaatgacctcttcttggatgcccagctgctccaaagaactggagctggggcctgccaggaagactacaggcagtaccaggccaaagtggaatggcaggtggagaagcacaagcaagagctgagggagaacgagagtaactgggcatacaaggcgctcctcagagtcaaacacttgatgcttttgcattatgagatttttgtttttctattgttgtgcagcatactttttttcattatttttctgttcatctttcattacatttaaatctctggaccctggagcacttctaatgtatcaccccatggagtcattgttctaataatcaccaattcagactcagatcctcgtggtctatggagcatgctgcttgctgtctgtgcagctcccatttccccttcttcctgatagacttggagctgtgtgcctccactccaaggctgcctgcctgctgtaaacactattccactctgtctgccaacaactgcttcaggaatgggcctgagatcccatgcaggtccctgagaagtgagtaaaagtccgcagaggtggggatggaagatctctccttagatagaacctgtcttcctccctggcattgtggggtctgggcgtgacactgggactctcagcagctctgtgctgctctcgagcactgccttcaatctcaggttggcagcgtcga

SEQ ID NO: 29183 - DNA, 1744 bp, Homo sapiens
accgtcagggtgggaaagcggtcataccggtccccctataccatttcctctcacgtcagttcttcgtgtccctgatccccacttccatcctcccactggacagtaccttgtaatttcctctccgccgctggaatgtccatttgacacaaagactttctgggactggaagtttccactacttcaaataaaccaatcttatttacagcaaggcaatttttttttctctattctggagagaatgggaggattccagaggggcaaatatggaactatggctgaaggtagatcagaagataacttgtctgcaacaccaccggcattgaggattatcctagtgggcaaaacaggctgcgggaaaagtgccacagggaacagcatccttggccagcccgtgtttgagtccaagctgagggcccagtcagtgaccaggacgtgccaggtgaaaacaggaacatggaacgggaggaaagtcctggtggttgacacgccctccatctttgagtcacaggccgatacccaagagctgtacaagaacatcggggactgctacctgctctctgccccggggccccacgtcctgcttctggtgatccagctggggcgtttcactgctcaggacacagtggccatcaggaaggtgaaagaggtctttgggacaggggccatgagacatgtggtcatcctcttcacccacaaagaggacttagggggccaggccctggatgactatgtagcaaacacggacaactgcagcctgaaagacctggtgcgggagtgtgagagaaggtactgtgccttcaacaactggggctctgtggaggagcagaggcagcagcaggcagagctcctggctgtgattgagaggctggggagggagcgagagggctccttccacagcaatgacctcttcttggatgcccagctgctccaaagaactggagctggggcctgccaggaagactacaggcagtaccaggccaaagtggaatggcaggtggagaagcacaagcaagagctgagggagaacgagagtaactgggcatacaaggcgctcctcagagtcaaacacttgatgcttttgcattatgagatttttgtttttctattgttgtgcagcatactttttttcattatttttctgttcatctttcattacatttaaatctctggaccctggagcacttctaatgtatcaccccatggagtcattgttctaataatcaccaattcagactcagatcctcgtggtctatggagcatgctgcttgctgtctgtgcagctcccatttccccttcttcctgatagacttggagctgtgtgcctccactccaaggctgcctgcctgctgtaaacactattccactctgtctgccaacaactgcttcaggaatgggcctgagatcccatgcaggtccctgagaagtgagtaaaagtccgcagaggtggggatggaagatctctccttagatagaacctgtcttcctccctggcattgtggggtctgggcgtgacactgggactctcagcagctttgtgctgccaacctgagattgaaggcagtgcctcagagcagcacagagagttggggccccctgagccctgagccaccagccctgcagcctgccctatctccgcatttccagttgtattagccaatagatttcctacttatttaagctatttgagctccgggtctcttctacctgcattctaaaacattcaaagtaataaaaatttctccac

SEQ ID NO: 29184 - DNA, 1392 bp, Homo sapiens
atgacaggaagtgacccgttaaggaagcagcacatcgctgcattcggctggttttcagggtcttgttcccaatcagtttccagccaacaccagggtgtcctagtccgcagaggtgtgggggacacactccataatctctacttttctttttgtgcagctgagtcatggagctttcagccccagcacatggctcctccttaactgcgtctgctcaacctccctcagccctgtgaacagcatccccgcacacagacgcagagcaggactctctctgctgccacttcaccttcctgagagaggaccagcggccagagcctcagtgactgccaccctggaggacagggcacaacaaccgtttctggagagaatgggaggattccagaggggcaaatatggaactatggctgaaggtagatcagaagataacttgtctgcaacaccaccggcattgaggattatcctagtgggcaaaacaggctgcgggaaaagtgccacagggaacagcatccttggccagcccgtgtttgagtccaagctgagggcccagtcagtgaccaggacgtgccaggtgaaaacaggaacatggaacgggaggaaagtcctggtggttgacacgccctccatctttgagtcacaggccgatacccaagagctgtacaagaacatcggggactgctacctgctctctgccccggggccccacgtcctgcttctggtgatccagctggggcgtttcactgctcaggacacagtggccatcaggaaggtgaaagaggtctttgggacaggggccatgagacatgtggtcatcctcttcaccctgagccaccagccctgcagcctgccctatctccgcatttccagttgtattagccaatagatttcctacttatttaagctatttgagctccgggtctcttctacctgcattctaaaacattcaaagtaataaaaatttctccacattcctttttatcctttaaatctgttggaacttcccagtccacatgcttcctttgagcaagtggcatctagaataaaggaacagggttggcttttcttgttcctaaaattaggaagaacctcctgctcctactgaagtgcctgccacatagtggacattccctgaactctgagtaaagcaaaacactttcagatggatggattgcattgacgaatgggagtgggagagggtcaaggaaatggggtgccctgtacgcagggctttctctgtgctttcttctcagtttggccaggggcccaaaagaaacacagctcacatttcaatgctctgcaaggaatcactttggcaaatgttcacacatgagaaaggttaagcaaactctttctccttctccactgtaaaatgtccttggatcaactctccagctc

SEQ ID NO: 29185 - DNA, 2301 bp, Homo sapiens
atgacaggaagtgacccgttaaggaagcagcacatcgctgcattcggctggttttcagggtcttgttcccaatcagtttccagccaacaccagggtgtcctagtccgcagaggtgtgggggacacactccataatctctacttttctttttgtgcagctgagtcatggagctttcagccccagcacatggctcctccttaactgcgtctgctcaacctccctcagccctgtgaacagcatccccgcacacagacgcagagcaggactctctctgctgccacttcaccttcctgagagaggaccagcggccagagcctcagtgactgccaccctggaggacagggcacaacaaccgtttctggagagaatgggaggattccagaggggcaaatatggaactatggctgaaggtagatcagaagataacttgtctgcaacaccaccggcattgaggattatcctagtgggcaaaacaggctgcgggaaaagtgccacagggaacagcatccttggccagcccgtgtttgagtccaagctgagggcccagtcagtgaccaggacgtgccaggtgaaaacaggaacatggaacgggaggaaagtcctggtggttgacacgccctccatctttgagtcacaggccgatacccaagagctgtacaagaacatcggggactgctacctgctctctgccccggggccccacgtcctgcttctggtgatccagctggggcgtttcactgctcaggacacagtggccatcaggaaggtgaaagaggtctttgggacaggggccatgagacatgtggtcatcctcttcacccacaaagaggacttagggggccaggccctggatgactatgtagcaaacacggacaactgcagcctgaaagacctggtgcgggagtgtgagagaaggtactgtgccttcaacaactggggctctgtggaggagcagaggcagcagcaggcagagctcctggctgtgattgagaggctggggagggagcgagagggctccttccacagcaatgacctcttcttggatgcccagctgctccaaagaactggagctggggcctgccaggaagactacaggcagtaccaggccaaagtggaatggcaggtggagaagcacaagcaagagctgagggagaacgagagtaactgggcatacaaggcgctcctcagagtcaaacacttgatgcttttgcattatgagatttttgtttttctattgttgtgcagcatactttttttcattatttttctgttcatctttcattacatttaaatctctggaccctggagcacttctaatgtatcaccccatggagtcattgttctaataatcaccaattcagactcagatcctcgtggtctatggagcatgctgcttgctgtctgtgcagctcccatttccccttcttcctgatagacttggagctgtgtgcctccactccaaggctgcctgcctgctgtaaacactattccactctgtctgccaacaactgcttcaggaatgggcctgagatcccatgcaggtccctgagaagtgagtaaaagtccgcagaggtggggatggaagatctctccttagatagaacctgtcttcctccctggcattgtggggtctgggcgtgacactgggactctcagcagctttgtgctgccaacctgagattgaaggcagtgcctcagagcagcacagagagttggggccccctgagccctgagccaccagccctgcagcctgccctatctccgcatttccagttgtattagccaatagatttcctacttatttaagctatttgagctccgggtctcttctacctgcattctaaaacattcaaagtaataaaaatttctccacattcctttttatcctttaaatctgttggaacttcccagtccacatgcttcctttgagcaagtggcatctagaataaaggaacagggttggcttttcttgttcctaaaattaggaagaacctcctgctcctactgaagtgcctgccacatagtggacattccctgaactctgagtaaagcaaaacactttcagatggatggattgcattgacgaatgggagtgggagagggtcaaggaaatggggtgccctgtacgcagggctttctctgtgctttcttctcagtttggccaggggcccaaaagaaacacagctcacatttcaatgctctgcaaggaatcactttggcaaatgttcacacatgagaaaggttaagcaaactctttctccttctccactgtaaaatgtccttggatcaactctccagctc

SEQ ID NO: 29186 - DNA, 807 bp, Homo sapiens
ttctgcactcacagccgaagggaaagcagcaggttggggcttcttgtggccaacttcagagcctgtcaccaggaaaggtaagcatgggaggaaggaagatggcgacagatgaagaaaatgtctatggtttagaagagaacgctcagtcccggcaggagtccacgcggaggctcatccttgttgggagaacaggggccgggaagagcgccactgggaacagcatcctgggccagagacggttcttctccaggctgggggccacgtctgtgaccagggcctgcaccacgggcagccgcaggtgggacaagtgccacgtggaagtcgtggacactccggacattttcagctcccaagtgtccaagacagatcctggctgtgaggagagaggtcactgctacctgctctcggcccccggaccccacgcgctgctcctggtgacccagttgggtcggttcaccgcccaggaccagcaggcggtgaggcaggtgagggacatgttcggggaggacgtcctaaaatggatggtcatcgtcttcaccaggaaggaggacctggccgggggctccctgcacgattacgtgagcaacacagagaaccgggttcctagagcagcgtagacagctggtaaactgaagagcacaacttatattcttatgaaaggaatttgtacctttggggtataatcttgtggcgcgtgacctcgttattgttacagctgagtgtaatggtagtcctgtggagaatgtatctggcattatggtactatattattaggtatatttgtatttaacatggtgctaatatatg

SEQ ID NO: 29187 - DNA, 2131 bp, Homo sapiens
ttctgcactcacagccgaagggaaagcagcaggttggggcttcttgtggccaacttcagagcctgtcaccaggaaaggtaagcatgggaggaaggaagatggcgacagatgaagaaaatgtctatgcgggaagagcgccactgggaacagcatcctgggccagagacggttcttctccaggctgggggccacgtctgtgaccagggcctgcaccacgggcagccgcaggtgggacaagtgccacgtggaagtcgtggacactccggacattttcagctcccaagtgtccaagacagatcctggctgtgaggagagaggtcactgctacctgctctcggcccccggaccccacgcgctgctcctggtgacccagttgggtcggttcaccgcccaggaccagcaggcggtgaggcagctgagtcatggagctttcagccccagcacatggctcctccttaactgcgtctgctcaacctccctcagccctgtgaacagcatccccgcacacagacgcagagcaggactctctctgctgccacttcaccttcctgagagaggaccagcggccagagcctcagtgactgccaccctggaggacagggcacaacaaccgtttctggagagaatgggaggattccagaggggcaaatatggaactatggctgaaggtagatcagaagataacttgtctgcaacaccaccggcattgaggattatcctagtgggcaaaacaggctgcgggaaaagtgccacagggaacagcatccttggccagcccgtgtttgagtccaagctgagggcccagtcagtgaccaggacgtgccaggtgaaaacaggaacatggaacgggaggaaagtcctggtggttgacacgccctccatctttgagtcacaggccgatacccaagagctgtacaagaacatcggggactgctacctgctctctgccccggggccccacgtcctgcttctggtgatccagctggggcgtttcactgctcaggacacagtggccatcaggaaggtgaaagaggtctttgggacaggggccatgagacatgtggtcatcctcttcacccacaaagaggacttagggggccaggccctggatgactatgtagcaaacacggacaactgcagcctgaaagacctggtgcgggagtgtgagagaaggtactgtgccttcaacaactggggctctgtggaggagcagaggcagcagcaggcagagctcctggctgtgattgagaggctggggagggagcgagagggctccttccacagcaatgacctcttcttggatgcccagctgctccaaagaactggagctggggcctgccaggaagactacaggcagtaccaggccaaagtggaatggcaggtggagaagcacaagcaagagctgagggagaacgagagtaactgggcatacaaggcgctcctcagagtcaaacacttgatgcttttgcattatgagatttttgtttttctattgttgtgcagcatactttttttcattatttttctgttcatctttcattacatttaaatctctggaccctggagcacttctaatgtatcaccccatggagtcattgttctaataatcaccaattcagactcagatcctcgtggtctatggagcatgctgcttgctgtctgtgcagctcccatttccccttcttcctgatagacttggagctgtgtgcctccactccaaggctgcctgcctgctgtaaacactattccactctgtctgccaacaactgcttcaggaatgggcctgagatcccatgcaggtccctgagaagtgagtaaaagtccgcagaggtggggatggaagatctctccttagatagaacctgtcttcctccctggcattgtggggtctgggcgtgacactgggactctcagcagctttgtgctgccaacctgagattgaaggcagtgcctcagagcagcacagagagttggggccccctgagccctgagccaccagccctgcagcctgccctatctccgcatttccagttgtattagccaatagatttcctacttatttaagctatttgagctccgggtctcttctacctgcattctaaaacattcaaagtaataaaaatttctccac

SEQ ID NO: 29188 - DNA, 1819 bp, Homo sapiens
atgacaggaagtgacccgttaaggaagcagcacatcgctgcattcggctggttttcagggtcttgttcccaatcagtttccagccaacaccagggtgtcctagtccgcagaggtgtgggggacacactccataatctctacttttctttttgtgcagctgagtcatggagctttcagccccagcacatggctcctccttaactgcgtctgctcaacctccctcagccctgtgaacagcatccccgcacacagacgcagagcaggactctctctgctgccacttcaccttcctgagagaggaccagcggccagagcctcagtgactgccaccctggaggacagggcacaacaaccgtttctggagagaatgggaggattccagaggggcaaatatggaactatggctgaaggtagatcagaagataacttgtctgcaacaccaccggcattgaggattatcctagtgggcaaaacaggctgcgggaaaagtgccacagggaacagcatccttggccagcccgtgtttgagtccaagctgagggcccagtcagtgaccaggacgtgccaggtgtttgagtcacaggccgatacccaagagctgtacaagaacatcggggactgctacctgctctctgccccggggccccacgtcctgcttctggtgatccagctggggcgtttcactgctcaggacacagtggccatcaggaaggtgaaagaggtctttgggacaggggccatgagacatgtggtcatcctcttcacccacaaagaggacttagggggccaggccctggatgactatgtagcaaacacggacaactgcagcctgaaagacctggtgcgggagtgtgagagaaggtactgtgccttcaacaactggggctctgtggaggagcagaggcagcagcaggcagagctcctggctgtgattgagaggctggggagggagcgagagggctccttccacagcaatgacctcttcttggatgcccagctgctccaaagaactggagctggggcctgccaggaagactacaggcagtaccaggccaaagtggaatggcaggtggagaagcacaagcaagagctgagggagaacgagagtaactgggcatacaaggcgctcctcagagtcaaacacttgatgcttttgcattatgagatttttgtttttctattgttgtgcagcatactttttttcattatttttctgttcatctttcattacatttaaatctctggaccctggagcacttctaatgtatcaccccatggagtcattgttctaataatcaccaattcagactcagatcctcgtggtctatggagcatgctgcttgctgtctgtgcagctcccatttccccttcttcctgatagacttggagctgtgtgcctccactccaaggctgcctgcctgctgtaaacactattccactctgtctgccaacaactgcttcaggaatgggcctgagatcccatgcaggtccctgagaagtgagtaaaagtccgcagaggtggggatggaagatctctccttagatagaacctgtcttcctccctggcattgtggggtctgggcgtgacactgggactctcagcagctttgtgctgccaacctgagattgaaggcagtgcctcagagcagcacagagagttggggccccctgagccctgagccaccagccctgcagcctgccctatctccgcatttccagttgtattagccaatagatttcctacttatttaagctatttgagctccgggtctcttctacctgcattctaaaacattcaaagtaataaaaatttctccac

SEQ ID NO: 29189 - DNA, 2571 bp, Homo sapiens
ttctgcactcacagccgaagggaaagcagcaggttggggcttcttgtggccaacttcagagcctgtcaccaggaaaggtaagcatgggaggaaggaagatggcgacagatgaagaaaatgtctatgacggttcttctccaggctgggggccacgtctgtgaccagggcctgcaccacgggcagccgcaggtgggacaagtgccacgtggaagtcgtggacactccggacattttcagctcccaagtgtccaagacagatcctggctgtgaggagagaggtcactgctacctgctctcggcccccggaccccacgcgctgctcctggtgacccagttgggtcggttcaccgcccaggaccagcaggcggtgaggcagctgagtcatggagctttcagccccagcacatggctcctccttaactgcgtctgctcaacctccctcagccctgtgaacagcatccccgcacacagacgcagagcaggactctctctgctgccacttcaccttcctgagagaggaccagcggccagagcctcagtgactgccaccctggaggacagggcacaacaaccgtttctggtaaggagaactgggtttatgctcacagagactttgggaattgaaaggatcacagtttggtcacagctgttcatttctgacatgaccttgcacagatcccctcacttctgggttcgctggtcagtaaaacggggcaatggtgatgagtgttgcgggcatcagcaggtgcacagctggtggagcacagcctgaagaatctgtgcctgcactcacagcccagtcccaggacagcgggctttgctgccccattgcccattacttagccaagtcgatctccatgaaactctcagggagtaaggctgaactgatcctctcatcagtgggacagatgggagaactgaagctcccagagggtgataggctttcccccatctcccctagcatgccggggcattcttctcaattttaccctcctaatttctcctgtcccagaccagccagacacgtaccatgtctcagacaagcctgggagctgaggatggattcttagggctccccagggcaaatgtgggatattttcccaccccaggagcctcatgttccaaacaagacccctgagtggaccttgtcttgtgactttcaacttctgaaaactaccccatgctcccccagatgccccacatttttcctatgacaccctgccggacgcacaccaaaccgcaaaacacatgattccaatacctggaaatacatgggctggggcagatgggtgaaggagatacttatgaacaaggaagacaagaagtggtttgatcttttctaaaatagtatggaagaggctgctttcttgtaatttgctaaaataagctcttctcatggtaaaatcaggttcatgcaattttcaaatcggaatgtgcattttgttcatttgcttcacccttttccctgagccagaccctcccaccagcttgccagaggctgctactgtcttgcttgcacactgccttccaatctctcatgaactttggtctcttttgtgggacgattagtaaaatttttcctttggagaagacgcctgtcttcattctcaattcctccacttttgtctgccctgtagaccaacacgtatcacattccttcaagcctacggtgtgtccaccacgctctattcagttcttttataatcttctccatgactcattttagcattgccatcagtatcctttctgactcacctgtgaacactttgttatttgtgaatatctgccaaaaaatgtattcctcaatgcagcctgatccactcagaaagcttggattgggagagctattgttgctggtcattggctaacataacatagtttgactggcttttgtgacaggcaattggctgttttaaaagaaaagacctcaattcagagaaactcctgccaccagcaattttatttttgaataaccttttataagaaatgcactcaagattttgcaataaaattctgtgtgttggttttagggtaggcttctagctgtccaattaatttgtctcctgaccagggagtggcagcattgtacacatgttccaagaggtttgttgacttttttggaaaagtctctttttccacctgtggaatcaaggacaatacacagcaaaaggagccatttcctgatgctagctccattgtaaatatgtgacctttggcaggtcatttaatgctcagtttccttgcattttaatagaaattttaagatcagttttgatcacatcacagggaatttgagagagcaattaaaataagaaggatgaaataactttgaaaattataaatgtattcacagaggcttattacaattatgatgttcataatcaatatcattaccactgtcatcttgacccttaccacatcattatgttgattccaaacctcagaaaacgtcatctaaagtagagaggatgtcagggaactggtgctattttagcaaaagccagaagcataatttaccagagacgagaacagggtgtgggagagaggaaaatgttcttctctgggcttaag

SEQ ID NO: 29190 - DNA, 1036 bp, Homo sapiens
atgacaggaagtgacccgttaaggaagcagcacatcgctgcattcggctggttttcagggtcttgttcccaatcagtttccagccaacaccagggtgtcctagtccgcagaggtgtgggggacacactccataatctctacttttctttttgtgcagctgagtcatggagctttcagccccagcacatggctcctccttaactgcgtctgctcaacctccctcagccctgtgaacagcatccccgcacacagacgcagagcaggactctctctgctgccacttcaccttcctgagagaggaccagcggccagagcctcagtgactgccaccctggaggacagggcacaacaaccgtttctggagagaatgggaggattccagaggggcaaatatggaactatggctgaaggtagatcagaagataacttgtctgcaacaccaccggcattgaggattatcctagtgggcaaaacaggctgcgggaaaagtgccacagggaacagcatccttggccagcccgtgtttgagtccaagctgagggcccagtcagtgaccaggacgtgccaggtgaaaacaggaacatggaacgggaggaaagtcctggtggttgacacgccctccatctttgagtcacaggccgatacccaagagctgtacaagaacatcggggactgctacctgctctctgccccggggccccacgtcctgcttctggtgatccagctggggcgtttcactgctcaggacacagtggccatcaggaaggtgaaagaggtctttgggacaggggccatgagacatgtggtcatcctcttcacccacaaagaggacttagggggccaggccctggatgactatgtagcaaacacggacaactgcagcagctttgtgctgccaacctgagattgaaggcagtgcctcagagcagcacagagagttggggccccctgagccctgagccaccagccctgcagcctgccctatctccgcatttccagttgtattagccaatagatttcctacttatttaagcta

SEQ ID NO: 29191 - DNA, 1425 bp, Homo sapiens
ttcctttgtcttcttgtcacaaaaagaatttcgtcagtctggaaggggagttttacttacgtaaatggatgtagaccagactcaagcatgtaagaactgtgttaatgtggatttctaagcctctgaatgaatttctaaggcacctaacctattgtttctgaaaatatttactttaaggttacaatcttaatctaaaagtggttcctgcttcataatgcctgtggacatgaagctaacaaatcttttcaaaatgtgttcatgtggtaattcactgcagcacaggagcaataatcagctatgtgcaggcatctatgctactgtctcttaaaatactttaaaagtaaggttagttattgtctattcgagtcagttagctcttacaattcatttgatagtgattatcagtacaatatattagtttgttggagtgtgagaataatggtgttaatccttagaaaaatgcaagaccaaagggaaatttaaattttgcatatttatgtttaatgtcaaatttatattcaaataaacggttatgattataactctttgtaaaagaaactccattttaagccccccagattatgatcactttcaaatacaggctcagaagtacagatttagagaaaaaggattcctcttagaggaatacatcatatatactgagacttctagcgagggaaggagtgtagttctggttcaactaagataaagtactgatgaaaggtcactggcagacaatacggagaaacagcctgccttgcaggattttttgtatgcctagtcagcctacccaaggacaatgtgtccagaatgacctctttactgcctgccagctaatcagttatcccataagaaatatgcaaacaagattcacacagcagagagcaattatttttctctccctctttcctctttgtcttaataaacgctctttttttatttgtggggtgaaatcaatctattgaggtatcgtctttgtaaacacataaacagcgtgctataattgactttgtgactttgaattattgacactgctctgtttcttttccaaagaacctttgcactgttgaaagagtaacttttccattataacctgagtcaagatgaagagaagcagggaatactgaatgaaagttacttttccatgcagcaggaaaaaacaagtttgctactatacaaatttatagaaaagtataaaattacatgtgaacttctttttctttttgtgtgtgccaaagttttttaaagatttatatctctactactcaaagcattcccatctctagcctgtattagttctgtcacctgaatcatttttcactcataaccacctggccattctttaacactcagttcatgtagattgtactaggcagtttaaatacattagattttataaacaaagacccagtgagcacagagcag

SEQ ID NO: 29192 - DNA, 393 bp, Homo sapiens
ttcctttgtcttcttgtcacaaaaagaatttcgtcagtctggaaggggagttttacttacgtaaatggatgtagaccagactcaagcatgtaagaactgtgttaatgtggatttctaagcctctgaatgaatttctaaggcacctaacctattgtttctgaaaatatttactttaaggaccctgtgaggtgatattatgacctccccttccctatgcctcagaagaaattgaggcaatgagaaataaagtggtttatccaagatcacacagcaagtggtagagccacaatctgaacgagggctgccctgaagggcagacaggtttattgggcaacagctgggaaaatcagcggttggacttggccacatgctccaagaaggccacacgtcctt

SEQ ID NO: 29193 - DNA, 654 bp, Homo sapiens
tgggaggcccttccgcaatcggagccctcacagaggccaaactgatataaatctgcttaggaggcctgattcacagacgctacaggatggagcggggcgcaggagccaagctgctgccgctgctgctgcttctgcgggcgactggtttcacatgtgcacaggcagatggccggaacggctacacggcggtcatcgaagtgaccagcgggggtccctggggcgactgggcctggcctgagatgtgtcccgatggattcttcgccagcgggttctcgctcaagctggggcgaatggagtgagccgctgtggtgtcgcggcggcgcctacctagtggctttctcgcttcgcgtggaggcacccacgaccctcggtgacaacacagcagcgaacaacgtgcgcttccgctgttcagacggcgaggaactgcaggggcctgggctgagctggggagactttggagactggagtgaccattgccccaagggcgcgtgcggcctgcagaccaagatccagggacctagaggcctcggcgatgacactgcgctgaacgacgcgcgcttattctgctgccgcagttgaacggcgccgccgccgccgctctctcccgggccaggaggctagtcccacctcttgctattaaagcttctctgagtt

SEQ ID NO: 29194 - DNA, 534 bp, Homo sapiens
tgggaggcccttccgcaatcggagccctcacagaggccaaactgatataaatctgcttaggaggcctgattcacagacgctacaggatggagcggggcgcaggagccaagctgctgccgctgctgctgcttctgcgggcgactggtttcacatgtgcacagctggggcgaatggagtgagccgctgtggtgtcgcggcggcgcctacctagtggctttctcgcttcgcgtggaggcacccacgaccctcggtgacaacacagcagcgaacaacgtgcgcttccgctgttcagacggcgaggaactgcaggggcctgggctgagctggggagactttggagactggagtgaccattgccccaagggcgcgtgcggcctgcagaccaagatccagggacctagaggcctcggcgatgacactgcgctgaacgacgcgcgcttattctgctgccgcagttgaacggcgccgccgccgccgctctctcccgggccaggaggctagtcccacctcttgctattaaagcttctctgagtt

SEQ ID NO: 29195 - DNA, 875 bp, Homo sapiens
tgggaggcccttccgcaatcggagccctcacagaggccaaactgatataaatctgcttaggaggcctgattcacagacgctacaggatggagcggggcgcaggagccaagctgctgccgctgctgctgcttctgcgggcgactggtttcacatgtgcacaggcagatggccggaacggctacacggcggtcatcgaagtgaccagcgggggtccctggggcgactgggcctggcctgagatgtgtcccgatggattcttcgccagcgggttctcgctcaaggttggggctcaggcgtaggtcctggagagggcggagatgcgtgggaccatagagccaaggatgataattccgtgactcgcccttgcccctctcctcgatacccaggtggagcctccccaaggcattcctggcgacgacactgcactgaatgggatcaggctgcactgcgcgcgcgggaacgtcctaggcaatacgcacgtggtagagtcccagtctggaagctggggcgaatggagtgagccgctgtggtgtcgcggcggcgcctacctagtggctttctcgcttcgcgtggaggcacccacgaccctcggtgacaacacagcagcgaacaacgtgcgcttccgctgttcagacggcgaggaactgcaggggcctgggctgagctggggagactttggagactggagtgaccattgccccaagggcgcgtgcggcctgcagaccaagatccagggacctagaggcctcggcgatgacactgcgctgaacgacgcgcgcttattctgctgccgcagttgaacggcgccgccgccgccgctctctcccgggccaggaggctagtcccacctcttgctattaaagcttctctgagtt

SEQ ID NO: 29196 - DNA, 770 bp, Homo sapiens
tgggaggcccttccgcaatcggagccctcacagaggccaaactgatataaatctgcttaggaggcctgattcacagacgctacaggatggagcggggcgcaggagccaagctgctgccgctgctgctgcttctgcgggcgactggtttcacatgtgcacaggcagatggccggaacggctacacggcggtcatcgaagtgaccagcgggggtccctggggcgactgggcctggcctgagatgtgtcccgatggattcttcgccagcgggttctcgctcaaggtggagcctccccaaggcattcctggcgacgacactgcactgaatgggatcaggctgcactgcgcgcgcgggaacgtcctaggcaatacgcacgtggtagagtcccagtctggaagctggggcgaatggagtgagccgctgtggtgtcgcggcggcgcctacctagtggctttctcgcttcgcgtggaggcacccacgaccctcggtgacaacacagcagcgaacaacgtgcgcttccgctgttcagacggcgaggaactgcaggggcctgggctgagctggggagactttggagactggagtgaccattgccccaagggcgcgtgcggcctgcagaccaagatccagggacctagaggcctcggcgatgacactgcgctgaacgacgcgcgcttattctgctgccgcagttgaacggcgccgccgccgccgctctctcccgggccaggaggctagtcccacctcttgctattaaagcttctctgagtt

SEQ ID NO: 29197 - DNA, 443 bp, Homo sapiens
gcttggaaagtctcaagggcttggtgaatggggggcccgcagaggcaacgcatctccctttgccttgcagctggggcgaatggagtgagccgctgtggtgtcgcggcggcgcctacctagtggctttctcgcttcgcgtggaggcacccacgaccctcggtgacaacacagcagcgaacaacgtgcgcttccgctgttcagacggcgaggaactgcaggggcctgggctgagctggggagactttggagactggagtgaccattgccccaagggcgcgtgcggcctgcagaccaagatccagggacctagaggcctcggcgatgacactgcgctgaacgacgcgcgcttattctgctgccgcagttgaacggcgccgccgccgccgctctctcccgggccaggaggctagtcccacctcttgctattaaagcttctctgagtt

SEQ ID NO: 29198 - DNA, 750 bp, Homo sapiens
tgggaggcccttccgcaatcggagccctcacagaggccaaactgatataaatctgcttaggaggcctgattcacagacgctacaggatggagcggggcgcaggagccaagctgctgccgctgctgctgcttctgcgggcgactggtttcacatgtgcacaggcagatggccggaacggctacacggcggtcatcgaagtgaccagcgggggtccctggggcgactgggcctggcctgagatgtgtcccgatggattcttcgccagcgggttctcgctcaaggtggagcctccccaaggcattcctggcgacgacactgcactgaatgggatcaggctgcactgcgcgcgcgggaacgtcctaggcaatacgcacgtgctggggcgaatggagtgagccgctgtggtgtcgcggcggcgcctacctagtggctttctcgcttcgcgtggaggcacccacgaccctcggtgacaacacagcagcgaacaacgtgcgcttccgctgttcagacggcgaggaactgcaggggcctgggctgagctggggagactttggagactggagtgaccattgccccaagggcgcgtgcggcctgcagaccaagatccagggacctagaggcctcggcgatgacactgcgctgaacgacgcgcgcttattctgctgccgcagttgaacggcgccgccgccgccgctctctcccgggccaggaggctagtcccacctcttgctattaaagcttctctgagtt

SEQ ID NO: 29199 - DNA, 299 bp, Homo sapiens
gcagtgaccgagatcatgccacgaactccagcctgggctgcctagcgagactatctcaaaaaaaaaaaaaaaaaaaaaaaaaaaaaaggaagtaagggaaaagagttagagttgagaaaccttttgagctaaagggagaaaagtaacaagtttggagttggagcagaggggcattgacagctattggtctcctttcgtggtggagtaggaagctaggtcatcttacagtaagggaagtagaatgggatgctctgcaaaatttatgtggtaaatgtttgaaccagatgctggggcaagag

SEQ ID NO: 29200 - DNA, 939 bp, Homo sapiens
atggacggggtgaatgatagctccttgcagggctttgttctgatgagcatatcggaccatccccagctggagatgatcttttttatagccatcctcttctcctatttgctgaccctacttgggaactcaaccatcatcttgctttcccgcctggaggcccggctccatacacccatgtacttcttcctcagcaacctctcctccttggaccttgctttcgctactagttcagtcccccaaatgctgatcaatttatggggaccaggcaagaccatcagctatggtggctgcataacccagctctatgtcttcctttggctgggggccaccgagtgcatcctgctggtggtgatggcatttgaccgctacgtggcagtgtgccggcccctccgctacaccgccatcatgaacccccagctctgctggctgctggctgtgattgcctggctgggtggcttgggcaactctgtgatccagtcaacattcactctgcagctcccattgtgtgggcaccggagggtggagggattcctctgcgaggtgcctgccatgatcaaactggcctgtggcgacacgagtctcaaccaggctgtgctcaatggtgtctgcaccttcttcactgcagtcccactaagcatcatcgtgatctcctactgcctcattgctcaggcagtgctgaaaatccactctgcagaggggaggcgaaaggcgttcaatacgtgcctctcccatctgctggtggtgttcctcttctatggctcagccagctatgggtatctgcttccggccaagaacagcaaacaggaccagggcaagttcatttccctgttctactcgttggtcacacccatggtgaatcccctcatctacacgctgcggaacatggaagtgaagggcgcactgaggaggttgctggggaaaggaagagaagttggctga

SEQ ID NO: 29201 - DNA, 295 bp, Homo sapiens
tcattagctttgagcatcaggaacatgacagagagaggacagaaacccggtgcagccgaggacagccagctgagcccttgctgagccagcgagatgcagcgtggtgccaccacatctggtctccaggagtcccaggagctcagacgtccgtcgtcttgtgacttcatgctcccctctgccgcgctcacgtgctgggcctgggcagaaaggcaacccaggaaatccattaaagcaagccaagacgacctttgcagcgtaacccaacgattccctaataaatcatgtttccaaggca

SEQ ID NO: 29202 - DNA, 245 bp, Homo sapiens
ttttgtagttaaggaaactgagctcgtaggcatttttgggacttcctggaagaaaattttacaatgccatgaatttggcagggcatatccttatctatcaattttcagacttaatatggtttggatgtgtgtctactccaaatctcaggcagaaatgtgaccctagtgttggaggtggggcctcgtgggaggcactggaacacgggagcagatcccttatgaatggcttggtgccatccccctgg

SEQ ID NO: 29203 - DNA, 450 bp, Homo sapiens
atacagcaaactctgaaagatggacagagagacaggagatggtcctttataatgcagtgtgatctgtgctgcaatagagatggaagagtgttctgatcggctggaaaacaacgcacatgggaagctgtacagaaatgagtggggaaagttttggaagctagaagttcaaaacgaggtgttggcagcaccatgctctctctgaagatgctaggaagaatctgctccatgcctttccattcgcttctggggtttcctgcaagccctgacattccttggcttgtagatgcatcaccccagtttccgcccccatcatcacatggcctcctctctgtgtgtgcctctgcgttccctctattcttcttctaaggacaccgacaccagtcatagtggattaagtgtccactcctaaccaattacatctgcaacaaccctatttccaaataaagtcac

SEQ ID NO: 29204 - DNA, 381 bp, Homo sapiens
atacagcaaactctgaaagatggacagagagacaggagatggtcctttataatgcagtgtgatctgtgctgcaatagagttttggaagctagaagttcaaaacgaggtgttggcagcaccatgctctctctgaagatgctaggaagaatctgctccatgcctttccattcgcttctggggtttcctgcaagccctgacattccttggcttgtagatgcatcaccccagtttccgcccccatcatcacatggcctcctctctgtgtgtgcctctgcgttccctctattcttcttctaaggacaccgacaccagtcatagtggattaagtgtccactcctaaccaattacatctgcaacaaccctatttccaaataaagtcac

SEQ ID NO: 29205 - DNA, 383 bp, Homo sapiens
tattctgtttctaggtctgctgtcacaaaataccagaaactgggtgtcttgttaaaacaacagaaattttttctctcacagttttggaagctagaagttcaaaacgaggtgttggcagcaccatgctctctctgaagatgctaggaagaatctgctccatgcctttccattcgcttctggggtttcctgcaagccctgacattccttggcttgtagatgcatcaccccagtttccgcccccatcatcacatggcctcctctctgtgtgtgcctctgcgttccctctattcttcttctaaggacaccgacaccagtcatagtggattaagtgtccactcctaaccaattacatctgcaacaaccctatttccaaataaagtcac

SEQ ID NO: 29206 - DNA, 341 bp, Homo sapiens
gaaggattccttgtggggtcaggcttctcaaactctgctgactttgcctcttccttttcctcttcctcatcaggtatcagagagtatttggtcccacctggttgcatgaaacaatcttttgcaaagtggcctttacagccacacttcttgcaggtagtgttcaatcaatatactctggttagcatgtaagtgtggggggatgggcaatgggtagagccttctctgtgctgtgtacatagcacagtgcctacacattctgtgccataagtatgttgaaaaactctcattactgaggtaggggtttaatgtccttactggagactatatttagctcttgaaag

SEQ ID NO: 29207 - DNA, 448 bp, Homo sapiens
cactttcagtgaaccttcggagggcgaaggggaagctttccttctttgaccctacacctgaatatctcccatgtgtacatacatgaggtatacatgttattaaactttgtttttctctcattttgttacagcagtccattccaaccaagagctcagaaaggggagagaaaaaattaattttttcctccttacactagtgatggtgcacagagtccatctggcaaggataaaggcagagacattctgttcattaaagcagcagtgatagggccagctctggtggctgtcccaagcagggggcaatgatgacttcactgagcagctctgcagcacaggttggggcactgttcctgtctgctagcctctaatcttttgtctctgggcctcccttggagcccttcagctgtttaattctttttgaaataaactcattttactgctgaaatga

SEQ ID NO: 29208 - DNA, 460 bp, Homo sapiens
tgcacgaaatcattcttttattcctgatcctgtttcctgtttatttcatgaacttgtctgtaggcagcatggtgctgggcgctgcaggggctcattaatgcatgagacacagattccactcaggagagagaagacgaacacagacacagtacacggtgggaaggggcacttccatgtctgcagccagagagccctttcagaatctgacccaaaagatggccagtattctaagaaaaagcacatatgcttacgatgtgcaaacagctgaaggtgttctttcaactatagtaaaaggggtgtctcggtggccacaggcggcccagatgaaggtgctgctggggaaaatgtcaccacgctggtcttgggaggctccatgagagggaggtgggacttgagaggggcttagagcctgggtgagaggcaaagaggaggccagagaccttctgggtagagaggaccc

SEQ ID NO: 29209 - DNA, 3049 bp, Homo sapiens
tgcacgaaatcattcttttattcctgatcctgtttcctgtttatttcatgaacttgtctgtaggcagcatggtgctgggcgctgcaggggctcattaatgcatgagacacagattccactcaggagagagaagacgaacacagacacagtacacggtgggaaggggcacttccatgtctgcagccagagagccctttcagaatctgacccaaaagatggccagtattctaagaaaaagcacatatgcttacgatgtgcaaacagctgaaggtgttctttcaactatagtaaaaggggtgtctcggtggccacaggcggcccagatgaagagacctgtctgggccgcagagaggagtctggaggtagggtccaagggccacgagccagtttgggctgctggaggggggcctggcaaggagggctctcggggaagcacctgtgggggtctgcttcctgaccccagggagctagaggcctccctccctccaggccccccgagccaggctgagccagccgctaggggcacggagcagtgcccaccttgcgcccagtgtggccagagcttcggccagaaggagctcagtgcgccgcaccagcgcgtgcatcgtggcccccggcctttcgctggtgctcagtgtcccaagagcttcacgcagcggaccacccccgccagccaccgtcgggcgcacgtggccgagtgcacctacacccgcgcccaatgcggcaagaccttcctccagcagtcgacgctcacacccactactgcgcgcacatcagggagaagccctacgagtgcgccaagctctttggccgcctgtccacgctgctggagcaccggcacatgcacacgggtgagcggcccttccagtgcacgcaatgtggctgctgcttcagccgcctgtccacgctgctggagcaccggcacacacacatcagcgagaagcccttccagtgtgcgcagtgcgacaagcgtttcacgcgtctggccaacctgaccgtgcaccagagagtgcacttgggcgagcgctccttccagtgcgcccagtacagcaggagattcatgcagaagcccggcttcctgcgtcatctgtgtggccactcgcaggagaagcactatccttgcagcccttgtggtgagagcttcacctgtccctcctggcttgtgcgtcaccaggacagccatgctagccaggcctctccatcttgcctggtttgtgagagggactcctcgaccgatgagccgcccacgggcctcaggggtgcagtgtgggggagcacccctagtaatccttctgccgcactcagatttgagggcactggtacagagctgggcctcaggaggtgccctggggacaggcagcggggcagtggtgatcaggaaggtcttgggtgggggtcccttgcccagttctctttctcgcgtgaagatggagaatgtgggtagcacccagagagctccctaaaggggctctgagggcccaggggcagttggtgccccttaaatctgagcaacctctcctgggggccacttcttggccaggtcaaagtattctggccatggtcttggcttcccgggggagggctgttctcccaggcactgagattgcccatgggccttctcgttgcagggaggcggctgggatagaggccagtcccaaacacctgagcctcactgaggggaaggcctgggcttggagatggggtgcgcaggagtggctggctttgccttgttctattaggcgagtgattttcagagacaaaggtccaagttaggagacgtaattactcagtgctttgaagggacatccaaggtgctcactcttagccatagccgttggtttcctggatgctgactgtgaagattctaaagtgcttcctagggtgggcggtggtggcaggaggccttggacggagtccagggccagacccagcctcctgtttaataggctgagcccaagcgtccctcagatgcgaatccaacagccttggtgagttgtaagatttcatggaaactttccctgacttctgtctcccccttgctccccattacctgggaaaggcagctttgtgggccatgtgtcccggaagggcctgggctggctgtggcccagtgctcaggaccagccatcttggccctcacagcgccctgcccagttggtgtaatatttgtcttcaagccattgttggagcaggcaggcaaagggggctttctgaggatccaacgtgtgccagccactgggatacaaagacaggcctggttcctagctgtggggctgggaagggtatctgacatcaatggtggcacctggcagaggacacacagacaacagcaggcagcatgggctgcagtaaatgttgcagaagcacctaaaggttgagcagaagggaggtaggaaacctggacatggcctgccagcagctgagaagcccccctgagatcctggcggccccgccaccatctgaagatttaggccagtcccttgggcttttcaggcaggcccttatggtggccggccagtttgggaccctcccattttgatacattagttccccctcagctactggagatctcagccacaactgggctccagctgtgacccagactccgccaggatcccctagatcctcagctgtcagataatcccctgtccccctcctcctccccactcaacccccagtgcttgacatgaatgcatgtgtgcttcctaggactagaggccggtgctgtctctaccattgccctcactttaaggggcacacgagcagatggtagcaagccctggagagcagcactcgggttcccatgatcagtggtgaaatatagtgattttcacctgtgcttccattctgaagttctggaaagaagtactggatggactgaagtccaggacaacgtcccaaagaaaggcagagtccaggtaggcttggaggaccaagccctggatgagcactggagggcagaggcctcagtgtccagcactgtgccctgcacatggaaagcccctacgtttgtggaatgaatgaataataaaaatgttttcataagtga

SEQ ID NO: 29210 - DNA, 3253 bp, Homo sapiens
tgcacgaaatcattcttttattcctgatcctgtttcctgtttatttcatgaacttgtctgtaggcagcatggtgctgggcgctgcaggggctcattaatgcatgagacacagattccactcaggagagagaagacgaacacagacacagtacacggtgggaaggggcacttccatgtctgcagccagagagccctttcagaatctgacccaaaagatggccagtattctaagaaaaagcacatatgcttacgatgtgcaaacagctgaaggtgttctttcaactatagtaaaaggggtgtctcggtggccacaggcggcccagatgaagagacctgtctgggccgcagagaggagtctggaggtagggtccaagggccacgagccagtttgggctgctggaggggggcctggcaaggagggctctcggggaagcacctgtgggggtctgcttcctgaccccagggagctagaggcctccctccctccaggccccccgagccaggctgagccagccgctaggggcacggagcagtgcccaccttgcgcccagtgtggccagagcttcggccagaaggagctcagtgcgccgcaccagcgcgtgcatcgtggcccccggcctttcgctggtgctcagtgtcccaagagcttcacgcagcggaccacccccgccagccaccgtcgggcgcacgtggccgagtgcacctacacccgcgcccaatgcggcaagaccttcctccagcagtcgacgctcacacccactactgcgcgcacatcagggagaagccctacgagtgcgccaagctctttggccgcctgtccacgctgctggagcaccggcacatgcacacgggtgagcggcccttccagtgcacgcaatgtggctgctgcttcagccgcctgtccacgctgctggagcaccggcacacacacatcagcgagaagcccttccagtgtgcgcagtgcgacaagcgtttcacgcgtctggccaacctgaccgtgcaccagagagtgcacttgggcgagcgctccttccagtgcgcccagtacagcaggagattcatgcagaagcccggcttcctgcgtcatctgtgtggccactcgcaggagaagcactatccttgcagcccttgtggtgagagcttcacctgtccctcctggcttgtgcgtcaccaggacagccatgctagccaggcctctccatcttgcctggtttgtgagagggactcctcgaccgatgagccgcccacgggcctcaggggtgcagtgtgggggagcacccctagtaatccttctgccgcactcagatttgagggcactggtacagagctgggcctcaggaggtgccctggggacaggcagcggggcagtggtgatcaggaaggtcttgggtgggggtcccttgcccagttctctttctcgcgtgaagatggagaatgtgggtagcacccagagagctccctaaaggggctctgagggcccaggggcagttggtgccccttaaatctgagcaacctctcctgggggccacttcttggccaggtcaaagtattctggccatggtcttggcttcccgggggagggctgttctcccaggcactgagattgcccatgggccttctcgttgcagggaggcggctgggatagaggccagtcccaaacacctgagcctcactgaggggaaggcctgggcttggagatggggtgcgcaggagtggctggctttgccttgttctattaggcgagtgattttcagagacaaaggtccaagttaggagacgtaattactcagtgctttgaagggacatccaaggtgctcactcttagccatagccgttggtttcctggatgctgactgtgaagattctaaagtgcttcctagggtgggcggtggtggcaggaggccttggacggagtccagggccagacccagcctcctgtttaataggctgagcccaagcgtccctcagatgcgaatccaacagccttggtgagttgtaagatttcatggaaactttccctgacttctgtctcccccttgctccccattacctgggaaaggcagctttgtgggccatgtgtcccggaagggcctgggctggctgtggcccagtgctcaggaccagccatcttggccctcacagcgccctgcccagttggtgtaatatttgtcttcaagccattgttggagcaggcaggcaaagggggctttctgaggatccaacgtgtgccagccactgggatacaaagacaggcctggttcctagctgtggggctgggaagggtatctgacatcaatggtggcacctggcagaggacacacagacaacagcaggcagcatgggctgcagtaaatgttgcagaagcacctaaaggttgagcagaagggaggtaggaaacctggacatggcctgccagcagctgagaagcccccctgagatcctggcggccccgccaccatctgaagatttaggccagtcccttgggcttttcaggcaggcccttatggtggccggccagtttgggaccctcccattttgatacattagttccccctcagctactggagatctcagccacaactgggctccagctgtgacccagactccgccaggatcccctagatcctcagctgtcagataatcccctgtccccctcctcctccccactcaacccccagtgcttgacatgaatgcatgtgtgcttcctaggactagaggccggtgctgtctctaccattgccctcactttaaggggcacacgagcagatggtagcaagccctggagagcagcactcgggcaagtgaggtggctctggcactgcccctggactttcatgtttgtagcttgagctggttttaattggaagctctgtgatttacataatcacttacaatctctgtaaataaggaactatttatgaggaattgtaaatttcctctctcccccttcttaccctgtctgtgatcttgtctgtgatgcagtaatgatattccactctaggttcccatgatcagtggtgaaatatagtgattttcacctgtgcttccattctgaagttctggaaagaagtactggatggactgaagtccaggacaacgtcccaaagaaaggcagagtccaggtaggcttggaggaccaagccctggatgagcactggagggcagaggcctcagtgtccagcactgtgccctgcacatggaaagcccctacgtttgtggaatgaatgaataataaaaatgttttcataagtga

SEQ ID NO: 29211 - DNA, 1552 bp, Homo sapiens
tgcacgaaatcattcttttattcctgatcctgtttcctgtttatttcatgaacttgtctgtaggcagcatggtgctgggcgctgcaggggctcattaatgcatgagacacagattccactcaggagagagaagacgaacacagacacagtacacggtgggaaggggcacttccatgtctgcagccagagagccctttcagaatctgacccaaaagatggccagtattctaagaaaaagcacatatgcttacgatgtgcaaacagctgaaggtgttctttcaactatagtaaaaggggtgtctcggtggccacaggcggcccagatgaagagacctgtctgggccgcagagaggagtctggaggtagggtccaagggccacgagccagtttgggctgctggaggggggcctggcaaggagggctctcggggaagcacctgtgggggtctgcttcctgaccccagggagctagaggcctccctccctccaggccccccgagccaggctgagccagccgctaggggcacggagcagtgcccaccttgcgcccagtgtggccagagcttcggccagaaggagctcagtgcgccgcaccagcgcgtgcatcgtggcccccggcctttcgctggtgctcagtgtcccaagagcttcacgcagcggaccacccccgccagccaccgtcgggcgcacgtggccgagtgcacctacacccgcgcccaatgcggcaagaccttcctccagcagtcgacgctcacacccactactgcgcgcacatcagggagaagccctacgagtgcgccaagctctttggccgcctgtccacgctgctggagcaccggcacatgcacacgggtgagcggcccttccagtgcacgcaatgtggctgctgcttcagccgcctgtccacgctgctggagcaccggcacacacacatcagcgagaagcccttccagtgtgcgcagtgcgacaagcgtttcacgcgtctggccaacctgaccgtgcaccagagagtgcacttgggcgagcgctccttccagtgcgcccagtacagcaggagattcatgcagaagcccggcttcctgcgtcatctgtgtggccactcgcaggagaagcactatccttgcagcccttgtggttcccatgatcagtggtgaaatatagtgattttcacctgtgcttccattctgaagttctggaaagaagtactggatggactgaagtccaggacaacgtcccaaagaaaggcagagtccaggtaggcttggaggaccaagccctggatgagcactggagggcagaggcctcagtgtccagcactgtgccctgcacatggaaagcccctacgtttgtggaatgaatgaataataaaaatgttttcataagtgaaacaaaaaaggggccgctcagtaccctggggggccagttccccttcccgttccttcagggcccaaggcggaaaacagcgggcggtacagcgacggaagcgccggccggaaccctgggggcacggcgcaccaatacgcgggaaaagtgccacccgcggcgaacagaca

SEQ ID NO: 29212 - DNA, 445 bp, Homo sapiens
accccaaaaaactttggaagaagtgtacacagtatgcccatctttgcccattctcagtttctttgcaaactgagtgttgtctcaccaaactgaaaagctgtggaagggaaagagaagtggttcaggacacttggttgttaactgtaagaaaaacagcttcccttcgccaggcgcagtggctcacgcctgtaatcccaacaatttgggaggccgaggcgggtggatcacctgaggtcaggagttcaagaccagcctggccaacacggcgaaaccccatctctgctaaaaatacaaaaattagtcgggcatagtggtgcgtgcctataatcccagctactagggggactgaggcaggaggattgcttgaacctgggaggtggaggttgcagtgagccaagattgtgccactgcactccagcgtgggcaacagggcgagactccatca

SEQ ID NO: 29213 - DNA, 967 bp, Homo sapiens
gcgcaactccacctcccgtctgatccccgggcgcaagccctgtctcctcccaccccgccctcctacacatgctcctcccctttcaaaaaaaaatattcttttcatccactttgataacggggtttctcccacagcagagatttaaaagggacaggaaaatctggaatagcatcttcaactaaagatgtcaaagcacaagctcacttcccacggaaggtagcaattactattatctacttgacagctacaagaacctaggcacagaggttaagtgctctgcaaatactaccagccagtggtggttttcctgccagaaccaagttcttgccttccagtggacaccattgatctctcaagatgattctttaagttaaaaagcacgaatcacaaagggcctcaaaaccacattaaaatttaagattgatctgctcttctgcttctgaatgtgagagcctatactggatctctgaagaaaataaagatgagatgaggttctgatcccttggacttcatgaagttacgtgacagaaagtatgattgtctagccgatacttgactgtgtgaaaccttcatctactccggaatcctgaggcacagactcagaggccctctgactcacgattagggttgtcagggtgatgcaacagcaagaccatagcctttggtgtcggaataccaagttttgaagctcagtttccccactcactaattttcagtgagcacatacataatttgaaatctgaaaatggacaataatgcctacctacttcaaaatttggtttgagaatcaagtgaaatattaatatatatgtaagcattttatgaacaaggaagcaagttataaatgcattatcttgttaatttagtcatttcactaggggtgggtccaatgtgggcctcctttgaggtagactgtatttcatgaatttataataaaattctaaagtttaacaaagacaaaaaaaaa

SEQ ID NO: 29214 - DNA, 922 bp, Homo sapiens
tcctcgctggggcgcggggcactgaagggagggagagactttctcctccttcctgttccccgggacagctgtgctctccgaatccttcccttcttcccagcccacttattccccgctcgccaagcatcttcaactaaagatgtcaaagcacaagctcacttcccacggaaggtagcaattactattatctacttgacagctacaagaacctaggcacagaggttaagtgctctgcaaatactaccagccagtggtggttttcctgccagaaccaagttcttgccttccagtggacaccattgatctctcaagatgattctttaagttaaaaagcacgaatcacaaagggcctcaaaaccacattaaaatttaagattgatctgctcttctgcttctgaatgtgagagcctatactggatctctgaagaaaataaagatgagatgaggttctgatcccttggacttcatgaagttacgtgacagaaagtatgattgtctagccgatacttgactgtgtgaaaccttcatctactccggaatcctgaggcacagactcagaggccctctgactcacgattagggttgtcagggtgatgcaacagcaagaccatagcctttggtgtcggaataccaagttttgaagctcagtttccccactcactaattttcagtgagcacatacataatttgaaatctgaaaatggacaataatgcctacctacttcaaaatttggtttgagaatcaagtgaaatattaatatatatgtaagcattttatgaacaaggaagcaagttataaatgcattatcttgttaatttagtcatttcactaggggtgggtccaatgtgggcctcctttgaggtagactgtatttcatgaatttataataaaattctaaagtttaacaaagacaaaaaaaaa

SEQ ID NO: 29215 - DNA, 431 bp, Homo sapiens
gcgcaactccacctcccgtctgatccccgggcgcaagccctgtctcctcccaccccgccctcctacacatgctcctcccctttcaaaaaaaaatattcttttcatccactttgataacggggtttctcccacagcagagatttaaaagggacaggaaaatctggaatagcatcttcaactaaagatgtcaaagcacaagctcacttcccacggaaggtagcaattactattatctacttgacagctacaagaacctaggcacagaggttaagtgctctgcaaatactaccagccagtggtggttttcctgccagaaccaagttcttgccttccagtggacaccattgatctctcaagatgattctttaagttaaaaagtaagataactcaaatttctactttctataataaaagtgcccaatcttaaaata

SEQ ID NO: 29216 - DNA, 386 bp, Homo sapiens
tcctcgctggggcgcggggcactgaagggagggagagactttctcctccttcctgttccccgggacagctgtgctctccgaatccttcccttcttcccagcccacttattccccgctcgccaagcatcttcaactaaagatgtcaaagcacaagctcacttcccacggaaggtagcaattactattatctacttgacagctacaagaacctaggcacagaggttaagtgctctgcaaatactaccagccagtggtggttttcctgccagaaccaagttcttgccttccagtggacaccattgatctctcaagatgattctttaagttaaaaagtaagataactcaaatttctactttctataataaaagtgcccaatcttaaaata

SEQ ID NO: 29217 - DNA, 665 bp, Homo sapiens
gcgcaactccacctcccgtctgatccccgggcgcaagccctgtctcctcccaccccgccctcctacacatgctcctcccctttcaaaaaaaaatattcttttcatccactttgataacggggtttctcccacagcagagatttaaaagggacaggaaaatctggaatagcatcttcaactaaagatgtcaaagcacaagctcacttcccacggaaggtagcaattactattatctacttgacagctacaagaacctaggcacagaggttaagtgctctgcaaatactaccagccagtggtggttttcctgccagaaccaagttcttgccttccagtggacaccattgatctctcaagatgattctttaagttaaaaagagctgaaagcctgcaaactacattttgttaagtctttggtaaacacatttcatattaatttctgttacaaggcagcagaaataggcacagtgcctccaacatatcaaaggaaagtaaaggctagtggaaggggataacagcttcctgacctccaggtccaatggaaaagtcccattacgttgactaggacccacacttgtgaagaattatgaaaacacagagcattttgcaacaaattatgtaatcatgtaaatagtaaactaataataaacagtaaactgataaca

SEQ ID NO: 29218 - DNA, 702 bp, Homo sapiens
tcacagtaatgctagtgtcatagaatgaattgggaagtattctcttctcttgaattttctggaagagtttgcatataatcatattatttcttccttaaggaagaattctacgtttgttagaattcaccagggaagccatctgggccaagagttttccttacgagaacacttttgacgataaattcaatttctttaataggcatagggatactcgggttatttatttcttgctgagtgaacttggataattgttgtttttgagtaatttgtctatttcattgaagttgattttgatagaaacatacataatattccctgattttctttttaatatccaagggatgtgtagtgacgttgtctttctcattccttgacattggtgatctatatcttattgcttttttcctgatcagtctggctagagtttaattaattaattttttcaaagaaacaccttttgattttatttttttcctatttttgtcttgttttgtttacttcgttgatttctgctctgatctttatttcctttcttgttatttattatttttcttcctctagttcctaagatagcttttttctttattttcttattttatttttcatttttgagacagagtctcactctgtcacccaggctagagtgagccgaggtcatgccattgcactctagcctgggcaacaagagtgaaactccaactc

SEQ ID NO: 29219 - DNA, 415 bp, Homo sapiens
cctatacatcaatcacatagcaacaattgtcaacattttactgttttctccatctcactatatataaaatctgtggctaaagcattttaaagctaattacagatattctaacacttcaaccctaaacacttcagcatgtatttccaaaaattagatcattctcttccataacaatacacttaacacgtctcacaaaattagcaataattttcttatatcatctaataccaagttcatagtgaaatttccccattgtctaaagcatggtgggccaggtatagtcgcttacacctgtaatctcagtgctttgggaagtcaaggtgggaaggtggcttgaagctaggagttccaggccagcctgggcaatgtagtgagatgtcatctctactaaaataaaaaaaaaaaaatggccagg

SEQ ID NO: 29220 - DNA, 410 bp, Homo sapiens
tgagatggagtttcgctcttgttgcccaggctggagtgcaatgacgcagtctcagctcactgaaacctccacctcccgggttcaagcaatcctcctgcgacagccacccaagtagctgggattacaggtgtccgccaccatgcccaactaacttttgtatttttagtagagacgaggtttcatcatgttggccaggctggtctcgaactcctgacctcaggtgatccacccacctctgcttcccaaagtgctgggattacaggcgtgagctaccaggcctggcctcttcttgcctcttaatgttgaaatgactcagttcttagtctgtggtctcctctttatttaccgtcactcccctggtgagctcatgcagttccatgccatatagttggtatttaaagtaaactccc

SEQ ID NO: 29221 - DNA, 342 bp, Homo sapiens
tttttgagacggaatcttgctctgtcacccaggctggagtgcagtggcgtgatctcagctcactgcaagctccgcctcccgggttcacgccattctcctacctcagcctcctgattagctgggacaacaggcacccgccaccacgcccagctaattttttgtattttttagaagagacggggtttcaccatgttagccaggatggtcttgatctcctgacctcgtgatccgcccgccttggcctcccaaagtgctgggattataggtgtgagccaccaaacccggcccctctaacaacaattttatgaggtaactattatcaatctctttcacaggtcgacg

SEQ ID NO: 29222 - DNA, 485 bp, Homo sapiens
gatggtgacagagtacaataaaagtagggaaattcttcgattggggtgcaatgagccatatattgcccaccacctgaatgcggtagttggtgtgaaagaactcatttaaaagtttttcactggtactaagttctgaagccatagtttgacaaggtgggtcaaaaataattgataaatgctcagtttggtagagtaatttgagttctgctccttctagtcactgctttttctcccccttgtttttcttcttttcatcatatgtacgtcagagacctgtgttattggatataccctgcctaagtaactggatataccctgcctaagtaactggatatgcttgggccacatcgggttaatctctttggatcatcattgtatacgaaactactgaggaaacgtatacagccactgtttaaggccttctcagtccgtggcagaaagtagtgtctctcacttaacttgattaaacttggacacttggggtc

SEQ ID NO: 29223 - DNA, 458 bp, Homo sapiens
cgagtaggggactgtgctgtgctgatgtcctgagccaccctgcctggttgagtgtgttgacctgggttgggggaaaaagccttggaatcagatttaaactgcagttcctcccaggttgtcatgttgtgtgactgcagaggacaaagcttcactccccaaaagtcgggccgggatggagcgcagtggctcacgcctgtaatcccagcactttgggaggccaaggcaggcggatcacaaggtcaggagttcaagaccagcctgaccaacatggtgaaaccccgtctctactaaaaataaaaaaattagctgggcatggtggcgcacacctgtaatcccaggtacttgggacgctgaggcaggagaatcacttgaacccaggaggcggagcttgcagtgagctgagatcgcgccactgcactccagcctgggaaacagagtgagactctgtctcaaaaaaa

SEQ ID NO: 29224 - DNA, 316 bp, Homo sapiens
cgagtaggggactgtgctgtgctgatgtcctgagccaccctgcctggttgagtgtgttgacctgggttgggggaaaaagccttggaatcagatttaaactgcagttcctcccaggttgtcatgttgtgtgactgcagaggacaaagcttcactccccaaaagtcgggccgggatggagcgcagtggctcacgcctgtaatcccagcactttgggaggctgaggcaggaggatcgcttgagcctgggcagttgaggctgcagtgagccatgatcacgccactgcactccagcctgggcaacagcgagacccagtctc

SEQ ID NO: 29225 - DNA, 377 bp, Homo sapiens
tgaaaaagcatttaaaattgaaagtaaaaggacctataaattcctgttaattttagtaaagaagctataaatttctgttaattaaagctgtcttaatggaacaaatatagcttaaagtacaggctatgaaaaaaatcaagaaagatttaaaaaatggtttcagcagttaagtcaagcagctagcaaaaaaattatggagataatagaaagaccaaaacaaaggagacaattaagcgtaaaaactaactggtggggagcagtggctcaccactgtaatcccaggactttgggaggctgagacaggtggatcacctgaggtcaagagttttagaccagcctggccagcatggtgaaaacctatctctactaaaaataca

SEQ ID NO: 29226 - DNA, 704 bp, Homo sapiens
aaggacatttgaatgttctgggtaagactcaaacttcaaccagatgcaccaggttctttctttcttatcctccaacttaattgctcagtgtctgtattctgcttgtgtcataacgtctctttcagtctaagaaaaatgactctaagtggctgtacttaaaaatgagaaattgtggggtaatttttgaggctgtgtctgatgaaataactacatttgaatgtggccagttggagacacaaaaaaagaaagagtggccagtcgtatcggtcgatggttgtcattcaagcttcaggcacacaaaggcagtacgctttgaacagtggccttaactccacctgaacttcccaaaagggcctttcgtctggggaaacatcaaagttgcttttgaaactcttgtgttttctcttccaaggtgagaacaaagcatcagaaaggcacaaatactaaaagcttccagcctctaagaaagagggaagggcaaatacattcctaagttactaatgtaataaaagccagaagagttcttcaagaattctaggggtagtgacgcatgccagacaagcccagccctgaggaatacttaaaagcgactcgcggagcatgcgcctcagaagtgccatgctttccactggggaatgggaacttgtaagttactgtggctctatattaataaaagtggaaattaaaatgttttgatatagccc

SEQ ID NO: 29227 - DNA, 426 bp, Homo sapiens
cccattggtattactcactgactaatgtcggtttggcttcctattcttaacgttaccattattacctcagtgtgggatgtacagacccatggggcaggcacagtactgctagcctgcgctccgtttcttcaaaacaccgttagcgatctgatcatctctactttagtgcctagagttcataagagaaggtgacaataaaaactggagcattgaaatgagcttactatgtaatcataactgtccctgagcattggtttaatattataaagctttggaaatatgttatcccattgcactcagagacattacaaagaacacttttttattgttgttgctgttattactactattgagatgggaaatttgataacataaggaagttaaaataatgcgtgcatcttataaattttaaaaccgatctactgg

SEQ ID NO: 29228 - DNA, 368 bp, Homo sapiens
cacctcttgttgcctgtctgtccttaatctttttaagcctcagtttccttagctataaaatgggaatgactccttgagccatagctagtaggatcatttagaaattaaatgtaatttaaaacatttaatagagggttttgacacatttaataaattctaaaatgttagccattgctgctactatgtaagtgagtgtgcaaggaagtcctacctttttggcctttttgctttcataattttaaactaaggctgggcacggtggctcacgcctgtaatcctagcactttgggaggctgaggcaggtggattacctgaggtcaggagttcgagaccagcctggccaacatggcaaaaccccgtctttacta

SEQ ID NO: 29229 - DNA, 392 bp, Homo sapiens
cacctcttgttgcctgtctgtccttaatctttttaagcctcagtttccttagctataaaatgggaatgactccttgagccatagctagtaggatcatttagaaattaaatgtaatttaaaacatttaatagagggttttgacacatttaataaattctaaaatgttagccattgctgctactatgtaagtgagtgtgcaaggaagtcctacctttttggcctttttgctttcataattttaaacaaagtgctgggattacaggtgtgagccacagcgcccggccccttgctactatctttaatagctgtgtaatcttaggcaacagtatataacattggctttcaattttctcattgcaaaccatgtaaaatgtcccccattactgcagtat

SEQ ID NO: 29230 - DNA, 753 bp, Homo sapiens
  misc_feature (468)..(468): n is a, c, g, or t
  misc_feature (472)..(472): n is a, c, g, or t
gcgacggttagataagctgattctgatgttgcctgcaatggtactgtaattgagcatccggaatatggagaagtaattcagctacagggtgaccaacgcaagaacatatgccagttcctcgtagagattggactggctaaggacgatcagctgaaggttcatgggttttaagtgcttgtggctcactgaagcttaagtgaggatttccttgcaatgagtagaatttcccttctctcccttgtcacaggtttaaaaacctcacagcttgtataatgtaaccatttggggtccgcttttaacttggactagtgtaactccttcatgcaataaactgaaaagagccatgctgtctagtcttgaagtccctcatttaaacagaggtcaagcaataggcgcctggcagtgtcaagcctgaaaccaagcaataccgtcatgtttcagccaagcccagagccctaagattacaancaantatggccggaacctcctcagctctccctctgcagagttccctaccctaagagaatgttaccacctgaacagtcctcggtgaatctgagaggagaggatggggtaaggcagaagcaccagctgtactactagaagggagcttttggtggtagatccctggtgtctccaacctgactaggtggacagagctcaaagaggccctcttaccgctagcgaggtgataggacatctggcttgccacaaaggtctgttcgaccagacatatcctagctaagggatgtc

SEQ ID NO: 29231 - DNA, 215 bp, Homo sapiens
aaataaataagatatataaagagaacatattatccgcgtattggtaaataacttctatttagtaattctaaatagtaaagttagactaccattctacacggcatttctaggtgtggtagttcatgcctgtaattgctttgggaggccaagctgggaggatcattaagcccaggagtttgcaccagcctgggcaacacagaaagaccctgtatctg

SEQ ID NO: 29232 - DNA, 365 bp, Homo sapiens
tttaggggtgtccctgtttgtccaatcaatatagaaggtggtgaaacatttataagtgtttctgggtaacactttacccttgctttcatgtaaccggggaataagtttctgaaattccgcctaacttttttcaatttaccagtccttaccccacccacctcctttccttccaccctgtgttctgcaacctttctttgatttttctttatttcaccttttataattttgttttcatttctgaccctctccccataacacacaagaccctttagatgagcctaaataaatacagaaatagacttaaagcattaaatgcttttttaagaaaaagttttgatgtgtcatcctccatagttaaaaaaaaa

SEQ ID NO: 29233 - DNA, 1200 bp, Homo sapiens
ggcccgcgtgtatagaggatcccgtctgagcacgctgggaactctctcctgatggagttctgcacagcaggtctttggtatcccgcccccaccccagggtcttactctttctcctgtctcactctcattgcctcatgccttcctgcccctccgctctggaagtcttccttgacgctcttctgcccagcctcagtctccatgtggtgctgctccattgtcttcacataaatactagacgtgcattgctagccctgtcttagtgctttatgtactctcttaggatgtatgtctacttcccttatgagaacaggtgctttttaaaacagaaaataatttgctcactaataaaagactaatcatattttagaatctttttccattgtgtattttatttatcagacttatttgtagatttgcttcatatgaaagtgtggagggtgtgcgcagcctcattatcagcatgtcagttccagttcagcttgctccttctctgtccccggtgcccagcctagaagagacttctagcaaatgtttgttgacttaagtattacccttcaagcccatgtcaaaactgggcaccatttcgtgatttcccatccctctctcccttctacctcctgtcttgctggatgaggtctctcctgtggctctacttttatatcatattcttccttggattatgtttttggagtagttatctattgtactgaaggggtatttgggcaagcagttgttggtatctctttaatctccacagcaatcaatagttatttgcataccttacgcatttgtatctactcaactgagtgtgtttaatgtccagaaatcagatgcctaagaaacaacttccttaggtggaagttcagcccttcatctctcatttcatttttagtttatgaaattaacttttgtctactgttcctcaaactagttctttgccaaaggaaaaagccgcctaacttttttcaatttaccagtccttaccccacccacctcctttccttccaccctgtgttctgcaacctttctttgatttttctttatttcaccttttataattttgttttcatttctgaccctctccccataacacacaagaccctttagatgagcctaaataaatacagaaatagacttaaagcattaaatgcttttttaagaaaaagttttgatgtgtcatcctccatagttaaaaaaaaa

SEQ ID NO: 29234 - DNA, 525 bp, Homo sapiens
  misc_feature (7)..(7): n is a, c, g, or t
cccgggnctgcaggaattcggcacgagcaatcatcaggtaaaaataaaataaaataaaataagatcagtagagtagaaaatcttccaagagcagagggagttcttccttagcaatgaaaaaaagacaaaaaaaaagggtaaatacataattaaatagttaattaaaaccctaaccatgaggggcttagaagattttttgataaaagacaaatgttgctgtcattttctttgtcaattagaaaacagtggtagtttctacgttgcatctacatttcagactaaatgattattgtacccagttatggttgtttgctaatattttgtctctctctctttctctctgtccgatgcttcttctgtatttttgtgtgtagcaacaaaaacgtgtaatgcattaggcattattctggtttgtttctgagtatctcctgtactgcattaaggtttctttcatttattttaagcttcgctactgttctcactttatgccgtgcaatatcatctgctgtgtttgctaagcaaaaa

SEQ ID NO: 29235 - DNA, 1828 bp, Homo sapiens
aagtagagtgtaaaaactcagagagacaagctaacttgaatttggaaatcctctaggttttcccaagtttctgaattgcttcaaggcagggggcagggcatggagacacagttccttttgcaaagctgagaggagagtgtaatggcctcatgcccttaagcagaaagtcaaggctggggagcagctgacccagcccctacccctctggccagtccacagtagacacaaaatacaattgcttggcctcaattatcaatagaatttaagagaaaaatcaaagttacacatccctctccacatcagtttcttggaatctgctactcatgactgcccctcctctccccacgcgcccctaccaaagtcacaggagtcatcctcaaatgtcagggtactggggtgaatgtactccacgcctctctgagtttgtctctgctcactcttcatcttcccactggtttcttttctgcactagagatgatccctgccctcagctcccttcatggaggcagttcagatacttggccctacctgtgatgagcacacacacagaattctcaactgacagtggcatcctcagaagagtcggtgcccactattttgttttattttgctgaaagaagttgccctcactacacatcataaacccatagatgtaaatactttccctctcaacatacaaattttacctttctctttccctcccacaggggtgactgtggtggggaaggaaagagagggcttagacttcaggtcaaatgttacattttcttaggaacatttttatactcattatgtattttaataggggcaataaatctgctttgggttgcaggatcactcagtgttctgttggaaagcattgaccaatgatttgtttttaatacaaatgctgtgcgatgagttatagaaacctaggacaatggttgagggagtcgactcctacatcagcagtgaagcgctgagcggcgttgtattcacaaagtcacatcttctgtttctgtgttagtctcgatttgttgtggtacgttctgcatttattacataatcattgtgggctcattttagatttgccatctgaaccaagtgacaagtatttttcaatacaataaagttgaaaaccttgtcttccacttgctttggtagttgtcttcatatctccctgtgcttattgccctgtctgaatcagcccatctgtcactcacttagacctatcccttccccactttttctactttcactacacttttgaccttagctattgtttgagtgtgactcagtttccctgttcaagttagcttgatggtttattatgtaaggagggtgcctaagacaatcatcaggtaaaaataaaataaaataaaataagatcagtagagtagaaaatcttccaagagcagagggagttcttccttagcaatgaaaaaaagacaaaaaaaaagggtaaatacataattaaatagttaattaaaaccctaaccatgaggggcttagaagattttttgataaaagacaaatgttgctgtcattttctttgtcaattagaaaacagtggtagtttctacgttgcatctacatttcagactaaatgattattgtacccagttatggttgtttgctaatattttgtctctctctctttctctctgtccgatgcttcttctgtatttttgtgtgtagcaacaaaaacgtgtaatgcattaggcattattctggtttgtttctgagtatctcctgtactgcattaaggtttctttcatttattttaagcttcgctactgttctcactttatgccgtgcaatatcatctgctgtgtttgctaagcaaaaa

SEQ ID NO: 29236 - DNA, 977 bp, Homo sapiens
gctactactactaaattggcggaagaacgcaccaaatgctgtgcgatgagttatagaaacctaggacaatggttgagggagtcgactcctacatcagcagtgaagcgctgagcggcgttgtattcacaaagtcacatcttctgtttctgtgttagtctcgatttgttgtggtacgttctgcatttattacataatcattgtgggctcattttagatttgccatctgaaccaagtgacaagtatttttcaatacaataaagttgaaaaccttgtcttccacttgctttggtagttgtcttcatatctccctgtgcttattgccctgtctgaatcagcccatctgtcactcacttagacctatcccttccccactttttctactttcactacacttttgaccttagctattgtttgagtgtgactcagtttccctgttcaagttagcttgatggtttattatgtaaggagggtgcctaagacaatcatcaggtaaaaataaaataaaataaaataagatcagtagagtagaaaatcttccaagagcagagggagttcttccttagcaatgaaaaaaagacaaaaaaaaagggtaaatacataattaaatagttaattaaaaccctaaccatgaggggcttagaagattttttgataaaagacaaatgttgctgtcattttctttgtcaattagaaaacagtggtagtttctacgttgcatctacatttcagactaaatgattattgtacccagttatggttgtttgctaatattttgtctctctctctttctctctgtccgatgcttcttctgtatttttgtgtgtagcaacaaaaacgtgtaatgcattaggcattattctggtttgtttctgagtatctcctgtactgcattaaggtttctttcatttattttaagcttcgctactgttctcactttatgccgtgcaatatcatctgctgtgtttgctaagcaaaaa

SEQ ID NO: 29237 - DNA, 272 bp, Homo sapiens
cagactgtctccactccctctcgctctcctgctagaatgcgctaggagggtgttggtaggggctaggggcccaaggacagagagcttgggtttcccaacagatcagcccaggaaggatctggctgagaccagagaaacgctttttcctgaatcaagagacctgctaggagcaacagcccctcctctctggacactgtgatctgcagggccctgagggttaccaggacgagagtgtcaacctgttttggggcaataaaaggctgtgaaggagc

SEQ ID NO: 29238 - DNA, 418 bp, Homo sapiens
gttgcagtgagccgagattacagcactacactcctgcctgggtgacagagtgagactctgtctcaaaaaaatagaaataaaaataaaataagttattgtgctgggaagacctttaaaattacttctaactggtaaaaaccttttggaagaattgttgttattactttaaaaaaatttgtcagtttctaagcccctgagcaagacctgataaatacaattagaagaaatgtgtgggctggttcagcctctgcttgggaaacataccctgtgtagggactgagggaaaagaattactgggtggaatttcatttctgtagtgcagtgggttggtgaagctctgtggaggggtttttaaagtccattgattgtattgagtgactcgccacatacacatgtgtaataaagaggtttcattaga

SEQ ID NO: 29239 - DNA, 331 bp, Homo sapiens
aaaattaatatattccaactacacttcaataaaataaattttttttgtgtgacaaggtctggccctgtcacccaggctggagtgcagtggtgtaatctcggctcacagcaacctcagcctcttgggctcaagcaatcctcccaccttagccttctggctacaaaaaaaaactgaaacagctaatgacttcaatgctgggtgtggttttaggagctaaaatgttgatagtaggagccaggcatggtggtacccgtctctaattccacctacttgagaggtgaggtgggagaatcacttgagcccaggagttcaaggccagcatgggcaacat

SEQ ID NO: 29240 - DNA, 487 bp, Homo sapiens
ccaaacattcttcaaaactgctggatgcttgcttttctttacataactgcagttcagttggaggagtgagagaagtgaagctaatatttacagagagtacctactatgtgtcagatactttgcaatgtgctttacagaaatacataatcacattctttaaacaaccctttgaggttgatgccttaattcccattttgtagataagaaattgagtccagaattaagttcagataatttgcccaaagccatagagttttcaagtcataaatttgatcttagacctttctagttgccaaggccttcctacttagacagaatccatttggagagaaaactttctaacattcttctaagaggtcttgattcttggcacattcttctgtgtgatgtgttctctgtcaggcttgtcattataggggcaggaagaacgcactcatttcacttatacatatctaccattgggatgtgttagtagtgggaaagtaaa

SEQ ID NO: 29241 - DNA, 510 bp, Homo sapiens
actcccaaactcaatctagcacttctacgtcagtctgggtctgagcttgggtgaacatcaccagctgcctgttcccctctgaccaccaatttgctgtgatcggatcaagacagaaatatgccaggtgggcctcaaagttggtcagtcctccttaacctgcagtggcctccaagcaatgcaggatgctgactcaaggagatgcacctcgtttgggaagctcaggaaaaccatgctgttagtactaggactgtacgtctgaccaccccagctctgtccaccttccccaaaagtctcttaactggggatgaaaagcaatccactccaggaagtggaggccaagctgggaggagacattgattgagaggtttttcccacagaaagcaagaaagatggccaggcatggtggctcatgcctgcaatcccaacattttgggaggctgaggcaggaggatcacttgaggccaggagtttgagaccagccaaaaccacatagtgagaccccgtttctac

SEQ ID NO: 29242 - DNA, 747 bp, Homo sapiens
ttcttacagtcctggccagtggctatgagaaggaaaagctcagagtacaggtgacttccttcttttgggatatattcactctgctctgtaggagtaaacaggagaatttcctcctattccacaatgctgaaatttctctcattttatgctgctgctggtcagaacttataaaagagtgagaattatctatgagggctcaaaaggtgaatataacgatcatttctcacatggcaaagtgttatttcttatggcagcatttctgagtgtttcgtatacacctagaggttagttcatagattttaccacaaaaagattggtctcaccgtcaaataactggggaatgctgagttccatacacagacagggttctgtagaagtcctcagcttttgatcagctaatatgcattttctgtgcaaaagaaaggggaatatacagctctacccacactttgttgccccttgtctctaccctgcatacatacccagcaccacactgaacttgaatatgacaagacttcgcttcaggaaatgctgccctccaggcctcttgcttgtcttttacttttgtttatactttcttttgtcatgtagaagtttaaatttttgatgttgtcaagtgtacttgttattttatttattatttttactttggcttctaaaaataaagacccttccctaacttcacaaagatattgtgtttgtgagaaaagaataaattttctttaaaaacttttttttaactccttc

SEQ ID NO: 29243 - DNA, 310 bp, Homo sapiens
agagcttttcccttctcagctctcatgctgtatctctgggatctagttgtcagaaatatagcccacacattgggctattttaaagagtgtaaaatatttttatgtggtaagtataaaagggaagtaagttacatataagtaaatttcattttatttggatagcctaggataaatttaaaacataattttcttctaagtagatctaaattaaccacttcttgtagcctgaaaccttgggattgctgaggtatcatggtccctttcctgttttaaggttcagctctccctggttattttttttttttttttt

SEQ ID NO: 29244 - DNA, 897 bp, Homo sapiens
cttggctatgacatggagaagcatctatctgtaaaatcatattatattactgtggttgttagcaaaccacagtaatataatatgattttacagatagatgcttccccttggctatgacatggagaaagattttcccataataataactaatatttatattaggttggtgcaaaactagttgcggtttttcccattaaaagtaataaccttactcttatacaaagtggacactgtggggagatacagagaaatggaagatacggatcctgcctggagtaggtaaccttgcttggaaaccccacatgcaaacgtcatgaggagaattaaaggagtattatcagtaatgaagtttatcatgggtcatcaatgagcatagattggtgtggatcctgtagaccctggtgttttctttgaagtgccctctcctaatgcagaggccttgaagcttacagtatacacttgaaaagtcacagatagctagaattatgatctttgaagttataactgtgatctgaaaatgtgtgtggtggtatgacagcataccattaaatacatttacatcacagctcaaaggactgtgatataatccatttatatcacaactcaaaggactgtgatataatccatttatatcacagctcacagtttctgaaaatgtataaaagaatctataatctagtactgaaattactaaattgggtaagatgatttaaatgattttaattttaacattttatttctagaatatatggctccattttattttatagtgtaaagttgtatttcctaaagtttgtgttttgtcgacagtatcttttaaatgagtcttaaaaataaaggcatattgttcatgtttttctttcctggtggcacataaatgacatgtcttaaaataga

SEQ ID NO: 29245 - DNA, 430 bp, Homo sapiens
ttatcctctcctgtttaaatgacaacagcctgctaactctggctctggtcttatcctcagctatctgtctttcagccagctgccaggctaatctctccaaagcaaaaatgtgaccctgtcacttaatagctttgaataatggctgaaacccttacctggcctataaaaccctccatcttctcccttgcctcctctccagattcatttcttggctcttctgctttgcctatcaaattgttactctgagtatactatttattattcctttctgtctttgcccatattggcctgaaatgagccctctgctgaatcccctcaattctatctgtgcactggctcctaattcattctttttttctttttttgagatggagttttgctcttcactcttgtcgcccaggctggagtataacggtgcgatctcggttca

SEQ ID NO: 29246 - DNA, 484 bp, Homo sapiens
caagctcaagggaaatgatgatccaaaatggactcagataaagtttctgccactctgcattgggggcttttggtaggagtccagttcaattttagaaaaataaaaatacatgtctcgcacttctgagtttgcagactaaggtccattctgtatttgcaaacgaggacaaaaagaaaggcggctgaatgcggtggctcacgcctgtaatcccagcactttgggaggtcaagatgggcggatcacttgaggctggccaggagttcgagaccagcctggtcaaccagcctggactttcattgtgttagggtgcctacaaatacaaaaatttagctggatgctgtggcacacgcctataatctcagctactcaggaggctgaggcaggagaatcatttgaacctgggaggcggaggttacagtgaaccaggatcacaccattgcactctagcctgggcaacaagagctaaattccatctcaaaaaaaa

SEQ ID NO: 29247 - DNA, 399 bp, Homo sapiens
ttctgcccttcaatattcaagattatatatcatgagaaattctaaaatgtatagaaatatcttgtaagaaatgttcaagtagtgacaaatggatagtccctgtgcttatggctgaatatcggataaaaataaccaagatattctcttttcctttctaatccttccacaaagtacctgatttacagtatgccttgggtaactgaaaactgcaacattcaagactagacactcttactgaggcaacaaaggtcccccagcatttataaatgctttttatttttatcctatatccttacttttatcctatatcctcatttagagagtatctggtatgattacaaagtcatcatttcattactttggtattttcaacaaataaaagtcatatatccaaatggg

SEQ ID NO: 29248 - DNA, 276 bp, Homo sapiens
gtgccaccatggccagccagaatttatgtttctgacaaccatattttgatttttaaaaagtttatgattctcatagaacagataagacaattgtattcagaagtactgaatgttaggtaatgctcataaaatatattaggactagtgtgtactgaatttactagtaggacattatttttcagatcttcaagaacattggtaagctggatgcagtggctcaagcttgtaatcccagcattttgtgaggctgaggtgggaggattgcttgagcccaag

SEQ ID NO: 29249 - DNA, 450 bp, Homo sapiens
gaggttgcagtgagccgagagtgcaccattgcactctagcctggagaacagagtgagaccctgtctcaaaacacacaaagaaatttcagatatgctcattggaatgtgagaagatattttcaactaaatttagttgcaggtttttttgttttgttttgagacagggcctcgctcttgcctgagatgaagagcagtgggaccatcatagctcacagcagcctcaaactcatgggctcaagcagtgttctcatatcagcctcctgagaacctaggactacaggtgcatgccaccacgcctagctaattttctaaatttttttttcgtaaatatggagtctccctatgttgtccaggctggtcttttgaattcctggcctcaggcgatcctcccactttggcctcccaaagtgctgtgattataggtgtgagctaccatgcccagccttaatt

SEQ ID NO: 29250 - DNA, 430 bp, Homo sapiens
gttcctcagacatcggaactcctcctcagatcacttcctgcctcccaggaccactgagactggttatggacctctgagaggagatggatgagagaatggtttataaactcagcctcttgcatctcccagagccacagtcccagcctcggccattcctgctacaaggacaagctcccaaccaacgccttggaaacccatttccctccctgcaggcctggggaggggggctcaaggtctgtgggcatgaaaacccctaaaaaaatcattctcagtgtgcagaatggccagacaaggtctcggtaactcagaaaatcgtcgtctcttctctttctctcgcttcccaggagagagagtgggaagggagaatcaagttcctgatgccttgctgggctcccagatcgacagcaccttctgcccgcctcgcaacagg

SEQ ID NO: 29251 - DNA, 272 bp, Homo sapiens
gttctctgtggtccctggataagaggcatcaccattatctggaaacatgcagtaaatgcagattcttcatcttctccccagacctcctgagttagaaattcacaagttctccaggtgatctcatacatgctaaagtttgagaaccattgagtaaagttaatgcattaagaagagattagatagggatggtggcgtatcttcctacagtttccctgttaacaagaaagtcagaggtcagttgatcagacattagattatttattgctaaaact

SEQ ID NO: 29252 - DNA, 465 bp, Homo sapiens
aggatggtcagaatctctgatgtcatcgctcatgccaacctggcaaccagtttgaaaaaaaacacatgtaactgccaggctgatctcttgtcctggagatcctgggtgaatggtatctcctgccactgtcccaacctcagaccattgtccaaaagcatcttcagggactccacatccctctgttccctgtcccagcagaggctgtgtcctctccactcaaagcctgaagcatgttggggtctctttgtctctgtacatgcccatttcagagtccagtctggtgggagagggaacagagtgggaaagaaaactagggtaagcagaaatgatgaaaccttataagaagtgagattatcatgtacaagagtgagattatcatgtacaagagtgagattatcatgtacaagagatcccaggaatactgacttgatgaaaaagtcacatcagagcactcagtttggcaga

SEQ ID NO: 29253 - DNA, 219 bp, Homo sapiens
tcaatggggttcatatcccaagaattcttcattatataattttccttatataaaaattatacttatcatctgattcctcttgccctgtttcatatatggttctttttgttttttacatgttcagtacacatgtgtgttttttggggtttttgtgtttgtttgtttttttcacacagagtcttgctctgtcgcccagactggagtgcagtggctcgatct

SEQ ID NO: 29254 - DNA, 413 bp, Homo sapiens
agtttccacccagagcattttccatgcattgacattcagtaccaaagataggtacattgtggaggtttcacgtaaacaagaaactgtacctattattttgtaatttgattttactccctaacaatttattttagggatcttttcatgttagtccattggtttgaaggactgaagaatatggaggtgccagatttgttcacttagtcctttactaatggacacttaggttgttttcagtttttccccttaacaaaccatacactattaacctaggctaacaaaacactgaacaaccggcatcctattacctccaatctacaacaacagacgctccaaaggaataaaactaaggaaagtcagtctagttacctcatatcctaacatgtgttgtatatagagtactgagcccttac

SEQ ID NO: 29255 - DNA, 409 bp, Homo sapiens
actaatctctaaatggtgtgaaaagcatttcatcttgatgtggactcgattctgtagaacatggtttcccttattttcggtaaagatctgaaattagatttgtatagggtggtgtgattgaacttatcctgaagtttaatgcatgtactttctacctttttagttcagaaaatcttcagtacacagaagtggagaatagtataatgagccccttcatcataatgaatgaccactatccagtttaacaatgatcaactcagggccaattttgtttttttctaagacctcacgcccacctccattattttgaagcacattccagacaccatatggatttcatctgttaagtatgccttttttttttctttttgagcctgggcaacagagcgagattccatttaaaaaaaaa

SEQ ID NO: 29256 - DNA, 411 bp, Homo sapiens
ggaggaaactggtcactccctgtctcccccgcgcgccccccgtgccttccatggaaactgcagtgctgactttctgtgtcgcctggttgtgactccagaagtgggctcaggaaacccttgttgacgatcacccagggaaaaaatccttccaaaccctccggcggggggtgggcgagtttcagtaatttcacagtaacaaggatggacgctcctcagggagcctcttagtggaattctgattctggagccaaccacaaaatggtggcggtgggaggaatccctgtggaaatccctgacttcccatccaaaaacatctgaccctaacagtcaccgcggttgctgatgcctcagaggactgctagacccaaaggccaactcctctccatctattttaaggtaaaaatttcagta

SEQ ID NO: 29257 - DNA, 644 bp, Homo sapiens
tacaggtgtaagccactgcaccttgcctaattaaatttttaaatacctgttttcagatatgaccttatattccagaactctcaattctgtggtggccatagacttggctcaatttgatgttaaacttgcgccatttggggtttgtctgtgtgcttggcaatctttatggactgtggcattgggaatctgcattataaagcaattatttctcatagtaaaagggaaaatgatagcttggattaatgtgcaagttgggtcttctgatgaagatatgttcttatttataatttaaagctgatagaactgaactaagtccaggctcagtattagcgttcaacttaataaaggagtcttggctttcagcactaggaaacaatgatcagggagaggcatcctagtgttttggtgtgggattacaggagtttgatagaggagagcttaagatcccaagacaacttgtcaatctgtggatctgcacatcaccttgttttgacgatgtccagcactgaggttttttccccaaaagttactgctttcctatctagtgtgtgaagtttaaagttacttgtttctcttatggatgacttaattgaccttggccttgtaagtttcctgttgactgttgaataaactactgaatgttg

SEQ ID NO: 29258 - DNA, 589 bp, Homo sapiens
tacaggtgtaagccactgcaccttgcctaattaaatttttaaatacctgttttcagatatgaccttatattccagaactctcaattctgtggtggccatagacttggctcaatttgatgttaaacttgcgccatttggggtttgtctgtgtgcttggcaatctttatggactgtggcattgggaatctgcattataaagcaattatttctcatagtaaaagggaaaatgatagcttggattaatgtgcaagttgggtcttctgatgaagatatgttcttatttataatttaaagctgatagaactgaactaagtccaggctcagtattagcgttcaacttaataaaggagtcttggctttcagcactaggaaacaatgatcagggagaggcatcctagtgttttggtgtgggattacaggagtttgatagaggagagcttaagatcccaagacaacttgtcaatctgtggatctgcacatcaccttgttttgacgatgtccagcactgaggttttttccccaaaagttactgctttcctatctagtgtgtgaagtttttgactgttaataaaggaatctgtcaaccatc

SEQ ID NO: 29259 - DNA, 312 bp, Homo sapiens
ggaggtcagaagctgctaggagagagatttttccccaagtcagcaaccttgcagcattggtctctatgaggagcaactcaaattcagctagatttaaaatgctagagtcttccagtgcactagcagagtcctacacaagagcctgagacaagaaaagacagaggcgaacgacacgtatcagcattcttgggatcatacacccactctcattctcctaacagtcattcagcttttgatttcagcattgaccaattcagcagaaatttctacccagaaccagtgatttcaggcctcttaaaaaccagtggtatt

SEQ ID NO: 29260 - DNA, 147 bp, Homo sapiens
acagcttggtttcctgctgctgtccagctcacccaaccacagttcccatttggcccaccatgtcccttcatactggatttcatctttctgtgacagaggcacattgtcacctttcaaattcacattcttaacttatctttcaaaata

SEQ ID NO: 29261 - DNA, 378 bp, Homo sapiens
tttttagacagagttttgctctgtcaaaaggctggggtgcagtggtgtgatcctggctcactgaaacctccgcctcctgggttcaagtgattcttgtgcctcagcctcccaaaaagctggaactacagtcatgcaccaccatgcctggctaatttctgtatttttagtagagacggggttttgccacgttggcaaggctggtcttgaacttctggcctcaagtgatccacctgccttggcctcccaaagtgttgagattacaggtgtgagccaccacgcctggcccatgcaggagtattttcaaatctaaaatgcaaacctgcacagctggtggatggtgggagaagttagtagccacaacaggtcaaaacttgaatc

SEQ ID NO: 29262 - DNA, 492 bp, Homo sapiens
gtattactaaagtttatctttagtaaacttatgaaaacactttaaattgtggtttgaaaaaatgcagttgatcccctttaatcatttttaagtgtgtagttcactaatgttaagtctatttgcattgtgcaatagatctctagaacttatttatattgcaaaactgaaactctgtacccattgaacaacaactctcctcattttcccctctcatcaactttgggttgtaacctctattctactttctgtttccgtgattttgagtagtctaggtttctgatataagtggaatcattaaatatttgtccttttgtgactggcttatttcacttagcctaatctcttcaacattcatctgtgttgtggcatgtgtcagcattttcttcgtttttaaggatgaatagtattgcagtgtgtgtgtgtatgtgtgtgtgtgtgtgtgtgtgtgcgctttcacccaggctggagtgctgtggcacaattatggctcac

SEQ ID NO: 29263 - DNA, 378 bp, Homo sapiens
tgtaagggcagctttgtgaaaatataggttgatattactaggtttctacattcataaagcagaaatatgtcatgcatattagaaaaagtgttttagctactaacataaagatataactttctgctttctatcatatattcctgattgtacttcaccaagttcttatgaattgttttcaccatggctccctcactttatttaaaattttaggaccacgaggtaccagatatctacatactaaaatatatatttattcaaaaatgtttccaaaccgtaagaaaagttgtcatttagatactttcagcccatttagtgaatgttgtgcatgttatgttgaaaaaatggagaagatgatgtggttcctgctcttgtactaat

SEQ ID NO: 29264 - DNA, 524 bp, Homo sapiens
gcaacacacaatatgccctgttctctctctcacttaaacttctgtttcttattccctttgctgtgcttcagctacactaaacttcttgctcttcgttatctatcacagttgcttaaacaccccaggcacacctctgtactgggcagttccctgtgtttgggatgccttttcctcagatagcctcctggctttctttttccattccttcagttctttacttcaaagcccctttctcaataaggacttttctggccatcctagaattcccactatccctcctctcaaacctgtaaacatttcattttcctgctttagtttttctcctttaacactgtatattttgcctaatctatctatggttattgtgtttatttcactcccatgagtaggatgtttgtgtgcctagaaaagggcctagcttgcaataagtagctactcaataaatatttattaaatgagcaactgaagtttacccttcggtgtattgttttaaacattagattgattctcaggtaagaaaaaaa

SEQ ID NO: 29265 - DNA, 2583 bp, Homo sapiens
gctacagcttgaagccaaacatttaatgaaagagagcgggaggggccgaatagaagaatgatgggcgtggccaaccccgaggtggctggaggccgcgcccccttcccagagtgcaccgcagccgctgcattcaggaaccgctttagcttcggccccggccggccgggcggggaagactggtgtggtctggccatggatgggctccaggccagtgcagggccgttgaggcgcgggcggccgaggcgccggcgcaagccccagccacacagcgggtcggtcctggccctgcccttgaggtccaggaagatacgaaagcagctgcgaagtgttgtatcccgcatggcagcgctgaggacgcagacgctgcctagcgagaactcggaggaatcgagggtggagtcgacggccgacgacctgggggacgcgctacccggtggggcggcggtggcggccgtcccggacgcagcccggcgagagccatacggccacctggggcccgcagagctgctggaggcctcgcccgccgcgcgctccctgcagaccccgtcggcgcgcctggtgcccgcttccgcgccgcccgcgcgcctggtggaggtgcccgccgcgccggtccgggtggtggagacctcggccctgctgtgcaccgcgcaacacttagcggccgtccagtcgtccggggcccctgcgacggcgtcggggccgcaggtggataacacgggtggggagccggcctgggactccccgctgcggcgcgtcttggccgagctgaaccgcatccccagcagccggcggcgagcggcccgcctctttgagtggctcatcgcgcccatgccgccagatcacttctaccggcgcctatgggagcgcgaggcggtgctggtgcggcggcaggaccacacctactaccagggacttttctctaccgctgacctggattcgatgctgcgcaacgaggaggtgcagttcggccagcatttggacgccgctcgctacatcaacggacgacgcgagaccctgaacccacccggccgcgcgctgcccgccgccgcgtggtccctgtaccaggccggctgctccctgcgtctcctctgtccgcaggctttctctactactgtgtggcagtttttggctgtgcttcaagagcagtttggaagcatggcaggctccaacgtttacctcacgccccctaactcgcagggctttgccccccactacgacgacatcgaggccttcgtgctgcagctggaaggtaggaaactctggcgtgtataccgaccccgagccccaaccgaggaactggctctgacatccagccccaacttcagtcaggacgacctcggtgagccggtgctgcagaccgtgctggaacctggagatttgctgtattttcctcggggcttcattcaccaagctgaatgccaggatggagtccactctctgcacctcaccttgtccacgtaccagcgcaatacctggggtgacttcttagaggccatactgcctctggcagtgcaggctgcaatggaagaaaatgtggagtttcggaggggtctgccccgagacttcatggattacatgggggcccagcattcagattctaaggatccgcgaagaaccgctttcatggagaaggtgcgggtcttggttgcccgcctgggacactttgctcctgttgatgctgtggccgaccagcgagccaaagacttcattcacgattctctgccccctgttttgactgatagggagagggcactaagtgtttacgggcttccaattcgctgggaggctggagaacctgtaaacgtgggggcccagttgacaacagaaacagaagtccatatgcttcaggatgggatagctcggctggtgggtgaggggggccatttgtttctctattacacagtggaaaactcccgtgtgtatcatctggaagaacccaagtgcttggaaatatacccccagcaagctgatgccatggaactgttgcttggttcttatccagagtttgtgagagtgggggacctgccctgtgacagtgtggaggaccagctgtccttggcaaccacgttgtatgataaggggctgctgctcactaagatgcctctagccctaaattagtttcttgttgattgctggaaacaaggcagtagtgattctccgctgccactgctaccttttttttttttttttttccttaaactcacgttcttaccttgataagcatcagtgtgctcacatttacctttatcactgcttcagtgtcacaaacctcggaaggtcttctaggaagaaccatctcatctaggtacaaaaggaaaaggagaagttggaggtggaaaaaaaacccttgatccgtgatcatttcagagcaccaacttcatcaccttcaggcttcagtgtactgggtaacactgaccatgtcgttctgcttgagacagatattagattttttttggaatttggatctttcatctgagttctttttcatgggcgggtcggggtcagtatcctgtttgttattgttaaatttgtatgaaccttagaaaagttattaaagtgccaaagaatgtttccctttcctaa

SEQ ID NO: 29266 - DNA, 496 bp, Homo sapiens
  misc_feature (34)..(34): n is a, c, g, or t
  misc_feature (56)..(56): n is a, c, g, or t
  misc_feature (77)..(77): n is a, c, g, or t
  misc_feature (119)..(119): n is a, c, g, or t
ggggaggaggaggtcaggggcttgcggttgtgtnggagagggagccgagcagtccngtgcacagtgcagggactacnggtgacagtcaggtgttgtgtgtggcgggtgtgctgagagangactccaggtgctcctaccacacacacatacacacacactaacatcgtacacacatacttaccctcatacacacacatacacacacacactcaccctcatacacatacatacatacacacagtctcacacacaattaaaaacacaccttacacacactcatacacacataatcaaacacacacactcatacacatgcatacacactcatacacacacttatccaaacacacccatgcacacacacttatacacacacatacaaaaaggaaccatggaaggtgttggagatattaattgcagccatcatttcagtagtgtacatgtttaccacagcaccatgttgtccaccatgaatatgtacaataaaaataaatgt

SEQ ID NO: 29267 - DNA, 164 bp, Homo sapiens
agagagagagagagagagagagagagagagagagagagagaggtcacttatcccagaagattattttagtgataattttgatgttgaatcaaactaccctgggttgttgactagatgaatgaatgaatgaatagacagcaggcattgccttctgcgatactgca

SEQ ID NO: 29268 - DNA, 1675 bp, Homo sapiens
ggtagaaattcaaaaaagattgaaatgctgctacagaagaaaaagaaaatactgaggtctctgtaatcacagatatttatgttataagaaatcaatacagattaaaaattaggtaagaaaattgatttactaataatcttgatctttagccacatttctctgaaataaatttgctctaatgctgtgacggggatcagcaagctacgttttccaagttccttcaagtgggatcctgctaggttctgctattgggaggtactagagaaacataggcaaaagaatggaagaataggtctccttttcctgtttgtttgctgtccttgccgatattctcccaagaacatccccttgcccaaggagcagtaattgtttcagtttaccaattttttcagagccccagaaagtgcctcttcagaggtaacagcagcagttggaacatatctctccctcagaggtctagcctcagctcaggaaggcttttactctgagttaacaaattttaataactccagtctcttccctttattcatctaagcttctgaggaggtctgtatgtggccaggagatggtggtgatagctgcatcttgcagtaattttctttgctttccacagtgttgttacttttttctccgatttcttatgtggtcaattttttaatattaactcatagtcatagtgtagtattcatgctttatgtgaaatgaaatgttttttataatgtagccatggcctaccaatagcatattttcttttagatttggtgatatatattttgcttcagtgactttatatccttatttgttgcccaaattagttttttgtatacaaaacatccactattaccctggtcccatcatttcttctgttatccattgtcctgtgatttctcctggaaagtgaattgtttatccgtccatttcactctgtgaagtcatacaggtctatctatatagaactcctgtgctccaatttattccctgtgtgaaactgggcaatgtattaatctgggaatatgtttcttcatatgcaaatcagagataacacttacctcacaacattgtttagagcattaaaagaaatataatatgatatcattcacacagaatttccctgggtgtgaattgaacaatgtcaatttttctcccatttaatgtgaaaactaactatataaataaacaaaaaaaacaaaaaaaagaagaaaaaatcaataaaaattattatcaaatgtatacatattaaaatattatcgagtcttatacaaattgagtttttcaaaaataataatgattgtaacttttatattgcagttaatgcaagaagcattatgaaggagaatcacatgtctagagcaaagtgatgttaatagtgtttatgtttgagccagatggaactcctcataggagcacacagtgctcacctcctcccaactttgcattcaaagaaatcatattcataagccaaaattggtcatagaggaaatattcaacaccactaaattaagcaaactaaaaatacagcagtttttctcagtgaactggttgttaaatacatactaaatcaccactaggtggtataggccctcataaatcgcaaaataaaaatgggactgcttagtttctattttgttactttctttatttctgaagagaatgagctcaaattttaacagcagag

SEQ ID NO: 29269 - DNA, 436 bp, Homo sapiens
ttacttactcctgctctacacttgagcctgctcggcactccaggcaggtcttggggctcctatgtaagctgtgttaagctgcagcctaaacacacagcctccccacctcatgatgatgaagaggcagctggggacctgtctacgacagttgacatgaattattatgggaaaataaaatctgttatcaggaaaactaatttagaaacagatgttgggggtacagcccaagttagaaatgaattgcatttatttataaatgattctggtctttagccatttagtattttctttagtgatgatacagatctggatttattcatgtgatagtaaccagaagcatcttcttcctgatgttactattttatggccttcaaaaaagtatttgccttcgttgggcatagtcagagttcctctatcaatacaaattctgatgata

SEQ ID NO: 29270 - DNA, 305 bp, Homo sapiens
cccatcaatatgactttctatactgcttttgaggtcttttgattatcaccttggttaaatgaataacttttattttgcaataacctttgattctggttagaccaagtgttttaaacttttgacatctgtgataagttcccttacggttcaaatcctaaattaagtctttttgaactaaataattatactttttttgtaaattgtatcagaggcattgtcaaatgacaaatgataatagatcttctttcagttagatttatgtgtatgttattgatacaaatattccaaaaattacataaggctgg

SEQ ID NO: 29271 - DNA, 452 bp, Homo sapiens
  misc_feature (1)..(1): n is a, c, g, or t
ngtaatctttcttggtcactgaaacttactagatataggcgagttttatatggaccgtttatggacctttcttatttagaaatctaatgaactaacggttagcttgatagatacgtctggggcatttgcatatcttggtttcccatttctcaggttttaataacagtaaccttgaaaaaagttgatgttcctctggctgtgaaagggctgctgtacctgtttaattattgagttgtgatgataaagcaggctgtatgtgcagttccttgttctttggatgaaaaagtaaactaggggtatagcgtcctagtaatgtaatttttagaaaatattcaactttaggtttccaaaattgggaaatcttggattataaacatttgtctttttttttttctttttttagacggaatctcgctctgtcgcccaggcctggagtgcagtggcgccatctg

SEQ ID NO: 29272 - DNA, 513 bp, Homo sapiens
  misc_feature (476)..(476): n is a, c, g, or t
catctggaaactagttcatttatatttccttctggtctacatgcaatttactcagagatcattttttccatagcggtatagcctactaatgtagtacatactgtaagggctccaagaaacatacctaaaaagttaactaaattcctatgcgagaggtgaaaaggttttgctactattttgccgacagacatggatggtgttccttcctctctatcttgaattacttggcctcacagtacttgagaacattccatttcagtaaaaagttattgcatacctaaataatccaggcaacatgctaggtcaatgtgacttactaagttttgacctttgacatcattctcttacatatttttacataaggaaagagtatttgttttatcttggtgggaacttttattcatccaatgaataatatattaaagaaaacaagtgggaaatttcatgcagaaattacatacaagaaataggaaganaatatacgtcgacgcggccgcgaatttagtagtagta

SEQ ID NO: 29273 - DNA, 1775 bp, Homo sapiens
catctggaaactagttcatttatatttccttctggtctacatgcaatttactcagagatcattttttccatagcggtatagcctactaatgtagtacatactgtaagggctccaagaaacatacctaaaaagttaactaaattcctatgcgagaggtgaaaaggttttgctactattttgccgacagacatggatggtgttccttcctctctatcttgaattacttggcctcacagtacttgagaacattccatttcagtaaaaagttattgcatacctaaataatccaggcaacatgctaggtcaatgtgacttactaagttttgacctttgtatattttcttcctatttcttgtatgtaatttctgcatgaaatttcccacttgttttctttaatatattattcattggatgaataaaagttcccaccaagataaaacaaatactctttccttatgtaaaaatatgtaagagaatgatgtcaaagtttagtctttttattaaaatatagtctccatgagtagactttgtattcttcatcatatatttcctagcacaggcagcattcaataagtatttgctgatgaacaaaaaatggggccgggggtagatggcaaatggaaacctactctggaagcaacattcattctaattcttttcctgaaaaaaaaaaaaaaaaaacaacaaaaaaaagtagcacttgaaagtttttaaactaatcttctaccagaaatggaagtgaaatttcatagtgaggttacccaccaaacaccacaaggagtgagagggctagaagagagaattccagccaagcaagggcacaaaggaaagcaatttggccaagcagtgacatttcctcatttgtttgcctgattatatagagaatcatcttggagagactccaggaagtaaaatacaaaaagatttgggaactctccccagacgtcaaaaaagagcaggcatcctcatcaacaggccatatacatgaagtaggcctctaatactaagatctcctacttttcctttggtgtgagggaaggaaagctttgaaagtgaggctcactcgggggctaacaatcattaaagaatacaaattaccaatttaaactagcctagactttcactgtaagtaggcaaagacaatggaaaatgactaggtgttataaatgacaatcaggagctgtaaaggagaccaagcagtcctcaaaaagagttaagtcaaggcaagaaagcacagaaaactttttaaaaaattctaatcaacaacctcagtgagagttaacagggatttaaaaggatattacattgacaaagcaagagaaactgctacagaaacagcagatgacaagaagagaaactatacagcagaaaaaaaaggaaaaaaatagtagagaagcacacttggaaataaaacacataataatgaaatcaaactcaacagttgagaacagcggaatcaacaacaatgtaaactgaaatgataaactaaaaagagcatattaaagaatttactggccaggcacagtggctcatgcttgtaattccaacactttgggaggctgagattacagatgtgagccaccgtgactgacctattatctgattttagccaacaatgttgtttttcttaatattctttcactgttaattaaatgtgatttaagtaatatcttttaactctcagttgttatagatgaaacagccagcaaaaactcaccctacttcacttcttccataatctttgtcctcctaaattttctattgcatcatttcta

SEQ ID NO: 29274 - DNA, 1655 bp, Homo sapiens
ggaccaccccccaaaaccggggcccgttcccggatgtgaaaaggttttgctactattttgccgacagacatggatggtgttccttcctctctatcttgaattacttggcctcacagtacttgagaacattccatttcagtaaaaagttattgcatacctaaataatccaggcaacatgctaggtcaatgtgacttactaagttttgacctttgtatattttcttcctatttcttgtatgtaatttctgcatgaaatttcccacttgttttctttaatatattattcattggatgaataaaagttcccaccaagataaaacaaatactctttccttatgtaaaaatatgtaagagaatgatgtcaaagtttagtctttttattaaaatatagtctccatgagtagactttgtattcttcatcatatatttcctagcacaggcagcattcaataagtatttgctgatgaacaaaaaatggggccgggggtagatggcaaatggaaacctactctggaagcaacattcattctaattcttttcctgaaaaaaaaaaaaaaaaaacaacaaaaaaaagtagcacttgaaagtttttaaactaatcttctaccagaaatggaagtgaaatttcatagtgaggttacccaccaaacaccacaaggagtgagagggctagaagagagaattccagccaagcaagggcacaaaggaaagcaatttggccaagcagtgacatttcctcatttgtttgcctgattatatagagaatcatcttggagagactccaggaagtaaaatacaaaaagatttgggaactctccccagacgtcaaaaaagagcaggcatcctcatcaacaggccatatacatgaagtaggcctctaatactaagatctcctacttttcctttggtgtgagggaaggaaagctttgaaagtgaggctcactcgggggctaacaatcattaaagaatacaaattaccaatttaaactagcctagactttcactgtaagtaggcaaagacaatggaaaatgactaggtgttataaatgacaatcaggagctgtaaaggagaccaagcagtcctcaaaaagagttaagtcaaggcaagaaagcacagaaaactttttaaaaaattctaatcaacaacctcagtgagagttaacagggatttaaaaggatattacattgacaaagcaagagaaactgctacagaaacagcagatgacaagaagagaaactatacagcagaaaaaaaaggaaaaaaatagtagagaagcacacttggaaataaaacacataataatgaaatcaaactcaacagttgagaacagcggaatcaacaacaatgtaaactgaaatgataaactaaaaagagcatattaaagaatttactggccaggcacagtggctcatgcttgtaattccaacactttgggaggctgagattacagatgtgagccaccgtgactgacctattatctgattttagccaacaatgttgtttttcttaatattctttcactgttaattaaatgtgatttaagtaatatcttttaactctcagttgttatagatgaaacagccagcaaaaactcaccctacttcacttcttccataatctttgtcctcctaaattttctattgcatcatttcta

SEQ ID NO: 29275 - DNA, 246 bp, Homo sapiens
tttttgtatttttagtacaggcaggatttcactatgttggccaggctggtctcgaactcctgacctcaggtgatttgctccccttggtctcccaaagtgctgggattacaggcatgagccactgtgcctggccttattcagttaatttattgagaacctgctgtgtcctagacactattgaccactgtatatgcagtatcactttgtaatatagcttttatacaatcattttaaaaagaaatttag

SEQ ID NO: 29276 - DNA, 554 bp, Homo sapiens
gggtgtgaagggaaagaggctcaaagctaagtactgtagctagtttctggtttctagtataggagagacacttcatagaaatacctcccaaggtgctgggcttataagtgtgagctaccatggtaggccatcatttaaaaaaaaaaaattagtgtttttgtttgggtggcttttttagatgggggctatgttgcctaggctggccttgaactccttgcctgaagccatcctcctgcctcctgagtaactggaaatacaggcgcctgccactgcacccagctcctactcattctttaggtttcagcctggatgttcttttttctgaaaagcattttctgactccgcctacttctcagcctgtatgaggattgcctccatcccccaaatcacacagtagtgtctctctttactgctgcttgtcatccttgtatgtacttactgtggtgctttgaatactctaggcattttaatatttattggagatactcagtaggtagttggtgttctttgactgactttcctctaaagactaaaattcagaatttactgtcagg

SEQ ID NO: 29277 - DNA, 769 bp, Homo sapiens
tgtatgctagagatgatgtctatgtcacaggacagtgacagagatgaaatgattaatgattaaatggctaaatgtcttccaagtgcctggctcatagtaggtatccaaagaaaaggaggcattcatagtaaagatgggtaaatattcatgtgttacagatggaagcaaatgggactcaaagaagttaagacatttgccctaaatcacacagacagttcttaaatggccaagtcagatctggccccagtttgttccccttccactctgccgtggctacctcctgttaatggactatacatttagagtgcttttgcctcataaagtgtgtgaagctccataaatataaaatgtttgtagtcccagccttgctagctcaaatccaagttaaattgactcttgggtagttcttctctcagccccaattctcataagctcaaatatatattttcttagtcccctgggatcctccattctgtgccccaacaatccctaacccttcattagtaatgcctagatgtctccacatatttcaaggggtgccagaaagtctccagacaaaataaaagatgccataaaacactaagtgcataaaactctagacaccttgttctccatgtcatgtttccttttaaaaacaaatattttgaaatgccctctttactatcctgctgatacacacataaaaactaataaaatgcacaaactcttttcttaaaaattgtgggaagatatacataataaaaaatttaccattttaaccactttcaaa

SEQ ID NO: 29278 - DNA, 342 bp, Homo sapiens
agggccaaggggtaagttcacagccttaaatgcctacatcaaaagatctgaaagagcacaaatagacaatctaaggtcacacctcaaggaacttgagtaacaagaacaaaccaaacccaaacccagcagaagaaaagaaataatcaagatcagagcagaactaaataaaactgaaagaaacaaacaacaacaacaaaaaaaaaacaagacaaaagataaatgaaacaaaaagctggttctttgaaaagataaataaaattgatagaccatgagcaacaataaccaggaagagagaagatccaaataagttcaattagaaatgaaacaggagatattgcaacc

SEQ ID NO: 29279 - DNA, 327 bp, Homo sapiens
ttgtgagatccatcccctggcttcattccctgaactggctttagaacactggcagtctagcttataacccccaggctgactagagaactcaaggtaaaagcagcccaagaaaaacagaccaacagaaaagcaatgagagaaaggatgaaggttcccttctcgatgatccattaaatggaagagtaacccaagaaaacatcatggaatccaagaatcagtggatccagcacaacaaagaggcaaagggaattccctaggacagtgtttatggaatcccatgacagtaattatccaacagacctagcgaaccaggccagactggagcag

SEQ ID NO: 29280 - DNA, 317 bp, Homo sapiens
tgaagtctaaccaggaaaaaggaggatgtgcaaaagtatgtttgtgttattattttgtgctttgttttagcttaatacataatttatgtctacccctgtttctgctcttaaaatacactataggaaaatgctatctggacattctttaagcctttctgaaaagtacttgtaacagaagcctttccatttaatggtttaaaaaaaaagtaaatagaatttatggctgtcctgggcccaattaaatttccattcaaacttgtcctgactggaaaataaattgcctatggattctgaataaggggtttgcacacttggag

SEQ ID NO: 29281 - DNA, 943 bp, Homo sapiens
atgtcagatgacgccggtccacgagaaggagggtggattatatccttagagacgccatagagtgaggatataattgctctgtaacaagcataaactgtgatggtctgggatgccctcgtcataggcagcccctggagagtccctcgtcatagacagcccctggagagtcgaaggtccacagaaaacatcctggggtcctgagctgaagtgtgatgggaggagtcctctgtatctcagtctgatcctggtctccctctcggccatggtctcacactagtgctgctgggaaaccatccctcacatccagtcctggcatcgggcagtgactctggtccaactgttgtccaactcaagggtttagctgcttagattttcctaaaacttgaatttcattttcctctagccatggaatacagattaatcctttacaattaaaatccaagttcagattttatttgttgtggtttttaattaaaatctcaccagcactttgtggattttttttttcttagaaaggcaaacacactgtgcgtatcagtcagcctggactgccatcacaaaataccatagactgtgtgtcttaaaacaacagaaatgtattttctcacagttctggaggctggaagttcaaggtcaatgttctggatgatttggtttccagtgaggcctctctttcttgcttgcagatggctgccattcttctgtgtcctgtagggaagttcaaacttttcctctgaaggtttgaacaaactgacaatatgcagactaataggaggaagaaaggcattcaaagttgctaatgtgcataagccaaggccacagaaaatatgagattcaaaggagcaccaggcgcctgaggcttaaataccctcctcataagggagagggaaatggggttgtaggcaattgcgaggggcagtaaatgactttcagtaaacgcatg

SEQ ID NO: 29282 - DNA, 453 bp, Homo sapiens
atgtcagatgacgccggtccacgagaaggagggtggattatatccttagagacgccatagagtgaggatataattgctctgtaacaagcataaactgtgatggtctgggatgccctcgtcataggcagcccctggagagtccctcgtcatagacagcccctggagagtcgaaggtccacagaaaacatcctggggtcctgagctgaagtgtgatgggaggagtcctctgtatctcagtctgatcctggtctccctctcggccatggtctcacactagtgctgctgggaaaccatccctcacatccagtcctggcatcgggcagtgactctggtccaactgttgtccaactcaagggtttagctgcttagattttcctaaaacttgaatttcattttcctctagccatggaatacagattaatcctttacaattaaaatccaagttcagatttt

SEQ ID NO: 29283 - DNA, 993 bp, Homo sapiens
tatcagtaatacgctattttattttcacaaacatctggctcatagataatgtttatcgatgagaaaacagaaatttgaagaggcaaagcaagttgcccaaggccaagggagaaggtcagcgtgaactgctaccgccatgttgaagttcatcttctcttcactgcgagaagctgcctggacaccagggtggaggagctgtcagggccctcactgtggaaggaaggtccacagaaaacatcctggggtcctgagctgaagtgtgatgggaggagtcctctgtatctcagtctgatcctggtctccctctcggccatggtctcacactagtgctgctgggaaaccatccctcacatccagtcctggcatcgggcagtgactctggtccaactgttgtccaactcaagggtttagctgcttagattttcctaaaacttgaatttcattttcctctagccatggaatacagattaatcctttacaattaaaatccaagttcagattttatttgttgtggtttttaattaaaatctcaccagcactttgtggattttttttttcttagaaaggcaaacacactgtgcgtatcagtcagcctggactgccatcacaaaataccatagactgtgtgtcttaaaacaacagaaatgtattttctcacagttctggaggctggaagttcaaggtcaatgttctggatgatttggtttccagtgaggcctctctttcttgcttgcagatggctgccattcttctgtgtcctgtagggaagttcaaacttttcctctgaaggtttgaacaaactgacaatatgcagactaataggaggaagaaaggcattcaaagttgctaatgtgcataagccaaggccacagaaaatatgagattcaaaggagcaccaggcgcctgaggcttaaataccctcctcataagggagagggaaatggggttgtaggcaattgcgaggggcagtaaatgactttcagtaaacgcatg

SEQ ID NO: 29284 - DNA, 503 bp, Homo sapiens
tatcagtaatacgctattttattttcacaaacatctggctcatagataatgtttatcgatgagaaaacagaaatttgaagaggcaaagcaagttgcccaaggccaagggagaaggtcagcgtgaactgctaccgccatgttgaagttcatcttctcttcactgcgagaagctgcctggacaccagggtggaggagctgtcagggccctcactgtggaaggaaggtccacagaaaacatcctggggtcctgagctgaagtgtgatgggaggagtcctctgtatctcagtctgatcctggtctccctctcggccatggtctcacactagtgctgctgggaaaccatccctcacatccagtcctggcatcgggcagtgactctggtccaactgttgtccaactcaagggtttagctgcttagattttcctaaaacttgaatttcattttcctctagccatggaatacagattaatcctttacaattaaaatccaagttcagatttt

SEQ ID NO: 29285 - DNA, 369 bp, Homo sapiens
tttagatagagtctcactctgtcgcccaggctggagtgcattggcaagatctcagctcactgcaacgtccgcctcccgggttcaagaaggtccacagaaaacatcctggggtcctgagctgaagtgtgatgggaggagtcctctgtatctcagtctgatcctggtctccctctcggccatggtctcacactagtgctgctgggaaaccatccctcacatccagtcctggcatcgggcagtgactctggtccaactgttgtccaactcaagggtttagctgcttagattttcctaaaacttgaatttcattttcctctagccatggaatacagattaatcctttacaattaaaatccaagttcagatttt

SEQ ID NO: 29286 - DNA, 382 bp, Homo sapiens
aactgaatttcataaaaggtgtctttctaatgcctttaaatataaaagaaggaagtaggatcgagtacactaaaaagaaaaatagtcatatgatgtaagagtttgtccaccagagcttaacaaaaacagtggagaacagaaaaaaaaatgggctaaatattgaatacaatagcagtttagtaatgatcagaggacagggagatggggggatcatgtctcggcaaaagaaaggtcaaaacaaggcagaaagtacattttgggttaattcaaacaaggtaaagtaatagaagaaaataataccaagtagacattgttttaagataatgaaatgtatagcctaatgttatgcacattgcttagcaacaagcaattaaaaaaaaga

SEQ ID NO: 29287 - DNA, 379 bp, Homo sapiens
cttctcccacgctcctaccttttgtagtctccagtgtctgtttttctattctgtatgtctaagtatttttcatcattgtagcatacaatcaaaaattggtaaaatttaagtgtcaaattcctagttaaaattttttgaaatgatggcatacaaacagctttaaaggtaggccttccgtcccattttttttttttggtaagatttatgaatagattgaaaaatataaaaattcggtggaaatcagaagctaagtcttatctttagtagtcagcttcctttctatgaatttgagttttattgagtcttcttcatcacaagagatcatgaatttggtaataaatctagaaaagtgcagctttttgttagtatatgtaaataa

SEQ ID NO: 29288 - DNA, 3637 bp, Homo sapiens
tctgttatcctaaatactttattatttcagaaatgcttttatttcttattttttttcagtcatcattgttacctaattcaagtgagtaccttctccatgccaggtcttgtgtttacatggttaaaacatggttcctgccctcaaggagtttacagcatacagagggatataataaaaacagacagataaggaattagaagggattggtgctaagacagggacaaacacaaaatgctctagaagcacagaataggggaacctacccaatttgaggaggtggaggaaggacaggaaaatcctgtcacagaaaatagcttctaagctgagatctgatgaagtagaagaatttattcaggtaaaggggttagatcgggaaaggggtcttctgggtagaaagaactatgtaaagtgattcagagttattacattctgcaaactgggaataattcacagtaactgtagtaagcatccaaggggcaaggccaagctgggtgtagtggcaggtgcctgtaatcccagttactcaagaggctgagacaggagaatcgcttgaatccgggaggcggaggttgcagtgggccgagttagcaccattgcactccagcctgggcgacagagtgagactccgtctcaaaaaataataaatgaagtaacaatggtgaagtttgaagtaactcaggtgaagtaacacctaagtggaaattccatactccactcagtaaaccattatcatgggctagttgaattgtaagacactttattatgttgctacaatatttcaggtgagagatgattaggaaccaaggaaggtaatgacaatgggtataaagaagagtagacagggctgggcatggtggctcacgcctgtaatcccagcactttgggagaccgagatgggggggatcacctgaggttgggaattcaagaccagcctggccaacatggtgaaaccccatctctaccaaaaatagtaaaaattaaccgggcgtggtggcgggtgcctgtaatcccagctactcaggaggctgagacaggagaatcacttaacccaggaggtggaggttgcagtgagccaagatcgcaccattgcactccagcctgggcgacaagagcaagactccatctcaagaaaaaactcaaacaccaaatacaaaagaaaaaggactggagtatccatttgatttggcagttagtaacctttttgagaccaatttcagtggatttgtagaggtgaaatctggcttatagaactaagtaatatggagaggttttgtggttgttttaggatgggaataattcaggcatatttattgaaagagtgaaaggaataagtaaaagctggagctcagtagagaatgataataaccaaaaagcagggttctgaagagaaaggaggtgaaatgagcacaggtggatgtggtttagttacatggtctacttctgcagacgtttgctgagcacttaccgtgtgccagccactctactaggtggtggggttagtctacttgggaagccaactgagtgagaaagtggtctcaagtaggactatatatgcctcatcctgctggagactcaaggcgaaaatataacagtaaactcccagctgattgtttttgactggggctaagtaatttataggagtcgttgtctgacagctttagtcagacttgtaaagtaggatgttagagaggtgggagtgtaaaaagtatagccataaaaggacatagaagagaggaggggcggagcccaatgactcaggcgcctataatcccgacagtttgggaggctgaggcaggaggattgcttgagtccaggagttccagaccagcctggacaacatggtaagaactcatctgtacaaaaaataaaagccaggcatggtggcacacgcctatagtcccagctacttgggacggtgaggtaggaagatctcgagcccaggacgagactgcagtgcacaattatcgtgcttgtgactagccactgcactccagcctgggcaacataaccaaaccccatctcttaaaaaaggtggggaggggtggttaggaagcaagcaatgttgaggttctaacagattggtaccatgaacatgtaatggtaccaatccatatctttgtgctattttctctagaagcacctagctccctgggtacaagagcagggacgacattattgtttagatcctgagtcaggatttgtagacagataaagtatactaagaaggaagcaaggggatgaaagtgctggtgaaagattaaagaatctctctgattatagctagataagaaaataggctaaggaagttgtgataaagctggtctcgaactcctgatctcaggtgatccacccaccttggcctcccaaagtgttgggattacaggcgtgagccaccatgcccggcccccctcaaatggttttatctgtcacactggtgctcctgcaatggacaaaggagacgtttcctgtaggaccagcatctctttactcaggtttttcaatcttggaactgctgacattttgggccaagtaattctttgttgcagggactgtcctgtgcatttcaggatgtttaacagcatctttgtcctctacccattagttgcttagtcagaataatcagaaaagtccccagacattgccaaatgccccctggagttgcctggttgcctggttgagaatcactatgcttaagaaaggggctcttgttgtaatcccagcactttgggaggccgaggcgggaggatcacgaggtcaggagatcgagaccatcctggttaacacagtgaaaccccatctctactaaaaatacaaaaattagctgggcatggtggcatgcgtctgtagtcccagctactcgggaggctgaggcaggagaatggcatgaaccccgggaggtggagcttgcagtgagccgagatcgcgccactgcactccagcctgcgtgacagagagaggctccatttcaaaaaaaaaaaaaaaaaaagcggggatggggggctgttttaactcaggtctgggcccacttagtcctcatggcagtatctattcttattcctgcatctccatgcctagctgcctttttctcacctttctttctggggctaccacacctttatcagatgagatcctccaacctctctctaccctcagtatctccaaaagtgccacctgggttgaaaatgagaagcaaaagcatctacccttccccctcttgcaccaagggtataccctaattagataggaatttacataattggtaaaaataagatatcatgggctggccacagtggctcacacctgtaatgccagcattttgagaggccgaggcacgaggaattcttcagcccaggagtttgagaccaggctgggcgatgtagtgagaccttgtctctacaaaaaaattaaaaattaactgagtggtggcaggcgcctgtagtcccagctactcgggaggctgaggcaagagaattgcttgaacttcggaggaagaggtttaagtaagcaaagattacaccaccgcactccagcctgggtgacagagccagactctgtctccaaaacaaaagacaaagtgcatacaaggctcagctcttaacaatgactgcttggataacagacgactaattggaggtcc

SEQ ID NO: 29289 - DNA, 3575 bp, Homo sapiens
tctgttatcctaaatactttattatttcagaaatgcttttatttcttattttttttcagtcatcattgttacctaattcaagtgagtaccttctccatgccaggtcttgtgtttacatggttaaaacatggttcctgccctcaaggagtttacagcatacagagggatataataaaaacagacagataaggaattagaagggattggtgctaagacagggacaaacacaaaatgctctagaagcacagaataggggaacctacccaatttgaggaggtggaggaaggacaggaaaatcctgtcacagaaaatagcttctaagctgagatctgatgaagtagaagaatttattcaggtaaaggggttagatcgggaaaggggtcttctgggtagaaagaactatgtaaagtgattcagagttattacattctgcaaactgggaataattcacagtaactgtagtaagcatccaaggggcaaggccaagctgggtgtagtggcaggtgcctgtaatcccagttactcaagaggctgagacaggagaatcgcttgaatccgggaggcggaggttgcagtgggccgagttagcaccattgcactccagcctgggcgacagagtgagactccgtctcaaaaaataataaatgaagtaacaatggtgaagtttgaagtaactcaggtgaagtaacacctaagtggaaattccatactccactcagtaaaccattatcatgggctagttgaattgtaagacactttattatgttgctacaatatttcaggtgagagatgattaggaaccaaggaaggtaatgacaatgggtataaagaagagtagacagggctgggcatggtggctcacgcctgtaatcccagcactttgggagaccccatctctaccaaaaatagtaaaaattaaccgggcgtggtggcgggtgcctgtaatcccagctactcaggaggctgagacaggagaatcacttaacccaggaggtggaggttgcagtgagccaagatcgcaccattgcactccagcctgggcgacaagagcaagactccatctcaagaaaaaactcaaacaccaaatacaaaagaaaaaggactggagtatccatttgatttggcagttagtaacctttttgagaccaatttcagtggatttgtagaggtgaaatctggcttatagaactaagtaatatggagaggttttgtggttgttttaggatgggaataattcaggcatatttattgaaagagtgaaaggaataagtaaaagctggagctcagtagagaatgataataaccaaaaagcagggttctgaagagaaaggaggtgaaatgagcacaggtggatgtggtttagttacatggtctacttctgcagacgtttgctgagcacttaccgtgtgccagccactctactaggtggtggggttagtctacttgggaagccaactgagtgagaaagtggtctcaagtaggactatatatgcctcatcctgctggagactcaaggcgaaaatataacagtaaactcccagctgattgtttttgactggggctaagtaatttataggagtcgttgtctgacagctttagtcagacttgtaaagtaggatgttagagaggtgggagtgtaaaaagtatagccataaaaggacatagaagagaggaggggcggagcccaatgactcaggcgcctataatcccgacagtttgggaggctgaggcaggaggattgcttgagtccaggagttccagaccagcctggacaacatggtaagaactcatctgtacaaaaaataaaagccaggcatggtggcacacgcctatagtcccagctacttgggacggtgaggtaggaagatctcgagcccaggacgagactgcagtgcacaattatcgtgcttgtgactagccactgcactccagcctgggcaacataaccaaaccccatctcttaaaaaaggtggggaggggtggttaggaagcaagcaatgttgaggttctaacagattggtaccatgaacatgtaatggtaccaatccatatctttgtgctattttctctagaagcacctagctccctgggtacaagagcagggacgacattattgtttagatcctgagtcaggatttgtagacagataaagtatactaagaaggaagcaaggggatgaaagtgctggtgaaagattaaagaatctctctgattatagctagataagaaaataggctaaggaagttgtgataaagctggtctcgaactcctgatctcaggtgatccacccaccttggcctcccaaagtgttgggattacaggcgtgagccaccatgcccggcccccctcaaatggttttatctgtcacactggtgctcctgcaatggacaaaggagacgtttcctgtaggaccagcatctctttactcaggtttttcaatcttggaactgctgacattttgggccaagtaattctttgttgcagggactgtcctgtgcatttcaggatgtttaacagcatctttgtcctctacccattagttgcttagtcagaataatcagaaaagtccccagacattgccaaatgccccctggagttgcctggttgcctggttgagaatcactatgcttaagaaaggggctcttgttgtaatcccagcactttgggaggccgaggcgggaggatcacgaggtcaggagatcgagaccatcctggttaacacagtgaaaccccatctctactaaaaatacaaaaattagctgggcatggtggcatgcgtctgtagtcccagctactcgggaggctgaggcaggagaatggcatgaaccccgggaggtggagcttgcagtgagccgagatcgcgccactgcactccagcctgcgtgacagagagaggctccatttcaaaaaaaaaaaaaaaaaaagcggggatggggggctgttttaactcaggtctgggcccacttagtcctcatggcagtatctattcttattcctgcatctccatgcctagctgcctttttctcacctttctttctggggctaccacacctttatcagatgagatcctccaacctctctctaccctcagtatctccaaaagtgccacctgggttgaaaatgagaagcaaaagcatctacccttccccctcttgcaccaagggtataccctaattagataggaatttacataattggtaaaaataagatatcatgggctggccacagtggctcacacctgtaatgccagcattttgagaggccgaggcacgaggaattcttcagcccaggagtttgagaccaggctgggcgatgtagtgagaccttgtctctacaaaaaaattaaaaattaactgagtggtggcaggcgcctgtagtcccagctactcgggaggctgaggcaagagaattgcttgaacttcggaggaagaggtttaagtaagcaaagattacaccaccgcactccagcctgggtgacagagccagactctgtctccaaaacaaaagacaaagtgcatacaaggctcagctcttaacaatgactgcttggataacagacgactaattggaggtcc

SEQ ID NO: 29290 - DNA, 2511 bp, Homo sapiens
tctgttatcctaaatactttattatttcagaaatgcttttatttcttattttttttcagtcatcattgttacctaattcaagtgagtaccttctccatgccaggtcttgtgtttacatggttaaaacatggttcctgccctcaaggagtttacagcatacagagggatataataaaaacagacagataaggaattagaagggattggtgctaagacagggacaaacacaaaatgctctagaagcacagaataggggaacctacccaatttgaggaggtggaggaaggacaggaaaatcctgtcacagaaaatagcttctaagctgagatctgatgaagtagaagaatttattcaggtaaaggggttagatcgggaaaggggtcttctgggtagaaagaactatgtaaagtgattcagagttattacattctgcaaactgggaataattcacagtaactgtagtaagcatccaaggggcaaggccaagctgggtgtagtggcaggtgcctgtaatcccagttactcaagaggctgagacaggagaatcgcttgaatccgggaggcggaggttgcagtgggccgagttagcaccattgcactccagcctgggcgacagagtgagactccgtctcaaaaaataataaatgaagtaacaatggtgaagtttgaagtaactcaggtgaagtaacacctaagtggaaattccatactccactcagtaaaccattatcatgggctagttgaattgtaagacactttattatgttgctacaatatttcaggtgagagatgattaggaaccaaggaaggtaatgacaatgggtataaagaagagtagacagggctgggcatggtggctcacgcctgtaatcccagcactttgggagaccgagatgggggggatcacctgaggttgggaattcaagaccagcctggccaacatggtgaaaccccatctctaccaaaaatagtaaaaattaaccgggcgtggtggcgggtgcctgtaatcccagctactcaggaggctgagacaggagaatcacttaacccaggaggtggaggttgcagtgagccaagatcgcaccattgcactccagcctgggcgacaagagcaagactccatctcaagaaaaaactcaaacaccaaatacaaaagaaaaaggactggagtatccatttgatttggcagttagtaacctttttgagaccaatttcagtggatttgtagaggtgaaatctggcttatagaactaagtaatatggagaggttttgtggttgttttaggatgggaataattcaggcatatttattgaaagagtgaaaggaataagtaaaagctggagctcagtagagaatgataataaccaaaaagcagggttctgaagagaaaggaggtgaaatgagcacaggtggatgtggtttagttacatggtctacttctgcagacgtttgctgagcacttaccgtgtgccagccactctactaggtggtggggttagtctacttgggaagccaactgagtgagaaagtggtctcaagtaggactatatatgcctcatcctgctggagactcaaggcgaaaatataacagtaaactcccagctgattgtttttgactggggctaagtaatttataggagtcgttgtctgacagctttagtcagacttgtaaagtaggatgttagagaggtgggagtgtaaaaagtatagccataaaaggacatagaagagaggaggggcggagcccaatgactcaggcgcctataatcccgacagtttgggaggctgaggcaggaggattgcttgagtccaggagttccagaccagcctggacaacatggtaagaactcatctgtacaaaaaataaaagccaggcatggtggcacacgcctatagtcccagctacttgggacggtgaggtaggaagatctcgagcccaggacgagactgcagtgcacaattatcgtgcttgtgactagccactgcactccagcctgggcaacataaccaaaccccatctcttaaaaaaggtggggaggggtggttaggaagcaagcaatgttgaggttctaacagattggtaccatgaacatgtaatggtaccaatccatatctttgtgctattttctctagaagcacctagctccctgggtacaagagcagggacgacattattgtttagatcctgagtcaggatttgtagacagataaagtatactaagaaggaagcaaggggatgaaagtgctggtgaaagattaaagaatctctctgattatagctagataagaaaataggctaaggaagttgtgataaactggtcaagccaggcgcggtggcccacacctgtaatcctagcactttgggaggctggggtgggtggatcatgaggtcaggtcaggagtttgagaccagcctggccaacatagtgaaactccgtctctactaaaaatacaaaaaattagctgggtgtggtggcgtgcgcctgtaatcccagctaccagggaggctg

SEQ ID NO: 29291 - DNA, 2238 bp, Homo sapiens
tcaataaataaaataaagtagcatcaaattgatacatatcctagagtagttatctttttttcctctgagctccaacaagaaacaacagtatttacatttttaactggagacaaaactctgcataggagaaattcaaacatcagcagacatatgagggcgttttttggcagaggcaacttactgtcaataaagtctcacccctggtgaacgccacctgctcacacgtacaaaaggaaagtcatttagtgatcatgaatcctggtttgacgttaaggtccatgtctgaagtgtcgtttatgattagggaagtctgagtcatccttaggcttcctctattgcatttgagtcatttccttttttacagacccaaactgtacagcccaggatatttcttaaatgtccaaaagtacagagttttggaactaaagggacattcgagatcattgagttcagtgtactcgttttacaaatggtgaaactaaggccaagaggagcatgcctttgcctgattgcacagcctctgtggggcagttttgcctataccaagaagggtataggaaaataccctattctctagaaccagctgatttcacagcaaatttggattctggcttgaatttatttttgtcagaagtaaactaaaaatacttggtctgaaagtctgagagggactcagggcccaggggaacaagcaggcatctctggtatatccccctcaaatagttttttgtttgtttgttttagacagagtgttgctcttgtttcccaggctggagagcaatggcgcaatctcggctcactgcaacctccacctcctagattcaagcgattctcctgccgcagcctcccaggtagccatcacacccagctaattttttgtatttttagtagagatggggtttcatcatgttggccaggctggtctcgaactcctgatctcaggtgatccacccaccttggcctcccaaagtgttgggattacaggcgtgagccaccatgcccggcccccctcaaatggttttatctgtcacactggtgctcctgcaatggacaaaggagacgtttcctgtaggaccagcatctctttactcaggtttttcaatcttggaactgctgacattttgggccaagtaattctttgttgcagggactgtcctgtgcatttcaggatgtttaacagcatctttgtcctctacccattagttgcttagtcagaataatcagaaaagtccccagacattgccaaatgccccctggagttgcctggttgcctggttgagaatcactatgcttaagaaaggggctcttgttgtaatcccagcactttgggaggccgaggcgggaggatcacgaggtcaggagatcgagaccatcctggttaacacagtgaaaccccatctctactaaaaatacaaaaattagctgggcatggtggcatgcgtctgtagtcccagctactcgggaggctgaggcaggagaatggcatgaaccccgggaggtggagcttgcagtgagccgagatcgcgccactgcactccagcctgcgtgacagagagaggctccatttcaaaaaaaaaaaaaaaaaaagcggggatggggggctgttttaactcaggtctgggcccacttagtcctcatggcagtatctattcttattcctgcatctccatgcctagctgcctttttctcacctttctttctggggctaccacacctttatcagatgagatcctccaacctctctctaccctcagtatctccaaaagtgccacctgggttgaaaatgagaagcaaaagcatctacccttccccctcttgcaccaagggtataccctaattagataggaatttacataattggtaaaaataagatatcatgggctggccacagtggctcacacctgtaatgccagcattttgagaggccgaggcacgaggaattcttcagcccaggagtttgagaccaggctgggcgatgtagtgagaccttgtctctacaaaaaaattaaaaattaactgagtggtggcaggcgcctgtagtcccagctactcgggaggctgaggcaagagaattgcttgaacttcggaggaagaggtttaagtaagcaaagattacaccaccgcactccagcctgggtgacagagccagactctgtctccaaaacaaaagacaaagtgcatacaaggctcagctcttaacaatgactgcttggataacagacgactaattggaggtcc

SEQ ID NO: 29292 - DNA, 709 bp, Homo sapiens
ttaaggcaccttcccgacttttccagagacctccccgattttgacagagaagcaggccaaacagctcctaagatctcggcgacaggatagaccaagcaaacccggattccccgatgagccaatgcgggaatacatgcaccacctgctcgccctggagcatcgcgctgaggagcagttcctggagcactggctgaaccctcactgcaaaccccactgtgacaggaacaggattcatcctgtgtaaggggatcaggaccagcctcgcaagcattttaatagacaacaagctggataatgtcgaagcaagacaaggctgcttctttcacttgtttttaaattgcagaaatggatgtcttcagacctcgtgaactgtgggcatatcaaagattgccttggaaatggcaaatatatatactgcttcattttactaacctgcatagatcactaaaaccaatagcttaaagcatagacacctcccaaaggtcttcccatcagtttgcaagagtgggaacaaccagaatcttacctggggttgatggagctggaactcccagaccaggagttggggcaggctgcctgccctaaggaatttggggaatccttgttcagagtagtgaagcataccacttggggttgctgagttgttttgtcctctatttttttcctcttcttttctgccctaataaacattggtattaaatttaaatta

SEQ ID NO: 29293 - DNA, 1310 bp, Homo sapiens
atgatgggacaaaatcaaaccagcatctcagacttcctgctcctgggcctgcccatccaaccagagcagcaaaacctgtgctatgccctgttcttggccatgtatcttaccaccctcctggggaacctcctcatcattgtcctcattcgactggattcccatctccacacgcctatgtatttgtttctcagcaacttgtccttctctgacctctgcttctcttccgtgaccattcccaagttgttacagaacatgcagaaccaggacccatccatcccctatgcggactgcctgacccaaatgtacttcttcctgttatttggagacctggagagcttcctccttgtggccatggcctatgaccgctatgtggccatctgcttccccctgcactacaccgccatcatgagccccatgctctgtctcaccctggtggcgctgtcctgggtgctgaccaccttccatgccatgttacacactttactcatggccaggttgtgtttttgtgcagacaatgtgatcccccactttttctgtgatatgtctgctctgctgaagctggccttctctgacactcgagttaatgaatgggtgatatttatcatgggagggctcattcttgtcatcccattcctactcatccttgggtcctatgcaagaattgtctcctccatcctcaaggtcccttcttctaagggtatctgcaaggccttctctacttgtggctcccacctgtctgtggtgtcactgttctatggaaccgttattggtctctacttatgctcatcagctaatagttctactctaaaggacactgtcatggctatgatgtacactgtggtgacccccatgctgaaccccttcatctacagcctgaggaacagagacatgaagggagccctgagcagagtcattcatcagaagaaaactttcttctctctctgatgataacacttggagctattacatagtttatccagtaaaatattgatattaatattggaatattattctaaattatttcctcaccatccttttgttgaaatggcatcgtacataatttttcaatatgtagtggagatgaagcatagctgagtagttgaactagggaagagggtcttggtgacctggctaagacttcctgtttgtcttcccaaggtgatcttggaaaaatgtagtttaagaacaactgttttaaatggtcttcatgccccacattcttaaattatcacaggattttgttatgttactcagaattttgctttgattgtagaatcatttttgtttaattaaaaaaatttttaaatttt

SEQ ID NO: 29294 - DNA, 230 bp, Homo sapiens
tgtgaatagtgaataattagtacttactacttcccagccaccgtgctacgtgtttactgtgaatcaacacctttagccacattttaggattttgggaaaggagggacaaagataataaggaatctggccaagttcccaactaagaagtggtagagctaggattggaagctaagcagtcgggctctggagctgaggctcttaagtcaccgcattattttgctgcattttca

SEQ ID NO: 29295 - DNA, 366 bp, Homo sapiens
gaaaaatgaagccccttcacacattcatagagaagtgtgcttgaaaagagagaagaagcagcagagagtgcttagcagcaaggctatttactacttctgtatcctaggcagttttccaggctgtagtttcacccccaaccttgcctcccctgctgaatgtggctggtgccaaattcctgctattggctgagtcatcatgtcctagttgatctggcaccgtagtcaacatttgtagcttttaccattgttgctttggagctagatcactaggttagattataggctagataattaggttttcctaaatagagaatctgctggtgctgaaacttgccccagaaggcacaccgtggtggttattcacgt

SEQ ID NO: 29296 - DNA, 294 bp, Homo sapiens
gaattagaacccatgtagtcaaccattatctttactgtgagattaaacacattttggaaagatgggctaggaaatattttgttgacaatagtggctaattatactatgagagtcagaagaaactgtgcaaaggtatctttacgaaccatttaatcaaattgttttaaaaaacctttcccaatacacatcatagatgtagagtagatactagacatattagtaatctttgatagtcatgtagtcagcatctgattcacaatttctaatattttaccatttcctgcagtgaagagg

SEQ ID NO: 29297 - DNA, 309 bp, Homo sapiens
cagagaaatgaaagcaggagccttgaatctagatttttccagaatccttttgagagacttattgtagcggcaggagctccattttgggggggtcaccccctgaactttgatggttttcaaatctttggagggccttggtcttagtggctcagaggtcccctgccaggacttctttaggatggggatgataggaagcgaacgttccttctgttgaggtgcatcagccttgcatctgagttcttgatgtcctcaggcctggcttcccagttggttaaaggaatgaaaataacaacgcctttcatttgcagt

SEQ ID NO: 29298 - DNA, 334 bp, Homo sapiens
ggaagttatgggaggaaaatgaaataattactaattaataattactattaataaggtttcaaatgatccccttttttccccttgcctgggtgtccttccatcatgtccaagtcttagatcagtttctagatctaggctcaacaaaattccctcccctggacccccaagccttcccagatagtcaccttcctcttccatatgtccatggcacctagtttgaaatgttcttacctcatgcatcatgttctgccttgtgttagaccctttaagcttttgtgtctcattaagatattgaactcggctgcgtgcggtggctcacgcctataatcccagc

SEQ ID NO: 29299 - DNA, 1129 bp, Homo sapiens
actgttctcgcgttcgcggacggctgtggtgttttggcgcatgggcggagccgtagttacggtcgactggggcgtcgtccctagcccgggagccgggtctctggagtcgcggcccggggttcacgatgtccgacgaggaagcgaggcagagcggaggctcctcgcaggccggcgccgtgactgtcagcgacgtccaggagctgatgcggcgcaaggaggagatagaagcgcagatcaaggccaactatgacgtgctggaaagccaaaaaggcattgggatgaacgagccgctggtggactgtgagggctacccccggtcagacgtggacctgtaccaagtccgcaccgccaggcacaacatcatatgcctgcagaatgatcacaaggcagtgatgaagcaggtggaggaggccctgcaccagctgcacgctcgcgacaaggagaagcaggcccgggacatggctgaggcccacaaagaggccatgagccgcaaactgggtcagagtgagagccagggccctccacgggccttcgccaaagtgaacagcatcagccccggctccccagccagcatcgcgggtctgcaagtggatgatgagattgtggagttcggctctgtgaacacccagaacttccagtcactgcataacattggcagtgtggtgcagcacagtgaggggaagcccctgaatgtgacagtgatccgcaggggggaaaaacaccagcttagacttgttccaacacgctgggcaggaaaaggactgctgggctgcaacattattcctctgcaaagatgattgtccctggggaacagtaacaggaaagcatcttcccttgccctggacttgggtctagggatttccaacttgtcttctctccctgaagcataaggatctggaagaggcttgtaacctgaacttctgtgtggtggcagtactgtggcccaccagtgtaatctccctggattaaggcattcttaaaaacttaggcttggcctctttcacaaattaggccacggccctaaataggaattccctggattgtgggcaagtgggcggaagttattctggcaggtactggtgtgattattattattatttttaataaagagttttacagtgctgatatg

SEQ ID NO: 29300 - DNA, 2349 bp, Homo sapiens
actgttctcgcgttcgcggacggctgtggtgttttggcgcatgggcggagccgtagttacggtcgactggggcgtcgtccctagcccgggagccgggtctctggagtcgcggcccggggttcacgatgtccgacgaggaagcgaggcagagcggaggctcctcgcaggccggcgccgtgactgtcagcgacgtccaggagctgatgcggcgcaaggaggagatagaagcgcagatcaaggccaactatgacgtgctggaaagccaaaaaggcattgggatgaacgagccgctggtggactgtgagggctacccccggtcagacgtggacctgtaccaagtccgcaccgccaggcacaacatcatatgcctgcagaatgatcacaaggcagtgatgaagcaggtggaggaggccctgcaccagctgcacgctcgcgacaaggagaagcaggcccgggacatggctgaggcccacaaagaggccatgagccgcaaactgggtcagagtgagagccagggccctccacgggccttcgccaaagtgaacagcatcagccccggctccccagccagcatcgcgggtctgcaagtggatgatgagattgtggagttcggctctgtgaacacccagaacttccagtcactgcataacattggcagtgtggtgcagcacagtgaggggaagcccctgaatgtgacagtgatccgcaggggggaaaaacaccagcttagacttgttccaacacgctgggcaggaaaaggactgctgggctgcaacattattcctctgcaaagatgattgtccctggggaacagtaacaggaaagcatcttcccttgccctggacttgggtctagggatttccaacttgtcttctctccctgaagcataaggatctggaagaggcttgtaacctgaacttctgtgtggtggcagtactgtggcccaccagtgtaatctccctggattaaggcattcttaaaaacttaggcttggcctctttcacaaattaggccacggccctaaataggaattccctggattgtgggcaagtgggcggaagttattctggcaggtactggtgtgattattattattatttttaataaagagttttacagtgctgatatgaccctgttgtcaccccagctgaatttcttatgaccctcccaaaccaaagctcagatggggtcagaagagcttcatagaaagttgggcaaaacaggctagcaattgcaaagtcaggctttgaccaacatatttctttgcactgaggccttgctgctgtggatacggaaatggttaagtactgtgcttcctcagcagctgggctgtcagggccatagtagctccctttggagaacagggaaagcctggaggcttcccaggtggcccagcgtggtgtcctgtcagcttcctctttaggaacccaccagagggcagcaagctcctttcacttcgctagtaagaacccctccgtttttgtgtgtttttgtttttgttttctggagacaaggtcttgctttgtcacccaggctggagtgcagtgtcgtgatcaaggttcactgaagccttgacgctgtgggcactgcctcagccgcccaagtatctgggaccacaggcgtgcaccaccatgcatagctaatttattttttgtagagacagggtctccctgtgttgaccaggttggtctcgaactcctgggctcaagcagtcctcctgccttggcctcctaaagtgctgggatcacaggcgtgagccactgcgcccagcccactgctagtttgactttttataattgaacctcctggctatgccctgagatcagcgctattttgtaaaccgctgaggtatggataggaacgagtagatcagacctcttgaaaatgcttattcttcctcccttttattttttgtctcttttaagatggtaaaatggttctcagggattcctgccaatactttgaattattttttcctctccatggtatcagtgttcatttccccagttcttgcacaccgctttctgttttggcagttctgccaggcaagccctgtgttccttgggactggttttgctgtggttggatacagataccagcttgccttgatgggattggtattgctgtgtgcttccagccacaggttctcacactcaattccaaagccttcctattgggcgaattccctcaaactctatttgacctgacagccatacgtattcccctctggtagccacagacatgctgtgtttaccaatgtttgctgtttaaattgcatgttctaattccacgtattttccagtctcttttataaagtctcagactataataaacacagcttgcccagtt

SEQ ID NO: 29301 - DNA, 1194 bp, Homo sapiens
actgttctcgcgttcgcggacggctgtggtgttttggcgcatgggcggagccgtagttacggtcgactggggcgtcgtccctagcccgggagccgggtctctggagtcgcggcccggggttcacgatgtccgacgaggaagcgaggcagagcggaggctcctcgcaggccggcgccgtgactgtcagcgacgtccaggagctgatgcggcgcaaggaggagatagaagcgcagatcaaggccaactatgacgtgctggaaagccaaaaaggcattgggatgaacgagccgctggtggactgtgagggctacccccggtcagacgtggacctgtaccaagtccgcaccgccaggcacaacatcatatgcctgcagaatgatcacaaggcagtgatgaagcaggtggaggaggccctgcaccagctgcacgctcgcgacaaggagaagcaggcccgggacatggctgaggcccacaaagaggccatgagccgcaaactgggtcagagtgagagccagggccctccacgggccttcgccaaagtgaacagcatcagccccggctccccagccagcatcgcgggtctgcaagtggatgatgagattgtggagttcggctctgtgaacacccagaacttccagtcactgcataacattggcagtgtggtgcagcacagtgagggggccctggcacccaccatcctactttctgtctctatgaatttgactactccagggacctcatctagaagcccctgaatgtgacagtgatccgcaggggggaaaaacaccagcttagacttgttccaacacgctgggcaggaaaaggactgctgggctgcaacattattcctctgcaaagatgattgtccctggggaacagtaacaggaaagcatcttcccttgccctggacttgggtctagggatttccaacttgtcttctctccctgaagcataaggatctggaagaggcttgtaacctgaacttctgtgtggtggcagtactgtggcccaccagtgtaatctccctggattaaggcattcttaaaaacttaggcttggcctctttcacaaattaggccacggccctaaataggaattccctggattgtgggcaagtgggcggaagttattctggcaggtactggtgtgattattattattatttttaataaagagttttacagtgctgatatg

SEQ ID NO: 29302 - DNA, 988 bp, Homo sapiens
actgttctcgcgttcgcggacggctgtggtgttttggcgcatgggcggagccgtagttacggtcgactggggcgtcgtccctagcccgggagccgggtctctggagtcgcggcccggggttcacgatgtccgacgaggaagcgaggcagagcggaggctcctcgcaggccggcgccgtgactgtcagcgacgtccaggagctgatgcggcgcaaggaggagatagaagcgcagatcaaggccaactatgacgtgctggaaagccaaaaaggcattgggatgaacgagccgctggtggactgtgagggctacccccggtcagacgtggacctgtaccaagtccgcaccgccaggcacaacatcatatgcctgcagaatgatcacaaggcagtgatgaagcaggtggaggaggccctgcaccagctgcacgctcgcgacaaggagaagcaggcccgggacatggctgaggcccacaaagaggccatgagccgcaaactgggtcagagtgagagccagggccctccacgggccttcgccaaagtgaacagcatcagccccggctccccagccagcatcgcgggtctgcaagtggatgatgagattgtggagttcggctctgtgaacacccagaacttccagtcactgcataacattggcagtgtggtgcagcacagtgaggggaagcccctgaatgtgacagtgatccgcaggggggaaaaacaccagcttagacttgttccaacacgctgggcaggaaaaggactgctgggtgaatattctctgaagatgtgtcctgggacagtaaggaggcatctctgcctgattggttagagttcatggtttctccgagatagttgaaggtgaccgaattgtgtgggatgtggcgcaaggttcggagggctaaaggggttaaggcggaagaaggggggggggatgggggtattaaaggggaaaaaggaggagctatgatagtttaggtatgtattgga

SEQ ID NO: 29303 - DNA, 2783 bp, Homo sapiens
actgttctcgcgttcgcggacggctgtggtgttttggcgcatgggcggagccgtagttacggtcgactggggcgtcgtccctagcccgggagccgggtctctggagtcgcggcccggggttcacgatgtccgacgaggaagcgaggcagagcggaggctcctcgcaggccggcgccgtgactgtcagcgacgtccaggagctgatgcggcgcaaggaggagatagaagcgcagatcaaggccaactatgacgtgctggaaagccaaaaaggcattgggatgaacgagccgctggtggactgtgagggctacccccggtcagacgtggacctgtaccaagtccgcaccgccaggcacaacatcatatgcctgcagaatgatcacaaggcagtgatgaagcaggtggaggaggccctgcaccagctgcacgctcgcgacaaggagaagcaggcccgggacatggctgaggcccacaaagaggccatgagccgcaaactgggtcagagtgagagccagggccctccacgggccttcgccaaagtgaacagcatcagccccggctccccagccagcatcgcgggtctgcaagtggatgatgagattgtggagttcggctctgtgaacacccagaacttccagtcactgcataacattggcagtgtggtgcagcacagtgaggggaagcccctgaatgtgacagtgatccgcaggggggaaaaacaccagcttagacttgttccaacacgctgggcaggaaaaggactgctgggctgcaacattattcctctgcaaagatgattgtccctggggaacagtaacaggaaagcatcttcccttgccctggacttgggtctagggatttccaacttgtcttctctccctgaagcataaggatctggaagaggcttgtaacctgaacttctgtgtggtggcagtactgtggcccaccagtgtaatctccctggattaaggcattcttaaaaacttaggcttggcctctttcacaaattaggccacggccctaaataggaattccctggattgtgggcaagtgggcggaagttattctggcaggtactggtgtgattattattattatttttaataaagagttttacagtgctgatatgaccctgttgtcaccccagctgaatttcttatgaccctcccaaaccaaagctcagatggggtcagaagagcttcatagaaagttgggcaaaacaggctagcaattgcaaagtcaggctttgaccaacatatttctttgcactgaggccttgctgctgtggatacggaaatggttaagtactgtgcttcctcagcagctgggctgtcagggccatagtagctccctttggagaacagggaaagcctggaggcttcccaggtggcccagcgtggtgtcctgtcagcttcctctttaggaacccaccagagggcagcaagctcctttcacttcgctagtaagaacccctccgtttttgtgtgtttttgtttttgttttctggagacaaggtcttgctttgtcacccaggctggagtgcagtgtcgtgatcaaggttcactgaagccttgacgctgtgggcactgcctcagccgcccaagtatctgggaccacaggcgtgcaccaccatgcatagctaatttattttttgtagagacagggtctccctgtgttgaccaggttggtctcgaactcctgggctcaagcagtcctcctgccttggcctcctaaagtgctgggatcacaggcgtgagccactgcgcccagcccactgctagtttgactttttataattgaacctcctggctatgccctgagatcagcgctattttgtaaaccgctgaggtatggataggaacgagtagatcagacctcttgaaaatgcttattcttcctcccttttattttttgtctcttttaagatggtaaaatggttctcagggattcctgccaatactttgaattattttttcctctccatggtatcagtgttcatttccccagttcttgcacaccgctttctgttttggcagttctgccaggcaagccctgtgttccttgggactggttttgctgtggttggatacagataccagcttgccttgatgggattggtattgctgtgtgcttccagccacaggttctcacactcaattccaaagccttcctattgggcgaattccctcaaactctatttgacctgacagccatacgtattcccctctggtagccacagacatgctgtgtttaccaatgtttgctgtttaaattgcatgttctaattccacgtattttccagtctcttttataaagtctcagactataataaacacagcttgcccagtttatcctttcttttttattttaagatgtatgcatattaatcaatttaccatcactggggcatggcagtgtgggcggggagaattattcacattctcctaaaatgacagcagcagagagccttctgcctcagtggctctggctggtttcctgcaggggtcccagtggaaacccgtgtggccacctgttgccgtcttccatgagatgttagtggagagccactttgacgtggaatgatcctaatagatatagccagaccggttttgcggaaacgctttgtgctgagaaccgcaagctggtgcaccctgtgtcatatctgcccccagccagctggaattgtctgcaacacgcggtgcccggtgaggaggcaggcaggacggttgtgtgctgcatccatgagacctggaaattcagtttgcttttggaaaagagcattg

SEQ ID NO: 29304 - DNA, 917 bp, Homo sapiens
actgttctcgcgttcgcggacggctgtggtgttttggcgcatgggcggagccgtagttacggtcgactggggcgtcgtccctagcccgggagccgggtctctggagtcgcggcccggggttcacgatgtccgacgaggaagcgaggcagagcggaggctcctcgcaggccggcgccgtgactgtcagcgacgtccaggagctgatgcggcgcaaggaggagatagaagcgcagatcaaggccaactatgacgtgctggaaagccaaaaaggcattgggatgaacgagccgctggtggactgtgagggctacccccggtcagacgtggacctgtaccaagtccgcaccgccaggcacaacatcatatggtctgcaagtggatgatgagattgtggagttcggctctgtgaacacccagaacttccagtcactgcataacattggcagtgtggtgcagcacagtgaggggaagcccctgaatgtgacagtgatccgcaggggggaaaaacaccagcttagacttgttccaacacgctgggcaggaaaaggactgctgggctgcaacattattcctctgcaaagatgattgtccctggggaacagtaacaggaaagcatcttcccttgccctggacttgggtctagggatttccaacttgtcttctctccctgaagcataaggatctggaagaggcttgtaacctgaacttctgtgtggtggcagtactgtggcccaccagtgtaatctccctggattaaggcattcttaaaaacttaggcttggcctctttcacaaattaggccacggccctaaataggaattccctggattgtgggcaagtgggcggaagttattctggcaggtactggtgtgattattattattatttttaataaagagttttacagtgctgatatg

SEQ ID NO: 29305 - DNA, 2288 bp, Homo sapiens
ccacgcgtcgctttggcgaaggccctccacgggccttcgccaaagtgaacagcatcagccccggctccccagccagcatcgcgggtctgcaagtggatgatgagattgtggagttcggctctgtgaacacccagaacttccagtcactgcataacattggcagtgtggtgcagcacagtgaggggaagcccctgaatgtgacagtgatccgcaggggggaaaaacaccagcttagacttgttccaacacgctgggcaggaaaaggactgctgggctgcaacattattcctctgcaaagatgattgtccctggggaacagtaacaggaaagcatcttcccttgccctggacttgggtctagggatttccaacttgtcttctctccctgaagcataaggatctggaagaggcttgtaacctgaacttctgtgtggtggcagtactgtggcccaccagtgtaatctccctggattaaggcattcttaaaaacttaggcttggcctctttcacaaattaggccacggccctaaataggaattccctggattgtgggcaagtgggcggaagttattctggcaggtactggtgtgattattattattatttttaataaagagttttacagtgctgatatgaccctgttgtcaccccagctgaatttcttatgaccctcccaaaccaaagctcagatggggtcagaagagcttcatagaaagttgggcaaaacaggctagcaattgcaaagtcaggctttgaccaacatatttctttgcactgaggccttgctgctgtggatacggaaatggttaagtactgtgcttcctcagcagctgggctgtcagggccatagtagctccctttggagaacagggaaagcctggaggcttcccaggtggcccagcgtggtgtcctgtcagcttcctctttaggaacccaccagagggcagcaagctcctttcacttcgctagtaagaacccctccgtttttgtgtgtttttgtttttgttttctggagacaaggtcttgctttgtcacccaggctggagtgcagtgtcgtgatcaaggttcactgaagccttgacgctgtgggcactgcctcagccgcccaagtatctgggaccacaggcgtgcaccaccatgcatagctaatttattttttgtagagacagggtctccctgtgttgaccaggttggtctcgaactcctgggctcaagcagtcctcctgccttggcctcctaaagtgctgggatcacaggcgtgagccactgcgcccagcccactgctagtttgactttttataattgaacctcctggctatgccctgagatcagcgctattttgtaaaccgctgaggtatggataggaacgagtagatcagacctcttgaaaatgcttattcttcctcccttttattttttgtctcttttaagatggtaaaatggttctcagggattcctgccaatactttgaattattttttcctctccatggtatcagtgttcatttccccagttcttgcacaccgctttctgttttggcagttctgccaggcaagccctgtgttccttgggactggttttgctgtggttggatacagataccagcttgccttgatgggattggtattgctgtgtgcttccagccacaggttctcacactcaattccaaagccttcctattgggcgaattccctcaaactctatttgacctgacagccatacgtattcccctctggtagccacagacatgctgtgtttaccaatgtttgctgtttaaattgcatgttctaattccacgtattttccagtctcttttataaagtctcagactataataaacacagcttgcccagtttatcctttcttttttattttaagatgtatgcatattaatcaatttaccatcactggggcatggcagtgtgggcggggagaattattcacattctcctaaaatgacagcagcagagagccttctgcctcagtggctctggctggtttcctgcaggggtcccagtggaaacccgtgtggccacctgttgccgtcttccatgagatgttagtggagagccactttgacgtggaatgatcctaatagatatagccagaccggttttgcggaaacgctttgtgctgagaaccgcaagctggtgcaccctgtgtcatatctgcccccagccagctggaattgtctgcaacacgcggtgcccggtgaggaggcaggcaggacggttgtgtgctgcatccatgagacctggaaattcagtttgcttttggaaaagagcattg

SEQ ID NO: 29306 - DNA, 717 bp, Homo sapiens
agctgggtagtcatcatctctacattccttaggatttctctccctatcaagcgggcccagatacaagtaccaaacagtagtctctgaagttcccccatttccttcagtaccagtctataagctacggtccgccacggattttcatctatcagggtgtcctaatcagaatcagccacccaagcaagcctctcgggcccacatatctatctctggccttcccccatgaacttcagcctgtcgggctagtcggggccccgactagcccgacaagcccctgaatgtgacagtgatccgcaggggggaaaaacaccagcttagacttgttccaacacgctgggcaggaaaaggactgctgggctgcaacattattcctctgcaaagatgattgtccctggggaacagtaacaggaaagcatcttcccttgccctggacttgggtctagggatttccaacttgtcttctctccctgaagcataaggatctggaagaggcttgtaacctgaacttctgtgtggtggcagtactgtggcccaccagtgtaatctccctggattaaggcattcttaaaaacttaggcttggcctctttcacaaattaggccacggccctaaataggaattccctggattgtgggcaagtgggcggaagttattctggcaggtactggtgtgattattattattatttttaataaagagttttacagtgctgatatg

SEQ ID NO: 29307 - DNA, 1115 bp, Homo sapiens
actgttctcgcgttcgcggacggctgtggtgttttggcgcatgggcggagccgtagttacggtcgactggggcgtcgtccctagcccgggagccgggtctctggagtcgcggcccggggttcacgatgtccgacgaggaagcgaggcagagcggaggctcctcgcaggccggcgccgtgactgtcagcgacgtccaggagctgatgcggcgcaaggaggagatagaagcgcagatcaaggccaactatgacgtgctggaaagccaaaaaggcattgggatgaacgagccgctggtggactgtgagggctacccccggtcagacgtggacctgtaccaagtccgcaccgccaggcacaacatcatatgcctgcagaatgatcacaaggcagtgatgaagcaggtggaggaggccctgcaccagctgcacgctcgcgacaaggagaagcaggcccgggacatggctgaggcccacaaagaggccatgagccgcaaactgggtcagagtgagagccagggccctccacgggccttcgccaaagtgaacagcatcagccccggctccccagccagcatcgcggtaatccaggggttggccactcaagtccatgcccaggggacacggtgggtcaggtagccttcggggatgtggaaagacagactagttctctccgtgctgcggtgctgagttcagttactcatttaacaaacactgactgaggcctgtcgtgtatccagccctgtgctgggggcagagttttagagaggggtcagccccggctgcccactacattggtgggggagtgacctcttcccagtgacagaagatgataaatgtcccaagagagggagaggatctcttcttggggctcattttagctgggcactgaatgatgaaaatgagaatggcatcttgccaaatgagttatgcatcttatgtgatgtcttaaaaaaaacattaggctgggcacagtggctcatgcgtgtaatcccactactcgggaggctgaggcaggagaatcgcctgaacccaggaggtggaggttgcagtgagcggagatcgtgccactacactccagagcctgggcgacagagtgagactctgtctaaaaaaaaa

SEQ ID NO: 29308 - DNA, 402 bp, Homo sapiens
ataatgggaatccccagtttgcatggaaactgcagataaatcctcgtggtaggaacgagactacagctctagaagcagagggagccccagagtctctcctgggagtctctccagttcattcatgcactaggcatttgctttaaaagaatgaaagaacattggtgaaaaggtcagaagggctcagcctctgaccttcctgaagggagcctccaaacttacgccattccttttcttctttcttccagctgcaacattattcctctgcaaagatgattgtccctggggaacagtaacaggaaagcatcttcccttgccctggacttgggtctagggatttccaacttgtcttctctccctgaagcataaggatctggaagaggcttgtaacctgaacttctgtgt

SEQ ID NO: 29309 - DNA, 4186 bp, Homo sapiens
gccatcagcgccatcttctgggctaccaagtactcacaggacaacaaggaggagtccctgtttctgctgctccagtacctgccccctggggtcatcgccctggtcaacttcctgggtcccctgctgttcacatttctggtccagctggagaactaccctcccaacacggaggtcaacctcactctgatctggtgcgtggtgctgaagctggccagcttggggatgttctccgtctccctgggtcagaccatactgtgcattggcagagacaagagcagctgtgagtcctacggctacaacgtttgtgactatcaggtggctggcagcccggcggggcctgtccctcccttccttctccccaaaaagctcacctcaaactgtgcagagccctgttcctgcccctttagtcacctttgagagaagctgtgagcagggctgcctgcaccgccgcacacctccagggggcgccactgctgccacatggtgtagtgtggctgccctggctgtggggcttcctgctctaatcccatcctcaaggcctgggtttcaacctaacgattctatcagacaccaggcaaggcacctgcaccacagaaaccctcacaggaggctaagggaaggaagggccggggtggccgtgagtggtgacgggtccccttcccctgcaccccagtgctgggagaactccgtgggggaggagctgtacaagctgagtatcttcaacttcctcctcaccgtggccttcgccttcctggtcaccctgcctcggaggctgctggtggaccggttctcaggccggttctgggcctggctggaacgggaggagttcctggtccccaagaatgtgctggacatcgtggcggggcagacggtcacctggatgggcctcttctactgccccctgctgcccctgctgaatagcgtcttcctcttcctcaccttctacatcaagaagtacaccctcctgaagaactccagggcatcttcgcggcccttccgtgcctccagctccaccttcttcttccagctagtgctcctcctgggcctgcttctggctgcagtgcccctgggctatgtggtcagcagccccacttggccatctctcgccagcatccactcctcctgggactgcggcctcttcaccaactactcagcaccctggcaagtggtcccggagctggtggcccttgggctcccgcccattggccagcgtgccctccactacctgggctcccacgccttcagcttccccctcctcatcatgctcaggttctcagggcagcaggggccatgggaggggacacctggagggggaggtccttccttccatgggggtggtgagcctgtgcacccccaaccaggagccagacgcagaaagccaagggaagcaggggcctctgaaaagcaggaacctcctgggcccaccctctgggctgccatggggattgcaggatcactggggaagcaccgtgtctgggtggctgcagctgctgagctattggtattgctgtgccagaggggaggggatgaggggctctgcgaggaaggagaggagggtcccatcctcagatacagcagtgtgcagtgagaagaccccagtaccgcgtattgtagagattgaggtggggagagaggaagtcagggagaggcgcctgtggccccaggggcaactgaccacgaatccccttcccacccaagccttgtcctgacggtgtgcgtctcccagacccaggccaatgccagggccatccacaggctccggaagcagctggtgtgggttcaggagaagtggcacctggtggaggacctgtcgcgactgctgccggagccaggcccgagcgactctccgggccccaagtaccctgcctcccaagcttcgcgcccgcagtccttctgccccggatgcccatgccctggctccccgggccaccaggccccgcggccgggcccctccgtcgtggatgccgcgggactgcgttccccttgccctggacagcacggtgccccggcctccgcccgcagattccgcttccccagcggcgcggagctgtaaccccgacccctgcctccccgaagcctccctggggccccttcaggcctccttactccatcttccagacccctggcgaccaccgcccctctcagtggctccagggcctccctcagaggtccccaaagatggacacacaaccccagcggcagcaggaaaaacatatgggaattttctttctatattttaatctcatccctttaaaatgtctattttttattgtgttttttataatatacataatctattagtatagtatctcttgaatgcgattttttctagaatgtgttctgctgatttgttttagagccatgagtgcaatttatacacatacatctattgggaatgctcagaagttgtttactgatggaagtgccttcagaagagtccgggaaccacttcctaaggaaggaaagagctggccacagttagagcaagcctgcctggggccctgctctgtgttccagctgcaaactgcctgcatcatcccttcctgttactcttccttcacctgagacagtcgaggccacagcgtcagccagggccagagctgggatttgaacccaggcactcgggctccagagccacactgccccagtgtggggcttagtggcggctcctggccctgactgaggggctgactgaagcctggtgagagcgtgctgggtcagcctctccctggcgggaatcctctccgtccagtcttctaacctagcagcctcacgtccacagagctgccttgtgaaactcagcagagccctggcttcctgcagagccgtgttctcccagcctgcttcatggctccctggttgagccaagcttgcggatccgtggggtgaaggtacccgcaccgcctgggccttagtggtatgtacgggcctgcatcgtgagcagcgggcgggggcccaggcaggtgaggcagctggccacaagggcagggcccggcccccctcccaaggctgtgtctgatattcttgagcctgttcgagtttccttttccaagcctcctgttctcccacccccacccctgccatgctgcagtgactaaatctgtggttctcatccttggagaacacctgagtagctgctacaagctggccacagcccagcgactctgatgtggttgggctgggtgtggccagcagccagggcatcgggacttttcgaagctcccaggtgactcaccggcagctggggatgagaactgtcaggagggaaggtcagaagtcccaggatgcacttgaaaagcctctagctccaccagtgaccagctcctggctggactcctggtctggactcagcatcagggaggctctggcctctcgccctcagggctgggggcttcttcacatggtcatcaaagacttggccagttccgcctctcccacggccgtccttgtctcacccagcatcacgacgcatcagttcaccaacaaacacgattcagtgctgctagtgctgggtcctgttctgggggctggtgatgaggccaagagggaaagagggagctctgtgttccatcgagggggcgacaagcctggaccagatgaaagtgactcatgttgttaattagcggcttagggccaaaggtggcccctggaccagtggcctcagcatcacctgggaaaaggttagaaatgaacattcccaggccccacctcagcctcctgaatcagagcatccctttggcaaaccatactgagaaacaaccacgtgcatcaccaagcgctgtgaagaaggcaagctttgagaccttgaaggaatcatcaaactctgggcctcggtgtgctcacccagggcgagacaaagacgccatgctcctccaagtggcctccaagattaaatgagcaatgacttttaaaaaaaaaaaaaaaaaaaaaaaaaaaaaaaaaaaaaaaaaaaaaaaaaaaaaaaaaaaaaaaaaaaaaaaaaaaaaaaaaaaacaaaaaaaaaaaaccttggggaccttttggcccccgtaaattttaaattctagcaagttatggcttgcgctcgaatttggggctatttggtccaatgccccttatagaggacggttttaaattaaattgcccggggttaaccaaattaactcttggaaaaccccgggttttcccaacttaattccttttgaac

SEQ ID NO: 29310 - DNA, 3757 bp, Homo sapiens
gccatcagcgccatcttctgggctaccaagtactcacaggacaacaaggaggagtccctgtttctgctgctccagtacctgccccctggggtcatcgccctggtcaacttcctgggtcccctgctgttcacatttctggtccagctggagaactaccctcccaacacggaggtcaacctcactctgatctggtgcgtggtgctgaagctggccagcttggggatgttctccgtctccctgggtcagaccatactgtgcattggcagagacaagagcagctgtgagtcctacggctacaacgtttgtgactatcaggtggctggcagcccggcggggcctgtccctcccttccttctccccaaaaagctcacctcaaactgtgcagagccctgttcctgcccctttagtcacctttgagagaagctgtgagcagggctgcctgcaccgccgcacacctccagggggcgccactgctgccacatggtgtagtgtggctgccctggctgtggggcttcctgctctaatcccatcctcaaggcctgggtttcaacctaacgattctatcagacaccaggcaaggcacctgcaccacagaaaccctcacaggaggctaagggaaggaagggccggggtggccgtgagtggtgacgggtccccttcccctgcaccccagtgctgggagaactccgtgggggaggagctgtacaagctgagtatcttcaacttcctcctcaccgtggccttcgccttcctggtcaccctgcctcggaggctgctggtggaccggttctcaggccggttctgggcctggctggaacgggaggagttcctggtccccaagaatgtgctggacatcgtggcggggcagacggtcacctggatgggcctcttctactgccccctgctgcccctgctgaatagcgtcttcctcttcctcaccttctacatcaagaagtacaccctcctgaagaactccagggcatcttcgcggcccttccgtgcctccagctccaccttcttcttccagctagtgctcctcctgggcctgcttctggctgcagtgcccctgggctatgtggtcagcagccccacttggccatctctcgccagcatccactcctcctgggactgcggcctcttcaccaactactcagcaccctggcaagtggtcccggagctggtggcccttgggctcccgcccattggccagcgtgccctccactacctgggctcccacgccttcagcttccccctcctcatcatgctcagccttgtcctgacggtgtgcgtctcccagacccaggccaatgccagggccatccacaggctccggaagcagctggtgtgggttcaggagaagtggcacctggtggaggacctgtcgcgactgctgccggagccaggcccgagcgactctccgggccccaagtaccctgcctcccaagcttcgcgcccgcagtccttctgccccggatgcccatgccctggctccccgggccaccaggccccgcggccgggcccctccgtcgtggatgccgcgggactgcgttccccttgccctggacagcacggtgccccggcctccgcccgcagattccgcttccccagcggcgcggagctgtaaccccgacccctgcctccccgaagcctccctggggccccttcaggcctccttactccatcttccagacccctggcgaccaccgcccctctcagtggctccagggcctccctcagaggtccccaaagatggacacacaaccccagcggcagcaggaaaaacatatgggaattttctttctatattttaatctcatccctttaaaatgtctattttttattgtgttttttataatatacataatctattagtatagtatctcttgaatgcgattttttctagaatgtgttctgctgatttgttttagagccatgagtgcaatttatacacatacatctattgggaatgctcagaagttgtttactgatggaagtgccttcagaagagtccgggaaccacttcctaaggaaggaaagagctggccacagttagagcaagcctgcctggggccctgctctgtgttccagctgcaaactgcctgcatcatcccttcctgttactcttccttcacctgagacagtcgaggccacagcgtcagccagggccagagctgggatttgaacccaggcactcgggctccagagccacactgccccagtgtggggcttagtggcggctcctggccctgactgaggggctgactgaagcctggtgagagcgtgctgggtcagcctctccctggcgggaatcctctccgtccagtcttctaacctagcagcctcacgtccacagagctgccttgtgaaactcagcagagccctggcttcctgcagagccgtgttctcccagcctgcttcatggctccctggttgagccaagcttgcggatccgtggggtgaaggtacccgcaccgcctgggccttagtggtatgtacgggcctgcatcgtgagcagcgggcgggggcccaggcaggtgaggcagctggccacaagggcagggcccggcccccctcccaaggctgtgtctgatattcttgagcctgttcgagtttccttttccaagcctcctgttctcccacccccacccctgccatgctgcagtgactaaatctgtggttctcatccttggagaacacctgagtagctgctacaagctggccacagcccagcgactctgatgtggttgggctgggtgtggccagcagccagggcatcgggacttttcgaagctcccaggtgactcaccggcagctggggatgagaactgtcaggagggaaggtcagaagtcccaggatgcacttgaaaagcctctagctccaccagtgaccagctcctggctggactcctggtctggactcagcatcagggaggctctggcctctcgccctcagggctgggggcttcttcacatggtcatcaaagacttggccagttccgcctctcccacggccgtccttgtctcacccagcatcacgacgcatcagttcaccaacaaacacgattcagtgctgctagtgctgggtcctgttctgggggctggtgatgaggccaagagggaaagagggagctctgtgttccatcgagggggcgacaagcctggaccagatgaaagtgactcatgttgttaattagcggcttagggccaaaggtggcccctggaccagtggcctcagcatcacctgggaaaaggttagaaatgaacattcccaggccccacctcagcctcctgaatcagagcatccctttggcaaaccatactgagaaacaaccacgtgcatcaccaagcgctgtgaagaaggcaagctttgagaccttgaaggaatcatcaaactctgggcctcggtgtgctcacccagggcgagacaaagacgccatgctcctccaagtggcctccaagattaaatgagcaatgacttttaaaaaaaaaaaaaaaaaaaaaaaaaaaaaaaaaaaaaaaaaaaaaaaaaaaaaaaaaaaaaaaaaaaaaaaaaaaaaaaaaaaacaaaaaaaaaaaaccttggggaccttttggcccccgtaaattttaaattctagcaagttatggcttgcgctcgaatttggggctatttggtccaatgccccttatagaggacggttttaaattaaattgcccggggttaaccaaattaactcttggaaaaccccgggttttcccaacttaattccttttgaac

SEQ ID NO: 29311 - DNA, 3680 bp, Homo sapiens
gccatcagcgccatcttctgggctaccaagtactcacaggacaacaaggaggagtccctgtttctgctgctccagtacctgccccctggggtcatcgccctggtcaacttcctgggtcccctgctgttcacatttctggtccagctggagaactaccctcccaacacggaggtcaacctcactctgatctgtgctgggagaactccgtgggggaggagctgtacaagctgagtatcttcaacttcctcctcaccgtggccttcgccttcctggtcaccctgcctcggaggctgctggtggaccggttctcaggccggttctgggcctggctggaacgggaggagttcctggtccccaagaatgtgctggacatcgtggcggggcagacggtcacctggatgggcctcttctactgccccctgctgcccctgctgaatagcgtcttcctcttcctcaccttctacatcaagaagtacaccctcctgaagaactccagggcatcttcgcggcccttccgtgcctccagctccaccttcttcttccagctagtgctcctcctgggcctgcttctggctgcagtgcccctgggctatgtggtcagcagcatccactcctcctgggactgcggcctcttcaccaactactcagcaccctggcaagtggtcccggagctggtggcccttgggctcccgcccattggccagcgtgccctccactacctgggctcccacgccttcagcttccccctcctcatcatgctcaggttctcagggcagcaggggccatgggaggggacacctggagggggaggtccttccttccatgggggtggtgagcctgtgcacccccaaccaggagccagacgcagaaagccaagggaagcaggggcctctgaaaagcaggaacctcctgggcccaccctctgggctgccatggggattgcaggatcactggggaagcaccgtgtctgggtggctgcagctgctgagctattggtattgctgtgccagaggggaggggatgaggggctctgcgaggaaggagaggagggtcccatcctcagatacagcagtgtgcagtgagaagaccccagtaccgcgtattgtagagattgaggtggggagagaggaagtcagggagaggcgcctgtggccccaggggcaactgaccacgaatccccttcccacccaagccttgtcctgacggtgtgcgtctcccagacccaggccaatgccagggccatccacaggctccggaagcagctggtgtgggttcaggagaagtggcacctggtggaggacctgtcgcgactgctgccggagccaggcccgagcgactctccgggccccaagtaccctgcctcccaagcttcgcgcccgcagtccttctgccccggatgcccatgccctggctccccgggccaccaggccccgcggccgggcccctccgtcgtggatgccgcgggactgcgttccccttgccctggacagcacggtgccccggcctccgcccgcagattccgcttccccagcggcgcggagctgtaaccccgacccctgcctccccgaagcctccctggggccccttcaggcctccttactccatcttccagacccctggcgaccaccgcccctctcagtggctccagggcctccctcagaggtccccaaagatggacacacaaccccagcggcagcaggaaaaacatatgggaattttctttctatattttaatctcatccctttaaaatgtctattttttattgtgttttttataatatacataatctattagtatagtatctcttgaatgcgattttttctagaatgtgttctgctgatttgttttagagccatgagtgcaatttatacacatacatctattgggaatgctcagaagttgtttactgatggaagtgccttcagaagagtccgggaaccacttcctaaggaaggaaagagctggccacagttagagcaagcctgcctggggccctgctctgtgttccagctgcaaactgcctgcatcatcccttcctgttactcttccttcacctgagacagtcgaggccacagcgtcagccagggccagagctgggatttgaacccaggcactcgggctccagagccacactgccccagtgtggggcttagtggcggctcctggccctgactgaggggctgactgaagcctggtgagagcgtgctgggtcagcctctccctggcgggaatcctctccgtccagtcttctaacctagcagcctcacgtccacagagctgccttgtgaaactcagcagagccctggcttcctgcagagccgtgttctcccagcctgcttcatggctccctggttgagccaagcttgcggatccgtggggtgaaggtacccgcaccgcctgggccttagtggtatgtacgggcctgcatcgtgagcagcgggcgggggcccaggcaggtgaggcagctggccacaagggcagggcccggcccccctcccaaggctgtgtctgatattcttgagcctgttcgagtttccttttccaagcctcctgttctcccacccccacccctgccatgctgcagtgactaaatctgtggttctcatccttggagaacacctgagtagctgctacaagctggccacagcccagcgactctgatgtggttgggctgggtgtggccagcagccagggcatcgggacttttcgaagctcccaggtgactcaccggcagctggggatgagaactgtcaggagggaaggtcagaagtcccaggatgcacttgaaaagcctctagctccaccagtgaccagctcctggctggactcctggtctggactcagcatcagggaggctctggcctctcgccctcagggctgggggcttcttcacatggtcatcaaagacttggccagttccgcctctcccacggccgtccttgtctcacccagcatcacgacgcatcagttcaccaacaaacacgattcagtgctgctagtgctgggtcctgttctgggggctggtgatgaggccaagagggaaagagggagctctgtgttccatcgagggggcgacaagcctggaccagatgaaagtgactcatgttgttaattagcggcttagggccaaaggtggcccctggaccagtggcctcagcatcacctgggaaaaggttagaaatgaacattcccaggccccacctcagcctcctgaatcagagcatccctttggcaaaccatactgagaaacaaccacgtgcatcaccaagcgctgtgaagaaggcaagctttgagaccttgaaggaatcatcaaactctgggcctcggtgtgctcacccagggcgagacaaagacgccatgctcctccaagtggcctccaagattaaatgagcaatgacttttaaaaaaaaaaaaaaaaaaaaaaaaaaaaaaaaaaaaaaaaaaaaaaaaaaaaaaaaaaaaaaaaaaaaaaaaaaaaaaaaaaaacaaaaaaaaaaaaccttggggaccttttggcccccgtaaattttaaattctagcaagttatggcttgcgctcgaatttggggctatttggtccaatgccccttatagaggacggttttaaattaaattgcccggggttaaccaaattaactcttggaaaaccccgggttttcccaacttaattccttttgaac

SEQ ID NO: 29312 - DNA, 3828 bp, Homo sapiens
gccatcagcgccatcttctgggctaccaagtactcacaggacaacaaggaggagtccctgtttctgctgctccagtacctgccccctggggtcatcgccctggtcaacttcctgggtcccctgctgttcacatttctggtccagctggagaactaccctcccaacacggaggtcaacctcactctgatctggtgcgtggtgctgaagctggccagcttggggatgttctccgtctccctgggtcagaccatactgtgcattggcagagacaagagcagctgtgagtcctacggctacaacgtttgtgactatcagtgctgggagaactccgtgggggaggagctgtacaagctgagtatcttcaacttcctcctcaccgtggccttcgccttcctggtcaccctgcctcggaggctgctggtggaccggttctcaggccggttctgggcctggctggaacgggaggagttcctggtccccaagaatgtgctggacatcgtggcggggcagacggtcacctggatgggcctcttctactgccccctgctgcccctgctgaatagcgtcttcctcttcctcaccttctacatcaagaagtacaccctcctgaagaactccagggcatcttcgcggcccttccgtgcctccagctccaccttcttcttccagctagtgctcctcctgggcctgcttctggctgcagtgcccctgggctatgtggtcagcagccccacttggccatctctcgccagcatccactcctcctgggactgcggcctcttcaccaactactcagcaccctggcaagtggtcccggagctggtggcccttgggctcccgcccattggccagcgtgccctccactacctgggctcccacgccttcagcttccccctcctcatcatgctcaggttctcagggcagcaggggccatgggaggggacacctggagggggaggtccttccttccatgggggtggtgagcctgtgcacccccaaccaggagccagacgcagaaagccaagggaagcaggggcctctgaaaagcaggaacctcctgggcccaccctctgggctgccatggggattgcaggatcactggggaagcaccgtgtctgggtggctgcagctgctgagctattggtattgctgtgccagaggggaggggatgaggggctctgcgaggaaggagaggagggtcccatcctcagatacagcagtgtgcagtgagaagaccccagtaccgcgtattgtagagattgaggtggggagagaggaagtcagggagaggcgcctgtggccccaggggcaactgaccacgaatccccttcccacccaagccttgtcctgacggtgtgcgtctcccagacccaggccaatgccagggccatccacaggctccggaagcagctggtgtgggttcaggagaagtggcacctggtggaggacctgtcgcgactgctgccggagccaggcccgagcgactctccgggccccaagtaccctgcctcccaagcttcgcgcccgcagtccttctgccccggatgcccatgccctggctccccgggccaccaggccccgcggccgggcccctccgtcgtggatgccgcgggactgcgttccccttgccctggacagcacggtgccccggcctccgcccgcagattccgcttccccagcggcgcggagctgtaaccccgacccctgcctccccgaagcctccctggggccccttcaggcctccttactccatcttccagacccctggcgaccaccgcccctctcagtggctccagggcctccctcagaggtccccaaagatggacacacaaccccagcggcagcaggaaaaacatatgggaattttctttctatattttaatctcatccctttaaaatgtctattttttattgtgttttttataatatacataatctattagtatagtatctcttgaatgcgattttttctagaatgtgttctgctgatttgttttagagccatgagtgcaatttatacacatacatctattgggaatgctcagaagttgtttactgatggaagtgccttcagaagagtccgggaaccacttcctaaggaaggaaagagctggccacagttagagcaagcctgcctggggccctgctctgtgttccagctgcaaactgcctgcatcatcccttcctgttactcttccttcacctgagacagtcgaggccacagcgtcagccagggccagagctgggatttgaacccaggcactcgggctccagagccacactgccccagtgtggggcttagtggcggctcctggccctgactgaggggctgactgaagcctggtgagagcgtgctgggtcagcctctccctggcgggaatcctctccgtccagtcttctaacctagcagcctcacgtccacagagctgccttgtgaaactcagcagagccctggcttcctgcagagccgtgttctcccagcctgcttcatggctccctggttgagccaagcttgcggatccgtggggtgaaggtacccgcaccgcctgggccttagtggtatgtacgggcctgcatcgtgagcagcgggcgggggcccaggcaggtgaggcagctggccacaagggcagggcccggcccccctcccaaggctgtgtctgatattcttgagcctgttcgagtttccttttccaagcctcctgttctcccacccccacccctgccatgctgcagtgactaaatctgtggttctcatccttggagaacacctgagtagctgctacaagctggccacagcccagcgactctgatgtggttgggctgggtgtggccagcagccagggcatcgggacttttcgaagctcccaggtgactcaccggcagctggggatgagaactgtcaggagggaaggtcagaagtcccaggatgcacttgaaaagcctctagctccaccagtgaccagctcctggctggactcctggtctggactcagcatcagggaggctctggcctctcgccctcagggctgggggcttcttcacatggtcatcaaagacttggccagttccgcctctcccacggccgtccttgtctcacccagcatcacgacgcatcagttcaccaacaaacacgattcagtgctgctagtgctgggtcctgttctgggggctggtgatgaggccaagagggaaagagggagctctgtgttccatcgagggggcgacaagcctggaccagatgaaagtgactcatgttgttaattagcggcttagggccaaaggtggcccctggaccagtggcctcagcatcacctgggaaaaggttagaaatgaacattcccaggccccacctcagcctcctgaatcagagcatccctttggcaaaccatactgagaaacaaccacgtgcatcaccaagcgctgtgaagaaggcaagctttgagaccttgaaggaatcatcaaactctgggcctcggtgtgctcacccagggcgagacaaagacgccatgctcctccaagtggcctccaagattaaatgagcaatgacttttaaaaaaaaaaaaaaaaaaaaaaaaaaaaaaaaaaaaaaaaaaaaaaaaaaaaaaaaaaaaaaaaaaaaaaaaaaaaaaaaaaaacaaaaaaaaaaaaccttggggaccttttggcccccgtaaattttaaattctagcaagttatggcttgcgctcgaatttggggctatttggtccaatgccccttatagaggacggttttaaattaaattgcccggggttaaccaaattaactcttggaaaaccccgggttttcccaacttaattccttttgaac

SEQ ID NO: 29313 - DNA, 2469 bp, Homo sapiens
cacacccgctcgtgggaagcagcgcctgtcgcaactcgccacttgttctcctcacagcaggttcaggagaagtggcacctggtggaggacctgtcgcgactgctgccggagccaggcccgagcgactctccgggccccaagtaccctgcctcccaagcttcgcgcccgcagtccttctgccccggatgcccatgccctggctccccgggccaccaggccccgcggccgggcccctccgtcgtggatgccgcgggactgcgttccccttgccctggacagcacggtgccccggcctccgcccgcagattccgcttccccagcggcgcggagctgtaaccccgacccctgcctccccgaagcctccctggggccccttcaggcctccttactccatcttccagacccctggcgaccaccgcccctctcagtggctccagggcctccctcagaggtccccaaagatggacacacaaccccagcggcagcaggaaaaacatatgggaattttctttctatattttaatctcatccctttaaaatgtctattttttattgtgttttttataatatacataatctattagtatagtatctcttgaatgcgattttttctagaatgtgttctgctgatttgttttagagccatgagtgcaatttatacacatacatctattgggaatgctcagaagttgtttactgatggaagtgccttcagaagagtccgggaaccacttcctaaggaaggaaagagctggccacagttagagcaagcctgcctggggccctgctctgtgttccagctgcaaactgcctgcatcatcccttcctgttactcttccttcacctgagacagtcgaggccacagcgtcagccagggccagagctgggatttgaacccaggcactcgggctccagagccacactgccccagtgtggggcttagtggcggctcctggccctgactgaggggctgactgaagcctggtgagagcgtgctgggtcagcctctccctggcgggaatcctctccgtccagtcttctaacctagcagcctcacgtccacagagctgccttgtgaaactcagcagagccctggcttcctgcagagccgtgttctcccagcctgcttcatggctccctggttgagccaagcttgcggatccgtggggtgaaggtacccgcaccgcctgggccttagtggtatgtacgggcctgcatcgtgagcagcgggcgggggcccaggcaggtgaggcagctggccacaagggcagggcccggcccccctcccaaggctgtgtctgatattcttgagcctgttcgagtttccttttccaagcctcctgttctcccacccccacccctgccatgctgcagtgactaaatctgtggttctcatccttggagaacacctgagtagctgctacaagctggccacagcccagcgactctgatgtggttgggctgggtgtggccagcagccagggcatcgggacttttcgaagctcccaggtgactcaccggcagctggggatgagaactgtcaggagggaaggtcagaagtcccaggatgcacttgaaaagcctctagctccaccagtgaccagctcctggctggactcctggtctggactcagcatcagggaggctctggcctctcgccctcagggctgggggcttcttcacatggtcatcaaagacttggccagttccgcctctcccacggccgtccttgtctcacccagcatcacgacgcatcagttcaccaacaaacacgattcagtgctgctagtgctgggtcctgttctgggggctggtgatgaggccaagagggaaagagggagctctgtgttccatcgagggggcgacaagcctggaccagatgaaagtgactcatgttgttaattagcggcttagggccaaaggtggcccctggaccagtggcctcagcatcacctgggaaaaggttagaaatgaacattcccaggccccacctcagcctcctgaatcagagcatccctttggcaaaccatactgagaaacaaccacgtgcatcaccaagcgctgtgaagaaggcaagctttgagaccttgaaggaatcatcaaactctgggcctcggtgtgctcacccagggcgagacaaagacgccatgctcctccaagtggcctccaagattaaatgagcaatgacttttaaaaaaaaaaaaaaaaaaaaaaaaaaaaaaaaaaaaaaaaaaaaaaaaaaaaaaaaaaaaaaaaaaaaaaaaaaaaaaaaaaaacaaaaaaaaaaaaccttggggaccttttggcccccgtaaattttaaattctagcaagttatggcttgcgctcgaatttggggctatttggtccaatgccccttatagaggacggttttaaattaaattgcccggggttaaccaaattaactcttggaaaaccccgggttttcccaacttaattccttttgaac

SEQ ID NO: 29314 - DNA, 2227 bp, Homo sapiens
gcaggctgtacggtccgagtctttggcctgcctggcttggcaggagtcgtctgagaaggggactcctccaggacttggtccctaggtccccagatggggagactgaggccgtggctgtgtgtccctctgagagttggagcggggctgggcccgaattcgaccccagcaggattctctccctctcagtggctccagggcctccctcagaggtccccaaagatggacacacaaccccagcggcagcaggaaaaacatatgggaattttctttctatattttaatctcatccctttaaaatgtctattttttattgtgttttttataatatacataatctattagtatagtatctcttgaatgcgattttttctagaatgtgttctgctgatttgttttagagccatgagtgcaatttatacacatacatctattgggaatgctcagaagttgtttactgatggaagtgccttcagaagagtccgggaaccacttcctaaggaaggaaagagctggccacagttagagcaagcctgcctggggccctgctctgtgttccagctgcaaactgcctgcatcatcccttcctgttactcttccttcacctgagacagtcgaggccacagcgtcagccagggccagagctgggatttgaacccaggcactcgggctccagagccacactgccccagtgtggggcttagtggcggctcctggccctgactgaggggctgactgaagcctggtgagagcgtgctgggtcagcctctccctggcgggaatcctctccgtccagtcttctaacctagcagcctcacgtccacagagctgccttgtgaaactcagcagagccctggcttcctgcagagccgtgttctcccagcctgcttcatggctccctggttgagccaagcttgcggatccgtggggtgaaggtacccgcaccgcctgggccttagtggtatgtacgggcctgcatcgtgagcagcgggcgggggcccaggcaggtgaggcagctggccacaagggcagggcccggcccccctcccaaggctgtgtctgatattcttgagcctgttcgagtttccttttccaagcctcctgttctcccacccccacccctgccatgctgcagtgactaaatctgtggttctcatccttggagaacacctgagtagctgctacaagctggccacagcccagcgactctgatgtggttgggctgggtgtggccagcagccagggcatcgggacttttcgaagctcccaggtgactcaccggcagctggggatgagaactgtcaggagggaaggtcagaagtcccaggatgcacttgaaaagcctctagctccaccagtgaccagctcctggctggactcctggtctggactcagcatcagggaggctctggcctctcgccctcagggctgggggcttcttcacatggtcatcaaagacttggccagttccgcctctcccacggccgtccttgtctcacccagcatcacgacgcatcagttcaccaacaaacacgattcagtgctgctagtgctgggtcctgttctgggggctggtgatgaggccaagagggaaagagggagctctgtgttccatcgagggggcgacaagcctggaccagatgaaagtgactcatgttgttaattagcggcttagggccaaaggtggcccctggaccagtggcctcagcatcacctgggaaaaggttagaaatgaacattcccaggccccacctcagcctcctgaatcagagcatccctttggcaaaccatactgagaaacaaccacgtgcatcaccaagcgctgtgaagaaggcaagctttgagaccttgaaggaatcatcaaactctgggcctcggtgtgctcacccagggcgagacaaagacgccatgctcctccaagtggcctccaagattaaatgagcaatgacttttaaaaaaaaaaaaaaaaaaaaaaaaaaaaaaaaaaaaaaaaaaaaaaaaaaaaaaaaaaaaaaaaaaaaaaaaaaaaaaaaaaaacaaaaaaaaaaaaccttggggaccttttggcccccgtaaattttaaattctagcaagttatggcttgcgctcgaatttggggctatttggtccaatgccccttatagaggacggttttaaattaaattgcccggggttaaccaaattaactcttggaaaaccccgggttttcccaacttaattccttttgaac

SEQ ID NO: 29315 - DNA, 3321 bp, Homo sapiens
gccatcagcgccatcttctgggctaccaagtactcacaggacaacaaggaggagtccctgtttctgctgctccagtacctgccccctggggtcatcgccctggtcaacttcctgggtcccctgctgttcacatttctggtccagctggagaactaccctcccaacacggaggtcaacctcactctgatctggtgcgtggtgctgaagctggccagcttggggatgttctccgtctccctgggtcagaccatactgtgcattggcagagacaagagcagctgtgagtcctacggctacaacgtttgtgactatcaggtggctggcagcccggcggggcctgtccctcccttccttctccccaaaaagctcacctcaaactgtgcagagccctgttcctgcccctttagtcacctttgagagaagctgtgagcagggctgcctgcaccgccgcacacctccagggggcgccactgctgccacatggtgtagtgtggctgccctggctgtggggcttcctgctctaatcccatcctcaaggcctgggtttcaacctaacgattctatcagacaccaggcaaggcacctgcaccacagaaaccctcacaggaggctaagggaaggaagggccggggtggccgtgagtggtgacgggtccccttcccctgcaccccagtgctgggagaactccgtgggggaggagctgtacaagctgagtatcttcaacttcctcctcaccgtggccttcgccttcctggtcaccctgcctcggaggctgctggtggaccggttctcaggccggttctgggcctggctggaacgggaggagttcctggtccccaagaatgtgctggacatcgtggcggggcagacggtcacctggatgggcctcttctactgccccctgctgcccctgctgaatagcgtcttcctcttcctcaccttctacatcaagaagtacaccctcctgaagaactccagggcatcttcgcggcccttccgtgcctccagctccaccttcttcttccagctagtgctcctcctgggcctgcttctggctgcagtgcccctgggctatgtggtcagcagccccacttggccatctctcgccagcatccactcctcctgggactgcggcctcttcaccaactactcagcaccctggcaagtggtcccggagctggtggcccttgggctcccgcccattggccagcgtgccctccactacctgggctcccacgccttcagcttccccctcctcatcatgctcaggttctcagggcagcaggggccatgggaggggacacctggagggggaggtccttccttccatgggggtggtgagcctgtgcacccccaaccaggagccagacgcagaaagccaagggaagcaggggcctctgaaaagcaggaacctcctgggcccaccctctgggctgccatggggattgcaggatcactggggaagcaccgtgtctgggtggctgcagctgctgagctattggtattgctgtgccagaggggaggggatgaggggctctgcgaggaaggagaggagggtcccatcctcagatacagcagtgtgcagtgagaagaccccagtaccgcgtattgtagagattgaggtggggagagaggaagtcagggagaggcgcctgtggccccaggggcaactgaccacgaatccccttcccacccaagccttgtcctgacggtgtgcgtctcccagacccaggccaatgccagggccatccacaggctccggaagcagctggtgtgggttcaggagaagtggcacctggtggaggacctgtcgcgactgctgccggagccaggcccgagcgactctccgggccccaagtaccctgcctcccaagcttcgcgcccgcagtccttctgccccggatgcccatgccctggctccccgggccaccaggccccgcggccgggcccctccgtcgtggatgccgcgggactgcgttccccttgccctggacagcacggtgccccggcctccgcccgcagattccgcttccccagcggcgcggagctgtaaccccgacccctgcctccccgaagcctccctggggccccttcaggcctccttactccatcttccagacccctggcgaccaccgcccctctcagtggctccagggcctccctcagaggtccccaaagatggacacacaaccccagcggcagcaggaaaaacatatgggaattttctttctatattttaatctcatccctttaaaatgtctattttttattgtgttttttataatatacataatctattagtatagtatctcttgaatgcgattttttctagaatgtgttctgctgatttgttttagagccatgagtgcaatttatacacatacatctattgggaatgctcagaagttgtttactgatggaagtgccttcagaagagtccgggaaccacttcctaaggaaggaaagagctggccacagttagagcaagcctgcctggggccctgctctgtgttccagctgcaaactgcctgcatcatcccttcctgttactcttccttcacctgagacagtcgaggccacagcgtcagccagggccagagctgggatttgaacccaggcactcgggctccagagccacactgccccagtgtggggcttagtggcggctcctggccctgactgaggggctgactgaagcctggtgagagcgtgctgggtcagcctctccctggcgggaatcctctccgtccagtcttctaacctagcagcctcacgtccacagagctgccttgtgaaactcagcagagccctggcttcctgcagagccgtgttctcccagcctgctcagcctcctgaatcagagcatccctttggcaaaccatactgagaaacaaccacgtgcatcaccaagcgctgtgaagaaggcaagctttgagaccttgaaggaatcatcaaactctgggcctcggtgtgctcacccagggcgagacaaagacgccatgctcctccaagtggcctccaagattaaatgagcaatgacttttaaaaaaaaaaaaaaaaaaaaaaaaaaaaaaaaaaaaaaaaaaaaaaaaaaaaaaaaaaaaaaaaaaaaaaaaaaaaaaaaaaaacaaaaaaaaaaaaccttggggaccttttggcccccgtaaattttaaattctagcaagttatggcttgcgctcgaatttggggctatttggtccaatgccccttatagaggacggttttaaattaaattgcccggggttaaccaaattaactcttggaaaaccccgggttttcccaacttaattccttttgaac

SEQ ID NO: 29316 - DNA, 2273 bp, Homo sapiens
gccatcagcgccatcttctgggctaccaagtactcacaggacaacaaggaggagtccctgtttctgctgctccagtacctgccccctggggtcatcgccctggtcaacttcctgggtcccctgctgttcacatttctggtccagctggagaactaccctcccaacacggaggtcaacctcactctgatctggtgcgtggtgctgaagctggccagcttggggatgttctccgtctccctgggtcagaccatactgtgcattggcagagacaagagcagctgtgagtcctacggctacaacgtttgtgactatcaggtggctggcagcccggcggggcctgtccctcccttccttctccccaaaaagctcacctcaaactgtgcagagccctgttcctgcccctttagtcacctttgagagaagctgtgagcagggctgcctgcaccgccgcacacctccagggggcgccactgctgccacatggtgtagtgtggctgccctggctgtggggcttcctgctctaatcccatcctcaaggcctgggtttcaacctaacgattctatcagacaccaggcaaggcacctgcaccacagaaaccctcacaggaggctaagggaaggaagggccggggtggccgtgagtggtgacgggtccccttcccctgcaccccagtgctgggagaactccgtgggggaggagctgtacaagctgagtatcttcaacttcctcctcaccgtggccttcgccttcctggtcaccctgcctcggaggctgctggtggaccggttctcaggccggttctgggcctggctggaacgggaggagttcctggtccccaagaatgtgctggacatcgtggcggggcagacggtcacctggatgggcctcttctactgccccctgctgcccctgctgaatagcgtcttcctcttcctcaccttctacatcaagaagtacaccctcctgaagaactccagggcatcttcgcggcccttccgtgcctccagctccaccttcttcttccagctagtgctcctcctgggcctgcttctggctgcagtgcccctgggctatgtggtcagcagccccacttggccatctctcgccagcatccactcctcctgggactgcggcctcttcaccaactactcagcaccctggcaagtggtcccggagctggtggcccttgggctcccgcccattggccagcgtgccctccactacctgggctcccacgccttcagcttccccctcctcatcatgctcaggttctcagggcagcaggggccatgggaggggacacctggagggggaggtccttccttccatgggggtggtgagcctgtgcacccccaaccaggagccagacgcagaaagccaagggaagcaggggcctctgaaaagcaggaacctcctgggcccaccctctgggctgccatggggattgcaggatcactggggaagcaccgtgtctgggtggctgcagctgctgagctattggtattgctgtgccagaggggaggggatgaggggctctgcgaggaaggagaggagggtcccatcctcagatacagcagtgtgcagtgagaagaccccagtaccgcgtattgtagagattgaggtggggagagaggaagtcagggagaggcgcctgtggccccaggggcaactgaccacgaatccccttcccacccaagccttgtcctgacggtgtgcgtctcccagacccaggccaatgccagggccatccacaggctccggaagcagctggtgtgggtgagtgtcctcggggctggtgaggggacagcagcttcagtggaaacccttccctatgtgtggccgagggcctagaacacgtctgagcgggtcaggtgggttcttcccactggagggcgtggcctcaggctgagagtgaagacggggaaggggaggaagagaacagctcgggctcctgagaccaggagccagacctggtaagtacatgaccttaggggctgggcctttgcctgtaatcccaacgctttggaggcccaggcaggaggatcggatcacttgaagccatgagttaaaaccagcctgggcaacaaagcaagaccctggtctccaccaaaaataagtaattaattttttaaaaggagaatgtggccgggcgtggtgactcacgcctgtaatcccagcactttcagaggccgaggtgggtggatcacctgaggtcaggagttcaagaccagcctggccaaaatagcgaaaccccgtctctacttaaaaaaaa

SEQ ID NO: 29317 - DNA, 743 bp, Homo sapiens
gcaggctgtacggtccgagtctttggcctgcctggcttggcaggagtcgtctgagaaggggactcctccaggacttggtccctaggtccccagatggggagactgaggccgtggctgtgtgtccctctgagagttggagcggggctgggcccgaattcgaccccagcaggattctctctcatttctgagccccggaggtggcagagcggcagacccgggcaagtgaaccctagggctgcaggagcccaggccccgacgccggcgcagaggggacggaagggcccgcccccagcccagcgtgcacagaggccatagccaaggccttaaggctcatccaaccggggactcatatcccccccaccggcagcccggcgccccagcctctacccgtgcccgccgagatgctgctgccgcggtcggtgtcatcggagcgggcccctggggtgccggagccggaggagctgtgggaggcagagatggagcggctgcgcggctctgggacgcccgtgcgcgggctgccctatgccatgatggacaagcgcctcatctggcagctgcgggagcccgcgggggtgcagaccttgcgctggcagcggtggcagcgccggcggcagacggtggaaaggcgcctgcgggaggcagcgcagcggctggcccgggggccttgggctctgggagggggcgctctacgagatcgggggcctcttcggcacaggaattcggtcctacttcaccttcctccg

SEQ ID NO: 29318 - DNA, 657 bp, Homo sapiens
  misc_feature (65)..(66): n is a, c, g, or t
  misc_feature (69)..(69): n is a, c, g, or t
cgccggatatagttggaactaccagtaacctcttaaagggtattatactatctctctctcctcgnnccnaattcggcacgaggttgttaattagcggcttagggccaaaggtggcccctggaccagtggcctcagcatcacctgggaaaaggttagaaatgaacattcccaggccccacctcagcctcctgaatcagagcatccctttggcaaaccatactgagaaacaaccacgtgcatcaccaagcgctgtgaagaaggcaagctttgagaccttgaaggaatcatcaaactctgggcctcggtgtgctcacccagggcgagacaaagacgccatgctcctccaagtggcctccaagattaaatgagcaatgacttttaaaaaaaaaaaaaaaaaaaaaaaaaaaaaaaaaaaaaaaaaaaaaaaaaaaaaaaaaaaaaaaaaaaaaaaaaaaaaaaaaaaacaaaaaaaaaaaaccttggggaccttttggcccccgtaaattttaaattctagcaagttatggcttgcgctcgaatttggggctatttggtccaatgccccttatagaggacggttttaaattaaattgcccggggttaaccaaattaactcttggaaaaccccgggttttcccaacttaattccttttgaac

SEQ ID NO: 29319 - DNA, 499 bp, Homo sapiens
ccttgagaggcaaccgaagcactcagcctcctgaatcagagcatccctttggcaaaccatactgagaaacaaccacgtgcatcaccaagcgctgtgaagaaggcaagctttgagaccttgaaggaatcatcaaactctgggcctcggtgtgctcacccagggcgagacaaagacgccatgctcctccaagtggcctccaagattaaatgagcaatgacttttaaaaaaaaaaaaaaaaaaaaaaaaaaaaaaaaaaaaaaaaaaaaaaaaaaaaaaaaaaaaaaaaaaaaaaaaaaaaaaaaaaaacaaaaaaaaaaaaccttggggaccttttggcccccgtaaattttaaattctagcaagttatggcttgcgctcgaatttggggctatttggtccaatgccccttatagaggacggttttaaattaaattgcccggggttaaccaaattaactcttggaaaaccccgggttttcccaacttaattccttttgaac

SEQ ID NO: 29320 - DNA, 770 bp, Homo sapiens
gccatcagcgccatcttctgggctaccaagtactcacaggacaacaaggaggagtccctgtttctgctgctccagtacctgccccctggggtcatcgccctggtcaacttcctgggtcccctgctgttcacatttctggtccagctggagaactaccctcccaacacggaggtcaacctcactctgatctggtgcgtggtgctgaagctggccagcttggggatgttctccgtctccctgggtcagaccatactgtgcattggcagagacaagagcagctgtgagtcctacggctacaacgtttgtgactatcagtgctgggagaactccgtgggggaggagctgtacaagctgagtatcttcaacttcctcctcaccgtggccttcgccttcctggtcaccctgcctcggaggctgctggtggaccggttctcaggccggtttggagagggacaggaggaaacgcgagcctggtgggactggctccaggcacacaggcgaagggcaagagggttggacacgaagccaccaagctacttgggttcctccttcttctcgtttgcctttttctgcttctgctgcatgatctccgagtccctctgcttgcgggcggcagcagaaagcccgtcatctcggcgctttcccttaaccgagtcgctctgctttttcatattcttctggcgggcgagctcacgctggtaccgccggtcatggcgacggcagcggctccaacctgcctcctcctgcccctctcagggatcctccagcat

SEQ ID NO: 29321 - DNA, 687 bp, Homo sapiens
ctgcaccgatctgggtcaacgcctctgatcgtatctcgtgtccatccttctcattcccacccaggtactatcgtggtgcagtgggggccctcctggtgtttgacctaaccaagcaccagacctatgctgtggtggagcgatggctgaaggagctctatgaccatgctgaagccacgatcgtcgtcatgctcgtgggtaacaaaagtgacctcagccaggcccgggaagtgcccactgaggaggcccgaatgttcgctgaaaacaatggactgctcttcctggagacctcagccctggactctaccaatgttgagctagcctttgagactgtcctgaaagaaatctttgcgaaggtgtccaagcagagacagaacagcatccggaccaatgccatcactctgggcagtgcccaggctggacaggagcctggccctggggagaagagggcctgttgcatcagcctctgaccttggccagcaccacctgcccccactggctttttggtgccccttgtccccacttcagccccaggacctttccttgccctttggttccagatatcagactgttccctgttcacagcaccctcagggtcttaaggtcttcatgccctatcacaaatacctcttttatctgtccacccctcacagactaggaccctcaaataaagctgttttatatcaatgc

SEQ ID NO: 29322 - DNA, 131 bp, Homo sapiens
gcctactactactaaattcccccccggtcgaccagggtcttaaggtcttcatgccctatcacaaatacctcttttatctgtccacccctcacagactaggaccctcaaataaagctgttttatatcaatgc

SEQ ID NO: 29323 - DNA, 1251 bp, Homo sapiens
cccggtgttgcgctcaccgccgtggggcagggccaacgggagaaacaaaaaaggaagcctgataaacagtttccatatccaacattttccacattcaattatttttaaattaaataatctctccctaggagaaaaaggaaagttctcgctcagcttccgtcctctctgcttccttacagcacccccacctgccagagctgatcctccctaggccctgcctaaccttgagttggcccccaatccctctggctgcagaagtccccttacccccaatgagaggaggggcaggaccagatcttttgagagctgagggttgagggcattgagccaacacacagatttgtcgcctctgtccccgaagacacctgcaccctccatgcggagccaagatggggaatggaactgaggaagattataactttgtcttcaaggtggtgctgatcggcgaatcaggtgtggggaagaccaatctactctcccgattcacgcgcaatgagttcagccacgacagccgcaccaccatcggggttgagttctccacccgcactgtgatgttgggcaccgctgctgtcaaggctcagatctgggacacagctggcctggagcggtaccgagccatcacctcggcgtactatcgtggtgcagtgggggccctcctggtgtttgacctaaccaagcaccagacctatgctgtggtggagcgatggctgaaggagctctatgaccatgctgaagccacgatcgtcgtcatgctcgtgggtaacaaaagtgacctcagccaggcccgggaagtgcccactgaggaggcccgaatgttcgctgaaaacaatggactgctcttcctggagacctcagccctggactctaccaatgttgagctagcctttgagactgtcctgaaagaaatctttgcgaaggtgtccaagcagagacagaacagcatccggaccaatgccatcactctgggcagtgcccaggctggacaggagcctggccctggggagaagagggcctgttgcatcagcctctgaccttggccagcaccacctgcccccactggctttttggtgccccttgtccccacttcagccccaggacctttccttgccctttggttccagatatcagactgttccctgttcacagcaccctcagggtcttaaggtcttcatgccctatcacaaatacctcttttatctgtccacccctcacagactaggaccctcaaataaagctgttttatatcaatgc

SEQ ID NO: 29324 - DNA, 1055 bp, Homo sapiens
cccggtgttgcgctcaccgccgtggggcagggccaacgggagaaacaaaaaaggaagcctgataaacagtttccatatccaacattttccacattcaattatttttaaattaaataatctctccctaggagaaaaaggaaagttctcgctcagcttccgtcctctctgcttccttacagcacccccacctgccagagctgatcctccctaggccctgcctaaccttgagttggcccccaatccctctggctgcagaagtccccttacccccaatgagaggaggggcaggaccagatcttttgagagctgagggttgagggcattgagccaacacacagatttgtcgcctctgtccccgaagacacctgcaccctccatgcggagccaagatggggaatggaactgaggaagattataactttgtcttcaagggtactatcgtggtgcagtgggggccctcctggtgtttgacctaaccaagcaccagacctatgctgtggtggagcgatggctgaaggagctctatgaccatgctgaagccacgatcgtcgtcatgctcgtgggtaacaaaagtgacctcagccaggcccgggaagtgcccactgaggaggcccgaatgttcgctgaaaacaatggactgctcttcctggagacctcagccctggactctaccaatgttgagctagcctttgagactgtcctgaaagaaatctttgcgaaggtgtccaagcagagacagaacagcatccggaccaatgccatcactctgggcagtgcccaggctggacaggagcctggccctggggagaagagggcctgttgcatcagcctctgaccttggccagcaccacctgcccccactggctttttggtgccccttgtccccacttcagccccaggacctttccttgccctttggttccagatatcagactgttccctgttcacagcaccctcagggtcttaaggtcttcatgccctatcacaaatacctcttttatctgtccacccctcacagactaggaccctcaaataaagctgttttatatcaatgc

SEQ ID NO: 29325 - DNA, 1189 bp, Homo sapiens
cccggtgttgcgctcaccgccgtggggcagggccaacgggagaaacaaaaaaggaagcctgataaacagtttccatatccaacattttccacattcaattatttttaaattaaataatctctccctaggagaaaaaggaaagttctcgctcagcttccgtcctctctgcttccttacagcacccccacctgccagagctgatcctccctaggccctgcctaaccttgagttggcccccaatccctctggctgcagaagtccccttacccccaatgagaggaggggcaggaccagatcttttgagagctgagggttgagggcattgagccaacacacagatttgtcgcctctgtccccgaagacacctgcaccctccatgcggagccaagatggggaatggaactgaggaagattataactttgtcttcaaggtggtgctgatcggcgaatcaggtgtggggaagaccaatctactctcccgattcacgcgcaatgagttcagccacgacagccgcaccaccatcggggttgagttctccacccgcactgtgatgttgggcaccgctgctgtcaaggctcagatctgggacacagctggtgtttgacctaaccaagcaccagacctatgctgtggtggagcgatggctgaaggagctctatgaccatgctgaagccacgatcgtcgtcatgctcgtgggtaacaaaagtgacctcagccaggcccgggaagtgcccactgaggaggcccgaatgttcgctgaaaacaatggactgctcttcctggagacctcagccctggactctaccaatgttgagctagcctttgagactgtcctgaaagaaatctttgcgaaggtgtccaagcagagacagaacagcatccggaccaatgccatcactctgggcagtgcccaggctggacaggagcctggccctggggagaagagggcctgttgcatcagcctctgaccttggccagcaccacctgcccccactggctttttggtgccccttgtccccacttcagccccaggacctttccttgccctttggttccagatatcagactgttccctgttcacagcaccctcagggtcttaaggtcttcatgccctatcacaaatacctcttttatctgtccacccctcacagactaggaccctcaaataaagctgttttatatcaatgc

SEQ ID NO: 29326 - DNA, 939 bp, Homo sapiens
cccggtgttgcgctcaccgccgtggggcagggccaacgggagaaacaaaaaaggaagcctgataaacagtttccatatccaacattttccacattcaattatttttaaattaaataatctctccctaggagaaaaaggaaagttctcgctcagcttccgtcctctctgcttccttacagcacccccacctgccagagctgatcctccctaggccctgcctaaccttgagttggcccccaatccctctggctgcagaagtccccttacccccaatgagaggaggggcaggaccagatcttttgagagctgagggttgagggcattgagccaacacacagatttgtcgcctctgtccccgaagacacctgcaccctccatgcggagccaagatggggaatggaactgaggaagattataactttgtcttcaaggtggtgctgatcggcgaatcaggtgtggggaagaccaatctactctcccgattcacgcgcaatgagttcagccacgacagccgcaccaccatcggggttgagttctccacccgcactgtgatgttgggcaccgctgctgtcaaggctcagatctgggacacagctggcctggagcggtaccgagccatcacctcggcgtactatcgtggtgcagtgggggccctcctggtgtttgacctaaccaagcaccagacctatgctgtggtggagcgatggctgaaggagctctatgaccatgctgaagccacgatcgtcgtcatgctcgtgggtaacaaaagtgacctcagccaggcccgggaagtgcccactgaggaggcccgaatgttcgctgaaaacaatggactgctcttcctggagacctcagccctggactctacccagctgtgctgccagcatctggccttccggggcttctagatgatccttcaatgctcatacagcgatgcgc

SEQ ID NO: 29327 - DNA, 483 bp, Homo sapiens
tcaaacacaggagggcccccacagtcaccactgaggaggcccgaatgttcgctgaaaacaatggactgctcttcctggagacctcagccctggactctaccaatgttgagctagcctttgagactgtcctgaaagaaatctttgcgaaggtgtccaagcagagacagaacagcatccggaccaatgccatcactctgggcagtgcccaggctggacaggagcctggccctggggagaagagggcctgttgcatcagcctctgaccttggccagcaccacctgcccccactggctttttggtgccccttgtccccacttcagccccaggacctttccttgccctttggttccagatatcagactgttccctgttcacagcaccctcagggtcttaaggtcttcatgccctatcacaaatacctcttttatctgtccacccctcacagactaggaccctcaaataaagctgttttatatcaatgc

SEQ ID NO: 29328 - DNA, 169 bp, Homo sapiens
tgatagggcactgaagaccttaagaccctttggttccagatatcagactgttccctgttcacagcaccctcagggtcttaaggtcttcatgccctatcacaaatacctcttttatctgtccacccctcacagactaggaccctcaaataaagctgttttatatcaatgc

SEQ ID NO: 29329 - DNA, 408 bp, Homo sapiens
ggagatcagtgtcgtagaaaataacaaaacaaatattgaggatagagcgctggggtggttgtaatgggaaagggtgcctttggcagcaggaatgataagcacaaagtacacacctgctctgctggaggaacagggagggggacgctggctggagcagactgaacgaggagaagcatggtagagatgaggagagacaggtaacatgaaactgaaatatggacagatcatgcatggccatgcaggctgctttggcttctactctgcagagtggaataacaagttgattgaaatttgcttgactgcccaatatctccttgtagcacttttctcctcttactagcagtatttccactcctatctccccacctcaggtggtctgcggttttaactcttagtttcctatgtggt

SEQ ID NO: 29330 - DNA, 205 bp, Homo sapiens
tgtcggtgcgtccggaccccgcagccccccagtgccgcccgggggcggtgggagaggggccgacaccgcagggcccgccgtgctgtggccgagggggcaggtccaggctctgcttcccgggcagacgccggagaccccagcaagccaagtgctgcgggcagcccccccccgcccccccgagagaggggacgccgcgtggaggcca

SEQ ID NO: 29331 - DNA, 341 bp, Homo sapiens
atcttatccaaaaaaactcacagaaacacacaacacacacataactaaatatctgggtaccctagaaccaaaaaagtagtatgtagtatgtatgagtgtattaataagatagaaaaatatgacagaatgttaaaaattggtgattatgaacaaagggttattttgaataagcaaaaagattatgaatatgacagttgtcttattttggcaactttgcattttaaatcatttaaaaataaaattaaaaaaattaattgaccacttgggaggctgaggcaggaggatctcttgagcccaggagttcaaggccagcgtgggcaatgtagtaagaccccgtctct

SEQ ID NO: 29332 - DNA, 202 bp, Homo sapiens
tccaggggggccccacagtaaaatattccaggcttttgggtctctctgaagccactttggaggctgcttaggaggcatatttgcttgaccaagcgatagaaatcctagagaaactcaggcctcagcaaagatttttcctcattcaccaaaaaagcaacaacagtagcagcagcagcaaggctgtgggcttttcctgctgatc

SEQ ID NO: 29333 - DNA, 481 bp, Homo sapiens
aaaatagctcttgggccccttccatatgcttagtgctgggctctggggcttccagacagacgtcagcccctctgacaacacaaaaagcagcgtacagaggcacgcagaaagctcctgaatgctagtcacctctctaatatttgatgtctgcagcatttcctgcattatctttttccccttagcaatggtcacttttgtacatattatatatgtgcatatatatttttttttctgcatatccctctaaactgtaacctccacgtggccagggattttatgttttgttcctgcttgtatccttagtgcctacaacagaagtatgtgttgaatgatgaatgccacagtcccctttatggacagagccagcatcagaagccaagcagaaggagtacctccagaagcaaacctctgttctaaccagaaatcagaaccaagatagaacaagaattaaacatgaactgaacactctctgaacccggct

SEQ ID NO: 29334 - DNA, 522 bp, Homo sapiens
atgattatcttccaggacctcatcagccacaatgagatgttctctgacatttacaagatctgggagatcacaaatgggctgtgcctggaagtggagcagaagatgctcagtaagacaacagggaacactgatgactcactcattggcagaaattcctcctctgaaagtactgaggatgaagttactgaaagcacgataatcactagtgttgatattgttacaaaccatcacttgcaggaaagcatcttcacaaaagaagcctacaagaagtatatcaaagattacatgaaatcaatcaacgaaaaacttgaagaacagagaccagaaagagtgaaactttttataacagggaatgaagaacaaatcaagcacatctttgctaattttcaaaactaccagttctttattggtgaaaacctaaatccacctggcatggttgctctgctgaactaccgtaaggatggtcagtatgaccccatatatgattttttaaggaatggtttagaaattaaaagatgttaa

SEQ ID NO: 29335 - DNA, 358 bp, Homo sapiens
gcaccattatgagatggggtggaggagccaatcctgcaacaatggtctgggcagaagttcatgcaaatatgcatgatgttttaatgaaaatgtgatgttgccaatgctaacttcacacgtgcagtcatattaccatgacaaccagtagctctctagagttcaaatatggagtaatgacttgcttatgcctgaacatttaacttaacagtttttcatgctgctaacaatgattaaattgaaaaagaactctgagccaaatctgacagatatgggaaaaattcatttctgaaagcaatatctaaaataattgctggctacatttgcttcctaattctgagaaaaaaaatcccaaactgtg

SEQ ID NO: 29336 - DNA, 937 bp, Homo sapiens
cggacgcgtgggtcgacccacgcgtcggtggaagtgacatcgtctttaaaccctgcgtggcaatccctgacgcaccgccgtgatgcccagggaagacagggcgacctggaagtccaactacttccttaagatcatccaactattggatgattatccgaaatgtttcattgtgggagcagacaatgtgggctccaagcagatgcagcagatccgcatgtcccttcgcgggaaggctgtggtgctgatgggcaagaacaccatgatgcgcaaggccatccgagggcacctggaaaacaacccagctctggagaaactgctgcctcatatccgggggaatgtgggctttgtgttcaccaaggaggacctcactgagatcagggacatgttgctggccaataaggtgccagctgctgcccgtgctggtgccattgccccatgtgaagtcactgtgccagcccagaacactggtctcgggcccgagaagacctcctttttccaggctttaggtatcaccactaaaatctccaggggcaccattgaaatcctgagtgatgtgcagctgatcaagactggagacaaagtgggagccagcgaagccacgctgctgaacatgctcaacatctcccccttctcctttgggctggtcatccagcaggtgttcgacaatggcagcatctacaaccctgaagtgcttgatatcacagaggaaactctgcattctcgcttcctggagggtgtccgcaatgttgccagtgtctgtctggcagattggtacccaactgttgcatcagtaccccattctatcatcaacgggtacaaacgagtcctggcttgtttgtggagacggattacaccttcccacttgctgaaaaggtcaaggctttcttggctgatccatctgcctttgtggctgctgcccctgtggctgctgccacca

SEQ ID NO: 29337 - DNA, 788 bp, Homo sapiens
  misc_feature (43)..(43): n is a, c, g, or t
gccttctctcgccaggcgtcctcgtggaaggcccgggaccgcnggatgggtgtcggcgtgaccaggcctgagctccctgtctctcctcagtgacatcgtctttaaaccctgcgtggcaatccctgacgcaccgccgtgatgcccagggaagacagggcgacctggaagtccaactacttccttaagatcatccaactattggatgattatccgaaatgtttcattgtgggagcagacaatgtgggctccaagcagatgcagcagatccgcatgtcccttcgcgggaaggctgtggtgctgatgggcaagaacaccatgatgcgcaaggccatccgagggcacctggaaaacaacccagctctggagaaactgctgcctcatatccgggggaatgtgggctttgtgttcaccaaggaggacctcactgagatcagggacatgttgctggccaataaggtgccagctgctgcccgtgctggtgccattgccccatgtgaagtcactgtgccagcccagaacactggtctcgggcccgagaagacctcctttttccaggctttaggtatcaccactaaaatctccaggggcaccattgaaatcctgtgtgccagctgatcaagactggcaagaaaatcacagcctttgtacccaatgacggttgcttgaactttattgaggaaaatgatgaagttctggttgctggattggtcgcaaaggtcatgctgttggtgatattcctggagtcgctttaaggttgtcaaagtagccaatgtttctctttggcccta

SEQ ID NO: 29338 - DNA, 932 bp, Homo sapiens
tcctgggtgttagggcgtcctcgtggaagtgacatcgtctttaaaccctgcgtggcaatccctgacgcaccgccgtgatgcccagggaagacagggcgacctggaagtccaactacttccttaagatcatccaactattggatgattatccgaaatgtttcattgtgggagcagacaatgtgggctccaagcagatgcagcagatccgcatgtcccttcgcgggaaggctgtggtgctgatgggcaagaacaccatgatgcgcaaggccatccgagggcacctggaaaacaacccagctctggagaaactgctgcctcatatccgggggaatgtgggctttgtgttcaccaaggaggacctcactgagatcagggacatgttgctggccaataaggtgccagctgctgcccgtgctggtgccattgccccatgtgaagtcactgtgccagcccagaacactggtctcgggcccgagaagacctcctttttccaggctttaggtatcaccactaaaatctccaggggcaccattgaaatcctgagtgatgtgcagctgatcaagactggagacaaagtgggagccagcgaagccacgctgctgaacatgctcaacatctcccccttctcctttgggctggtcatccagcaggtgttcgacaatggcagcatctacaaccctgaagtgcttgatatcacagaggaaactctgcattctcgcttcctggagggtgtccgcaatgttgccagtgtctgtctggcagattggtacccaactgttgcatcagtaccccattctatcatcaacgggtacaaacgagtcctggcttgtttgtggagacggattacaccttcccacttgctgaaaaggtcaaggctttcttggctgatccatctgcctttgtggctgctgcccctgtggctgctgccacca

SEQ ID NO: 29339 - DNA, 993 bp, Homo sapiens
  misc_feature (43)..(43): n is a, c, g, or t
gccttctctcgccaggcgtcctcgtggaaggcccgggaccgcnggatgggtgtcggcgtgaccaggcctgagctccctgtctctcctcagtgacatcgtctttaaaccctgcgtggcaatccctgacgcaccgccgtgatgcccagggaagacagggcgacctggaagtccaactacttccttaagatcatccaactattggatgattatccgaaatgtttcattgtgggagcagacaatgtgggctccaagcagatgcagcagatccgcatgtcccttcgcgggaaggctgtggtgctgatgggcaagaacaccatgatgcgcaaggccatccgagggcacctggaaaacaacccagctctggagaaactgctgcctcatatccgggggaatgtgggctttgtgttcaccaaggaggacctcactgagatcagggacatgttgctggccaataaggtgccagctgctgcccgtgctggtgccattgccccatgtgaagtcactgtgccagcccagaacactggtctcgggcccgagaagacctcctttttccaggctttaggtatcaccactaaaatctccaggggcaccattgaaatcctgagtgatgtgcagctgatcaagactggagacaaagtgggagccagcgaagccacgctgctgaacatgctcaacatctcccccttctcctttgggctggtcatccagcaggtgttcgacaatggcagcatctacaaccctgaagtgcttgatatcacagaggaaactctgcattctcgcttcctggagggtgtccgcaatgttgccagtgtctgtctggcagattggtacccaactgttgcatcagtaccccattctatcatcaacgggtacaaacgagtcctggcttgtttgtggagacggattacaccttcccacttgctgaaaaggtcaaggctttcttggctgatccatctgcctttgtggctgctgcccctgtggctgctgccacca

SEQ ID NO: 29340 - DNA, 746 bp, Homo sapiens
tcctgggtgttagggcgtcctcgtggaagtgacatcgtctttaaaccctgcgtggcaatccctgacgcaccgccgtgatgcccagggaagacagggcgacctggaagtccaactacttccttaagatcatccaactattggatgattatccgaaatgtttcattgtgggagcagacaatgtgggctccaagcagatgcagcagatccgcatgtcccttcgcgggaaggctgtggtgctgatgggcaagaacaccatgatgcgcaaggccatccgagggcacctggaaaacaacccagctctggagaaactgctgcctcatatccgggggaatgtgggctttgtgttcaccaaggaggacctcactgagatcagggacatgttgctggccaataaggtgccagctgctgcccgtgctggtgccattgccccatgtgaagtcactgtgccagcccagaacactggtctcgggcccgagaagacctcctttttccaggctttaggtatcaccactaaaatctccaggggcaccattgaaatcctgggtgtccgcaatgttgccagtgtctgtctggcagattggtacccaactgttgcatcagtaccccattctatcatcaacgggtacaaacgagtcctggcttgtttgtggagacggattacaccttcccacttgctgaaaaggtcaaggctttcttggctgatccatctgcctttgtggctgctgcccctgtggctgctgccacca

SEQ ID NO: 29341 - DNA, 637 bp, Homo sapiens
cggacgcgtgggtcgacccacgcgtcggtggaagtgacatcgtctttaaaccctgcgtggcaatccctgacgcaccgccgtgatgcccagggaagacagggcgacctggaagtccaactacttccttaagatcatccaactattggatgattatcctgaatatgtttcacttgatggtgaggcgagactaatgtgggctccaacgtctaggatgccagcaacgaatccggacatgtcctcatttcgtcggtggacatgggcctgttggggatagacgatttgcaatttggagggcaacatgaatcgacctcgatgtatgcgcaatggctcgatcacgaggggcacctgcgaaatatcaacaccagtctctgggaggagaactgctgcctcatatccgggggaatgtgggctttgtgttcaccaaggaggacctcactgagatcagggacatgttgctggccaataaggtgccagctgctgcccgtgctggtgccattgccccatgtgaagtcactgtgccagcccagaacactggtctcgggcccgagaagacctcctttttccaggctttaggtatcaccactaaaatctccaggggcaccattgaaatcctgtgagtggacctggtttgcctgtg

SEQ ID NO: 29342 - DNA, 694 bp, Homo sapiens
gttatactacagtgctggttccgtagtcttcaaagcttggaactccctcttgcctttgctccaaaaatttgttctttcactcagcaaatatttaccaagtttctgctatatgcaggaccgtgtggagaactcaaagatgaatcagacgtggggcctgtccacaaatgttgtcagtcaagtgtaggacatagggcaagcacacgggagcttttgctgttgtgtccaagaatagcatgatgcgccgtaggtatttggtgggggaaggaaattagtgggtgggtttcaagtaaacccacatggagaaggtgacatttgagttgagccttgaaggacaggtttatctgtgcagagagggaagttttagggcagagatatagcacaaaagttagaaaacaaaaccaaaacaggtggaagagaggaagagtaatcaacctttaactgcgttgccatgcccttgactgaggcctcacccacattatcccatctaatcctcctcataagaaaacttttttcctcataagaaaactaaggcctgcagcattaaaataacttgcccgagaaggctcataagtggttagagtggagatttgaacccaagacagttcaattccagatttgaactgagcaggctttagccagagcaaaagatatttgaagagaaaaaggagtaatttgaagagataaagtttaggaa

SEQ ID NO: 29343 - DNA, 441 bp, Homo sapiens
aaatgtagctttacgttgcagagtacggtaaactagcagtctatgccatagaccatataatgcaatttggatatcaccctataagttattctaagtataataagatgttatacaagtcaaaaatggttagttgcctataactttctaacactcagtcattgttgggtattttgcagtgattatcaggctagagttactgaaagagttgagttttaggtaagcttgattttttgggcttaccagggcacatgccttggatcagtccctgtactctgaaacccaaaggtcagatctgcactggaattttccactaattgagacaactaagtagctctctcgaaaacaaaactcacaagattgctttacacaatgagtttaatatattttcaggcgtattaggtagaattctgtgggttacaaatagtagaaactgactctaga

SEQ ID NO: 29344 - DNA, 480 bp, Homo sapiens
aatcctctgcgtcgacgtaacttgtagtgaaatacttcctagtgttctcttcttctagttgtccatatgtagtatgtataactatagaccttgatgatttaagttgagcacagtttagtgtcaggttcctttcagtgatgcatgagattggttatatgatctagtgagtgttatttagaaattaattcaccagacccgggtgtggtggctcatgcctgtaatcccagcactatgggagggcgaggcaggcagatcacctgaggtcaggagttcgagaccagcctggccaacatggtgaaaccctgtctctactaaaaatatgaaaattatctgggcgtggtgatgctcgcctgcaatcccagctacttgggaggctgaggcatgagaattgcttgaacctgggggacaggtgttacagtgagccaagattgtgccactgcactccagcctgggtgacagagtgagactctgtctcaaaaa

SEQ ID NO: 29345 - DNA, 703 bp, Homo sapiens
cctccaccctcacccccctttttgactcaaattttattgtgagttggtgtatagttaggaatttgaagagcactttttttgtttattttatcttttcggttactatgcatactatgtgtgtcaactcttaaacctgcagggggtcattttggccatcaactagttttagggctttcgcctcctaaagaatatgaattatggttgtaatttttacagtttaacaagatggcatatgaagaatctttatttcattatgacttcctagtgttctcttcttctagttgtccatatgtagtatgtataactatagaccttgatgatttaagttgagcacagtttagtgtcaggttcctttcagtgatgcatgagattggttatatgatctagtgagtgttatttagaaattaattcaccagacccgggtgtggtggctcatgcctgtaatcccagcactatgggagggcgaggcaggcagatcacctgaggtcaggagttcgagaccagcctggccaacatggtgaaaccctgtctctactaaaaatatgaaaattatctgggcgtggtgatgctcgcctgcaatcccagctacttgggaggctgaggcatgagaattgcttgaacctgggggacaggtgttacagtgagccaagattgtgccactgcactccagcctgggtgacagagtgagactctgtctcaaaaa

SEQ ID NO: 29346 - DNA, 184 bp, Homo sapiens
ctattgctaatctacctttttgccagtttaatttgcagcctcccaagaattaaccctaagaggttagaggaaaagtttctcctctctgactttcataaccacagaacatgtcccaccacataccccgtcattattgtgagaatataattcaactagacatggaggtaactaacctcagtgaatc

SEQ ID NO: 29347 - DNA, 643 bp, Homo sapiens
ggtttctctattttgcccaggctgttcttgaactcctgagctcaaaagatcctttcatcttggttttccagagtgctaggactataaggcatgagccacagtgctcagtccatcatcccttcttgaatcttagactttccttttagtacaggcataccttggagacattgcaggtacgattccagaccactgcaataaggcaagttcctggttatttattattgttttggtttctcagtgcatataaaagttatgtgtacacaatactatagtctcttaagtgtttttatggttaaaaaacacaatgtgactaccttaattaaaatatattttgtgttaaaaatgctaatgatcggccgtggttcacgcctgtaatcctagcactttgggattacaggcatgggccaccatgcctggccttaccttccaatttatacactatagttactgaggatttaaattatatcttcattttattcctatcaattagacattgttatatttctgatatttcttgtctttgacatcaatatttagatttcactccatgtttaccattttatttgctcatcatcccgtcttcgtttctttttctttttttacttttttttttgagacagggtctccctctgttggcggccgc

SEQ ID NO: 29348 - DNA, 477 bp, Homo sapiens
ggtttctctattttgcccaggctgttcttgaactcctgagctcaaaagatcctttcatcttggttttccagagtgctaggactataaggcatgagccacagtgctcagtccatcatcccttcttgaatcttagactttccttttagtacaggcataccttggagacattgcaggtacgattccagaccactgcaataaggcaagttcctggttatttattattgttttggtttctcagtgcatataaaagttatgtgtacacaatactatagtctcttaagtgtttttatggttaaaaaacacaatgtgactaccttaattaaaatatattttgtgttaaaaatgctaatgatcggccgtggttcacgcctgtaatcctagcactttgggaggttgaggggggcggatcacttgcggtcaggagttcaaggccagcctggccaacatggtgaaaccctgtctctactacaaatattt

SEQ ID NO: 29349 - DNA, 2842 bp, Homo sapiens
tggcgatgctactgtttaattgcaggaggtgggggtgtgtgtaccatgtaccagggctattagaagcaagaaggaaggagggagggcagagcgccctgctgagcaacaaaggactcctgcagccttctctgtctgtctcttggcacaggcacatggggaggcctcccgcaggtggggggccaccagtccaggggtgggagcactacagggcacgagttggtttgggagctgccagtctcctgggaggatcgcagtcagcagagcagggctgaggcctgggggtaggagcagagcctgcgcatctggaggcagcatgtccaagaaagggagtggaggtgcagcgaaggacccaggggcagagcccacgctgggatggaccccttcgaggacacgctgcggcggctgcgtgaggccttcaactgagggcgcacgcggccggccgagttccgggctgcgcagctccagggcctgggccacttccttcaagaaaacaagcagcttctgcgcgacgtgctggcccaggacctgcataagccagctttcgaggcagacatatctgagctcatcctttgccagaacgaggttgactacgctctcaagaacctgcaggcctggatgaaggatgaaccacggtccacgaacctgttcatgaagctggactcggtcttcatctggaaggaaccctttggcctggtcctcatcatcgcaccctggaactacccactgaacctgaccctggtgctcctggtgggcgccctcgccgcagggagttgcgtggtgctgaagccgtcagaaatcagccagggcacagagaaggtcctggctgaggtgctgccccagtacctggaccagagctgctttgccgtggtgctgggcggaccccaggagacagggcagctgctagagcacaagttggactacatcttcttcacagggagccctcgtgtgggcaagattgtcatgactgctgccaccaagcacctgacgcctgtcaccctggagctggggggcaagaacccctgctacgtggacgacaactgcgacccccagaccgtggccaaccgcgtggcctggttctgctacttcaatgccggccagacctgcgtggcccctgactacgtcctgtgcagccccgagatgcaggagaggctgctgcccgccctgcagagcaccatcacccgtttctatggcgacgacccccagagctccccaaacctgggccgcatcatcaaccagaaacagttccagcggctgcgggcattgctgggctgcggccgcgtggccattgggggccagagcaacgagagcgatcgctacatcgcccccacggtgctggtggacgtgcaggagacggagcctgtgatgcaggaggagatcttcgggcccatcctgcccatcgtgaacgtgcagagcgtggacgaggccatcaagttcatcaaccggcaggagaagcccctggccctgtacgccttctccaacagcagccaggttgtgaaccagatgctggagcggaccagcagcggcagctttggaggcaatgagggcttcacctacatatctctgctgtccgtgccattcgggggagtcggccacagtgggatgggccggtaccacggcaagttcaccttcgacaccttctcccaccaccgcacctgcctgctcgccccctccggcctggagaaattaaaggagatccgctacccaccctataccgactggaaccagcagctgttacgctggggcatgggctcccagagctgcaccctcctgtgagcgtcccacccgcctccaacgggtcacacagagaaacctgagtctagccatgaggggcttatgctcccaactcacattgttcctccagaccgcaggctcccccagcctcaggttgctggagctgtcacatgactgcatcctgcctgccagggctgcaaagcaaggtcttgcttctatctgggggacgctgctcgagagaggccgagaggccgcagaacatgccaggtgtcctcactcaccccaccctccccaattccagccctttgccctctcggtcagggttggccaggcccagtcacaggggcagtgtcaccctggaaaatacagtgccctgccttcttaggggcatcagccctgaacggttgagagcgtggagccctccaggcctttgctctcccctctaggcacacgcgcacttccacctctgccccatcccaactgcaccagcactgcctcccccagggatcctctcacatcccacactggtctctgcaccacccctctggttcacaccgcaccctgcactcacccacagcagctccatccactgggaaaactggggtttgcatcactccactgcacagtgttagtgggacctgggggcaagtcccttgacttctctgagcctcagtttccttatgtgaaagttgctggaaccaaaatggagtcacttatgccaaactctaataaaatggagtcggggggccacatagaagccctcacacacacatgcccgtaacaggatttatcacaagacacgcctgcatgtagaccagacacagggcgtatggaaagcacgtcctcaagactgtagtattccagatgagctgcagatgcttacctaccacggccgtctccaccagaaaaccatcgccaactcctgcgatcagcttgtgacttacaaaccttgtttaaaagctgcttacatggacttctgtcctttaaaagcttccccttggctgtggccctctgtgtatgcctgggatccttccaagcactcatagcccagataggaatcctctgctcctcccaaataaattcatctgttctggagagcctatatttctga

SEQ ID NO: 29350 - DNA, 2519 bp, Homo sapiens
  misc_feature (2)..(2): n is a, c, g, or t
  misc_feature (6)..(6): n is a, c, g, or t
  misc_feature (8)..(8): n is a, c, g, or t
gncacnanggtgaagaaggatgtggttgcttccccttccaccataactgatggaccccttcgaggacacgctgcggcggctgcgtgaggccttcaactgagggcgcacgcggccggccgagttccgggctgcgcagctccagggcctgggccacttccttcaagaaaacaagcagcttctgcgcgacgtgctggcccaggacctgcataagccagctttcgaggcagacatatctgagctcatcctttgccagaacgaggttgactacgctctcaagaacctgcaggcctggatgaaggatgaaccacggtccacgaacctgttcatgaagctggactcggtcttcatctggaaggaaccctttggcctggtcctcatcatcgcaccctggaactacccactgaacctgaccctggtgctcctggtgggcgccctcgccgcagggagttgcgtggtgctgaagccgtcagaaatcagccagggcacagagaaggtcctggctgaggtgctgccccagtacctggaccagagctgctttgccgtggtgctgggcggaccccaggagacagggcagctgctagagcacaagttggactacatcttcttcacagggagccctcgtgtgggcaagattgtcatgactgctgccaccaagcacctgacgcctgtcaccctggagctggggggcaagaacccctgctacgtggacgacaactgcgacccccagaccgtggccaaccgcgtggcctggttctgctacttcaatgccggccagacctgcgtggcccctgactacgtcctgtgcagccccgagatgcaggagaggctgctgcccgccctgcagagcaccatcacccgtttctatggcgacgacccccagagctccccaaacctgggccgcatcatcaaccagaaacagttccagcggctgcgggcattgctgggctgcggccgcgtggccattgggggccagagcaacgagagcgatcgctacatcgcccccacggtgctggtggacgtgcaggagacggagcctgtgatgcaggaggagatcttcgggcccatcctgcccatcgtgaacgtgcagagcgtggacgaggccatcaagttcatcaaccggcaggagaagcccctggccctgtacgccttctccaacagcagccaggttgtgaaccagatgctggagcggaccagcagcggcagctttggaggcaatgagggcttcacctacatatctctgctgtccgtgccattcgggggagtcggccacagtgggatgggccggtaccacggcaagttcaccttcgacaccttctcccaccaccgcacctgcctgctcgccccctccggcctggagaaattaaaggagatccgctacccaccctataccgactggaaccagcagctgttacgctggggcatgggctcccagagctgcaccctcctgtgagcgtcccacccgcctccaacgggtcacacagagaaacctgagtctagccatgaggggcttatgctcccaactcacattgttcctccagaccgcaggctcccccagcctcaggttgctggagctgtcacatgactgcatcctgcctgccagggctgcaaagcaaggtcttgcttctatctgggggacgctgctcgagagaggccgagaggccgcagaacatgccaggtgtcctcactcaccccaccctccccaattccagccctttgccctctcggtcagggttggccaggcccagtcacaggggcagtgtcaccctggaaaatacagtgccctgccttcttaggggcatcagccctgaacggttgagagcgtggagccctccaggcctttgctctcccctctaggcacacgcgcacttccacctctgccccatcccaactgcaccagcactgcctcccccagggatcctctcacatcccacactggtctctgcaccacccctctggttcacaccgcaccctgcactcacccacagcagctccatccactgggaaaactggggtttgcatcactccactgcacagtgttagtgggacctgggggcaagtcccttgacttctctgagcctcagtttccttatgtgaaagttgctggaaccaaaatggagtcacttatgccaaactctaataaaatggagtcggggggccacatagaagccctcacacacacatgcccgtaacaggatttatcacaagacacgcctgcatgtagaccagacacagggcgtatggaaagcacgtcctcaagactgtagtattccagatgagctgcagatgcttacctaccacggccgtctccaccagaaaaccatcgccaactcctgcgatcagcttgtgacttacaaaccttgtttaaaagctgcttacatggacttctgtcctttaaaagcttccccttggctgtggccctctgtgtatgcctgggatccttccaagcactcatagcccagataggaatcctctgctcctcccaaataaattcatctgttctggagagcctatatttctga

SEQ ID NO: 29351 - DNA, 595 bp, Homo sapiens
attgccaggcgtgggcacgggagttggtttgggagctgccagtctcctgggaggatcgcagtcagcagagcagggctgaggcctgggggtaggagcagagcctgcgcatctggaggcagcatgtccaagaaagggagtggaggtgcagcgaaggacccaggggcagagcccacgctgggatggaccccttcgaggacacgctgcggcggctgcgtgaggccttcaactgagggcgcacgcggccggccgagttccgggctgcgcagctccagggcctgggccacttccttcaagaaaacaagcagcttctgcgcgacgtgctggcccaggacctgcataagccagctttcgaggcagacatatctgagctcatcctttgccagaacgaggttgactacgctctcaagaacctgcaggcctggatgaaggatgaaccacggtccacgaacctgttcatgaagctggactcggtcttcatctggaaggaaccctttggcctggtcctcatcatcgcaccctggaactacccactgaacctgaccctggtgctcctggtgggcgccctcgccgcaggtgaggagggcgttccgaaccc

SEQ ID NO: 29352 - DNA, 2394 bp, Homo sapiens
  misc_feature (2)..(2): n is a, c, g, or t
  misc_feature (6)..(6): n is a, c, g, or t
  misc_feature (8)..(8): n is a, c, g, or t
gncacnanggtgaagaaggatgtggttgcttccccttccaccataactgatggaccccttcgaggacacgctgcggcggctgcgtgaggccttcaactgagggcgcacgcggccggccgagttccgggctgcgcagctccagggcctgggccacttccttcaagaaaacaagcagcttctgcgcgacgtgctggcccaggacctgcataagccagctttcgaggcagacatatctgagctcatcctttgccagaacgaggttgactacgctctcaagaacctgcaggcctggatgaaggatgaaccacggtccacgaacctgttcatgaagctggactcggtcttcatctggaaggaaccctttggcctggtcctcatcatcgcaccctggaactacccactgaacctgaccctggtgctcctggtgggcgccctcgccgcagggagttgcgtggtgctgaagccgtcagaaatcagccagggcacagagaaggtcctggctgaggtgctgccccagtacctggaccagagctgctttgccgtggtgctgggcggaccccaggagacagggcagctgctagagcacaagttggactacatcttcttcacagggagccctcgtgtgggcaagattgtcatgactgctgccaccaagcacctgacgcctgtcaccctggagctggggggcaagaacccctgctacgtggacgacaactgcgacccccagaccgtggccaaccgcgtggcctggttctgctacttcaatgccggccagacctgcgtggcccctgactacgtcctgtgcagccccgagatgcaggagaggctgctgcccgccctgcagagcaccatcacccgtttctatggcgacgacccccagagctccccaaacctgggccgcatcatcaaccagaaacagttccagcggctgcgggcattgctgggctgcggccgcgtggccattgggggccagagcaacgagagcgatcgctacatcgcccccacggtgctggtggacgtgcaggagacggagcctgtgatgcaggaggagatcttcgggcccatcctgcccatcgtgaacgtgcagagcgtggacgaggccatcaagttcatcaaccggcaggagaagcccctggccctgccacagtgggatgggccggtaccacggcaagttcaccttcgacaccttctcccaccaccgcacctgcctgctcgccccctccggcctggagaaattaaaggagatccgctacccaccctataccgactggaaccagcagctgttacgctggggcatgggctcccagagctgcaccctcctgtgagcgtcccacccgcctccaacgggtcacacagagaaacctgagtctagccatgaggggcttatgctcccaactcacattgttcctccagaccgcaggctcccccagcctcaggttgctggagctgtcacatgactgcatcctgcctgccagggctgcaaagcaaggtcttgcttctatctgggggacgctgctcgagagaggccgagaggccgcagaacatgccaggtgtcctcactcaccccaccctccccaattccagccctttgccctctcggtcagggttggccaggcccagtcacaggggcagtgtcaccctggaaaatacagtgccctgccttcttaggggcatcagccctgaacggttgagagcgtggagccctccaggcctttgctctcccctctaggcacacgcgcacttccacctctgccccatcccaactgcaccagcactgcctcccccagggatcctctcacatcccacactggtctctgcaccacccctctggttcacaccgcaccctgcactcacccacagcagctccatccactgggaaaactggggtttgcatcactccactgcacagtgttagtgggacctgggggcaagtcccttgacttctctgagcctcagtttccttatgtgaaagttgctggaaccaaaatggagtcacttatgccaaactctaataaaatggagtcggggggccacatagaagccctcacacacacatgcccgtaacaggatttatcacaagacacgcctgcatgtagaccagacacagggcgtatggaaagcacgtcctcaagactgtagtattccagatgagctgcagatgcttacctaccacggccgtctccaccagaaaaccatcgccaactcctgcgatcagcttgtgacttacaaaccttgtttaaaagctgcttacatggacttctgtcctttaaaagcttccccttggctgtggccctctgtgtatgcctgggatccttccaagcactcatagcccagataggaatcctctgctcctcccaaataaattcatctgttctggagagcctatatttctga

SEQ ID NO: 29353 - DNA, 2513 bp, Homo sapiens
  misc_feature (26)..(26): n is a, c, g, or t
  misc_feature (29)..(29): n is a, c, g, or t
gggtgaacacagagtggttatgcttnccnttccaccataactgatggaccccttcgaggacacgctgcggcggctgcgtgaggccttcaactgagggcgcacgcggccggccgagttccgggctgcgcagctccagggcctgggccacttccttcaagaaaacaagcagcttctgcgcgacgtgctggcccaggacctgcataagccagctttcgaggcagacatatctgagctcatcctttgccagaacgaggttgactacgctctcaagaacctgcaggcctggatgaaggatgaaccacggtccacgaacctgttcatgaagctggactcggtcttcatctggaaggaaccctttggcctggtcctcatcatcgcaccctggaactacccactgaacctgaccctggtgctcctggtgggcgccctcgccgcagggagttgcgtggtgctgaagccgtcagaaatcagccagggcacagagaaggtcctggctgaggtgctgccccagtacctggaccagagctgctttgccgtggtgctgggcggaccccaggagacagggcagctgctagagcacaagttggactacatcttcttcacagggagccctcgtgtgggcaagattgtcatgactgctgccaccaagcacctgacgcctgtcaccctggagctggggggcaagaacccctgctacgtggacgacaactgcgacccccagaccgtggccaaccgcgtggcctggttctgctacttcaatgccggccagacctgcgtggcccctgactacgtcctgtgcagccccgagatgcaggagaggctgctgcccgccctgcagagcaccatcacccgtttctatggcgacgacccccagagctccccaaacctgggccgcatcatcaaccagaaacagttccagcggctgcgggcattgctgggctgcggccgcgtggccattgggggccagagcaacgagagcgatcgctacatcgcccccacggtgctggtggacgtgcaggagacggagcctgtgatgcaggaggagatcttcgggcccatcctgcccatcgtgaacgtgcagagcgtggacgaggccatcaagttcatcaaccggcaggagaagcccctggccctgtacgccttctccaacagcagccaggttgtgaaccagatgctggagcggaccagcagcggcagctttggaggcaatgagggcttcacctacatatctctgctgtccgtgccattcgggggagtcggccacagtgggatgggccggtaccacggcaagttcaccttcgacaccttctcccaccaccgcacctgcctgctcgccccctccggcctggagaaattaaaggagatccgctacccaccctataccgactggaaccagcagctgttacgctggggcatgggctcccagagctgcaccctcctgtgagcgtcccacccgcctccaacgggtcacacagagaaacctgagtctagccatgaggggcttatgctcccaactcacattgttcctccagaccgcaggctcccccagcctcaggttgctggagctgtcacatgactgcatcctgcctgccagggctgcaaagcaaggtcttgcttctatctgggggacgctgctcgagagaggccgagaggccgcagaacatgccaggtgtcctcactcaccccaccctccccaattccagccctttgccctctcggtcagggttggccaggcccagtcacaggggcagtgtcaccctggaaaatacagtgccctgccttcttaggggcatcagccctgaacggttgagagcgtggagccctccaggcctttgctctcccctctaggcacacgcgcacttccacctctgccccatcccaactgcaccagcactgcctcccccagggatcctctcacatcccacactggtctctgcaccacccctctggttcacaccgcaccctgcactcacccacagcagctccatccactgggaaaactggggtttgcatcactccactgcacagtgttagtgggacctgggggcaagtcccttgacttctctgagcctcagtttccttatgtgaaagttgctggaaccaaaatggagtcacttatgccaaactctaataaaatggagtcggggggccacatagaagccctcacacacacatgcccgtaacaggatttatcacaagacacgcctgcatgtagaccagacacagggcgtatggaaagcacgtcctcaagactgtagtattccagatgagctgcagatgcttacctaccacggccgtctccaccagaaaaccatcgccaactcctgcgatcagcttgtgacttacaaaccttgtttaaaagctgcttacatggacttctgtcctttaaaagcttccccttggctgtggccctctgtgtatgcctgggatccttccaagcactcatagcccagataggaatcctctgctcctcccaaataaattcatctgttctggagagcctatatttctga

SEQ ID NO: 29354 - DNA, 2767 bp, Homo sapiens
  misc_feature (31)..(31): n is a, c, g, or t
ggggatgtcgttgctgttacttccaccatanctgcagatgctgctggctccgtgattatttcaccgagcaccagatgtgcacatgtgaggacaggcgacgactgcccagaaagggcaggggttcctctgccccacctgcctcacctgggaaagctgtgaccacgctgaggccaggttcctgggatgaacatcaggacacctgtgtgccatagctcatcccagactcctccaatccgggtcttgattcaggccggaggcggtcatccctccaaaggcaccagggagccatggaagaggatggaccccttcgaggacacgctgcggcggctgcgtgaggccttcaactgagggcgcacgcggccggccgagttccgggctgcgcagctccagggcctgggccacttccttcaagaaaacaagcagcttctgcgcgacgtgctggcccaggacctgcataagccagctttcgaggcagacatatctgagctcatcctttgccagaacgaggttgactacgctctcaagaacctgcaggcctggatgaaggatgaaccacggtccacgaacctgttcatgaagctggactcggtcttcatctggaaggaaccctttggcctggtcctcatcatcgcaccctggaactacccactgaacctgaccctggtgctcctggtgggcgccctcgccgcagggagttgcgtggtgctgaagccgtcagaaatcagccagggcacagagaaggtcctggctgaggtgctgccccagtacctggaccagagctgctttgccgtggtgctgggcggaccccaggagacagggcagctgctagagcacaagttggactacatcttcttcacagggagccctcgtgtgggcaagattgtcatgactgctgccaccaagcacctgacgcctgtcaccctggagctggggggcaagaacccctgctacgtggacgacaactgcgacccccagaccgtggccaaccgcgtggcctggttctgctacttcaatgccggccagacctgcgtggcccctgactacgtcctgtgcagccccgagatgcaggagaggctgctgcccgccctgcagagcaccatcacccgtttctatggcgacgacccccagagctccccaaacctgggccgcatcatcaaccagaaacagttccagcggctgcgggcattgctgggctgcggccgcgtggccattgggggccagagcaacgagagcgatcgctacatcgcccccacggtgctggtggacgtgcaggagacggagcctgtgatgcaggaggagatcttcgggcccatcctgcccatcgtgaacgtgcagagcgtggacgaggccatcaagttcatcaaccggcaggagaagcccctggccctgtacgccttctccaacagcagccaggttgtgaaccagatgctggagcggaccagcagcggcagctttggaggcaatgagggcttcacctacatatctctgctgtccgtgccattcgggggagtcggccacagtgggatgggccggtaccacggcaagttcaccttcgacaccttctcccaccaccgcacctgcctgctcgccccctccggcctggagaaattaaaggagatccgctacccaccctataccgactggaaccagcagctgttacgctggggcatgggctcccagagctgcaccctcctgtgagcgtcccacccgcctccaacgggtcacacagagaaacctgagtctagccatgaggggcttatgctcccaactcacattgttcctccagaccgcaggctcccccagcctcaggttgctggagctgtcacatgactgcatcctgcctgccagggctgcaaagcaaggtcttgcttctatctgggggacgctgctcgagagaggccgagaggccgcagaacatgccaggtgtcctcactcaccccaccctccccaattccagccctttgccctctcggtcagggttggccaggcccagtcacaggggcagtgtcaccctggaaaatacagtgccctgccttcttaggggcatcagccctgaacggttgagagcgtggagccctccaggcctttgctctcccctctaggcacacgcgcacttccacctctgccccatcccaactgcaccagcactgcctcccccagggatcctctcacatcccacactggtctctgcaccacccctctggttcacaccgcaccctgcactcacccacagcagctccatccactgggaaaactggggtttgcatcactccactgcacagtgttagtgggacctgggggcaagtcccttgacttctctgagcctcagtttccttatgtgaaagttgctggaaccaaaatggagtcacttatgccaaactctaataaaatggagtcggggggccacatagaagccctcacacacacatgcccgtaacaggatttatcacaagacacgcctgcatgtagaccagacacagggcgtatggaaagcacgtcctcaagactgtagtattccagatgagctgcagatgcttacctaccacggccgtctccaccagaaaaccatcgccaactcctgcgatcagcttgtgacttacaaaccttgtttaaaagctgcttacatggacttctgtcctttaaaagcttccccttggctgtggccctctgtgtatgcctgggatccttccaagcactcatagcccagataggaatcctctgctcctcccaaataaattcatctgttctggagagcctatatttctga

SEQ ID NO: 29355 - DNA, 2518 bp, Homo sapiens
tggggcatggatggtattgtacttggcctgttcgcggcatgtacattgatggaccccttcgaggacacgctgcggcggctgcgtgaggccttcaactgagggcgcacgcggccggccgagttccgggctgcgcagctccagggcctgggccacttccttcaagaaaacaagcagcttctgcgcgacgtgctggcccaggacctgcataagccagctttcgaggcagacatatctgagctcatcctttgccagaacgaggttgactacgctctcaagaacctgcaggcctggatgaaggatgaaccacggtccacgaacctgttcatgaagctggactcggtcttcatctggaaggaaccctttggcctggtcctcatcatcgcaccctggaactacccactgaacctgaccctggtgctcctggtgggcgccctcgccgcagggagttgcgtggtgctgaagccgtcagaaatcagccagggcacagagaaggtcctggctgaggtgctgccccagtacctggaccagagctgctttgccgtggtgctgggcggaccccaggagacagggcagctgctagagcacaagttggactacatcttcttcacagggagccctcgtgtgggcaagattgtcatgactgctgccaccaagcacctgacgcctgtcaccctggagctggggggcaagaacccctgctacgtggacgacaactgcgacccccagaccgtggccaaccgcgtggcctggttctgctacttcaatgccggccagacctgcgtggcccctgactacgtcctgtgcagccccgagatgcaggagaggctgctgcccgccctgcagagcaccatcacccgtttctatggcgacgacccccagagctccccaaacctgggccgcatcatcaaccagaaacagttccagcggctgcgggcattgctgggctgcggccgcgtggccattgggggccagagcaacgagagcgatcgctacatcgcccccacggtgctggtggacgtgcaggagacggagcctgtgatgcaggaggagatcttcgggcccatcctgcccatcgtgaacgtgcagagcgtggacgaggccatcaagttcatcaaccggcaggagaagcccctggccctgtacgccttctccaacagcagccaggttgtgaaccagatgctggagcggaccagcagcggcagctttggaggcaatgagggcttcacctacatatctctgctgtccgtgccattcgggggagtcggccacagtgggatgggccggtaccacggcaagttcaccttcgacaccttctcccaccaccgcacctgcctgctcgccccctccggcctggagaaattaaaggagatccgctacccaccctataccgactggaaccagcagctgttacgctggggcatgggctcccagagctgcaccctcctgtgagcgtcccacccgcctccaacgggtcacacagagaaacctgagtctagccatgaggggcttatgctcccaactcacattgttcctccagaccgcaggctcccccagcctcaggttgctggagctgtcacatgactgcatcctgcctgccagggctgcaaagcaaggtcttgcttctatctgggggacgctgctcgagagaggccgagaggccgcagaacatgccaggtgtcctcactcaccccaccctccccaattccagccctttgccctctcggtcagggttggccaggcccagtcacaggggcagtgtcaccctggaaaatacagtgccctgccttcttaggggcatcagccctgaacggttgagagcgtggagccctccaggcctttgctctcccctctaggcacacgcgcacttccacctctgccccatcccaactgcaccagcactgcctcccccagggatcctctcacatcccacactggtctctgcaccacccctctggttcacaccgcaccctgcactcacccacagcagctccatccactgggaaaactggggtttgcatcactccactgcacagtgttagtgggacctgggggcaagtcccttgacttctctgagcctcagtttccttatgtgaaagttgctggaaccaaaatggagtcacttatgccaaactctaataaaatggagtcggggggccacatagaagccctcacacacacatgcccgtaacaggatttatcacaagacacgcctgcatgtagaccagacacagggcgtatggaaagcacgtcctcaagactgtagtattccagatgagctgcagatgcttacctaccacggccgtctccaccagaaaaccatcgccaactcctgcgatcagcttgtgacttacaaaccttgtttaaaagctgcttacatggacttctgtcctttaaaagcttccccttggctgtggccctctgtgtatgcctgggatccttccaagcactcatagcccagataggaatcctctgctcctcccaaataaattcatctgttctggagagcctatatttctga

SEQ ID NO: 29356 - DNA, 1992 bp, Homo sapiens
  misc_feature (2)..(2): n is a, c, g, or t
  misc_feature (6)..(6): n is a, c, g, or t
  misc_feature (8)..(8): n is a, c, g, or t
gncacnanggtgaagaaggatgtggttgcttccccttccaccataactgatggaccccttcgaggacacgctgcggcggctgcgtgaggccttcaactgagggcgcacgcggccggccgagttccgggctgcgcagctccagggcctgggccacttccttcaagaaaacaagcagcttctgcgcgacgtgctggcccaggacctgcataagccagctttcgaggcagacatatctgagctcatcctttgccagaacgaggttgactacgctctcaagaacctgcaggcctggatgaaggatgaaccacggtccacgaacctgttcatgaagctggactcggtcttcatctggaaggaaccctttggcctggtcctcatcatcgcaccctggaactacccactgaacctgaccctggtgctcctggtgggcgccctcgccgcagggagttgcgtggtgctgaagccgtcagaaatcagccagggcacagagaaggtcctggctgaggtgctgccccagtacctggaccagagctgctttgccgtggtgctgggcggaccccaggagacagggcagctgctagagcacaagttggactacatcttcttcacagggagccctcgtgtgggcaagattgtcatgactgctgccaccaagcacctgacgcctgtcaccctggagctggggggcaagaacccctgctacgtggacgacaactgcgacccccagaccgtggccaaccgcgtggcctggttctgctacttcaatgccggccagacctgcgtggcccctgactacgtcctgtgcagccccgagatgcaggagaggctgctgcccgccctgcagagcaccatcaccctataccgactggaaccagcagctgttacgctggggcatgggctcccagagctgcaccctcctgtgagcgtcccacccgcctccaacgggtcacacagagaaacctgagtctagccatgaggggcttatgctcccaactcacattgttcctccagaccgcaggctcccccagcctcaggttgctggagctgtcacatgactgcatcctgcctgccagggctgcaaagcaaggtcttgcttctatctgggggacgctgctcgagagaggccgagaggccgcagaacatgccaggtgtcctcactcaccccaccctccccaattccagccctttgccctctcggtcagggttggccaggcccagtcacaggggcagtgtcaccctggaaaatacagtgccctgccttcttaggggcatcagccctgaacggttgagagcgtggagccctccaggcctttgctctcccctctaggcacacgcgcacttccacctctgccccatcccaactgcaccagcactgcctcccccagggatcctctcacatcccacactggtctctgcaccacccctctggttcacaccgcaccctgcactcacccacagcagctccatccactgggaaaactggggtttgcatcactccactgcacagtgttagtgggacctgggggcaagtcccttgacttctctgagcctcagtttccttatgtgaaagttgctggaaccaaaatggagtcacttatgccaaactctaataaaatggagtcggggggccacatagaagccctcacacacacatgcccgtaacaggatttatcacaagacacgcctgcatgtagaccagacacagggcgtatggaaagcacgtcctcaagactgtagtattccagatgagctgcagatgcttacctaccacggccgtctccaccagaaaaccatcgccaactcctgcgatcagcttgtgacttacaaaccttgtttaaaagctgcttacatggacttctgtcctttaaaagcttccccttggctgtggccctctgtgtatgcctgggatccttccaagcactcatagcccagataggaatcctctgctcctcccaaataaattcatctgttctggagagcctatatttctga

SEQ ID NO: 29357 - DNA, 1648 bp, Homo sapiens
gcccgcataccacactgcagcatcctaacctcaccgtcgcgactcaaggctgccggctccccatgatcctgcagggcttcctggtctttgcgccatggtggtaatcacccccatggcaccccgaccgtcactgagagggtgctgtccccagaagatgcttagagcggagattattgcccgttagagggtggaggggcaggtgaggatgaggctcacctccgctgtggaatgtgcggggctcaagccctcttctcatgactagagcccaacacccaccttctcactccctggcaggttgtgaaccagatgctggagcggaccagcagcggcagctttggaggcaatgagggcttcacctacatatctctgctgtccgtgccattcgggggagtcggccacagtgggatgggccggtaccacggcaagttcaccttcgacaccttctcccaccaccgcacctgcctgctcgccccctccggcctggagaaattaaaggagatccgctacccaccctataccgactggaaccagcagctgttacgctggggcatgggctcccagagctgcaccctcctgtgagcgtcccacccgcctccaacgggtcacacagagaaacctgagtctagccatgaggggcttatgctcccaactcacattgttcctccagaccgcaggctcccccagcctcaggttgctggagctgtcacatgactgcatcctgcctgccagggctgcaaagcaaggtcttgcttctatctgggggacgctgctcgagagaggccgagaggccgcagaacatgccaggtgtcctcactcaccccaccctccccaattccagccctttgccctctcggtcagggttggccaggcccagtcacaggggcagtgtcaccctggaaaatacagtgccctgccttcttaggggcatcagccctgaacggttgagagcgtggagccctccaggcctttgctctcccctctaggcacacgcgcacttccacctctgccccatcccaactgcaccagcactgcctcccccagggatcctctcacatcccacactggtctctgcaccacccctctggttcacaccgcaccctgcactcacccacagcagctccatccactgggaaaactggggtttgcatcactccactgcacagtgttagtgggacctgggggcaagtcccttgacttctctgagcctcagtttccttatgtgaaagttgctggaaccaaaatggagtcacttatgccaaactctaataaaatggagtcggggggccacatagaagccctcacacacacatgcccgtaacaggatttatcacaagacacgcctgcatgtagaccagacacagggcgtatggaaagcacgtcctcaagactgtagtattccagatgagctgcagatgcttacctaccacggccgtctccaccagaaaaccatcgccaactcctgcgatcagcttgtgacttacaaaccttgtttaaaagctgcttacatggacttctgtcctttaaaagcttccccttggctgtggccctctgtgtatgcctgggatccttccaagcactcatagcccagataggaatcctctgctcctcccaaataaattcatctgttctggagagcctatatttctga

SEQ ID NO: 29358 - DNA, 2370 bp, Homo sapiens
  misc_feature (2)..(2): n is a, c, g, or t
  misc_feature (6)..(6): n is a, c, g, or t
  misc_feature (8)..(8): n is a, c, g, or t
gncacnanggtgaagaaggatgtggttgcttccccttccaccataactgatggaccccttcgaggacacgctgcggcggctgcgtgaggccttcaactgagggcgcacgcggccggccgagttccgggctgcgcagctccagggcctgggccacttccttcaagaaaacaagcagcttctgcgcgacgtgctggcccaggacctgcataagccagctttcgaggcagacatatctgagctcatcctttgccagaacgaggttgactacgctctcaagaacctgcaggcctggatgaaggatgaaccacggtccacgaacctgttcatgaagctggactcggtcttcatctggaaggaaccctttggcctggtcctcatcatcgcaccctggaactacccactgaacctgaccctggtgctcctggtgggcgccctcgccgcagggagttgcgtggtgctgaagccgtcagaaatcagccagggcacagagaaggtcctggctgaggtgctgccccagtacctggaccagagctgctttgccgtggtgctgggcggaccccaggagacagggcagctgctagagcacaagttggactacatcttcttcacagggagccctcgtgtgggcaagattgtcatgactgctgccaccaagcacctgacgcctgtcaccctggagctggggggcaagaacccctgctacgtggacgacaactgcgacccccagaccgtggccaaccgcgtggcctggttctgctacttcaatgccggccagacctgcgtggcccctgactacgtcctgtgcagccccgagatgcaggagaggctgctgcccgccctgcagagcaccatcacccgtttctatggcgacgacccccagagctccccaaacctgggccgcatcatcaaccagaaacagttccagcggctgcgggcattgctgggctgcggccgcgtggccattgggggccagagcaacgagagcgatcgctacatcgcccccacggtgctggtggacgtgcaggagacggagcctgtgatgcaggaggagatcttcgggcccatcctgcccatcgtgaacgtgcagagcgtggacgaggccatcaagttcatcaaccggcaggagaagcccctggccctgtacgccttctccaacagcagccaggttgtgaaccagatgctggagcggaccagcagcggcagctttggaggcaatgagggcttcacctacatatctctgctgtccgtgccattcgggggagtcggccacagtgggatgggccggtaccacggcaagttcaccttcgacaccttctcccaccaccgcacctgcctgctcgccccctccggcctggagaaattaaaggagatccgctacccaccctataccgactggaaccagcagctgttacgctggggcatgggctcccagagctgcaccctcctgtgagcgtcccacccgcctccaacgggtcacacagagaaacctgagtctagccatgaggggcttatgctcccaactcacattgttcctccagaccgcaggctcccccagcctcaggttgctggagctgtcacatgactgcatcctgcctgccagggctgcaaagcaaggtcttgcttctatctgggggacgctgctcgagagaggccgagaggccgcagaacatgccaggtgtcctcactcaccccaccctccccaattccagccctttgccctctcggtcagggttggccaggcccagtcacaggggcagtgtcaccctggaaaatacagtgccctgccttcttaggggcatcagccctgaacggttgagagcgtggagccctccaggcctttgctctcccctctaggcacacgcgcacttccacctctgccccatcccaactgcaccagcactgcctcccccagggatcctctcacatcccacactggtctctgcaccacccctctggttcacaccgcaccctgcactcacccacagcagctccatccactgggaaaactggggtttgcatcactccactgcacagtgttagtgggacctgggggcaagtcccttgacttctctgagcctcagtttccttatgtgaaagttgctggaaccaaaatggagtcacttatgccaaactctaataaaatggagtcggggggccacatagaagccctcacacacacatgcccgtaacaggatttatcacaagacacgcctgcatgtagaccagacacagggcgtatggaaagcacgtcctcaagactgtagtattccagatgagctgcagatgcttacctaccacggccgtctccaccagaaaaccatcgccaactcctgcgatcagtccgttcgcatgttgggtatcctctagagt

SEQ ID NO: 29359 - DNA, 1097 bp, Homo sapiens
  misc_feature (2)..(2): n is a, c, g, or t
  misc_feature (6)..(6): n is a, c, g, or t
  misc_feature (8)..(8): n is a, c, g, or t
gncacnanggtgaagaaggatgtggttgcttccccttccaccataactgatggaccccttcgaggacacgctgcggcggctgcgtgaggccttcaactgagggcgcacgcggccggccgagttccgggctgcgcagctccagggcctgggccacttccttcaagaaaacaagcagcttctgcgcgacgtgctggcccaggacctgcataagccagctttcgaggcagacatatctgagctcatcctttgccagaacgaggttgactacgctctcaagaacctgcaggcctggatgaaggatgaaccacggtccacgaacctgttcatgaagctggactcggtcttcatctggaaggaaccctttggcctggtcctcatcatcgcaccctggaactacccactgaacctgaccctggtgctcctggtgggcgccctcgccgcagggagttgcgtggtgctgaagccgtcagaaatcagccagggcacagagaaggtcctggctgaggtgctgccccagtacctggaccagagctgctttgccgtggtgctgggcggaccccaggagacagggcagctgctagagcacaagttggactacatcttcttcacagggagccctcgtgtgggcaagattgtcatgactgctgccaccaagcacctgacgcctgtcaccctggagctggggggcaagaacccctgctacgtggacgacaactgcgacccccagaccgtggccaaccgcgtggcctggttctgctacttcaatgccggccagacctgcgtggcccctgactacgtcctgtgcagccccgagatgcaggagaggctgctgcccgccctgcagagcaccatcacccgtttctatggcgacgacccccagagctccccaaacctgggccgcatcatcaaccagaaacagttccaagtcaagcctgtctgaaaagggtcgacaggtagatgctgaggaatacttaggcttcattctagatggacttcatgaggaaatgttgaccctaaagaagcttctctcaccaagtaatgaaagacttacgatttccaacaggcccaaaaaccactcggtcaatgaagaagagcag

SEQ ID NO: 29360 - DNA, 1114 bp, Homo sapiens
  misc_feature (1052)..(1052): n is a, c, g, or t
  misc_feature (1055)..(1055): n is a, c, g, or t
  misc_feature (1110)..(1110): n is a, c, g, or t
tggcgatgctactgtttaattgcaggaggtgggggtgtgtgtaccatgtaccagggctattagaagcaagaaggaaggagggagggcagagcgccctgctgagcaacaaaggactcctgcagccttctctgtctgtctcttggcacaggcacatggggaggcctcccgcaggtggggggccaccagtccaggggtgggagcactacagggcacgagttggtttgggagctgccagtctcctgggaggatcgcagtcagcagagcagggctgaggcctgggggtaggagcagagcctgcgcatctggaggcagcatgtccaagaaagggagtggaggtgcagcgaaggacccaggggcagagcccacgctggggagccctcgtgtgggcaagattgtcatgactgctgccaccaagcacctgacgcctgtcaccctggagctggggggcaagaacccctgctacgtggacgacaactgcgacccccagaccgtggccaaccgcgtggcctggttctgctacttcaatgccggccagacctgcgtggcccctgactacgtcctgtgcagccccgagatgcaggagaggctgctgcccgccctgcagagcaccatcacccgtttctatggcgacgacccccagagctccccaaacctgggccgcatcatcaaccagaaacagttccagcggctgcgggcattgctgggctgcggccgcgtggccattgggggccagagcaacgagagcgatcgctacatcgcccccacggtgctggtggacgtgcaggagacggagcctgtgatgcaggaggagatcttcgggcccatcctgcccatcgtgaacgtgcagagcgtggacgaggccatcaagttcatcaaccggcaggagaagcccctggccctgtacgccttctccaacagcagccaggttgtgaaccagatgctggagcggaccagcagcggcagctttggaggcaatgagggcttcacctacatatctctgctgtccgtgccattcgggggagtcgaatcggcaagtggatggccgtacacgnaantcactcacactctccacacgactgctgtcgcctcggctgagaataaggaatcgtncact

SEQ ID NO: 29361 - DNA, 842 bp, Homo sapiens
tggcgatgctactgtttaattgcaggaggtgggggtgtgtgtaccatgtaccagggctattagaagcaagaaggaaggagggagggcagagcgccctgctgagcaacaaaggactcctgcagccttctctgtctgtctcttggcacaggcacatggggaggcctcccgcaggtggggggccaccagtccaggggtgggagcactacagggcacgagttggtttgggagctgccagtctcctgggaggatcgcagtcagcagagcagggctgaggcctgggggtaggagcagagcctgcgcatctggaggcagcatgtccaagaaagggagtggaggtgcagcgaaggacccaggggcagagcccacgctgggcagatgctgctggctccgtgattatttcaccgagcaccagatgtgcacatgtgaggacaggcgacgactgcccagaaagggcaggggttcctctgccccacctgcctcacctgggaaagctgtgaccacgctgaggccaggttcctgggatgaacatcaggacacctgtgtgccatagctcatcccagactcctccaatccgggtcttgattcaggccggaggcggtcatccctccaaaggcaccagggagccatggaagaggttagagctgagctgatgtggccaggagctgcttgagcgccgggtggaggctgctgacgctcgcatgccaggcaaagctttgggtcagggccctggaacctgggacctggaagcgctccaggccaataccgcccgctaccagagaagggcccaggccccacccaggttctagcccaagggcttgagcaaagacagtagatgaatattt

SEQ ID NO: 29362 - DNA, 252 bp, Homo sapiens
ttctcactccctggcaggttgtgaaccagatgctggagcggaccagcagcggcagctttggaggcaatgagggcttcacctacatatctctgctgtccgtgccattcgggggagtcgcggtgggtccctgcccatttccacccctagggaagcttggctttggtaccccagacccaggaagtcccttcactcactgttcaaccttgatccacaccctgggcctctcaaggcctcagtttccctatctgtaaa

SEQ ID NO: 29363 - DNA, 394 bp, Homo sapiens
cagcttgaattttccttttagcttactgattttgggggtccaagatattttcctttcacaccagtcagccctgccccagcaagcgcccggacccctgccctgcagcaggtgggcgagacaagaaagcaccttgcatgagaggcagggcttgggtccagctccagcccccatctgtttcctcatccgtcaggcagatgctgctggctccgtgattatttcaccgagcaccagatgtgcacatgtgaggacaggcgacgactgcccagaaagggcaggggttcctctgccccacctgcctcacctgggaaagctgtgaccacgctgaggccaggttcctgggatgaacatcaggacacctgtgtgccatagctcatcccagactcctccaatccgg

SEQ ID NO: 29364 - DNA, 2040 bp, Homo sapiens
tctgtaattcatggctaatccgaagagtttgattgagttgatggcggcagggaccagatagacaccttggtgattgtctttggccataagaatagaccaaggataggttttccagagacaccttcatactgtaaacatggtttagacacggtcatagggaaggctgctggtccatcatttgttctgaacaaatggcatttcctgctcctgaccctggcagttggccccagattccttgtcgatgacttggaaacgtccattctgggtaaggtcagcactccctgagagatgttaacaaagtttacctatgagtcttactgtgtagacaatctgaagtcaattttagttacacaatcagcattcccatgtgtcctcagtgtcttatcaatgaactatgtgtatcaagccatactaaactggagtttagcaggacaaaggcaaactaaatgtagaacataacatatcagctgaatatgtctatccaggactgtttttctagaacataaatcatggagctccttgacagtgtatccactgtttttggggtttaataaaaccaactagaatttagacttaaaaagaaattattattccttttggttgtccacataaagtagtccagggctatcatatggctaaaatcaagttatttggttcatctctggtatgtatttataaagtcaacttatcagccattaagatggagatttgctttaaatttttgcagtgtgtgtggcagtcagaaaaacccatatctagttttcaacttcacctctggtgtttttatggcttaaccttatatcattgatccaacatctagcctgatgctggagctcttatttctagcctgatgctggagctcttatatctagcctgatgctggagctcttgaagctgactcttggaagtttggagggtgtagagtttcccatctagtatttaatttgtccctgtgccattagtcccagcttgaagtcatttgccagtgtcgatgttgacaggattgtgacaatattgcctttcataaaaccgagaaccaaagaattccattattctaacaaagcctgagtttcatagattgtgggcacatctagacagatatgtgcatgcttgatggtgcagagaaactgctgacttccaccaacctcatgctccccctggctggccatacagagggattcgttgtcatattgaaaaggctctgaaagatgagtttctaattgaagctcactatctcaggttggtgtttctactgtgtagtcccaagcctgtatccatatcataaaagtggaggcctggtactcctccaggttatctggccagtgtagactcctccatctgaatatgaacctccagggtaagaatttttcagacatgtctatactgaacagtaggatcctgcactttccaaatgtctgcctccttttgttcttcattgacccattctaattcctgttaggtgtgagaagaattgtcttcagttctctctccattctcattcatgatggaatcattgatccattgaccagttgagaaatgattgatgctgaagaagtggtattctattggtaaggcttattaccaaacttccgataatgaagcaggctaccaaaaacttatccagcccaccctaggagtgtttggatttgatcatggatgtagcatacaccaaaatccaccgagacctttgcaaaattaggctacttgttttattttgccagattatcatgggagagtctttaactagttctgaatatttgtaagtctgagtacttcatagaattataaagaaggtacagctgaccccttctcaccatgttgtaaatatttactgagactgggtgcagtactgagggataataatcttctgatttatcaaatcctgactgtctagagcaaattgtacactctctttgtgaatggtcctgtaacgtgtatgaacacatttctgggtgccttagaagttgtatttttcatgtgtgctaatatgcagtatttatacattgtgagaagctgctttgaataaaaaggttgaaactt

SEQ ID NO: 29365 - DNA, 2412 bp, Homo sapiens
  misc_feature (2186)..(2186): n is a, c, g, or t
tctgtaattcatggctaatccgaagagtttgattgagttgatggcggcagggaccagatagacaccttggtgattgtctttggccataagaatagaccaaggataggttttccagagacaccttcatactgtaaacatggtttagacacggtcatagggaaggctgctggtccatcatttgttctgaacaaatggcatttcctgctcctgaccctggcagttggccccagattccttgtcgatgacttggaaacgtccattctgggtaaggtcagcactccctgagagatgttaacaaagtttacctatgagtcttactgtgtagacaatctgaagtcaattttagttacacaatcagcattcccatgtgtcctcagtgtcttatcaatgaactatgtgtatcaagccatactaaactggagtttagcaggacaaaggcaaactaaatgtagaacataacatatcagctgaatatgtctatccaggactgtttttctagaacataaatcatggagctccttgacagtgtatccactgtttttggggtttaataaaaccaactagaatttagacttaaaaagaaattattattccttttggttgtccacataaagtagtccagggctatcatatggctaaaatcaagttatttggttcatctctggtatgtatttataaagtcaacttatcagccattaagatggagatttgctttaaatttttgcagtgtgtgtggcagtcagaaaaacccatatctagttttcaacttcacctctggtgtttttatggcttaaccttatatcattgatccaacatctagcctgatgctggagctcttatttctagcctgatgctggagctcttatatctagcctgatgctggagctcttgaagctgactcttggaagtttggagggtgtagagtttcccatctagtatttaatttgtccctgtgccattagtcccagcttgaagtcatttgccagtgtcgatgttgacaggattgtgacaatattgcctttcataaaaccgagaaccaaagaattccattattctaacaaagcctgagtttcatagattgtgggcacatctagacagatatgtgcatgcttgatggtgcagagaaactgctgacttccaccaacctcatgctccccctggctggccatacagagggattcgttgtcatattgaaaaggctctgaaagatgagtttctaattgaagctcactatctcaggttggtgtttctactgtgtagtcccaagcctgtatccatatcataaaagtggaggcctggtactcctccaggttatctggccagtgtagactcctccatctgaatatgaacctccagggtaagaatttttcagacatgtctatactgaacagtaggatcctgcactttccaaatgtctgcctccttttgttcttcattgacccattctaattcctgttaggtgtgagaagaattgtcttcagttctctctccattctcattcatgatggaatcattgatccattgaccagttgagaaatgattgatgctgaagaagtggtattctattggtaaggcttattaccaaacttccgataatgaagcaggctaccaaaaacttatccagcccaccctaggagtgtttggatttgatcatggatgtagcatacaccaaaatccaccgagacctttgcaaaattaggctacttgttttattttgccagattatcatgggagagtctttaactagttctgaatatttgtaagtctgagtacttcatagaattataaagaaggtacagctgaccccttctcaccatgttgtaaatatttactgagactgggtgcagtactgagggataataatcttctgatttatcaaatcctgactgtctagagcaaattgtacactctctttgtgaatggtcctgtaacgtgtatgaacacatttctgggtgccttagaagttgtatttttcatgtgtgctaatatgcagtatttatacattgtgagaagctgctttgaataaaaaggttgaaacttaaaaaaaaaaaaaaaacaaaaaaaaaaaaacctgtgttgtgcgcgcgcgcgcccgtgggccctggaagaaggttttctaaaacccttcgcgttggggcgcgcgcgggggccccctgaggttaagagtgcaccaggggtcatacgcnggtgtcccctccaaggaagaaacgcgggtcctgtgacatcagagggtgtggtgatttttccccccattataaaaagaaggccgcgggggggagacaccgaagtcgtcttcctgaaacaatattacccagaaggagatctccggaagggaccaatcacacggggctctcttattccacaagggaggttcccaaagggggaaaccatcataattcaaatattagccga

SEQ ID NO: 29366 - DNA, 426 bp, Homo sapiens
gattttaaaagaattttggagccaccacacccagcctatgatttcatcctttttaagactgaaactattattttgtataatatatttgtatatctatatatctctatctgtctagctcatactttgtcctttcatgtgtcagtagacacttgggttgcttccaccttccacctttttggctaatatctctttgagatcctgctttcaattcttttggatatgtacccagaagtgggattgctggattgtatcgtaattccatttttaactttttgtaaaattttcttttgcatttaggctatttcattttttctcaggttaaactttggacatcgtaaccagtctcacaaagagatgaaatatgaaccacaataagcttgcttcagttttacctcttccgtgatttagtttgctgctgtttgtaag

SEQ ID NO: 29367 - DNA, 451 bp, Homo sapiens
aatttctattctgccatcttagaagttatttagttaaaaacagttcaatacattcaaatctacagtaaatgtctgacaatctcttttaagatgaattataggggacaattggtttgccaggagcatgctaaggtcaagaccctaaacataacatagtacaatgaacataattccaattgcttttttctgtttaatattaaaaagaaaagatttttttgtctacgtgcttttttcagattttcttcaagtgttgacatgtaataaacttaagtagaagcatcagaaatagcataatgatttgctgctaccaagacaggattgatctgaatttgatttagccatagaaatacctcctgtgagaggaaggccaggtgtagtttagaggaggcagatttgggcattgccactccctggttttcttatctcaggtaagttacttagtgatatggtt

SEQ ID NO: 29368 - DNA, 465 bp, Homo sapiens
tgtctaattttctttcctagcacctctgccatttataaattatatttcgcttggactggtgcaatagcaaactggtcttttagctctctcctttttgattcattgttcacatcaatgccaagtaaatcttcccacaacccagctcagacccactcttctcaccagagacttttcccccatggacaatggatttagaacaaactccttggcctgctatttgaggctaccagcagactggtcaaagtcacccttttcaactttatttcctggcattctggagattcgcccgctcacgactgtcggtgcacaggtatttgcaagcttttccatcagcctgcctttgtgcatgccctttgctccttggcatgctttcctctccctctctttagcatacatcacaacctgccttacatgtttctctctgtatctgtcccatgccgtccctcccctcccccctcccccgga

SEQ ID NO: 29369 - DNA, 566 bp, Homo sapiens
cttaagggtgaagtgatgaagggagcgggaggggagtcctaaacatcctctaccaccttgatgaaaagacaagccggttttcaatacttatagaggcttgggaacactgcaaaccccttgcatcaaatgagacccttcaagaagccctgtcagaggtgttgaacagcattaattcagctcaggtttacttcaaagcaggacttgatgtgttcaagagtgtcttggatgggaagaattgagaaaactctgagcatttttaaaagtttgtttacaattccacaagcaaaagctctaatttaaccagattttctgacattgaaggcttattttccccaatggctttttgacaagtataaagctattattacattgtattttttaaatgtaaatatagaaagaacattttgcacatttaatatttttcttatatctacatttctgaatatgtaaagcaagttattgaaataggacttaagaattacctattaaaaagaaatctgatatataaaaatatgtactattttaaggaaaaaaaaaacaaaattgggcctcgttgggcctcagcg

SEQ ID NO: 29370 - DNA, 2488 bp, Homo sapiens
aggagaagtgattttgcaaattgccaacgaacctgttctgccctttaatgcacttgatatagctttagaagttcaaaacaaccttaaaggtgatcaacccaacactcatcaactgttagccatggcgtcacgcctgcgggagagtgctgaactttttcagtctgatgagatgcgacctgctaatgatcccaaggagagagcacccatccgcatccggatgctgaatgacattctccaagacatggagaaaagctttctggtaaagcaggcaccaccaggtttttatagaaacatcctctaccaccttgatgaaaagacaagccggttttcaatacttatagaggcttgggaacactgcaaaccccttgcatcaaatgagacccttcaagaagccctgtcagaggtgttgaacagcattaattcagctcaggtttacttcaaagcaggacttgatgtgttcaagagtgtcttggatgggaagaattgagaaaactctgagcatttttaaaagtttgtttacaattccacaagcaaaagctctaatttaaccagattttctgacattgaaggcttattttccccaatggctttttgacaagtataaagctattattacattgtattttttaaatgtaaatatagaaagaacattttgcacatttaatatttttcttatatctacatttctgaatatgtaaagcaagttattgaaataggacttaagaattacctattaaaaagaaatctgatatataaaaatatgtactattttaaggaaaaatttccaagaagttctggactatctttgttcctatggggagggcatataggaacacagtttattctctctgatagagctattaatgacttagtttctgtaaaagaaatggagagttgatatggttcagattaacttcactattaagtgttcaatatgaagaattcaagtattctgactgagtgattggttgacctaaaccactttgaatgtttctattttatgaaatgaagtttctcttcttaacacaactagatgtagtaatacactggttatgaaattgtatttttttaagtattaatgaaaaaaaccataagcattccaggagaaaatctaaggggcaagggagctacatagagcaatttaaatgcaaatttttttcctaacaacttacaaggtgactagctttgaaacccctaatttgcctcagttgattttctaagaatttcaggagtgatgtatgtcttaagagggagaaaaaaatatttcttattactttttctcttgtttctgttggaaacactgaagcagggactctaaaatgaaagcatctcacattggttttctttcttgtatcttttctgaaactccttgctgtaaggcagctttctcagagtactatatattttcaacagtaaagtagcagagtttctctttgaaacccaaaatgtcttctaaagaatcaaatttctatttctgcctctgacaaaaagaacttactatgaaagaaatagttgttttatcaataaaagccccttaatattatgaagaaacttttcatattttttcttctttatccttaattgtgactaagatggaaatctagaaaatattcatgcttctaagtttctgcaggttactgtaagagagtgtctcgtctacacttcagttcttctctcatgtggaaaactaagctttttatattgacattgccattgaatagctctagcaactattattattcccccaaaccctaaaattctacctattaggtgtcaggttaaagttctaatttatctttagaaatttatgtgaaaaatggttttcctatactggataaagcaattccccttaggaaacatagcctcagagtatttcatataaattttctctatctaattcaaacatatctccccatgatacaccgccagagtgacattgcagacagtctgtgtatgtttaaattttcactttttatggatgagcataaacctagtcttagtttaaaggcaaactaaagttgaggggaaataattaatcaatactgattaattgatttataaggttcaacactgtctaccctaaataatttttatatgctcaaggcaaagcagggaatagaggcaattagctagataattcaagcagaaatccattttcatcgaaattgcctgtgtgcacatatttttagatgaaaaatgaaactaccttacaatattatttttttaaccaatgtatttgtttgcaaacatttgccatgttgaagagtgtgtataggaaaggtctagaaataacataggcttgtgcatacctaggcattcatgctctttcttcctcttcagagatcatcagaaaagaggtgggaatacacaagcaggtgcatgtaagcccaaaagctagaaagccttatatttaaccaaaggttgatgtgttcattccagttattcacttacagatgaaactaaaacaaataaaggcaagctattatca

SEQ ID NO: 29371 - DNA, 2253 bp, Homo sapiens
acaatccaaacaatactgaatatacacataaacccaccacaaacacacaacctaaacatcctctaccaccttgatgaaaagacaagccggttttcaatacttatagaggcttgggaacactgcaaaccccttgcatcaaatgagacccttcaagaagccctgtcagaggtgttgaacagcattaattcagctcaggtttacttcaaagcaggacttgatgtgttcaagagtgtcttggatgggaagaattgagaaaactctgagcatttttaaaagtttgtttacaattccacaagcaaaagctctaatttaaccagattttctgacattgaaggcttattttccccaatggctttttgacaagtataaagctattattacattgtattttttaaatgtaaatatagaaagaacattttgcacatttaatatttttcttatatctacatttctgaatatgtaaagcaagttattgaaataggacttaagaattacctattaaaaagaaatctgatatataaaaatatgtactattttaaggaaaaatttccaagaagttctggactatctttgttcctatggggagggcatataggaacacagtttattctctctgatagagctattaatgacttagtttctgtaaaagaaatggagagttgatatggttcagattaacttcactattaagtgttcaatatgaagaattcaagtattctgactgagtgattggttgacctaaaccactttgaatgtttctattttatgaaatgaagtttctcttcttaacacaactagatgtagtaatacactggttatgaaattgtatttttttaagtattaatgaaaaaaaccataagcattccaggagaaaatctaaggggcaagggagctacatagagcaatttaaatgcaaatttttttcctaacaacttacaaggtgactagctttgaaacccctaatttgcctcagttgattttctaagaatttcaggagtgatgtatgtcttaagagggagaaaaaaatatttcttattactttttctcttgtttctgttggaaacactgaagcagggactctaaaatgaaagcatctcacattggttttctttcttgtatcttttctgaaactccttgctgtaaggcagctttctcagagtactatatattttcaacagtaaagtagcagagtttctctttgaaacccaaaatgtcttctaaagaatcaaatttctatttctgcctctgacaaaaagaacttactatgaaagaaatagttgttttatcaataaaagccccttaatattatgaagaaacttttcatattttttcttctttatccttaattgtgactaagatggaaatctagaaaatattcatgcttctaagtttctgcaggttactgtaagagagtgtctcgtctacacttcagttcttctctcatgtggaaaactaagctttttatattgacattgccattgaatagctctagcaactattattattcccccaaaccctaaaattctacctattaggtgtcaggttaaagttctaatttatctttagaaatttatgtgaaaaatggttttcctatactggataaagcaattccccttaggaaacatagcctcagagtatttcatataaattttctctatctaattcaaacatatctccccatgatacaccgccagagtgacattgcagacagtctgtgtatgtttaaattttcactttttatggatgagcataaacctagtcttagtttaaaggcaaactaaagttgaggggaaataattaatcaatactgattaattgatttataaggttcaacactgtctaccctaaataatttttatatgctcaaggcaaagcagggaatagaggcaattagctagataattcaagcagaaatccattttcatcgaaattgcctgtgtgcacatatttttagatgaaaaatgaaactaccttacaatattatttttttaaccaatgtatttgtttgcaaacatttgccatgttgaagagtgtgtataggaaaggtctagaaataacataggcttgtgcatacctaggcattcatgctctttcttcctcttcagagatcatcagaaaagaggtgggaatacacaagcaggtgcatgtaagcccaaaagctagaaagccttatatttaaccaaaggttgatgtgttcattccagttattcacttacagatgaaactaaaacaaataaaggcaagctattatca

SEQ ID NO: 29372 - DNA, 754 bp, Homo sapiens
aggagaagtgattttgcaaattgccaacgaacctgttctgccctttaatgcacttgatatagctttagaagttcaaaacaaccttaaaggtgatcaacccaacactcatcaactgttagccatggcgtcacgcctgcgggagagtgctgaactttttcagtctgatgagatgcgacctgctaatgatcccaaggagagagcacccatccgcatccggatgctgaatgacattctccaagacatggagaaaagctttctggtaaagcaggcaccaccaggtttttatagaaacatcctctaccaccttgatgaaaagacaagccggttttcaatacttatagaggcttgggaacactgcaaaccccttgcatcaaatgagacccttcaagaagccctgtcagaggtgttgaacagcattaattcagctcaggtttacttcaaagcaggacttgatgtgttcaagagtgtcttggatgggaagaattgagaaaactctgagcatttttaaaagtttgtttacaattccacaagcaaaagctctaatttaaccagattttctgacattgaaggcttattttccccaatggctttttgacaagtataaagctattattacattgtattttttaaatgtaaatatagaaagaacattttgcacatttaatatttttcttatatctacatttctgaatatgtaaagcaagttattgaaataggacttaagaattacctattaaaaagaaatctgatatat

SEQ ID NO: 29373 - DNA, 824 bp, Homo sapiens
aacgacgtatgcttcctgtagttcagtagtttgctctcatcgataacgtgcattgggaagtttccagactgcaaaaactaggagctcgcattcatttcccaagtgtgacccttagatgcttagttgactcgctgcatatttgctcttgtcttcagaaaagaaaggaagaagtatcgttccaacgaaatgtttccagaaaagtgtactataaactttcattccaaaaatggtgtcataagcaaacaactcacttgtcaaatttcaaatggtattgaacaaaaaaagaaagctgttgtgtttttgttttgttttgttttcatgaaactgtgattttcaacttatgaatgctataatgtcccagcgcgggaagctcacgctgtgtgaacatgaagttgtataaaacaaaccaaccaacctacacacaaatgttttcataggcactgtataaagaaaaatgtatgtttattaactcaaatcagtttttcagagaggaaacgtcactgagatgaagaggcgggtaaattggtttgttattttttaaaaaaaacttgcatgtttaaaaaaaagttgattgcttcaaatttctgctactaacttcaagctatgggagtttggcagtagtcacttgaggattttttttccaattcttttctttttgttgttaaagctgtacttcagtgaacagaaaaattgccaagcaaactaatggctataaaagcgtaatttgcatgtgtgggcataaactacagagcctcattgccatgaggtattgtacaaagttttaatacattttgtaaataaaattgtaaagaaagaaaaaaatt

SEQ ID NO: 29374 - DNA, 507 bp, Homo sapiens
gccgcacacacagaggtcaagcgctctctcacagtacaaaataatcctgggtatctcaaaagccaaagagatctggtaactcaatgcagaagacagcagccctttagacctgagggtcttgggagctcatgactcttggggctccacaaggaaaacagaaaaccccaaataggggatgtgcaaggcacctttttctatgttcttcaaggggtctcagggctgctagaagtctcccctaggtttcttcatgtggtatcaaagatggcaaaaggaaggagtcttagaagagcaaatttggggaaattttaagttttctaaaaggtaaatgaaattctgcatttttctcagcaaaaatcatgtcaacatgtggtggctcaagcctgtaatcccacctttggcttattaataatgaggacttgcttatttgtaagtcagtttggtaccaagtagacagtataccaacagacatgtatacacatgtattaatacaaatacaaacaaacataa

SEQ ID NO: 29375 - DNA, 711 bp, Homo sapiens
atgacgggttatgaagcccggctcattacttttgggacatggatgtactccgttaacaaagagcagcttgcaagagctggattttatgctataggtcaagaggataaagtacagtgctttcactgtggaggagggctagccaactggaagcccaaggaagatccttgggaacagcatgctaaatggtatccaggttgcaaatatctgctagaagagaagggacatgaatatataaacaacattcatttaacccgttcacttgagggagctctggtacaaactaccaagaaaacaccatcactaactaaaagaatcagtgataccatcttccctaatcctatgctacaagaagctatacgaatgggatttgatttcaaggacgttaagaaaataatggaggaaagaattcaaacatctgggagcaactataaaacgcttgaggttcttgttgcagatctagtgagcgctcagaaagacactacagaaaatgaattgaatcagacttcattgcagagagaaatcagccctgaagagccgctaaggcgtctgcaagaggagaagctttgtaaaatctgcatggacagacatatcgctgttgtttttattccttgtggacatctggtcacttgtaaacaatgtgctgaagcagttgacagatgtcccatgtgcagcgcggttattgatttcaagcaaagagtttttatgtcttaa

SEQ ID NO: 29376 - DNA, 1906 bp, Homo sapiens
gtctcttccgggtgcagatagctggaagggaaagaaaatccctaaaattacccacaagccaagaatgaagtgtctccctttgagccacagtggcagttttgtttttaatcatagaagtgtattttgagccgggtgtgctggctcacgcctgtaatccccgcactttgggaggccgaggtggggggcggagggggtggggatcgcctgaggtcaggagttcgagaccagcctgaccaacatggagaaaccccgtctctactaaaaatacaaaattagccggcgtggtggtgcatgcctgtaatcccagctactcatgaggctgagtcaggagaatctcttgaacccaggaggtggaggttgcggtgagctgagatcatgccattgcactccagcctgggaacaagaaaaaaaaaaaagaagaagaagaagtgtattcatttcagttacttttaaaaaagtgaacagactttatattttagagcggttttaggtttacagaaaatgaaacagacagggcagcgagctccttgtactcctccccagcacacagttgccctgttatgaacatcccacatcagtgctgtgcgttcattaacaccgatgaacctgatgcatacattatgatgaactgaagtcctggacttcaccctttctcttgtacagttctgtgggatttgacaaatgcataatgctgtacagccacaatgatagtatcgtccagagtagttctcctgccttaaaacctcttttgctgcacctgtttctctctccccactcaccccagctatctgatcttcttagtgcctccgaagttttggtcttttcaggatgttgtagcgttggaatcatggagtatgtagccttcaccacatacaccttccttcactttgttggcttcctttacttagtaatatgcattcaagtttcctccatgccttttcatggcttgatagctcatttctttttagcaccaaataatattccgttgtccagatgtagcacaatgtttaaccattcatgtaacctgtgaccgactcacagataggatgtggaatcactcaccacagaggcattagacaataatcagacccaagtcatttcatgggggaacaagcccacaggtaccagactgtccagtgagtcagggccactcgtaggaagtaagaagagaggctagagcatagccaggtcctcactttatactttaagcccatgtgtatttctcccaaaccacacagcattgtttccatgctttcagctttgcatgaataacgtgatacttgaacgcatcatttatcacttgctctctttcccacagcgctgttttcaagcttcttcctgttcatgatgctctgcttaacccttaagctgcatgggattctgttctgtgaatacgcccaccccatgtattatcctgcccagcaaaaagtccccaaaactctggatggtggttacctctagggagggagagaagagattgggaatagggagcgacttcaacggtgtttgtaatgttttgtttctttaaataaaagagctgagatcatttcagcagaatgttgatttagagtctcctggacaatttgttgctcaaagtgctctcttaaagagcactttaaaaaaaaaaaccttttatcttattatttatttatttatttattgagacggagttttgctctgtcacccaggctggagtggagtggtgtgatctcagctcactgcaacctttacctcctgggttcaagcaattcccctgcctcagcctcccaagtaggtgggattacagatgcgtgccaccacacttggctaatttttgcattttagtagagatcggtttctccatgttggccaggctgatctcaaacgcctgacctcaggtgatctgcccgccttggcctcccaaagt

SEQ ID NO: 29377 - DNA, 463 bp, Homo sapiens
atttatttatttatttatttatttatttatttgagagagagagagagagagtctcactgttgcccaggggtgtgtggcgcaatcacagttcagtgtaacctcaaactcctaggctcaagcgatcctcctgccttggcctcccaaagtgctgggattatagacatgagccactgtgcctggccaatgatgttggtaacattttttgagccctgtctagaacttgccatggtcatggggtcttatcacacatggtatttaatacttaaagatgtaaaataaaatagacttgaattaaagcaaaggaaaagaaactaaagcaagatagaaatgctgacttcattgcaagagagattagcgctatcttttagaaactaaatttatgacaagatgataaataataaatactaagagattagaataatttcttataaactatgagtttgtgagactctctcctttgaaa

SEQ ID NO: 29378 - DNA, 496 bp, Homo sapiens
gtttatcattcaaagtaacctctattctctatttcattagatcgcccatttttaacatgtgtaatttaatttaaaaatcacacaatactagcccagtccattcaaaaggctttttgaaaacctctgtttcctttgaaaatggattgttatctatggccataccaccctgaacaaacccgacctcatgtgaaaatggattgtagtttaggttcctccatttcaaagtggaattgcaagacctccctaacgtgtttacaacattcctgtgctgagtgttatcccttctcccaggagccagattgacagtctctagcgcagccctctctttggctgacagctgtcattcataatggcaagggggcagtcctatccccatctaaaataggcaacagaatgtagccagatcgcctactgtcatacctatactaaaacacacacaaacacacacacacacacacacacacacacacaaagatattcacggtagtgttttttt

SEQ ID NO: 29379 - DNA, 274 bp, Homo sapiens
ccccacctgtccttggctgcccatcccaaggaaagcaggtggcatgtgctggaatttctgctgttgctttcctcagaagcattgcaaaatatcatcagcttatactaactaccgactagtgattgagtgtgcagacccaaaatcaagccacctgagttttggacctgtttccatcacttgctagcagttttattacggttaagttatttaacttctctgcaactcagtttctcatctgaaaaattaagtaaataaatagcatctccttgctgga

SEQ ID NO: 29380 - DNA, 3178 bp, Homo sapiens
agtcacacagcagccttgtaggtgactggaggtgttcgctgatgtggccccaaccctacctccctccccaccccatgatgttagaagaatctcgacagaataaattggcagcagccaagaaaaagctaaaagaatatcagcaaaggaagagccctggtattccagcaggagcaaagacaaaaaagaaaaaaactgacagtagccctgagacaaccacttccggtggttgccactcacctggggatagccagtaccaagaactagcagtagccctggagtcaagctcagtgacaatcaatcagctcaatgaaaacatagaatcattgaaacagcagaagaaacaagtggaacatcagctggaagaagcaaagaaaacaaacaatgaaatacacaaagcacaaatggagcagttagagacaatcaacatcctcacattggaaaaggcagacttgaagaccaccctttaccatactaaacgtgctgcccgacacttcgaagaagagtccaaggatctggctggccgcctgcaatactccttacagcgtattcaagaattggagcgggctctctgtgctgtgtctacacagcagcaggaagaggacaggtcctcgagctgcagagaagcggtcctccagcggcggttacagcagaccataaaggagcgggcgctgctgaacgcacacgtgacacaggtgacagagtcactaaaacaagtccagctagagcgagacgaatatgctaaacacataaaaggagagagggcccggtggcaggagaggatgtggaaaatgtcggtggaggctcgaacattgaaggaagagaagaagcgtgacatacatcggatacaggagctggagaggagcttgtccgaactcaaaaaccagatggctgagcccccatccctggcacccccagcagtgacctctgtggtggaacagctacaagatgaggccaaacacctgaggcaggaggtggaaggtctggagggaaagctccagtcccaggtggaaaacaatcaggccttgagtctccttagcaaggaacaaaagcagagactccaggagcaggaggagatgctccgagagcaggaggcgcagagagtgcgggagcaggagagactgtgtgaacaaaacgagaggcttcgggagcagcagaagacgctacaggagcagggtgagaggctgcgaaagcaggagcagaggctacgcaaacaggaggagaggctgcgaaaggaggaggagaggctgcaaaagcaggaaaagaggctgtgggaccaggaggagaggctgtggaagaaggaggagaggctacaaaagcaggaggagaggctcgcgctctcccagaaccacaagctcgacaagcagctggccgagccacagtgcagcttcgaggatctgaacaacgagaaaaagagcgcactgcagttggagcagcaagtaaaggagctgcaggagaagctagacgaggagcacctagaagctgccagccaccagaaccaacagctagagacccagctaagcctcgtggctctccctggagaaggagatggaggacaacatctggacagtgaggaggaggaggcgcctcggcccacgccaaacatcccagaggacctggagagccgggaggccacgagcagctttatggacctcccgaaggagaaggcggacgggacggagcaggtggagagacgagagcttggattcgtccagccttctggagtgacagacggcatgagagagtccttcaccgtatatgaaagccagggggcagtgccaaacacgcggcaccaggagatggaggatgtcatcaggctggcccagaaggaggaggagatgaaggtgaagctgctggagctgcaagagttggtgttgccccttgtgggcaaccatgaggggcatggcaaattcctcatcgctgcccagaaccctgctgatgagcccactccaggggccccagccccccaggaacttggggctgccggtgagcaggatgttttttatgaagtgagcctggacaacaacgtggagcctgcaccaggagcggccagggagggttctccccatgacaaccccactgtacagcagatcgtgcagctgtctcctgtcatgcaggacacctaggagcacccaggcttgcccagcaaaccctgcgtgccattcttctaccaggcagccgagaacagggagataaacatcatcatcttctaagagctggtcaagaaatttaaaacaacaacaacaacaaaaagttacggggttcatctcctacacaattcatttactccatttgaatgctagagccactcacatttatttgtgtttctaatttaccgtttaaatttatttgtaaaaagttaagggagagttggtctttccctgatgttctttctggcatcctttagcatttttatttttaatttgataattgtaggtcattagtatgcatatcgagtttgcccttaggtggtgggaattcaaacacacaaagacccactaatttgcacaaaactattctggctggtttggaacaggctgccatgcttttttaatgttattgcagcatgtatattcattccagaattcagataaaatgtgcttatgttctgctattacgtttgatcgaatcctaaccacagtgagctcttcattagctcaatatgtggtttgccctcaattgagcactgtttattactttgtaatatgccactgtgagtactgacatttagagttgtttaaaggccaagaactggaaacagccttttccctattttctgtgtattggggatgggagtaataacattttggggagctttttaaatctcacagaagaggaaagtggcctgctctggcaggtgtgtgcaggatagagtgtgtttcatttgttctggtgccaagaatgagcgctgtactatggtagttcccttaggatttgtatgtgctctgggctcatgaagatattgcatcatgagctgcagcagttgtaccctttcttgatgacctaaaaagggattatttctgaggaatgaaaggctcccatcattgactgtggatgtggaaaaccttttctagcttagagcatttatatctacaatacattttaaagtcagagttcatgttacctgttttaatcacatgagtatatgtcccagtacacaaaagggcactggttggcattc

SEQ ID NO: 29381 - DNA, 460 bp, Homo sapiens
atttctatttattgactcatggatttccatagagttaagaagtaaatttttttaggaacttaaagaatgctgcattttgttttcactttgagttagatgtgaatttgctttagttattccatctgcaaagtatttgccatttcattgcaaagatttctgaattcattgtacaaacttgaaagtgtccatgttatttatacttctgctagagatctagcaattctgctagaatcaataggttttgaagggttttgtgatttatttcactctgctatcagccagctttttctatgaggcttaggtcacagaacctctttagaggtgaagtaagtaaacctctggttatcatccagtttgatctcaactctcaatgttcgaatgagtaaatgtatacagcttttattaaagtttttatatgtgtatgcactaaataaacagtgacaggaaaatttactctgag

SEQ ID NO: 29382 - DNA, 463 bp, Homo sapiens
aaaaatatcataagtccattttacaaacacaaaaatgtgataaagatgtgggacaatgccccttttttaaatattggacagttataaatagaaacgacatgcatatatgaatgtttacattttgttcataacaagaaatcaggaacagcttaatatgcaacagtagagaaatggctaaataaatcatgacatgttcatctgcaaaaaaaaaaaaatactatactgccagtattagggagttcttgcattgctatacagaaatatctgaggctgggtaatttataaagaaaagaggtttagttggctcaaggttctgcagacaggacaaaaagtgaggtgccaacatccgcttctggaaagggtcttaggaagctaacaatcacggcagaaggtgaagggaaagcaggcaccatgcatgatgagagtggaagcaaaagaacaagggggaggtgccacacacttt

SEQ ID NO: 29383 - DNA, 824 bp, Homo sapiens
aatcaggagtcaagtgaaacctttgcagatgaaagccatgagccccaaagatatggcatgctttatgtgaagaggatggtactagccagctgtcatgatggctgtgcaagcctccttatttgtttttttccttattgaggtcctttatctttaaacatctgtaggaagaagtatgattagctctctttgcctaattctgccagtagctactttgagaatttcaagcacaataacttcgcaaacttcaactcaacaaaaatttaccagcagcctttctgagaattattggggtttggacagtaattatgaatggacaaatcctacttttactcatgatgtccttttcccagtcctttccttttgctcacagtgtgtctgttctgtggggcatagactcagtaggaattgttccctttaagataccatttaccccaattatggtgcagtgatgatgatctgctttgcatatttcaggttctttttggctttttccattgaagccagtggtcctcccagcgttttatctttgatgtgacttttcattgataaagtaacactttaccttcctgggacaacagattccaacaccttaactaatctgaagttgttagcttccaccttccctcgtcacatgggacctttagggccaatttattttcctgcccacatgagaagtctccagtaaactagctgaaggtcctcagcatgtagcatgctttgtctctccagtgtttaaaagaaatcatcacattcacatgagcataccctctgcaccaccctccctttataactaccaccatatccacttcccttgctgcctctgc

SEQ ID NO: 29384 - DNA, 853 bp, Homo sapiens
caagaagtagcaattgggaattatgggctatacccagccttcaccctggtttttctagctcacgggcgcagctgttcccctacttatgaaaacaaaacttgcctgtaaacgtcttcatgtgcagtttcttaatgagccacaaggtgaggatgtggctccgtaagatctctgtctcagcaagatttgtcactcttctctttgtccctccaccagtcttctctctcttctgctttgtggcttaactgtttgatcacttattccccagttggctcataaacagcttgggctctggagttgggcagtcctggacttgtctcactcagaggcttcgtttccccatctgtgacgtgaggattaaagaccctggctcccgtgggaactggccctcacatgtgctggtggagtgtagagtgataccactcagcagagggccacttggcagtgtgtgcaaaagcacccttcgcctcagcagctctacttctgcaatttatgctgaggatgtgccagcacaaatgtgtgtgcatagtgactcatcatagcattgtttggactagcaaaaaagactagaaataacccaaatgtccactaataagggactggtgaaataaactagtgcgtccttacaccagaatacagtactggtcagtaatgaaaaagaggaagctgtctttgtacgttaagtcctcacttgatgtcgtcagtaagttcttggaaaccgtgactctgccacttgaaaggacatataacgaaaccaattttaccatagtctaattgatataaataagagttaagctcctatggcatatttctggtcatgaaagcatcaccaaacttctaagtaaagactaaaaca

SEQ ID NO: 29385 - DNA, 429 bp, Homo sapiens
tgaagaaatttcaggtcattagcggagttagcatattctatcttttaatttctacactacttcaaaggtcttctaactgttccattttctacaaagcatcccacacaatgtgctcatatcagtctttctaacacaaagagtgctcaaaagccaactgcctgctgttttttatttaatttttttcagtgacaggtcttgttctgtagcccatgctggagtgcccaggcaaaactcaatgcagcctcaaactcctgggcttaaacaatcctccagtttcagcttcctgagtagctgggactacaggtgtgtgccagcatgctcaactactttttaaattgtttgtagagatgggagtctcgttatgtttcccaggctggtcttgaactcctggcctcaagtaatccttctgtcacagcctcccaaagtgtt

SEQ ID NO: 29386 - DNA, 345 bp, Homo sapiens
gtttgtattttaatatagaatctgaaaatgacagttcttatatgaacttcagatgccataacaccaaagtgggaaatatattggtgagcagagggagtgtgctgccaagcaagtcacactgtaggggcagctgctgcccattttactcacacataaggccagtcttgccagaaatctgttaaatttaaaacacaggctgttgagatattctagtatatgtaatttaaagtcagacactttatttctgaaatgtcttcaataaccattattttcttatattgctcctttggagggtggaggacaactttgccagaaaggtacattatcaatgtttccagtgatttg

SEQ ID NO: 29387 - DNA, 548 bp, Homo sapiens
ttcttcatagccacctttggatttgtgagccctcacatcaggatctactaacagtttatgtccatgctgcagatataaaggatgaagttgtagggcaggaagtcttatgacacttggagcagctactcaatggaaatcacaaacagaatgagtttcatccacatgtcaagacactactaccaacagagctatttcaggacacctacctaaataactagctgtctcttccacttaaagcaaggagagtcttctcttatcttcaagaagaataaaaagtgaagctgacattacttggaaagagaataaacaaaatctgtcatgaggactgcagggatgaatgacacaaaccagccatttctttgagagtcaggaaatatctagtttatacaataagctgatctaccaataaaatacaattggtgttgaaatatatggctgaggaaagtcctcatgtttcaaggttcaaagttattccaaagaagtcctcgctctacaaatgtaacattgagatgacgtattatatgcttatcagaataaactaaaggaac

SEQ ID NO: 29388 - DNA, 386 bp, Homo sapiens
tagcagaaagaagagcaaggagaagttggtgaagctggggcaaagtgaggatatgtgtgcgtgcagtttatgtccatgctgcagatataaaggatgaagttgtagggcaggaagtcttatgacacttggagcagctactcaatggaaatcacaaacagaatgagtttcatccacatgtcaagacactactaccaacagagctatttcaggacacctacctaaataactagctgtctcttccacttaaagcaagagcgtataatggagttaggatgactggatacacatgtaagtcatcatctttacgtgcttattgtcacttggatctggcaggttgactattgaatagtacccgactggcactaataaaattgctaaactgctgt

SEQ ID NO: 29389 - DNA, 303 bp, Homo sapiens
ttcaattccattcgatgatgattccatttgattccattcgatgatgattccattcagttacattggatgatgaatccattcaattccattcgatgatcattccattctatttcattcgatgatgattccattcaatttcattcgatgattccattcgatcccattcgatgatgactccattctattccattggatgattccattctattccattcgatgatgatcccattcaattccattcaatgatgattccattcgattccatttgatgatgattccatacgatgatgattccatttgatt

SEQ ID NO: 29390 - DNA, 461 bp, Homo sapiens
gtaatcctaacactttgggagggcaaggcaggtggatcacttgaggtcaggagttcgagaccagccttgccacatggtgaaaccctgtctctatgaaaaatacaaaaaatagctgggcatcgtggcaggtgcctgtaatcccagctacgtgggagactgaggcaggagaatctcttgaacccaggaggtggaggttgcagtgtgttgagatcgcccctggactctagcagcaacagagacagactccatctcaaacaaaaaaaaaaggaggctcacccttagaaaggcttctacaaattaacaccacaaagtggacacaggcacacagatcttggtaaatgtgggctatcattacttaacgatgatttcaccagcctctttcagcctcaggatgagctccattcccgtttccaggtattagagtcaaacctacccccacctcccaccagagccccggctta

SEQ ID NO: 29391 - DNA, 632 bp, Homo sapiens
gcccgcgcgcaggggttgcgaacaggatgaaagtcagaggaaacagaagtgagctagcctagcccaagaggggccccaaacatgcatgcacctcacatcacgaaacgaatcatgagaagcacttcaagtgtgaatagggacaggctggaatcccagggaaaccgtgcatgacaggatctggcaaggtccctagtacccagcagtgcctccaaaactttcctttaaaaagaaacacctctagggaagcctgtttcaggttctaagaaagcagtgtttaggatttcatgggaggaccacaacatgccccgaaaaaaacaggctgttccgcagtcagtgaaacttactagggatcttacaaactgtctttcagtttgagctttaaattaatgagctctcaaatccccagtgggcatctggccccccgaccctcatactacttttgattcttatgtttcagaggcctttgcttgaatggaaaatcttttccccaaatttttgtactattaatatcaatacaattcaatcctgtgtacaacagaaaaaaagttgggggaggtcaagataaacaaatcctcattgcagccaaaaccttaaaaagttgtgtgatcttctgtgccttggtcaaatgtagg

SEQ ID NO: 29392 - DNA, 338 bp, Homo sapiens
gaagaataaaataataataactgaaggatgagataaaagccctacctaaaattattttggttgaacagtagcaaatgttagagtatgttccactggctacattattctctgaagtaagttgatattttgccttcttccaaggatatgtgtatagtagactctcctatgccactgaaattttcagtatttaccttaaaattttttgtaattttaagttaactatattatgaatttttgcttttccacttttcctaagacttcttagatactatacaattgcacatggtatatattgggcaaaactataaataaaaattaaatcctgtccttataacagc

SEQ ID NO: 29393 - DNA, 484 bp, Homo sapiens
taaatacttaacatcaacactgatctttaaatgctttagcacaatcaaatataaataacaaacacacacataaatgcaaaataaatgaattagggagatagatgaaataagattgtggaaatagtaatgtttgttaaagctggatggtgatccttgtactattcactctactctagtgtgtatttgaaaattaccattaggctggttatggtggctcatgcctgttaatcccggcattttggaaggctgaggcaggcggattacttgagctcaggagtttgagatctgcctgggcaacatggcaaaatcccatctctacaaaaaattagctggcatgatggcacactcctgtagtcccagctccttgaggggctgaggcagagaatggcttgaacctgagaggtcaaagctgcagtgagccaagatcatgccactgcactccagcctgggtgaccaagtgagaccctgtctcaaaaaaaaaaaa

SEQ ID NO: 29394 - DNA, 472 bp, Homo sapiens
atccatttggggagaccaggttttttgttttgttttcatatttgaatctttgctgacttgctcctttaatatcagacacttaaatcctcaagaattgggacctcatcattaatttttttttggagatggaatctcactatgttgctcaagcttggtctcaaactcctgggctcaagccatcctctcgtcttgtgggcctcacaaaatgcctgttaatcccggcattttggaaggctgaggcaggcggattacttgagctcaggagtttgagatctgcctgggcaacatggcaaaatcccatctctacaaaaaattagctggcatgatggcacactcctgtagtcccagctccttgaggggctgaggcagagaatggcttgaacctgagaggtcaaagctgcagtgagccaagatcatgccactgcactccagcctgggtgaccaagtgagaccctgtctcaaaaaaaaaaaa

SEQ ID NO: 29395 - DNA, 5907 bp, Homo sapiens
gcgggtagccagaggctggggcggctgtggagcctgtggtgggagcggcattgtggggcagggaaaaggtgagccgagccgacggaggggacgcgctgcggggcgcccccagtctatggagcggggtaagatggcggaggcggagagcctggagacagcggcagagcacgagcggatcctgcgagagatcgagagcactgacacggcctgcatcgggcccacgctcaggtctgtttatgatggtgaagaacatggacgtttcatggagaagcttgaaactcgtatccgtaatcacgaccgagaaattgagaaaatgtgcaactttcattaccagggctttgtggactctataactgaactgctgaaagtgagaggagaagcccagaaactcaaactggtaatagcaatggaagagctgaagcagtgtcgactacaacagagaaatatttctgccactgttgataaattaatgctgtgtcttccagtcctagagatgtacagcaaactgagggaccagatgaaaactaaaaggcattatcctgcactgaaaactctggaacatctagagcatacctacctgcctcaagtaagccactatcgattctgcaaggtgatggtggacaacatccccaagcttcgagaagaaataaaagatgtttctatgtccgatctcaaagactttctggagagcatccgcaaacattcagacaaaattggagagactgccatgaagcaagcccagcagcaaagaaacctggataacatcgtcttgcaacaacccagaataggtagcaagaggaaatctaagaaagatgcatatataatctttgatacagagatagaaagtactagtccgaagtctgaacaggattcaggaattctggatgttgaagacgaggaagatgatgaagaggtacctggggcccaagatttggtggatttctctccagtttatcgatgtctacatatatattctgtcctgggtgcccgggaaacatttgagaattactaccgaaaacagaggcgaaaacaggctcgtttggtacttcaacctccatctaacatgcatgaaactttagatggctacaggaagtattttaatcaaattgtaggcttttttgtggttgaagatcacattttacatacaacccagggcttagtaaatagagcctacattgatgaactgtgggaaatggcactttcaaaaaccatcgcagcactccgtacccactcgtcttactgttctgatccaaaccttgtgttagatttgaagaacctcattgtgctttttgctgacacacttcaggtgtatggtttccctgtaaatcagctttttgacatgctgttagaaatcagagaccaatatagtgaaactctgctaaagaagtgggcaggtattttcagaaacatacttgattctgacaactacagtcctataccagtaacaagtgaagagatgtacaaaaaggtggtaggacaattcccatttcaagatatagaactggaaaagcaaccatttccaaaaaagtttcctttctctgaatttgtgccaaaagtttacaaccaaattaaagaatttatctacgcttgtctgaagttttcagaagatcttcatctaagctcaactgaagttgatgacatgattcggaaatcaacaaacctgttgctaaccaggactctgagcaactctctgcagaatgtaattaaaaggaagaatattgggcttactgagcttgttcagattattatcaatacaacacatttggagaaatcctgtaagtacttggaagaatttatcaccaacatcactaatgtgcttccagagacagttcacactaccaagctctatggcaccacaacttttaaggatgctagacatgcagctgaagaagagatttataccaacttaaaccagaagattgaccagttcctacagctggcagactatgactggatgaccggagatttgggcaacaaagctagtgattacctggtagacctcattgcctttcttcgtagcacctttgctgtattcacacaccttcctggaaaggtggcccagacagcgtgtatgtcagcttgcaagcatttagccacatccttgatgcaacttttgttggaagctgaagtgcggcagctcaccttgggagcattacagcagttcaacttggacgtcagagaatgtgaacagtttgccagatccggcccggtgcctgggttccaggaggacacgctgcagttggccttcatcgacttgagacaacttttggatcttttcatccagtgggattggtcaacctaccttgctgactatggtcagcccaactgcaagtacctccgggtaaacccagtgactgctctgaccctgcttgagaagatgaaggatactagccgcaagaacaacatgtttgcacagtttcggaaaaatgagcgagacaagcagaaactcattgacaccgtggccaagcagctccgaggactcatcagcagccaccactcatgaagggtgaccccggacccacagaggcgacctgctgcagcctctgtgtcagtctggggtccagccccagctgaccctgcatttgtgcattcttcttcaaagagagcatatgtatttttttattaacccctgtgcagtattcacataacatttccctatagtaaaagaggcacaagaataagcaagtacatgagatgttgctaggctgggactcaggggaagttattactacactatctgtgttatcttagagatggtggtatcatcaattccacagtgatgaaccacctttcatccatggctctaaagcttaggtctggggcttaggaaccataaaaagtgggtatctggcgctgggaggtagagtgagtaagcaaaaggatactaaaatatgtcctgttcactcttggatgcccattcaccacatagatgaggctgattcttctcaatacaaggaaagggcatggcaaacattactatttagtacactaagggcagctctggagggtcatctcctcagtctgctgactttcactggcttgtgaacaagcatggcatatggcaagatgacagcttcattccaatcccccaagaatggcggtttctttagcctgatctaaccccaggcttttattgcaattttttctagggcaggatacagctaagtagacagcagtaataattggatcccatgtttaactgcatattgccccagctctaggagtgttgagtctcaactcgaagagtttttctggatcttgaaagccagttttcatggaatcagagacccaatcccttccctgttcatctcatttccttcacttacagtcagagcacttggttcaggacataaatcaacagttacttccataggccttcacagggcgtttcagacttagcctcctccagtaatgccattgaaatagttcagatttcggaagcctaaaaatggcctttaccttacccttaggtgtaacctgaggattagttgggattgttcctttatgttttaaaaccagctttttggttatcatctttaaggaaatgtcaccagctctgcactgtgggggcagccatgcctggactggatgcctctagggatggagacattgttaccataaagtcgacagagccaaccatggcttgtggcttgttgcctctggcccaactgtccttcactaaataatatcctagatattattttgttgctcaagcccaaggttcccaccctcttttgagatccccaaagccatctttggccttgtctaagaaagattgcctataatcctgtcctccaaactctaaagcctggagcagcttagcgtggaggctgcactcattgacccagatggactcctgagacttaacgcaagggctttgctatgaggtcagtcgggggaaactgtactttaagacacttcagaaagatgctactggctagtagcagaaagatggctagtggcaagagtataattgtgcatcaccaaacaatgacaaataagccacacaggcatttccagcttggattgatgggaggagagactcatcaaacagaattcttcactacctttgtcagctactgagttgcttctggggagggaagtacttccttgcccctccccaacccccctacctcaccatatcctatcatatcttgatagtcatggggaagaggatgtgcacacagacatacaaatttcctcaaagctggagagaccaggctacatgtgagctcatagatgctgctgaggctcatcctgagggctggatggttggccagggtttcagaatgagggtaagggatgagcactgccacccagaacttgataagccaagagaaggcaggagccaaaatggcatcgccaagctctcatctttgttgaaacaagtgagaaacgattatattaatctgaagttctattgcttgagaagagttcaaaacacttctctttgctagtacccagtttgcagcaagatctcttcagctttaagtgctgagagactttgaagtggaaatggagagatgtgtaagcatggcacagtgtttgtctttttagaggatcatcattgctggtctggtctcaaacctctgccttggaagaactgtgctatacaggaaaaagtgaacaaggtggaggaataggggttattctgcacagaagtcccatgaaaggaaaagcttattcaagctcaagacataaagatggaccctttgatatatcttctctccattcttagtctgccttcaccttatctaacaaaaaacaacatgcagctactgagttgtatgtagagacatactcttggtgggccagggaaggtaaaaacagggaccagcaatgtcaagtttttgaactagaaaagtgggatgtttttagttttgtctataacctgtagctgggccaacccttgagaggacttgtgcaaagcatgtgtgcccagacccatcagactcctcagatatggcctcaaatacctagagatgtagaagtaccgtggagggcctcaataagagggcaagcacacagatggctagaagcctgtatggcttctggtcaggatgaacccttggccaagttcttgaggaaaccaggtctatattcctgaagggacagttcagtttgggactctattaggtttcagtagtaatataggctgcttgcatcattttaacattcatagggaaaatctctttgagcaggctataaatgaagctgttgcaggtagggaagaacaggacctgaaaatgggaaccaggaagtgagatcctgttggcaaagggaatgtagagcttccagggtgcattgcccactgttctcattgcataccagtcctccaagtcagtctagccttactgtacacttgacaagtgcttactcagcaagtcccagacccacggccttttatctcccaagactggctttggccatgaccttcctcatcaggcctctgagcacactctctaggaactgctgcagaaattcccctaccttagcctcccttctcccaggactcctctcttgactgcaattgcctcttcttcttcttcttcttcttcctttttgttttttttttttttgcctgcattcacaattacttttcacaaaggtgttggaaatggcatttttattttacacagatagttgcacatatatagagaaaattaggaaagtccatttttaactctaaagggaacttttttctctaaaacttacttgtaaagctactgatacagatgggccgcatggttaggggaaagctcctctgtgaaaagagcatgtttattcctcttgtacattttcctcttttaactgctattaaacaagaaagcctacatacctgtttcaaaagccacggtgttgtctcatgggtattttgttcttccatcctttttgcacagtgcagct

SEQ ID NO: 29396 - DNA, 5779 bp, Homo sapiens
  misc_feature (31)..(31): n is a, c, g, or t
gcctcgcctctaccttgtctgccggcgacgnccgggtatgggcccacgctcagtctgtttatgatggtgaagaacatggacgtttcatggagaagcttgaaactcgtatccgtaatcacgaccgagaaattgagaaaatgtgcaactttcattaccagggctttgtggactctataactgaactgctgaaagtgagaggagaagcccagaaactcaaaaatcaagtgacggatactaatagaaaactacaacatgagggaaaggaactggtaatagcaatggaagagctgaagcagtgtcgactacaacagagaaatatttctgccactgttgataaattaatgctgtgtcttccagtcctagagatgtacagcaaactgagggaccagatgaaaactaaaaggcattatcctgcactgaaaactctggaacatctagagcatacctacctgcctcaagtaagccactatcgattctgcaaggtgatggtggacaacatccccaagcttcgagaagaaataaaagatgtttctatgtccgatctcaaagactttctggagagcatccgcaaacattcagacaaaattggagagactgccatgaagcaagcccagcagcaaagaaacctggataacatcgtcttgcaacaacccagaataggtagcaagaggaaatctaagaaagatgcatatataatctttgatacagagatagaaagtactagtccgaagtctgaacaggattcaggaattctggatgttgaagacgaggaagatgatgaagaggtacctggggcccaagatttggtggatttctctccagtttatcgatgtctacatatatattctgtcctgggtgcccgggaaacatttgagaattactaccgaaaacagaggcgaaaacaggctcgtttggtacttcaacctccatctaacatgcatgaaactttagatggctacaggaagtattttaatcaaattgtaggcttttttgtggttgaagatcacattttacatacaacccagggcttagtaaatagagcctacattgatgaactgtgggaaatggcactttcaaaaaccatcgcagcactccgtacccactcgtcttactgttctgatccaaaccttgtgttagatttgaagaacctcattgtgctttttgctgacacacttcaggtgtatggtttccctgtaaatcagctttttgacatgctgttagaaatcagagaccaatatagtgaaactctgctaaagaagtgggcaggtattttcagaaacatacttgattctgacaactacagtcctataccagtaacaagtgaagagatgtacaaaaaggtggtaggacaattcccatttcaagatatagaactggaaaagcaaccatttccaaaaaagtttcctttctctgaatttgtgccaaaagtttacaaccaaattaaagaatttatctacgcttgtctgaagttttcagaagatcttcatctaagctcaactgaagttgatgacatgattcggaaatcaacaaacctgttgctaaccaggactctgagcaactctctgcagaatgtaattaaaaggaagaatattgggcttactgagcttgttcagattattatcaatacaacacatttggagaaatcctgtaagtacttggaagaatttatcaccaacatcactaatgtgcttccagagacagttcacactaccaagctctatggcaccacaacttttaaggatgctagacatgcagctgaagaagagatttataccaacttaaaccagaagattgaccagttcctacagctggcagactatgactggatgaccggagatttgggcaacaaagctagtgattacctggtagacctcattgcctttcttcgtagcacctttgctgtattcacacaccttcctggaaaggtggcccagacagcgtgtatgtcagcttgcaagcatttagccacatccttgatgcaacttttgttggaagctgaagtgcggcagctcaccttgggagcattacagcagttcaacttggacgtcagagaatgtgaacagtttgccagatccggcccggtgcctgggttccaggaggacacgctgcagttggccttcatcgacttgagacaacttttggatcttttcatccagtgggattggtcaacctaccttgctgactatggtcagcccaactgcaagtacctccgggtaaacccagtgactgctctgaccctgcttgagaagatgaaggatactagccgcaagaacaacatgtttgcacagtttcggaaaaatgagcgagacaagcagaaactcattgacaccgtggccaagcagctccgaggactcatcagcagccaccactcatgaagggtgaccccggacccacagaggcgacctgctgcagcctctgtgtcagtctggggtccagccccagctgaccctgcatttgtgcattcttcttcaaagagagcatatgtatttttttattaacccctgtgcagtattcacataacatttccctatagtaaaagaggcacaagaataagcaagtacatgagatgttgctaggctgggactcaggggaagttattactacactatctgtgttatcttagagatggtggtatcatcaattccacagtgatgaaccacctttcatccatggctctaaagcttaggtctggggcttaggaaccataaaaagtgggtatctggcgctgggaggtagagtgagtaagcaaaaggatactaaaatatgtcctgttcactcttggatgcccattcaccacatagatgaggctgattcttctcaatacaaggaaagggcatggcaaacattactatttagtacactaagggcagctctggagggtcatctcctcagtctgctgactttcactggcttgtgaacaagcatggcatatggcaagatgacagcttcattccaatcccccaagaatggcggtttctttagcctgatctaaccccaggcttttattgcaattttttctagggcaggatacagctaagtagacagcagtaataattggatcccatgtttaactgcatattgccccagctctaggagtgttgagtctcaactcgaagagtttttctggatcttgaaagccagttttcatggaatcagagacccaatcccttccctgttcatctcatttccttcacttacagtcagagcacttggttcaggacataaatcaacagttacttccataggccttcacagggcgtttcagacttagcctcctccagtaatgccattgaaatagttcagatttcggaagcctaaaaatggcctttaccttacccttaggtgtaacctgaggattagttgggattgttcctttatgttttaaaaccagctttttggttatcatctttaaggaaatgtcaccagctctgcactgtgggggcagccatgcctggactggatgcctctagggatggagacattgttaccataaagtcgacagagccaaccatggcttgtggcttgttgcctctggcccaactgtccttcactaaataatatcctagatattattttgttgctcaagcccaaggttcccaccctcttttgagatccccaaagccatctttggccttgtctaagaaagattgcctataatcctgtcctccaaactctaaagcctggagcagcttagcgtggaggctgcactcattgacccagatggactcctgagacttaacgcaagggctttgctatgaggtcagtcgggggaaactgtactttaagacacttcagaaagatgctactggctagtagcagaaagatggctagtggcaagagtataattgtgcatcaccaaacaatgacaaataagccacacaggcatttccagcttggattgatgggaggagagactcatcaaacagaattcttcactacctttgtcagctactgagttgcttctggggagggaagtacttccttgcccctccccaacccccctacctcaccatatcctatcatatcttgatagtcatggggaagaggatgtgcacacagacatacaaatttcctcaaagctggagagaccaggctacatgtgagctcatagatgctgctgaggctcatcctgagggctggatggttggccagggtttcagaatgagggtaagggatgagcactgccacccagaacttgataagccaagagaaggcaggagccaaaatggcatcgccaagctctcatctttgttgaaacaagtgagaaacgattatattaatctgaagttctattgcttgagaagagttcaaaacacttctctttgctagtacccagtttgcagcaagatctcttcagctttaagtgctgagagactttgaagtggaaatggagagatgtgtaagcatggcacagtgtttgtctttttagaggatcatcattgctggtctggtctcaaacctctgccttggaagaactgtgctatacaggaaaaagtgaacaaggtggaggaataggggttattctgcacagaagtcccatgaaaggaaaagcttattcaagctcaagacataaagatggaccctttgatatatcttctctccattcttagtctgccttcaccttatctaacaaaaaacaacatgcagctactgagttgtatgtagagacatactcttggtgggccagggaaggtaaaaacagggaccagcaatgtcaagtttttgaactagaaaagtgggatgtttttagttttgtctataacctgtagctgggccaacccttgagaggacttgtgcaaagcatgtgtgcccagacccatcagactcctcagatatggcctcaaatacctagagatgtagaagtaccgtggagggcctcaataagagggcaagcacacagatggctagaagcctgtatggcttctggtcaggatgaacccttggccaagttcttgaggaaaccaggtctatattcctgaagggacagttcagtttgggactctattaggtttcagtagtaatataggctgcttgcatcattttaacattcatagggaaaatctctttgagcaggctataaatgaagctgttgcaggtagggaagaacaggacctgaaaatgggaaccaggaagtgagatcctgttggcaaagggaatgtagagcttccagggtgcattgcccactgttctcattgcataccagtcctccaagtcagtctagccttactgtacacttgacaagtgcttactcagcaagtcccagacccacggccttttatctcccaagactggctttggccatgaccttcctcatcaggcctctgagcacactctctaggaactgctgcagaaattcccctaccttagcctcccttctcccaggactcctctcttgactgcaattgcctcttcttcttcttcttcttcttcctttttgttttttttttttttgcctgcattcacaattacttttcacaaaggtgttggaaatggcatttttattttacacagatagttgcacatatatagagaaaattaggaaagtccatttttaactctaaagggaacttttttctctaaaacttacttgtaaagctactgatacagatgggccgcatggttaggggaaagctcctctgtgaaaagagcatgtttattcctcttgtacattttcctcttttaactgctattaaacaagaaagcctacatacctgtttcaaaagccacggtgttgtctcatgggtattttgttcttccatcctttttgcacagtgcagct

SEQ ID NO: 29397 - DNA, 5486 bp, Homo sapiens
gcgggtagccagaggctggggcggctgtggagcctgtggtgggagcggcattgtggggcagggaaaaggtgagccgagccgacggaggggacgcgctgcggggcgcccccagtctatggagcggggtaagatggcggaggcggagagcctggagacagcggcagagcacgagcggatcctgcgagagatcgagagcactgacacggcctgcatcgggcccacgctcaggtctgtttatgatggtgaagaacatggacgtttcatggagaagcttgaaactcgtatccgtaatcacgaccgagaaattgagaaaatgtgcaactttcattaccagggctttgtggactctataactgaactgctgaaagtgagaggagaagcccagaaactcaaactggtaatagcaatggaagagctgaagcagtgtcgactacaacagagaaatatttctgccactgttgataaattaatgctgtgtcttccagtcctagagatgtacagcaaactgagggaccagatgaaaactaaaaggcattatcctgcactgaaaactctggaacatctagagcatacctacctgcctcaagtaagccactatcgattctgcaaggtgatggtggacaacatccccaagcttcgagaagaaataaaagatgtttctatgtccgatctcaaagactttctggagagcatccgcaaacattcagacaaaattggagagactgccatgaagcaagcccagcagcaaagaaacctggataacatcgtcttgcaacaacccagaataggtagcaagaggaaatctaagaaagatgcatatataatctttgatacagagatagaaagtactagtccgaagtctgaacaggattcaggaattctggatgttgaagacgaggaagatgatgaagaggtacctggggcccaagatttggtggatttctctccagtttatcgatgtctacatatatattctgtcctgggtgcccgggaaacatttgagaattactaccgaaaacagaggcgaaaacaggctcgtttggtacttcaacctccatctaacatgcatgaaactttagatggctacaggaagtattttaatcaaattgtaggcttttttgtggttgaagatcacattttacatacaacccagggcttagtaaatagagcctacattgatgaactgtgggaaatggcactttcaaaaaccatcgcagcactccgtacccactcgtcttactgttctgatccaaaccttgtgttagatttgaagaacctcattgtgctttttgctgacacacttcaggtgtatggtttccctgtaaatcagctttttgacatgctgttagaaatcagagaccaatatagtgaaactctgctaaagaagtgggcaggtattttcagaaacatacttgattctgacaactacagtcctataccagtaacaagtgaagagatgtacaaaaaggtggtaggacaattcccatttcaagatatagaactggaaaagcaaccatttccaaaaaagtttcctttctctgaatttgtgccaaaagtttacaaccaaattaaagaatttatctacgcttgtctgaagttttcagaagatcttcatctaagctcaactgaagttgatgacatgattcggaaatcaacaaacctgttgctaaccaggactctgagcaactctctgcagaatgtaattaaaaggaagaatattgggcttactgagcttgttcagattattatcaatacaacacatttggagaaatcctgtaagtacttggaagaatttatcaccaacatcactaatgtgcttccagagacagttcacactaccaagctctatggcaccacaacttttaaggatgctagacatgcagctgaagaagagatttataccaacttaaaccagaagattgaccagttcctacagctggcagactatgactggatgaccggagatttgggcaacaaagctagtgattacctggtagacctcattgcctttcttcgtagcacctttgctgtattcacacaccttcctggaaaggtggcccagacagcgtgtatgtcagcttgcaagcatttagccacatccttgatgcaacttttgttggaagctgaagtgcggcagctcaccttgggagcattacagcagttcaacttggacgtcagagaatgtgaacagtttgccagatccggcccggtgcctgggttccaggaggacacgctgcagttggccttcatcgacttgagacaacttttggatcttttcatccagtgggattggtcaacctaccttgctgactatggtcagcccaactgcaagtacctccgggtaaacccagtgactgctctgaccctgcttgagaagatgaaggatactagccgcaagaacaacatgtttgcacagtttcggaaaaatgagcgagacaagcagaaactcattgacaccgtggccaagcagctccgaggactcatcagcagccaccactcatgaagggtgaccccggacccacagaggcgacctgctgcagcctctgtgtcagtctggggtccagccccagctgaccctgcatttgtgcattcttcttcaaagagagcatatgtatttttttattaacccctgtgcagtattcacataacatttccctatagtaaaagaggcacaagaataagcaagtacatgagatgttgctaggctgggactcaggggaagttattactacactatctgtgttatcttagagatggtggtatcatcaattccacagtgatgaaccacctttcatccatggctctaaagcttaggtctggggcttaggaaccataaaaagtgggtatctggcgctgggaggtagagtgagtaagcaaaaggatactaaaatatgtcctgttcactcttggatgcccattcaccacatagatgaggctgattcttctcaatacaaggaaagggcatggcaaacattactatttagtacactaagggcagctctggagggtcatctcctcagtctgctgactttcactggcttgtgaacaagcatggcatatggcaagatgacagcttcattccaatcccccaagaatggcggtttctttagcctgatctaaccccaggcttttattgcaattttttctagggcaggatacagctaagtagacagcagtaataattggatcccatgtttaactgcatattgccccagctctaggagtgttgagtctcaactcgaagagtttttctggatcttgaaagccagttttcatggaatcagagacccaatcccttccctgttcatctcatttccttcacttacagtcagagcacttggttcaggacataaatcaacagttacttccataggccttcacagggcgtttcagacttagcctcctccagtaatgccattgaaatagttcagatttcggaagcctaaaaatggcctttaccttacccttaggtgtaacctgaggattagttgggattgttcctttatgttttaaaaccagctttttggttatcatctttaaggaaatgtcaccagctctgcactgtgggggcagccatgcctggactggatgcctctagggatggagacattgttaccataaagtcgacagagccaaccatggcttgtggcttgttgcctctggcccaactgtccttcactaaataatatcctagatattattttgttgctcaagcccaaggttcccaccctcttttgagatccccaaagccatctttggccttgtctaagaaagattgcctataatcctgtcctccaaactctaaagcctggagcagcttagcgtggaggctgcactcattgacccagatggactcctgagacttaacgcaagggctttgctatgaggtcagtcgggggaaactgtactttaagacacttcagaaagatgctactggctagtagcagaaagatggctagtggcaagagtataattgtgcatcaccaaacaatgacaaataagccacacaggcatttccagcttggattgatgggaggagagactcatcaaacagaattcttcactacctttgtcagctactgagttgcttctggggagggaagtacttccttgcccctccccaacccccctacctcaccatatcctatcatatcttgatagtcatggggaagaggatgtgcacacagacatacaaatttcctcaaagctggagagaccaggctacatgtgagctcatagatgctgctgaggctcatcctgagggctggatggttggccagggtttcagaatgagggtaagggatgagcactgccacccagaacttgataagccaagagaaggcaggagccaaaatggcatcgccaagctctcatctttgttgaaacaagtgagaaacgattatattaatctgaagttctattgcttgagaagagttcaaaacacttctctttgctagtacccagtttgcagcaagatctcttcagctttaagtgctgagagactttgaagtggaaatggagagatgtgtaagcatggcacagtgtttgtctttttagaggatcatcattgctggtctggtctcaaacctctgccttggaagaactgtgctatacaggaaaaagtgaacaaggtggaggaataggggttattctgcacagaagtcccatgaaaggaaaagcttattcaagctcaagacataaagatggaccctttgatatatcttctctccattcttagtctgccttcaccttatctaacaaaaaacaacatgcagctactgagttgtatgtagagacatactcttggtgggccagggaaggtaaaaacagggaccagcaatgtcaagtttttgaactagaaaagtgggatgtttttagttttgtctataacctgtagctgggccaacccttgagaggacttgtgcaaagcatgtgtgcccagacccatcagactcctcagatatggcctcaaatacctagagatgtagaagtaccgtggagggcctcaataagagggcaagcacacagatggctagaagcctgtatggcttctggtcaggatgaacccttggccaagttcttgaggaaaccaggtctatattcctgaagggacagttcagtttgggactctattaggtttcagtagtaatataggctgcttgcatcattttaacattcatagggaaaatctctttgagcaggctataaatgaagctgttgcaggtagggaagaacaggacctgaaaatgggaaccaggaagtgagatcctgttggcaaagggaatgtagagcttccagggtgcattgcccactgttctcattgcataccagtcctccaagtcagtctagccttactgtacacttgacaagtgcttactcagcaagtcccagactgatactgtcccttcaggaataatagacctggtttctctcaagaacttgtccatagggtttatctcttaccagaagcctatacaggcttctga

SEQ ID NO: 29398 - DNA, 3310 bp, Homo sapiens
gcgggtagccagaggctggggcggctgtggagcctgtggtgggagcggcattgtggggcagggaaaaggtgagccgagccgacggaggggacgcgctgcggggcgcccccagtctatggagcggggtaagatggcggaggcggagagcctggagacagcggcagagcacgagcggatcctgcgagagatcgagagcactgacacggcctgcatcgggcccacgctcaggtctgtttatgatggtgaagaacatggacgtttcatggagaagcttgaaactcgtatccgtaatcacgaccgagaaattgagaaaatgtgcaactttcattaccagggctttgtggactctataactgaactgctgaaagtgagaggagaagcccagaaactcaaactggtaatagcaatggaagagctgaagcagtgtcgactacaacagagaaatatttctgccactgttgataaattaatgctgtgtcttccagtcctagagatgtacagcaaactgagggaccagatgaaaactaaaaggcattatcctgcactgaaaactctggaacatctagagcatacctacctgcctcaagtaagccactatcgattctgcaaggtgatggtggacaacatccccaagcttcgagaagaaataaaagatgtttctatgtccgatctcaaagactttctggagagcatccgcaaacattcagacaaaattggagagactgccatgaagcaagcccagcagcaaagaaacctggataacatcgtcttgcaacaacccagaataggtagcaagaggaaatctaagaaagatgcatatataatctttgatacagagatagaaagtactagtccgaagtctgaacaggattcaggaattctggatgttgaagacgaggaagatgatgaagaggtacctggggcccaagatttggtggatttctctccagtttatcgatgtctacatatatattctgtcctgggtgcccgggaaacatttgagaattactaccgaaaacagaggcgaaaacaggctcgtttggtacttcaacctccatctaacatgcatgaaactttagatggctacaggaagtattttaatcaaattgtaggcttttttgtggttgaagatcacattttacatacaacccagggcttagtaaatagagcctacattgatgaactgtgggaaatggcactttcaaaaaccatcgcagcactccgtacccactcgtcttactgttctgatccaaaccttgtgttagatttgaagaacctcattgtgctttttgctgacacacttcaggtgtatggtttccctgtaaatcagctttttgacatgctgttagaaatcagagaccaatatagtgaaactctgctaaagaagtgggcaggtattttcagaaacatacttgattctgacaactacagtcctataccagtaacaagtgaagagatgtacaaaaaggtggtaggacaattcccatttcaagatatagaactggaaaagcaaccatttccaaaaaagtttcctttctctgaatttgtgccaaaagtttacaaccaaattaaagaatttatctacgcttgtctgaagttttcagaagatcttcatctaagctcaactgaagttgatgacatgattcggaaatcaacaaacctgttgctaaccaggactctgagcaactctctgcagaatgtaattaaaaggaagaatattgggcttactgagcttgttcagattattatcaatacaacacatttggagaaatcctgtaagtacttggaagaatttatcaccaacatcactaatgtgcttccagagacagttcacactaccaagctctatggcaccacaacttttaaggatgctagacatgcagctgaagaagagatttataccaacttaaaccagaagattgaccagttcctacagctggcagactatgactggatgaccggagatttgggcaacaaagctagtgattacctggtagacctcattgcctttcttcgtagcacctttgctgtattcacacaccttcctggaaaggtggcccagacagcgtgtatgtcagcttgcaagcatttagccacatccttgatgcaacttttgttggaagctgaagtgcggcagctcaccttgggagcattacagcagttcaacttggacgtcagagaatgtgaacagtttgccagatccggcccggtgcctgggttccaggaggacacgctgcagttggccttcatcgacttgagacaacttttggatcttttcatccagtgggattggtcaacctaccttgctgactatggtcagcccaactgcaagtacctccgggtaaacccagtgactgctctgaccctgcttgagaagatgaaggatactagccgcaagaacaacatgtttgcacagtttcggaaaaatgagcgagacaagcagaaactcattgacaccgtggccaagcagctccgaggactcatcagcagccaccactcatgaagggtgaccccggacccacagaggcgacctgctgcagcctctgtgtcagtctggggtccagccccagctgaccctgcatttgtgcattcttcttcaaagagagcatatgtatttttttattaacccctgtgcagtattcacataacatttccctatagtaaaagaggcacaagaataagcaagtacatgagatgttgctaggctgggactcaggggaagttattactacactatctgtgttatcttagagatggtggtatcatcaattccacagtgatgaaccacctttcatcccacggccttttatctcccaagactggctttggccatgaccttcctcatcaggcctctgagcacactctctaggaactgctgcagaaattcccctaccttagcctcccttctcccaggactcctctcttgactgcaattgcctcttcttcttcttcttcttcttcctttttgttttttttttttttgcctgcattcacaattacttttcacaaaggtgttggaaatggcatttttattttacacagatagttgcacatatatagagaaaattaggaaagtccatttttaactctaaagggaacttttttctctaaaacttacttgtaaagctactgatacagatgggccgcatggttaggggaaagctcctctgtgaaaagagcatgtttattcctcttgtacattttcctcttttaactgctattaaacaagaaagcctacatacctgtttcaaaagccacggtgttgtctcatgggtattttgttcttccatcctttttgcacagtgcagct

SEQ ID NO: 29399 - DNA, 2229 bp, Homo sapiens
gcgggtagccagaggctggggcggctgtggagcctgtggtgggagcggcattgtggggcagggaaaaggtgagccgagccgacggaggggacgcgctgcggggcgcccccagtctatggagcggggtaagatggcggaggcggagagcctggagacagcggcagagcacgagcggatcctgcgagagatcgagagcactgacacggcctgcatcgggcccacgctcaggtctgtttatgatggtgaagaacatggacgtttcatggagaagcttgaaactcgtatccgtaatcacgaccgagaaattgagaaaatgtgcaactttcattaccagggctttgtggactctataactgaactgctgaaagtgagaggagaagcccagaaactcaaactggtaatagcaatggaagagctgaagcagtgtcgactacaacagagaaatatttctgccactgttgataaattaatgctgtgtcttccagtcctagagatgtacagcaaactgagggaccagatgaaaactaaaaggcattatcctgcactgaaaactctggaacatctagagcatacctacctgcctcaagtaagccactatcgattctgcaaggtgatggtggacaacatccccaagcttcgagaagaaataaaagatgtttctatgtccgatctcaaagactttctggagagcatccgcaaacattcagacaaaattggagagactgccatgaagcaagcccagcagcaaagaaacctggataacatcgtcttgcaacaacccagaataggtagcaagaggaaatctaagaaagatgcatatataatctttgatacagagatagaaagtactagtccgaagtctgaacaggattcaggaattctggatgttgaagacgaggaagatgatgaagaggtacctggggcccaagatttggtggatttctctccagtttatcgatgtctacatatatattctgtcctgggtgcccgggaaacatttgagaattactaccgaaaacagaggcgaaaacaggctcgtttggtacttcaacctccatctaacatgcatgaaactttagatggctacaggaagtattttaatcaaattgtaggcttttttgtggttgaagatcacattttacatacaacccagggcttagtaaatagagcctacattgatgaactgtgggaaatggcactttcaaaaaccatcgcagcactccgtacccactcgtcttactgttctgatccaaaccttgtgttagatttgaagaacctcattgtgctttttgctgacacacttcaggtgtatggtttccctgtaaatcagctttttgacatgctgttagaaatcagagaccaatatagtgaaactctgctaaagaagtgggcaggtattttcagaaacatacttgattctgacaactacagtcctataccagtaacaagtgaagagatgtacaaaaaggtggtaggacaattcccatttcaagatatagaactggaaaagcaaccatttccaaaaaagtttcctttctctgaatttgtgccaaaagtttacaaccaaattaaagaatttatctacgcttgtctgaagttttcagaagatcttcatctaagctcaactgaagttgatgacatgattcggaaatcaacaaacctgttgctaaccaggactctgagcaactctctgcagaatgtaattaaaaggaagaatattgggcttactgagcttgttcagattattatcaatacaacacatttggagaaatcctgtaagtacttggaagaatttatcaccaacatcactaatgtgcttccagagacagttcacactaccaagctctatggcaccacaacttttaaggatgctagacatgcagctgaagaagagatttataccaacttaaaccagaagattgaccagttcctacagctggcagactatgactggatgaccggagatttgggcaacaaagctagtgattacctggtagacctcattgcctttcttcgtagcacctttgctgtattcacacaccttcctacatcctatagcaagactctcaagcaggaccctgaggtgttaatgaaaaaagagtgcattaaaagtgagttgaagtttaagatgttaaattttatgttacatttattttaccataataatgaaggtgatttcaaaaagagtaaggaaaagaaaacatgaaatatactggtctatatgaatgt

SEQ ID NO: 29400 - DNA, 533 bp, Homo sapiens
ggggaaactgcccccatgattcaattacctccacctggtctctcccttgatacatgggattatggagattacaattcaagatgagatttgggtggggacacaaagcctgaccatatcaaaaacttcctagaagaggtaacatgaaagcccatgctttaacataccccttgcccgaatgtggatggccttttccattatgccttacatttgttttgtaccggcagattcatattgagccattcatcctggggtgagtagttaaatgacttttacatgtgtttgttgttttctagcttgttcagattattatcaatacaacacatttggagaaatcctgtaagtacttggaagaatttatcaccaacatcactaatgtgcttccagagacagttcacactaccaagctctatggcaccacaacttttaaggtgagagggccctacagtactgtggaactgcttctggtgtacacagtctgggacgttctacctaacatggccttgtttctgtaagatggtttataacatgctctt

SEQ ID NO: 29401 - DNA, 6132 bp, Homo sapiens
  misc_feature (3359)..(3359): n is a, c, g, or t
  misc_feature (3429)..(3429): n is a, c, g, or t
gcgggtagccagaggctggggcggctgtggagcctgtggtgggagcggcattgtggggcagggaaaaggtgagccgagccgacggaggggacgcgctgcggggcgcccccagtctatggagcggggtaagatggcggaggcggagagcctggagacagcggcagagcacgagcggatcctgcgagagatcgagagcactgacacggcctgcatcgggcccacgctcaggtctgtttatgatggtgaagaacatggacgtttcatggagaagcttgaaactcgtatccgtaatcacgaccgagaaattgagaaaatgtgcaactttcattaccagggctttgtggactctataactgaactgctgaaagtgagaggagaagcccagaaactcaaaaatcaagtgacggatactaatagaaaactacaacatgagggaaaggaactggtaatagcaatggaagagctgaagcagtgtcgactacaacagagaaatatttctgccactgttgataaattaatgctgtgtcttccagtcctagagatgtacagcaaactgagggaccagatgaaaactaaaaggcattatcctgcactgaaaactctggaacatctagagcatacctacctgcctcaagtaagccactatcgattctgcaaggtgatggtggacaacatccccaagcttcgagaagaaataaaagatgtttctatgtccgatctcaaagactttctggagagcatccgcaaacattcagacaaaattggagagactgccatgaagcaagcccagcagcaaagaaacctggataacatcgtcttgcaacaacccagaataggtagcaagaggaaatctaagaaagatgcatatataatctttgatacagagatagaaagtactagtccgaagtctgaacaggattcaggaattctggatgttgaagacgaggaagatgatgaagaggtacctggggcccaagatttggtggatttctctccagtttatcgatgtctacatatatattctgtcctgggtgcccgggaaacatttgagaattactaccgaaaacagaggcgaaaacaggctcgtttggtacttcaacctccatctaacatgcatgaaactttagatggctacaggaagtattttaatcaaattgtaggcttttttgtggttgaagatcacattttacatacaacccagggcttagtaaatagagcctacattgatgaactgtgggaaatggcactttcaaaaaccatcgcagcactccgtacccactcgtcttactgttctgatccaaaccttgtgttagatttgaagaacctcattgtgctttttgctgacacacttcaggtgtatggtttccctgtaaatcagctttttgacatgctgttagaaatcagagaccaatatagtgaaactctgctaaagaagtgggcaggtattttcagaaacatacttgattctgacaactacagtcctataccagtaacaagtgaagagatgtacaaaaaggtggtaggacaattcccatttcaagatatagaactggaaaagcaaccatttccaaaaaagtttcctttctctgaatttgtgccaaaagtttacaaccaaattaaagaatttatctacgcttgtctgaagttttcagaagatcttcatctaagctcaactgaagttgatgacatgattcggaaatcaacaaacctgttgctaaccaggactctgagcaactctctgcagaatgtaattaaaaggaagaatattgggcttactgagcttgttcagattattatcaatacaacacatttggagaaatcctgtaagtacttggaagaatttatcaccaacatcactaatgtgcttccagagacagttcacactaccaagctctatggcaccacaacttttaaggatgctagacatgcagctgaagaagagatttataccaacttaaaccagaagattgaccagttcctacagctggcagactatgactggatgaccggagatttgggcaacaaagctagtgattacctggtagacctcattgcctttcttcgtagcacctttgctgtattcacacaccttcctgtaagtggcagttgctcttactttgtcctttatatataaaaagatttccttataatttagtttggtgaaagatgttagtttctgctgtaactacccaggaagattttcagtatataaaggcgcatgctatatttattaacctttaatgatatgtagaggctacttccatcattttttcattgacctttgcatttttttcatctgaaaatggttcctggtattatgtctgcttatcttcctatgatgttcaaggtaattagtacaaagacaatataaaagccttggtagaattaaaaaaagaaacttagttagaatttcagatatgtatattttagttttagaatattctttaacttttttatataaactgaaattctttgatgaaatgctccatcttttttatctaatttgtctatgttttctctgttttcttaagcatattaattatagacattcaaaatcattctttactacttcttatatatattatacatacatattggtggattttttttctcttggttttcagtgatatggtcctgtctgtttctaatatttttcggttgatgttagacattgtataaaatatgtagagattccaggtggtgttatcttccaccagaaaaggttcatgttttcctttacttagtaaatagaatgggcaggtgggttgtggtttgaagctgaccaccttagtaccatcatggactgatttggattaatattgggttgcagttgtagtgtactttgtttgcccttgttggtaggatatggctctgcagagcttttaaaaactgcctgatatgtcattgtctttttagcaccaaagaggactatagaaattcctgctcttcacagaaaccttgtctgttcagcctcctgtactctttcgttttagaatctggtaaatgtcttgagaaggagacttagcagtacccagtatcagcaattgctgatgggaaaaaaagtgttggggattgtcagtgttactttaccatccctaatgaggtttcagctcctatgtgatctgaatgtttgtgtaccccaaaaaatcatatgttgaatctaataaccagtgtgattacattaggaggtgaggccttgggaggtgatagattatgatggtagagcctcgcaaatgggattagtatacttataaaggagacttcagagagctgccttgttccttgtggccatgtgaggatacggggatacaggaagaagactccttttttatttcgcactaggaaataggccttcatcngacaccgaatctgctgataccttgatgttggacttccaagcctccagaactgtgagaattcttttgtttntaagctaccagtctatgggattttgttacattattctgaatggactaagatagctcctgtcatttttaggcattcttctactagtgagtctttttctctgaaacactgtgaaactgtgagaaatctccttgcttttcaaagattttggcttaaacccttattttcctcagccgtttagctttagaattcagtaaatatcttgagggtaaaactagtcctcaaacctctaactgtggcactctagtctgttggaagcagcaaagattccaagtttttttcgccccctagtagttagtctctgcctggttttaagattctcagtctgttgcccttgtctacgttcctcaaatgcccacaaggaaagctgcagattttcacctcacctttaaaaggttttgtcctctctgcagttttattccctttagtcttcattgcttcacagcacctgatgccttttaatatgttttttctacatgttttacttcctctcctagttgttcctagtgggagcatttatctgcagaaaattatgtcattttgtctggctttatcctgataccaaagccagacaaaaagagcacacacaaaaaaactatgagttaatctcacaattatggataaaagtaaaataaataaaattttagcaagtcaattcccagtgttttaagaaagtaattttgtactagtgtgtaggatttattccagaaatgcaaggatggtttgatattttaaaaaaatatgttaatataatttatcatattactaggtgagggagatacagtttcttgatgtattctagaaagacattttattacatccaggctacattcttgatttaaaaacaaagtttactaaattccaagcagtataatattttaataacaaaataaagaacatctatttgaaatttagtggccaccatagattgaacagtagaacaataaaacatttattttcattgacaacaggaattgggtgaagatgcttctcaccaacactttagaagttctataaaataaatgtaaaaaaagaataaattacattataatgagccatgcatgtcttagtccattcctgctcccataacaggatactgtagactgagaaatttatggacaacagaaatttgtttctcacagttctggaggctgcaaagtccaatattaagatgtcagcagattcagtgtctgataaagtcctgttactcataaatggcacctctgtatccttacgtggcagagaaggcaaaaaggacaaactcactcccccaatcccttctataaggcactaatccaattaatgagtgatgtaatcacttctgaaatttttgtgccctcccccacaaaaattaaaaattaaaaaaaataacaaagttgcattggggattaaatttcaatatgaattttggcaaggctcaaacatttcaaaccatagcacatgcatattattattcataggttattattatctaaatagaacatactaaaaattcattaagaccaataagagtttaggttagatgattcacttagaaaacaaataaacttttcttatattagcaatgcccacatagaaaatatagtgtcaaaagtgtcttatttactattgggacatagatataatttttctatgcagctacttagcaagtcaatttagaaataatgtgacaacatcacagagtaatataaaagagactttcttatgcacaaatatatatggtattccaggatgggagtatttcattctgtagaaagttttttcaaatttaatctaattgcagtgagtatcaagtaaatttgtttagggaagaatcttaatgaaatcattctgaaattcatttgtaagcaaaaatggacaatatttggtaaaaaatgataacatgaacataatttgtaactctattaataagacatacaaattaagcttgtgtgatatttttgactataaactactcagaaataagaaaatggtaacactccttgtttataagaaatatttgtggaaataggtattttcatacctgctgctaggggtctagttattgtagtctttttggagtcagtttttcaatatgcctcagaaaccccttaaaatgtgcttacctttttactatgtaattccccttttagaatttgaacttaatgaaataatcatgattgtattataatattcagatgtaactatatttaatacaatgtattttgtatagcgaggagtaggtataaattaaaaatccaacaaacaaatgtgttcacaaactaaattattgtatattcatataatgtgatattcattaaattaatgtaaatttatatttattcattaaaaatatattcgttatttcttaactggaaaacaacacaacaacacaacaacaaaaacaacaaaaacacaaaaaaaaacacaaaaaaacacaaaaaaaacaaacaacacaacaaaaccccaaacacacaaacaaacaaaaaaaaacataacagcatgtgcgggcgcgcggcagacggtgcggagcgaagcaagaaaagtagaagcgtcagacgacagaaaagaaagtgagggggagcggggcgggcgacaaggctgagtagagtatggacgaagaccttgggcggtgatggccgcgccacgagcgcagaacgtcatgagatctctgccggccaccaaagaccgagggggttggggcaacacaccacacacaaaaaacaa

SEQ ID NO: 29402 - DNA, 4253 bp, Homo sapiens
tgcgaccttattcagggaaagaagtatcatctcttgcgaaaggtaatacccggacagactattggagcttacatagagcttgttcagattattatcaatacaacacatttggagaaatcctgtaagtacttggaagaatttatcaccaacatcactaatgtgcttccagagacagttcacactaccaagctctatggcaccacaacttttaaggatgctagacatgcagctgaagaagagatttataccaacttaaaccagaagattgaccagttcctacagctggcagactatgactggatgaccggagatttgggcaacaaagctagtgattacctggtagacctcattgcctttcttcgtagcacctttgctgtattcacacaccttcctggaaaggtggcccagacagcgtgtatgtcagcttgcaagcatttagccacatccttgatgcaacttttgttggaagctgaagtgcggcagctcaccttgggagcattacagcagttcaacttggacgtcagagaatgtgaacagtttgccagatccggcccggtgcctgggttccaggaggacacgctgcagttggccttcatcgacttgagacaacttttggatcttttcatccagtgggattggtcaacctaccttgctgactatggtcagcccaactgcaagtacctccgggtaaacccagtgactgctctgaccctgcttgagaagatgaaggatactagccgcaagaacaacatgtttgcacagtttcggaaaaatgagcgagacaagcagaaactcattgacaccgtggccaagcagctccgaggactcatcagcagccaccactcatgaagggtgaccccggacccacagaggcgacctgctgcagcctctgtgtcagtctggggtccagccccagctgaccctgcatttgtgcattcttcttcaaagagagcatatgtatttttttattaacccctgtgcagtattcacataacatttccctatagtaaaagaggcacaagaataagcaagtacatgagatgttgctaggctgggactcaggggaagttattactacactatctgtgttatcttagagatggtggtatcatcaattccacagtgatgaaccacctttcatccatggctctaaagcttaggtctggggcttaggaaccataaaaagtgggtatctggcgctgggaggtagagtgagtaagcaaaaggatactaaaatatgtcctgttcactcttggatgcccattcaccacatagatgaggctgattcttctcaatacaaggaaagggcatggcaaacattactatttagtacactaagggcagctctggagggtcatctcctcagtctgctgactttcactggcttgtgaacaagcatggcatatggcaagatgacagcttcattccaatcccccaagaatggcggtttctttagcctgatctaaccccaggcttttattgcaattttttctagggcaggatacagctaagtagacagcagtaataattggatcccatgtttaactgcatattgccccagctctaggagtgttgagtctcaactcgaagagtttttctggatcttgaaagccagttttcatggaatcagagacccaatcccttccctgttcatctcatttccttcacttacagtcagagcacttggttcaggacataaatcaacagttacttccataggccttcacagggcgtttcagacttagcctcctccagtaatgccattgaaatagttcagatttcggaagcctaaaaatggcctttaccttacccttaggtgtaacctgaggattagttgggattgttcctttatgttttaaaaccagctttttggttatcatctttaaggaaatgtcaccagctctgcactgtgggggcagccatgcctggactggatgcctctagggatggagacattgttaccataaagtcgacagagccaaccatggcttgtggcttgttgcctctggcccaactgtccttcactaaataatatcctagatattattttgttgctcaagcccaaggttcccaccctcttttgagatccccaaagccatctttggccttgtctaagaaagattgcctataatcctgtcctccaaactctaaagcctggagcagcttagcgtggaggctgcactcattgacccagatggactcctgagacttaacgcaagggctttgctatgaggtcagtcgggggaaactgtactttaagacacttcagaaagatgctactggctagtagcagaaagatggctagtggcaagagtataattgtgcatcaccaaacaatgacaaataagccacacaggcatttccagcttggattgatgggaggagagactcatcaaacagaattcttcactacctttgtcagctactgagttgcttctggggagggaagtacttccttgcccctccccaacccccctacctcaccatatcctatcatatcttgatagtcatggggaagaggatgtgcacacagacatacaaatttcctcaaagctggagagaccaggctacatgtgagctcatagatgctgctgaggctcatcctgagggctggatggttggccagggtttcagaatgagggtaagggatgagcactgccacccagaacttgataagccaagagaaggcaggagccaaaatggcatcgccaagctctcatctttgttgaaacaagtgagaaacgattatattaatctgaagttctattgcttgagaagagttcaaaacacttctctttgctagtacccagtttgcagcaagatctcttcagctttaagtgctgagagactttgaagtggaaatggagagatgtgtaagcatggcacagtgtttgtctttttagaggatcatcattgctggtctggtctcaaacctctgccttggaagaactgtgctatacaggaaaaagtgaacaaggtggaggaataggggttattctgcacagaagtcccatgaaaggaaaagcttattcaagctcaagacataaagatggaccctttgatatatcttctctccattcttagtctgccttcaccttatctaacaaaaaacaacatgcagctactgagttgtatgtagagacatactcttggtgggccagggaaggtaaaaacagggaccagcaatgtcaagtttttgaactagaaaagtgggatgtttttagttttgtctataacctgtagctgggccaacccttgagaggacttgtgcaaagcatgtgtgcccagacccatcagactcctcagatatggcctcaaatacctagagatgtagaagtaccgtggagggcctcaataagagggcaagcacacagatggctagaagcctgtatggcttctggtcaggatgaacccttggccaagttcttgaggaaaccaggtctatattcctgaagggacagttcagtttgggactctattaggtttcagtagtaatataggctgcttgcatcattttaacattcatagggaaaatctctttgagcaggctataaatgaagctgttgcaggtagggaagaacaggacctgaaaatgggaaccaggaagtgagatcctgttggcaaagggaatgtagagcttccagggtgcattgcccactgttctcattgcataccagtcctccaagtcagtctagccttactgtacacttgacaagtgcttactcagcaagtcccagacccacggccttttatctcccaagactggctttggccatgaccttcctcatcaggcctctgagcacactctctaggaactgctgcagaaattcccctaccttagcctcccttctcccaggactcctctcttgactgcaattgcctcttcttcttcttcttcttcttcctttttgttttttttttttttgcctgcattcacaattacttttcacaaaggtgttggaaatggcatttttattttacacagatagttgcacatatatagagaaaattaggaaagtccatttttaactctaaagggaacttttttctctaaaacttacttgtaaagctactgatacagatgggccgcatggttaggggaaagctcctctgtgaaaagagcatgtttattcctcttgtacattttcctcttttaactgctattaaacaagaaagcctacatacctgtttcaaaagccacggtgttgtctcatgggtattttgttcttccatcctttttgcacagtgcagct

SEQ ID NO: 29403 - DNA, 2531 bp, Homo sapiens
gcgggtagccagaggctggggcggctgtggagcctgtggtgggagcggcattgtggggcagggaaaaggtgagccgagccgacggaggggacgcgctgcggggcgcccccagtctatggagcggggtaagatggcggaggcggagagcctggagacagcggcagagcacgagcggatcctgcgagagatcgagagcactgacacggcctgcatcgggcccacgctcaggtctgtttatgatggtgaagaacatggacgtttcatggagaagcttgaaactcgtatccgtaatcacgaccgagaaattgagaaaatgtgcaactttcattaccagggctttgtggactctataactgaactgctgaaagtgagaggagaagcccagaaactcaaactggtaatagcaatggaagagctgaagcagtgtcgactacaacagagaaatatttctgccactgttgataaattaatgctgtgtcttccagtcctagagatgtacagcaaactgagggaccagatgaaaactaaaaggcattatcctgcactgaaaactctggaacatctagagcatacctacctgcctcaagtaagccactatcgattctgcaaggtgatggtggacaacatccccaagcttcgagaagaaataaaagatgtttctatgtccgatctcaaagactttctggagagcatccgcaaacattcagacaaaattggagagactgccatgaagcaagcccagcagcaaagaaacctggataacatcgtcttgcaacaacccagaataggtagcaagaggaaatctaagaaagatgcatatataatctttgatacagagatagaaagtactagtccgaagtctgaacaggattcaggaattctggatgttgaagacgaggaagatgatgaagaggtacctggggcccaagatttggtggatttctctccagtttatcgatgtctacatatatattctgtcctgggtgcccgggaaacatttgagaattactaccgaaaacagaggcgaaaacaggctcgtttggtacttcaacctccatctaacatgcatgaaactttagatggctacaggaagtattttaatcaaattgtaggcttttttgtggttgaagatcacattttacatacaacccagggcttagtaaatagagcctacattgatgaactgtgggaaatggcactttcaaaaaccatcgcagcactccgtacccactcgtcttactgttctgatccaaaccttgtgttagatttgaagaacctcattgtgctttttgctgacacacttcaggtgtatggtttccctgtaaatcagctttttgacatgctgttagaaatcagagaccaatatagtgaaactctgctaaagaagtgggcaggtattttcagaaacatacttgattctgacaactacagtcctataccagtaacaagtgaagagatgtacaaaaaggtggtaggacaattcccatttcaagatatagaactggaaaagcaaccatttccaaaaaagtttcctttctctgaatttgtgccaaaagtttacaaccaaattaaagaatttatctacgcttgtctgaagttttcagaagatcttcatctaagctcaactgaagttgatgacatgattcggaaatcaacaaacctgttgctaaccaggactctgagcaactctctgcagaatgtaattaaaaggaagaatattgggcttactgagcttgttcagattattatcaatacaacacatttggagaaatcctgtaagtacttggaagaatttatcaccaacatcactaatgtgcttccagagacagttcacactaccaagctctatggcaccacaacttttaaggatgctagacatgcagctgaagaagagatttataccaacttaaaccagaagattgaccagttcctacagctggcagactatgactggatgaccggagatttgggcaacaaagctagtgattacctggtagacctcattgcctttcttcgtagcacctttgctgtattcacacaccttcctggaaaggtggcccagacagcgtgtatgtcagcttgcaagcatttagccacatccttgatgcaacttttgttggaagctgaagtgcggcagctcaccttgggagcattacagcagttcaacttggacgtcagagaatgtgaacagtttgccagatccggcccggtgcctgggttccaggaggacacgctgcagttggccttcatcgacttgagacaagtaagtctttgtgtttttgttttttgtttttcttttaagatgtgtgactgaagaccatcaggtcttaaggaaaaggggaagggagggggattggcgttggcgattcacattggagacctaagggttttccctgtatttgaggccacctcttttatttagctatctgggatccttagctatggtggagttaaaggttttgtgggtagaagggaaccgcgggggtgggaggacgccccgcgagtccgagcacccgtcagtcgtttcctcc

SEQ ID NO: 29404 - DNA, 466 bp, Homo sapiens
attgaaaagctaaaggaagaaaactagagaaagtgaaggatattttcctaacttggtatttgcaaactctgatgcctgtttatcaaattggagttctccttgggagtgagttgaaggaggtcccttggggcccccatcccctggaaaggagctggtgtggaaagtcacctggtgtggtgactcacgcctgcaatctcaccactttgggaggctgaagtggtaggattgcttaggccaggagttcgagaccagcctgggcaacgtagtgagaccctgtctctactaaaaattaaaaaattagctgggcatggtgatgtgtgcctgtagtcccagccacttgggaggctgaggcaggaggatctcttgaagctcaggagcttgaggctgcagtgagctaggattgccccactgcccttcagcctggatgacagagtgagaccttgtctctaacaaaagaaaaagaaaa

SEQ ID NO: 29405 - DNA, 379 bp, Homo sapiens
gttacttccattattccttccagcagcccacaagtagatattacaattagtttacagatgactggtaggatgatcaaagtaaatgaattagaggtggagctggggatcagacccaatctgtcaggttccaaagtgcaagctatatgatggcaccccatcaattatttcatggacaagaccaaggagcactcaaaatctgtaagggtttcggtagttaacattattgtgtgattaccatgggcgtcagtagaaacacacaaagagccaggttgctccaggttgctttggaactccagacacatcccagcacctctgggcctcagtttcctcaattccacaataaggctgccagtgcccacttactgaggctttatggtgt

SEQ ID NO: 29406 - DNA, 364 bp, Homo sapiens
tacttctgccaatagatttccatggaagtggagctacgtaacttctgaggctaagtcataatgggccatgctgctgccactgtaacagacactcttggaaccctgagtgccatttaagaagactgaccatcctgagtccatcatgctggggtcaccaaggtgctctgattgacactcctagctgggattgcctttcatctttcacagacttcccagcccaggcaccagacacaggagtgaaagagtcgttggacgagggcccttcagcccaggctgttcccagatcccaaccactggagtcctcaccagcagttcagatcatctgacctgtggccccaaacatggagcagttatgcccttttca

SEQ ID NO: 29407 - DNA, 396 bp, Homo sapiens
acaataaaagtcatatatcagaagcccacagctgacatcaaacattgaaaagctaaaagcttgcccaacaagattaggaacaagacaagaatgcccactctcactaattctattcaccatagcactgaaagttctagccagagcaactaggaaagaaaaagaaaccaaaaccatccgaaacataaaagaagaaggcaattgtctctgtttgcagatgacgtcatcttacatatagaaaactctaaagactccaccaacaaaactggtagaactaataaattaattcagtaaaattgcaggatataacattaacatataaaaattagttgtgtttccatatactaacaatgaactattcaaaaaagacattaagaaagcaatgccatgtataatagc

SEQ ID NO: 29408 - DNA, 175 bp, Homo sapiens
tgccaccaccttctagcctgggcaacagagtgagatcctgtctcaaaaaaaaaaaaaaaagacaagacaagaaaaaagtaattctgctttctcttactccaggtcaaggtttagctgctggcctcctgtaagaaggtaagaagaaactagtgtagtttcttctacctccgtatat

SEQ ID NO: 29409 - DNA, 542 bp, Homo sapiens
gatacgtaggacggcacacagcctctcggcaagcaggctcattcctgcacgaagcttgcaaggcagctctctctaaactggcaaagaacctttcttggtcatggttttcctccttgcaatctggcctcactttagggagatattctcatcagggaggctgagaccaactccctctcctgggggtggcgcctccctgacaccagctgtggtgtgcagatgtgcagtaaatgtcgcatcgttatcacttcaaagataatttcattcctggaagactggaaatccttaccctgggttttggcaaacacttacattagagttgctcagtcagttgcagctttaaaccatggcgccccctgcccacccagccagctgataatttatgagaaacaggtgtacaaagaatgagtacattgggctgcggacccagatcaaacttcagaaaatgcagattaccaagggttaatcatttttgagcaatcttatttccactgagactgcatctgcacagcaaagcaagccactgaggcaaaaagaaaaaaaaa

SEQ ID NO: 29410 - DNA, 428 bp, Homo sapiens
aaagaaaatgacttctgcagagactgaatcatctttatgtcctctatggtagttggcacttagtagatattaaataaaaaacaggctgggcaagatggctcatgcctgtaatcccagtacttcgggaggctgaagcaggtggatcacttgagctcaggagttcaagaccagcctgggcaacatggtaaaatcctatctctacaaaaactataaaaagtagcgggatgtggtggcatgtgcccatagacccagctacttggaaggctgaagtgggaggattgcttgagcccggggggtggaagttggactgagccaaggtccagctccagcctgggccacagagggagaccctgtctcaaaacaaacaaacaaacaaatctctttaactcccaaaatggaaagttctccaagatatatgttaagtgatt

SEQ ID NO: 29411 - DNA, 540 bp, Homo sapiens
ttatctttagttgggtgaagttaccatttaaacttgctgcctccctctcacatatattttctagtggttaaaaaaggatgttttgtagactggagagaaagggacttccaaggaggcaagtggaagggttaggatggcgggtagtggaattagacaacatctctggggtccaagaggcaccttgagagttccatgctgggatccccgaatctaagctgcaaaagggcatatggtgtctcaagctgcttgaaagaagtattgtctcagattttacttagtaagcattggtcaggaaggccaggtcaacattaagaagcagaaattagtgtagactgagaatgagccctgtcatgtgcctgacagaaaataggctgggccaatctggaactctacttaaaaaagaagcagctgtggctgggcgtggtggctcacacctgtaatcccagcactttgggaggccgaggcgagtggattgccagagctcaggagtttgaaactagcctaggcaacacggtgaaaccccctctctactaaaataca

SEQ ID NO: 29412 - DNA, 547 bp, Homo sapiens
gacagcgtgagactccatcttaaaaaaaaaggtaaataatgtgtatggtttaaagagttttgataaatggatgcccctgtgtaaccatcacaacactctagatacagaacattttcatcagccctaaaggttctcttgtgccccttctcagttaaccagggagtccccccactcctccagccctttcagcccaggcaatacttttctgggctgaaaagatttttttacattaagaaatataaggagttccggccgggcttggtggcttatgcctgtaatcccagcactttaggaggccgaggcgagcggatcacgaggtcaggagatccagaccatcctggctaacacggtgaaaccccgtctctactaaaaatacaaaaaattagccgagcgtggtggcgggcacctgtaatcccagctactcgggaggctgaggcaggagaatggcgtgaacccaggaggtggagcttgcaataagccgagatcgcgccactgcactccagcctgggcgacagagcgagactccatctcaaagaaaaaaaaaaaa

SEQ ID NO: 29413 - DNA, 304 bp, Homo sapiens
gctgtggggctggcaggaagctgtcctggacagggcacagagtggccaggacaatagggaggagaggcaccggctggggggatttgccagaggcggtgcctcccttccccagcagggcatgtgctccagatcttgtgccacttgacatgcagagcctgggtgcaacctgcagaaaccatgtgggctgtgccccagccttggggtgggtgtggacctggtctccctggggatactggaagggcctctgggagatatttagggcgcagcctggacatctataccatgcactggcaaacatacaaac

SEQ ID NO: 29414 - DNA, 726 bp, Homo sapiens
ggcatttggaaaaagtgaatttcctggacttaactcatgtaaatagctctactgcagagctgtgtgtttagtgacagtgcagtcaggggcattcccacagctgtcacagcacggcccagcatcattgtagccagatcctaacatgccaacatcacctcttgccatttagcccctagtgagaaattgggagctaccaggcaggtgcccagtgcattcagggaagatgggcacaacatcaggatgggtgtgtctggaagctcctcttcactgaccagggctgggcagggccaccctgggctggtgaggctgccctgcagggcttctcactatgtagcaccagtcaccagcccaggtcacagaagaagcccctcccagcacccactggagaggggaagctgaagcccagggagacgggctccatggtggtcccacatggagctgttttgcaaaccctggaaaaggcggctctccctgtcccaacactcttcagagacaggaagacagagttaatcttgaatgaatgttatttctacttagtcctaagcaagaataagctgccctcttggtgatcatactttatacggagtgctatcgtttatgaaatgctttcagtatgctttttaaattatgcaggcaaaataaccacacttcagaaaatgtggacttctgaaaaataaaatccccataattcttaataaaactgccttttgcactttgatacattac

SEQ ID NO: 29415 - DNA, 369 bp, Homo sapiens
tggtagcatccttgcttggtgtttcccctggtcctgggataggggcagggagagaagagaagaaggtggtcccacatggagctgttttgcaaaccctggaaaaggcggctctccctgtcccaacactcttcagagacaggaagacagagttaatcttgaatgaatgttatttctacttagtcctaagcaagaataagctgccctcttggtgatcatactttatacggagtgctatcgtttatgaaatgctttcagtatgctttttaaattatgcaggcaaaataaccacacttcagaaaatgtggacttctgaaaaataaaatccccataattcttaataaaactgccttttgcactttgatacattac

SEQ ID NO: 29416 - DNA, 496 bp, Homo sapiens
ctcaacatcattgatcattagagaaatgcagccataaaaaggaacaagattatgtcctttgcagggatgtggatggagctggaagccgttatccttagcaaactaatgcaggaaaagaaaaccaaacactgcatgctgtcatttataagtggagctgaatgatgagaacacatggccacttcgtggggaacaacacactctggggcctgtcgggggtgtgggggtagagagagtatcaggaagaatcgctaatggatcctgggcttaatacctaggtgatgggttgatctctgcggcagaccaccatggcacacgtttacctctgtaaaaaacctgcccatgtaccctggaaattaaaagttggagaaaaaaaggaaaggaagagaataggaaaggagaacgaatcagaggaagaaagagaaaagtgggcaaagaaagaaaaggcaaaaagaatagagataggaaaagaagacagaaaataatagaagaaaaagaa

SEQ ID NO: 29417 - DNA, 1368 bp, Homo sapiens
atggtggattttccaggctacaatctgtctggtgcagtcgcctccttcctattcatcctgctgacaatgaagcagtcagaagactttagagtcattggccctgctcatcctatcctggccggggttggggaagatgccctgttaacctgccagctactccccaagaggaccacaatgcacgtggaggtgaggtggtaccgctcagagcccagcacacctgtgtttgtgcacagggatggagtggaggtgactgagatgcagatggaggagtacagaggctgggtagagtggatagagaatggcattgcaaagggaaatgtggcactgaagatacacaacatccagccctccgacaatggacaatactggtgccatttccaggatgggaactactgtggagaaacaagcttgctgctcaaagtagcaggtctggggtctgcccctagcatccacatggagggacctggggagagtggagtccagcttgtgtgcactgcaaggggctggttcccagagccccaggtgtattgggaagacatccggggagagaagctgctggccgtgtctgagcatcgcatccaagataaagatggcctgttctatgcggaagccaccctggtggtcaggaacgcctctgcagagtctgtgtcctgcttggtccacaaccccgtcctcactgaggagaaggggtcggtcatcagcctcccagagaaactccagactgagctggcttctttaaaagtgaatggaccttcccagcccatcctcgtcagagtgggagaagatatacagctaacctgttacctgtcccccaaggcgaatgcacagagcatggaggtgaggtgggaccgatcccaccgttaccctgctgtgcatgtgtatatggatggggaccatgtggctggagagcagatggcagagtacagagggaggactgtactggtgagtgacgccattgacgagggcagactgaccctgcagatactcagtgccagaccttcggacgacgggcagtaccgctgcctttttgaaaaagatgatgtctaccaggaggccagtttggatctgaaggtggtaagtctgggttcttccccactgatcactgtggaggggcaagaagatggagaaatgcagccgatgtgctcttcagatgggtggttcccacagccccacgtgccatggagggacatggaaggaaagacgataccatcatcttcccaggccctgactcaaggcagccacgggctgttccacgtgcagacattgctaagggtcacaaacatctccgctgtggacgtcacttgttccatcagcatcccctttttgggcgaggagaaaatcgcaactttttctctctcaggttggtga

SEQ ID NO: 29418 - DNA, 800 bp, Homo sapiens
cttgaacccacagccaggggagcgtgggtgaaatatgagcagacgttttcaccagctgttaaaacctagcaggggcattaggaatcaatcgcagactgtgcctcctgtgacttggcaaacctccatgaggaaggctcaagggattggaagagcagtcacaggtctccaccagccaagagcaaacctgagcagagctaagcacttttgtgccctctgaagcaaggcaaccccataaccttgcagagattcaggaatgatggaagctgaggagctacatggccatgtcaggaggatgacgagatcgccaggcagctgccatcaagttagggttcagagtggtcctgcaggagaaggggagatgcccctgcccgggaccacacaggacagaagggcatctggacagtgccaggccatgttcagaaagtgaagtgcctttcccataggaaggttctgggcccaaacacttactgagcacctactgtgtagctggcatattcaataagtgttaaaggaagggagagagagagagagactgggagggaagaaaggaggaggatgcgcccctggacagtacgtgctgtcactctgagtctcctccaaggccagtttgcggcttctaccttacatctttatacctttgaattggatgaaatgtattttctcttggtcattagggcactgatgcaaaatttcagtatgaccttgttggttctttccacctggtccttaaggttctgaggaccgtgtatgaagcagtatcatgcaggagaagaaggcaggcaaacctggttttgaattcc

SEQ ID NO: 29419 - DNA, 266 bp, Homo sapiens
ttcttcaaggcccagggccatcccctgcagaggtagggtgggctgcaagacctcaggcccctgcctcatgggactctctgatgggcttcaaccgtgggctcttgcaggcatggagcctgtatcatgacaccttacacccaaggccagcaatgcaaggagagtatggacatcaaattctttccttccagaggctgaattcttcaaagacacacgcggtcgtcccttgctcttggcattaacggtggagaacccagctgaggtggctt

SEQ ID NO: 29420 - DNA, 451 bp, Homo sapiens
cgccatcatgggattcaaccaagctgggccatcgttgcttcgccctctgttcccctcatggcagcagtgctgggctccctgcttcccgtggggtcccgcagcactcggcacctgtgaggattggaggatgggctgtactcttttaaagactggggatagggccaggttctgtggctcatgcctgtaatcccagcactttgggataccgaggcgggtggatcacttgaggtcgggagattgagaccggcctggccaacatgcagaaaccccgtttctactgcaaacacaaaaaattagccgggcatggtggcgcatgcctgtaatcccagctatttcggaggctgaggcaggagaatcgcttgaacctgggaggtggaggctgcagtgagcggagattgtgccattgcactgaagcctgggtgacagagtgagaccctatctccaaaaaaaa

SEQ ID NO: 29421 - DNA, 374 bp, Homo sapiens
gaaagagatgtggtacagtcagtgttttgagaaaaatgaattttgaagtagctgtgtaataaatgaatgatgtacataaaagaattgccaagttgaaatgttatgtacttatagtagtaccattctgtgtaatttttctttagcagcacttagcaccccaggtgtaaacatagaagatggaaactagactgatccagaattacattctactttctactatatgtacatataaatatgttcaactctctcattaaattgtaagactggcattacctttatattccttacatcttctacattttgaaatactatggaaaaagccagcagtcagacagacaagacttgtattcatatcccagctctgctacttaata

SEQ ID NO: 29422 - DNA, 570 bp, Homo sapiens
tctgaaactgggtttatctaatacattgataaattattgcaaaggtacttttatcgttgaaatcacttcacttttaccctgataaatatcagtgactaggaatgaccttcggatagcgtttacatctgtaaccaatctgacaataatgtgttcatgaggtgcctatggattaaatcacacactggcatatttaagctgaaggtcagtctggaaaataaatttactatattgactgaaataccactctttgtgtaggtatttgtgatatatttaagaaaacgctaaaaagaatggaaattgtatgacaataacttaagtctttctccaaagtgcatgcagtcttttgcgatacctcattcagccgagtatttgtgctcttcctcattcagtataaggaagctttcagtttgcttagaaggcaacattggaatgttagagttcatcagaaacatagaattttaaactgtgagttccactgaatacattttaatgtctggtaggaagaatcaaacacctatttaaagatggcaatatataataatcattttaaaagtatttgattaaacctga

SEQ ID NO: 29423 - DNA, 609 bp, Homo sapiens
ggggcaacaaacgaaggggtcagtgctcgtttttcggtggacagtcagtagataacaagcatataaaatttggtgaatcaagatatgaaagcaaaatggcattaaagttaaactggtaactgtgctagaagtctattaatgatgtaacatgtattttgccattttgatgcaggagggtaacaagacttatggttcgtcttgtgcctttgtagcctttgaatttcttaaaaaccctaagtggatgcatcacatttataatgttaaaaagattgcaaggctgggattataggcgtgagccacagcacccggccgattttaccttaagtatattcttattgcttattacttcatactcaaactgacttataaggtagagaaaatcataatgtgtacccagatagtgctatttcagtttagaaaataaattcattttttatttcttgagattatttgaaagtacattgtagaaatggcacatttatggaactactttatggctgtgcctctcttgcagggaattttgcctccccctttccttttcccaaaaatactattagcttgcctaatttaacctttcactttttttatccccatcttcccccacaaaag

SEQ ID NO: 29424 - DNA, 700 bp, Homo sapiens
cttgctgatcatagtgaattatgctgataagaatgggaaacaagattattgggaataaattgaaaaatattaaataggtttttatgcgtcaagggtaaaaaaaatgtgttttgagtaaatgatctgaaatacagcatgcttttttggtaaaagcttagtataatgtagggtgaagttaaggcgttggcgataaccagaatcataattctcattttaaataatgctatgctacatctgcacaaaatagattatgtatatttttggctgctgtaccatgaaaatgatgactaaaacgaggtctagagagggatagtttaaaaatgatggtagggctagagatggaatccatgattgaggaggactgtagattttacttaactatattctttctttttaatttatttttattttattttattttttttgagacgaagtctcgctctgtctcccaggctggagtgcagtggcgccatgccgtctcactgcaacctccgcattccagattcaagtgattcttctgcctcagcctcccaggtagctggggctacaggcgccggcgccaccacgcccggctaatttttgtatttttagtagagacgaagtttcaccatgttagtcaggctggtctcgaactcctgaccttggatccgcccccctcggccttccaaagtgcctgggattataggcgtgagccacagca

SEQ ID NO: 29425 - DNA, 549 bp, Homo sapiens
atttgtgttagcgtcgacattagctatggataagcttgacttttccccctagcctataaaatcctgaagaggaaagattattcttctgctctgtatgtgtctcacatagtagctgctcagtaaaggcttgtgaaattcatttgaactgatcagcttctaaccgtgaaactcttctaaatgacaggcatgatatacaaatcatgctgtgtaattgtcacaagaaccctgtgagatatttattatcttcgtgttatatataaagaaactgaagtggtggcttatgcctgtaatcccagcactttgggaggctgaggcgggtggatcacctgtggtcaggagttccagaccagcctggccaacgtggtgaaaacccgtctctactaaaaatacaaaaattagctgggcttggtggtgggtgcctgtaatcccagctactcaggaggctgaagtgggagaatcacttgaacccgtgtggcggaggttacagtgagccgagattgtgccactgcactctagcctgggcgacaaagcgagactccgcctcaaaca

SEQ ID NO: 29426 - DNA, 478 bp, Homo sapiens
gctgttatggagctacagtatgcatccatgaacttttcacaaatttctacttaaaaaaatcaataccactatgtactatcaagttcttaaaaatttaagaacttaaaaattaatgtttaagaaaatttaaaatttaagtttaagaacttaaataacaggacagctttcatacacatcatagagtaaagaagatacactttcttaggagaaataaaaaagattaagtattcatgattggttactgctgtggtttgaatgtctccaccaaaacacatgttaaatttaattgccaatgtaacagtattggggaggtgggggcttttaacagggtgattagcttatgaggggctccaccttcatggaaaaggttaatggccccgatgggaaggcgtggggtcagttatttacaggggtggggctcctaataaaagtgcaaggtggacttatctctctatcttgtggaagggtgccttccacc

SEQ ID NO: 29427 - DNA, 975 bp, Homo sapiens
taaggtggcttgggagggaccagttttcctagatgcaggagacagcgtccatagtttcagttcgaagcaactggtggcaaaaggttagcatttaagatggcagggacagcgcgccatgaccgagagatggcgatccaggccaagaaaaagctcaccacggccaccgaccccattgaaagactccgactgcagtgcctggccaggggctctgctgggatcaaaggacttggcagagtgtttagaattatggatgacgataataatcgaacccttgattttaaagaatttatgaaagggttaaatgattatgctgtggtcatggaaaaagaagaggtggaagaacttttccggaggtttgataaagatggaaatggaacaatagacttcaatgaatttcttctcacattaagacctccaatgtccagagccagaaaagaggtaatcatgcaagcttttagaaagttagacaagactggagatggtgttataacaatcgaagaccttcgtgaagtatataatgcaaaacaccacccaaagtaccagaatggggaatggagtgaggaacaagtatttaggaaatttctggataactttgattcaccctatgacaaagatggattggtgacccctgaggagttcatgaactactatgcaggtgtgagcgcatccattgacactgatgtgtacttcatcatcatgatgagaaccgcctggaagctttaagcacatgacctggggaccaggccctgggacagccatgtggctccaaatgactaaatgtcagctcaaaaaccagaatcgtatttgatttcacactcatcctaatgtttttttctgtgtcaaaatattgcattttctggggccaaaaaacaggcagaaataaaagacattgagtagccaactgtgagtttgccttgcctaagactgtttcctttgttctaaaataggacttaaataaaatgagctctgtaaagc

SEQ ID NO: 29428 - DNA, 1011 bp, Homo sapiens
aacttgagaaaaggcagaaccagagtagagattgacagtgagctgagccaatcaggctgtgaatctgcagcagtgatcccaggtcctccaattaatactaagagagtggaccagggcccctgaggaagacagatggcagggacagcgcgccatgaccgagagatggcgatccaggccaagaaaaagctcaccacggccaccgaccccattgaaagactccgactgcagtgcctggccaggggctctgctgggatcaaaggacttggcagagtgtttagaattatggatgacgataataatcgaacccttgattttaaagaatttatgaaagggttaaatgattatgctgtggtcatggaaaaagaagaggtggaagaacttttccggaggtttgataaagatggaaatggaacaatagacttcaatgaatttcttctcacattaagacctccaatgtccagagccagaaaagaggtaatcatgcaagcttttagaaagttagacaagactggagatggtgttataacaatcgaagaccttcgtgaagtatataatgcaaaacaccacccaaagtaccagaatggggaatggagtgaggaacaagtatttaggaaatttctggataactttgattcaccctatgacaaagatggattggtgacccctgaggagttcatgaactactatgcaggtgtgagcgcatccattgacactgatgtgtacttcatcatcatgatgagaaccgcctggaagctttaagcacatgacctggggaccaggccctgggacagccatgtggctccaaatgactaaatgtcagctcaaaaaccagaatcgtatttgatttcacactcatcctaatgtttttttctgtgtcaaaatattgcattttctggggccaaaaaacaggcagaaataaaagacattgagtagccaactgtgagtttgccttgcctaagactgtttcctttgttctaaaataggacttaaataaaatgagctctgtaaagc

SEQ ID NO: 29429 - DNA, 976 bp, Homo sapiens
aacttgagaaaaggcagaaccagagtagagattgacagtgagctgagccaatcaggctgtgaatctgcagcagtgatcccaggtcctccaattaatactaagagagtggaccagggcccctgaggaagacagatggcagggacagcgcgccatgaccgagagatggcgatccaggccaagaaaaagctcaccacggccaccgaccccattgaaagactccgactgcagtgcctggccaggggctctgctgggatcaaaggacttggcagagtgtttagaattatggatgacgataataatcgaacccttgattttaaagaatttatgaaagggttaaatgattatgctgtggtcatggaaaaagaagaggtggaagaacttttccggaggtttgataaagatggaaatggaacaatagacttcaatgaatttcttctcacattaagacctccaatgtccagagccagaaaagaggtaatcatgcaagcttttagaaagttagacaagactggagatggtgttataacaatcgaagaccttcgtgaagtatataatgcaaaacaccacccaaagtaccagaatggggaatggagtgaggaacaagtatttaggaaatttctggataactttgattcaccctatgacaaagatggattggtgacccctgaggagttcatgaactactatgcaggtgtgagcgcatccattgacactgatgtgtacttcatcatcatgatgagaaccgcctggaagctttaagcacatgacctggggaccaggccctgggacagccatgtggctccaaatgactaaatgtcagctcaaaaaccagaatcgtatttgatttcacactcatcctaatgtttttttctgtgtcaaaatattgcattttctggggccaaaaaacaggcagaaataaagagcgatgcggccgtttgataaattgaaataaatagttagtaaaaacacgactaac

SEQ ID NO: 29430 - DNA, 676 bp, Homo sapiens
taaggtggcttgggagggaccagttttcctagatgcaggagacagcgtccatagtttcagttcgaagcaactggtggcaaaaggttagcatttaagatggcagggacagcgcgccatgaccgagagatggcgatccaggccaagaaaaagctcaccacggccaccgaccccattgaaagactccgactgcagtgcctggccaggggctctgctgggatcaaaggacttggcagagtgtttagaattatggatgacgataataatcgaacccttgattttaaagaatttatgaaagggttaaatgattatgctgtggtcatggaaaaagaagaggtggaagaacttttccggaggtttgataaagatggaaatggaacaatagacttcaatgaatttcttctcacattaagacctccaatgtccagagccagaaaagaggtaatcatgcaagcttttagaaagttagacaagactggagatggtgttataacaatcgaagaccttcgtgaagtatataatgcaaaacaccacccaaagtaccagaatggggaatggagtgaggaacaagtatttaggaaatttctggataactttgattcaccctatgacaaagatggattggtaagtaaaagagcctaatctaggggaaatttcttcaattcgaaattgtaaatgg

SEQ ID NO: 29431 - DNA, 973 bp, Homo sapiens
aacttgagaaaaggcagaaccagagtagagattgacagtgagctgagccaatcaggctgtgaatctgcagcagtgatcccaggtcctccaattaatactaagagagtggaccagggcccctgaggaagacagatggcagggacagcgcgccatgaccgagagatggcgatccaggccaagaaaaagctcaccacggccaccgaccccattgaaagactccgactgcagtgcctggccaggggctctgctgggatcaaaggacttggcagagtgtttagaattatggatgacgataataatcgaacccttgattttaaagaatttatgaaagggttaaatgattatgctgtggtcatggaaaaagaagaggtggaagaacttttccggaggtttgataaagatggaaatggaacaatagacttcaatgaatttcttctcacattaagacctccaatgtccagagccagaaaagaggtaatcatgcaagcttttagaaagttagacaagactggagatggtgttataacaatcgaagaccttcgtgaagtatataatgcaaaacaccacccaaagtaccagaatggggaatggagtgaggaacaagtatttaggaaatttctggataactttgattcaccctatgacaaagatggattggtgacccctgaggagttcatgaactactatgcaggtgtgagcgcatccattgacactgatgtgtacttcatcatcatgatgagaaccgcctggaagctttaagcacatgacctggggaccaggccctgggacagccatgtggctccaaatgactaaatgtcagctcaaaaaccagaatcgtatttgatttcacactcatcctaatgtttttttctgtgtcaaaatattgcattttctggggccaaaaaacaggcagaaataaatgagatgcgtccgaatttttatatataatatcaacggcgtcgatccgaaggcg

SEQ ID NO: 29432 - DNA, 548 bp, Homo sapiens
ctccctcatgttagattgttttaaagcagatcctagatgttatatccttttatccataaatattttattatgtatctctaaatgatactcttttaaaaaaacatagtatcattatcaaacctaaaaagttaacagtgattccttaatgtcatcaaatatgggatcaatattcaaatttctgcagttgtctcataattattttgtagctaatttaaatccagatctaaacaaggtctatacagtgcatttggttgatatgtctcttaagacttttaatttgtagcttttctgtcacccccttgaatttatttcttgaagaaaccaggttgttgatcctgtagaatttcttatgatagctaccatttactgagtgcttactctgctaggtattatgccaagggttgctggtaaatccacttaattctcataccaatccttagatgtattataatagacctttttctgatgttatatataagtaaattgaggtttgggaatatctaggtaacttagccgtagtcacatatctggattcagataggaggggg

SEQ ID NO: 29433 - DNA, 345 bp, Homo sapiens
tgtgcaaaaacataatgcatagaggggtagcattcatcagaataaggtcagaaaaatggaggactccagtgttttttgcgattgctttccgtgtttatgtgtgtgtgtgtgtatgggcgcacgcgcatgcatgcatgtgcacacttgtatctgtgtttctgacatatgggcaacaggtctactgcaggctggactccctctctgtaggctctagggacttctccataagaggatgacctacttgacctatttttgcaagtatcttttgccattttcctaccctctgcttccctactcccatcagacatgttaatggctcatatcatcttctcctttcatcagcca

SEQ ID NO: 29434 - DNA, 334 bp, Homo sapiens
cacatgcctggagttcaggagtgtaagaataggcaacctgaacaactagacacctcaaagagccaaggagttcagaatgccaaccattccataaaactagtccatggtggaaaaaaatcacaatagtgcttgcctctggagggaaaggattaactggatgatgtacaagaggattctctggggtattgaaaatgtgctctcaatatcttgttagggacgtggtacatgtggctgtatgcatttgtcaaaactcaccaaatggtccacttgagacctgtgtatatcattgtatgtaagtttaacctaaaaaaagacaaataaaaaagaacacttc

SEQ ID NO: 29435 - DNA, 365 bp, Homo sapiens
ggcaccctttgacggggctgcttcactattcagaacaacctcagagcatcccaatgtctgctgaataaaaaagtcatactggcggccaggcgcggtggctcatgcctgtaatcccagcactttgggaggccaaggcaggcagatcacaaggtcaggagatcgagaccatcctggctaacacggtgaaaccccgtctctactaaaaatacaaaaaattagtcaggtatggtggtgggcgcctgtagtcccagctactcaggaggctgaggcaggagaatggcgtgaacccgggaggcggagcttgcagtgagccgagactgagccactgcattccagcctgggcgacagagcgagactccgtctca

SEQ ID NO: 29436 - DNA, 383 bp, Homo sapiens
agagaacaaaaaccgtaggaaatttgtagaaagaggggtcaccaacagtgccaaatattaattgtggcgatatcaaataggatgaagcctgaaaaataggccaaagtctgactcctaggaggtgattaatagtccctcagagaattggtccattaaaatactgagggcataggcctagattgcagcaatttaacaagggcttgtggaagtggaggcagtaagagtagattcaacctttaacaaatgtgtcagaaaaaaatggaggaaaataaaaacatttggtttgtgtagggaaaagagtgatagtagcttcaggaaataagattggaaggaagatgttattttttttcaactgttcttgtttgcttttaggataaggcaat

SEQ ID NO: 29437 - DNA, 233 bp, Homo sapiens
cctagcaattcccagacccttttcttgcagggtgttagatttagggatccaactgggaaaaaaatatctgcaacaaatacggcaaatgactcataattttaattcagtaagggctagaaagccaacaccttaacaacaggtgaaaggcggaacactgtcacctttcacaacaggtgaatggccaaaaatgctgaaaaaatgttctgtctcactgatagtgaaaaagaaatgca

SEQ ID NO: 29438 - DNA, 447 bp, Homo sapiens
ctggacacacacacctggacgcacacacctggacacacatacctagacacaccagaatcaaaatgttcaagacaaagacaaggagaaaccttgaaaggaacagaataaaatggctcaccacaaagaagggaacccagtaggattaacacttgatctgtctgtaaaaggatggaggccagaaggcagtgggataacatattcaaagtgctcagaggaagaaactattaatccacaatcctatatccagcaaggccatctgtcagacatgaaggtgaaataaatttcaagataagcaaaaacggagagaatttcttgctagctgaactgctttatgagatattaaaggaattcttcaggctgaaaacaagtgaactcatacgattttcaaatccacacaaaaaagcaaagggcagtagtaaaggtaattatgtactttttaaaaaaggt

SEQ ID NO: 29439 - DNA, 413 bp, Homo sapiens
agctactcagaaaactgaagtgggagaattgcatgagtctaggaggcttgagcctgggaggcagaggttgcagtgagccatgatcatgctgctacactccagcctgggcaacagagcaagaccctgtctcaaaaaaaaaagaaatgtgaatgaggctgggcatggtggtgtacacctgtagtcccagctactcagaaggctgaggcaggaggatcccttgagcccaggagtttgagtccagcttggacaccatggtgagaccccatctcctaaaaaaaatcaatttaaaaaaaagggttcatgggtgtaatttcaacactttggaaggctgaggcaagaggattgcttgaagccaggcaagaggattgcttgaagccaggagttcaagacccccgtctcctcgttattaaaat

SEQ ID NO: 29440 - DNA, 377 bp, Homo sapiens
cgaacttacaccaacccttctcagacttttccaaaaaagtgaagaggaagaaaacttccaaactcattttatgatgccagcattaccctgataccaaagccagacactactggaaaagaaaactatggaacaatatcccttatgaacactgatgcaaaaattctcaacagaagactagcaaactgaattctacagcatagtaaaaggattatacaccatgacctagtagaatttattcctggaatgcaagaataattcaacatatgaagaaaaaacaatgtactataccacatcaacagaatgaagggaaaaaaatccatgatcatctccattgatgcataaaaatcatactgacaaaattctttttttcatgataa

SEQ ID NO: 29441 - DNA, 412 bp, Homo sapiens
ggccttagagcctgcccctccaccccctcagatcaggcatagccatagtcaagcccagcaggtttcctcaggagctgtctggggtgttgatggtggatgacgctgctgaacaagtttggtgactgttctaagcacaactggcttgatactgttcccacggcctgtccacctcccacccccaaccctccaccagagtaggtaggatgtagggagggtgcgtgcctcctttgctctaggcactgagggaccaagctagccgtgcacagccccatacacttcaggggactaaaggaaagagctgagccaaggaaaatcagctgagcccagggctgggggctgcttgtctgctatcctgtaccttttttttttttaaccaaaataaagattcccctcttcttgccataaaattggc

SEQ ID NO: 29442 - DNA, 313 bp, Homo sapiens
agataaggcagaaaaataaattttaataagatacacagaataatcttgtatttgaagaatgctatgaaaaaagatagtttggagcagtagttagtatttggctcatataatgtgttaggtactattctaagccattaaacatttgtatgcttaatacctaagagtttaaagtgaagaaatcaaagattcattgaaaaagaaaaattaaatttaaaaaaaattgtatttttaattgaaaaataatagttgtacatatctgtctacagtgtaatattttgatatatgtttatgttgtaaaatgattaaatcaagt

SEQ ID NO: 29443 - DNA, 1612 bp, Homo sapiens
aaaacaggtacaggaaatcccatgtggatgcttgcttccaggatttcctgccatgattccagaatcccacagctccaacatgattgcaaaagactccctgctcatttttcctcagcatgcacagcgctgtcctgtctcagttgcaactcgacagagccgcatttactccagaacccaatccacacacctgctcatcctgccccgagaggagtgcctgaagccaatagcagggaactagagcagacttgggtggatcttcattggatattaggtatcttgccctagataggcagcagtggccttacagatgctgacagatgatctgattagatgcacagttgctgggtggcgtctggggccagtctattggcagttctgggagtgggaactatttgggctctgcaaagatggtttcacctttaagaagggcagtatggggaggtgaagatggggcccaaaggatagaacatagtcaaagaagcagggccacaatgcccctttaattcccaagccctagttgggcagtgcttggtgacacatcccattacctcaccttagatcaatgtctactgagccatcattagctctgcttcctcacttcttcacagtatctgatggcccatcacatgctgctcaacatcttagaccaatgtctgctcacccattacctcccttcacctcatccagcactgtatctgaagcttcactattcttccttcagttttggatattttgtgatacaacattatccccaacttaggacaatgtcagctgactctcaggagggtgcctggagatcacctcttccttcctaacataccctagaacaaggtctggtccccttcattattcccattttaccttactcctaagtgtatcactcctcatgaattccaggaaatatggaggaaaacacatttcactgtacatgactttcaataatttctcctttatatttattgtaacgtgatattttagtgctgacatatatatgtatatgtatgcccatttatataaaagactagtttttagagaaattttaggttcacagcaaaatggggcagaaggtacagagatttcccatatatcccctaccctcacatatacacagcctcccccatcatcaacatcccccttcagagtggtacatttgttacaattgatgaaactacattgacactatcggccaaagtccatggtttaattagggttcagtcttgatgtgcattctgtgggttgagacaaatgaataatgacatgtatgcattattacagaaggataaagagccgtttcactgtcccaataatcctctgtgtttcgcctactcctctaaactcctggctattttcttttgtctccataattttgcctctgaaccataaagtatgcagccttttcagattgatttgtttcacttagtaatgtggatttaagtttcttccatgtcttttcgtagcttgctagctcttttttttttttttttctcattgaataatatgctattgtctggaagtaccatgacttatttatccattcacctactgaaggacaccttaattgcttccaagttttgttgattatgaataaagatgctataaacacctgtgtgca

SEQ ID NO: 29444 - DNA, 770 bp, Homo sapiens
  misc_feature (32)..(32): n is a, c, g, or t
  misc_feature (34)..(35): n is a, c, g, or t
  misc_feature (37)..(37): n is a, c, g, or t
  misc_feature (64)..(64): n is a, c, g, or t
  misc_feature (115)..(115): n is a, c, g, or t
gtcgatagtaaaagcatctaggatgtggagcnanngntgaaatctgctagaaagttagggggtncttatttgcattccagaatcttgactttctgattggtgattcaaagctgtngtgttcctggcctggctagacccaggacatatatatgtatatgtatgcccatttatataaaagactagtttttagagaaattttaggttcacagcaaaatggggcagaaggtacagagatttcccatatatcccctaccctcacatatacacagcctcccccatcatcaacatcccccttcagagtggtacatttgttacaattgatgaaactacattgacactatcggccaaagtccatggtttaattagggttcagtcttgatgtgcattctgtgggttgagacaaatgaataatgacatgtatgcattattacagaaggataaagagccgtttcactgtcccaataatcctctgtgtttcgcctactcctctaaactcctggctattttcttttgtctccataattttgcctctgaaccataaagtatgcagccttttcagattgatttgtttcacttagtaatgtggatttaagtttcttccatgtcttttcgtagcttgctagctcttttttttttttttttctcattgaataatatgctattgtctggaagtaccatgacttatttatccattcacctactgaaggacaccttaattgcttccaagttttgttgattatgaataaagatgctataaacacctgtgtgca

SEQ ID NO: 29445 - DNA, 784 bp, Homo sapiens
tttgtagagctggggtctcatgttgtccagactggtctccaactcctgccttagcctcccaaagctaattacaggtgtgagatgctgtgcctggcctgattttcttaatagtatttcttttctctagctaactctaagaatacagtatataatacatataacataaaatacatgttaatcgactatgttctcagtaaggcttctggtcaatagtaggctattagtaaagtttttggagaatcaaaaggtatatgcagattttcgactatgcaggggttggcgccccaactcctgtgttgttcaagggttaactgcacactcatttgggagctgcaggcaaagaacagatttgagggaatgccagatgatgaaggcagatcagatggccatacccattgtccatcagagagatgagagtagctttcaccacagtgatggtgctagagatgggaagaagtgatggattcaagaactattttgaagctaagtcaacaggccttggatgatggccatggagggagaaggagcagcttaggacaattcccagcttgagcaactggatgactggtgatgccattcactgaggctctcaagatgagggagtttttggtgagtagaacagggagggagggtagcctggctgagtttgaagggtttttcagcctccttcaaaggaggagtcaagttggcagttagatatgcaagctggagcttagaggaagatgtgagaactgtccacacataggtggtgatgggtaccccggtatgggtgagatcactagag

SEQ ID NO: 29446 - DNA, 369 bp, Homo sapiens
ttttttgcgggggggaggggtggagacagggttttgctctgctgcacaggctgcagtgctatgatgtgaacggggcttactgcagccttgccctcctgagctcaagggattcttctacctcagcctcctgagtagctgggactgcagtctcatcacactcccagctaattttttactgttttgcagagatacggtctcactatgttgcccaggctggtctccacactactcaagcaatcctcccgccgcctcagcctctcaaagtgctgggattacagtcatgagccaccgtgcccagccccactgacatcttttgaaatttaaaaaactcctgtgtgggagaatgaaaatctggaacttgacgtgaag

SEQ ID NO: 29447 - DNA, 804 bp, Homo sapiens
ggcatgaatagcctcaaaatatagttaatagtaaatagaaataaccagaaaatgatgcattttgagtacttattatctttgtttttggtataatttatttaattgtaaatttatgtaatttaatttttaatactggcactaatgggcctgcaaaattcctaaaaatttaacaactagttcttgtgggctagtaggggctggcttctgcacagatcatatagatcatctggtgtagtgattcccaaccttgctttacactgaaatacctcaaagaacttagagcccacagttttagtagatccacattagggcccaggaatctgaactaaaaacgtttttattgaagtatatcttatatttaaaaaaaaattatcagtatataacaaaaagttttcctaaattgaacacactcacataaccagcacctaaatacagaaacagaacattaccagcacccagaagcccttctcatgcccctatccagccactacccaatcaatgtaacccttatcttgacttctaataccataaattagttttgcctgcttttggactttatataaatgaaatcatatcctatgtattcttttgtgcctggcttcaatattatgtttgtgagattcatccataatgtatgcagcagtagttcattcatttttagtagtgtataatattccattgtataaatagtcctcaatttattatttttaatccattttactgttgatgggttgtttccagttgttggctgttttggatagtgctgccaagaacattcttgtacagatagcagtatgcaaaaca

SEQ ID NO: 29448 - DNA, 743 bp, Homo sapiens
gacataccctgacgatttctcactgacaggcaattttctaggactaaagaggaaaagatagcattgcatcctcgcatctgcagtgcattacaggggtgcatttagacattctttctcccagtagattgtgagctccgtgatggtgaagaccatataccatgtgtctcttattcaattctcaacacgcatttgttgagcacctactatcttcttggcacccagtaggggttgagcaacacaatagaagtgctctgtaaatatttatggttggaagataggtagatgccccaggagaaaagacatgggagtttctaggcagggccttgggttttaaattgccaaaaaattttctctcctctgttgatttgaatatggtccggtccctagtaaaagcttgatattagcctagtgatgtggtggaaagaactttggattaaaattaggaaaaccaggttctagtaccaactgtgctgagaacttacataaagctggccaagtggcttccctagtcttggcctcagtttacctactgtaaatttttaaatgattgggttaagtggtcctaactcttaacttaagagccttacctgcacttctgttgtgtgattttttgaggtgggtgactgaattccttctaattgtgaactctacctgagccaaactcttacctttgtcgtcatccttatggcaaccaacactagtcccagaccatgctgaaaaatatctgcctgtttgacttgcac

SEQ ID NO: 29449 - DNA, 1662 bp, Homo sapiens
acgctcccctttcacctcgcggccgtaggctaacgtggaagtcggaccagccggccggcggaagaacctagagcgcgctgcctggcgagtcaggcgcgcggggcggcgttggtggtcttcgcggcgcaactcggcctttcctgggagggagtgatggggcgcaccggggccggggagcgggcgccagtgtagcccgcgcggcgcctggcccggagcgcggcggctgcggcggcggcggcggcgggcgctggaggcctgtgagagccgcagcccggagcgcccggcttcccacgccatggcccccatgggcatccgcctttccccactgggggtggcagtgttttgcctgctggggctcggcgtgctctaccacctctactcgggcttcttggccggccgcttcagcctcttcggcctgggcggcgagcctggcggcggcgcggcggggcccgcggccgcggccgatgggggcaccgtggacttgcgcgagatgctggctgtgtcagtgctggccgcagtccgcggcggcgacgaggtgaggcgcgtccgcgagagcaacgtcctccacgagaagtccaaggggaagacgcgcgagggagccgaggacaagatgaccagcggcgacgtgctgtccaaccgcaagatgttctacctgctcaagaccgccttccccagcgtccagattaatactgaggaacacgtggatgcagctgatcaggaggttatcttgtgggatcataagattcctgaggatatcctaaaggaagtaactactcctaaagaggtaccagcagaaagtgttactgtctggattgacccacttgatgctacacaggaatatacagaggatcttcgaaagtacgtcactactatggtgtgtgtggctgtaaatggtaaacccatgctaggagttatacataagccattttccgaatatacagcttgggcaatggtagatggtggttcaaatgtgaaagcccgctcttcctacaatgagaagaccccaaggatcgttgtgtctcgttcccattcagggatggtcaaacaggtcgctcttcagacttttggaaaccagactacaattatcccagctggtggtgctggttataaagttttagcacttttggatgtgcctgataagagtcaagaaaaagctgatttatacatccatgtgacatacatcaaaaagtgggatatatgtgctggtaatgccatcttaaaagccctaggggggcatatgactaccctgagtggtgaagaaatcagttacactggttcagacggcattgaagggggactccttgctagcatcagaatgaaccaccaggccctggtcagaaaactcccagatctagaaaagacaggacataaatgagcataactgattacagggtacagttcttcacagctgaaatggttagcctgagatgctggaagcttcaaaggattggtggagactatgcatggttaaggccatcccgaactttttaaagtatttatgaagcatcagagacttattttccctgtaatagaatgcaaaatcagggaaaatgggttgctttgtgtctcaagtattgtctttatttttgagactattttcatacagttgtcatacacaaggcgcatatatatatttgtgaattaaaatctgtagctgagtct

SEQ ID NO: 29450 - DNA, 7177 bp, Homo sapiens
acgctcccctttcacctcgcggccgtaggctaacgtggaagtcggaccagccggccggcggaagaacctagagcgcgctgcctggcgagtcaggcgcgcggggcggcgttggtggtcttcgcggcgcaactcggcctttcctgggagggagtgatggggcgcaccggggccggggagcgggcgccagtgtagcccgcgcggcgcctggcccggagcgcggcggctgcggcggcggcggcggcgggcgctggaggcctgtgagagccgcagcccggagcgcccggcttcccacgccatggcccccatgggcatccgcctttccccactgggggtggcagtgttttgcctgctggggctcggcgtgctctaccacctctactcgggcttcttggccggccgcttcagcctcttcggcctgggcggcgagcctggcggcggcgcggcggggcccgcggccgcggccgatgggggcaccgtggacttgcgcgagatgctggctgtgtcagtgctggccgcagtccgcggcggcgacgaggtgaggcgcgtccgcgagagcaacgtcctccacgagaagtccaaggggaagacgcgcgagggagccgaggacaagatgaccagcggcgacgtgctgtccaaccgcaagatgttctacctgctcaagaccgccttccccagcgtccagattaatactgaggaacacgtggatgcagctgatcaggaggttatcttgtgggatcataagattcctgaggatatcctaaaggaagtaactactcctaaagaggtaccagcagaaagtgttactgtctggattgacccacttgatgctacacaggaatatacagaggatcttcgaaagtacgtcactactatggtgtgtgtggctgtaaatggtaaacccatgctaggagttatacataagccattttccgaatatacagcttgggcaatggtagatggtggttcaaatgtgaaagcccgctcttcctacaatgagaagaccccaaggatcgttgtgtctcgttcccattcagggatggtcaaacaggtcgctcttcagacttttggaaaccagactacaattatcccagctggtggtgctggttataaagttttagcacttttggatgtgcctgataagagtcaagaaaaagctgatttatacatccatgtgacatacatcaaaaagtgggatatatgtgctggtaatgccatcttaaaagccctaggggggcatatgactaccctgagtggtgaagaaatcagttacactggttcagacggcattgaagggggactccttgctagcatcagaatgaaccaccaggccctggtcagaaaactcccagatctagaaaagacaggacataaatgagcataactgattacagggtacagttcttcacagctgaaatggttagcctgagatgctggaagcttcaaaggattggtggagactatgcatggttaaggccatcccgaactttttaaagtatttatgaagcatcagagacttattttccctgtaatagaatgcaaaatcagggaaaatgggttgctttgtgtctcaagtattgtctttatttttgagactattttcatacagttgtcatacacaaggcgcatatatatatttgtgaattaaaatctgtagctgagtctacattgttatgagtcaccattttcacacaacatcatgaatcttcactgttagtactttcatatagaattcggttgaaggaaagattgatttttgtgtagatgtttaatataactttacaactatatctcattgaaaataaagtcattggggatttttacctctaatttggatggaaagcacaagaagccacacattcattaatatgcaacaaatgttgtatttatgttactgaatatttctatggattaaaatagaaaaagtttaattgattttttcttttaaattttaataacaggttcaccagctggtagaaaatagagacacatgatgatttgcattgtaataatttctgtgtgtatgtgtgtgtgttgttttgtttttataaagaaaagtgtgtttgtacccatgagttcagcatttctgccatcttgctattttcattttccctgtggaagatgcatggttgcatccttttccttctgaccaacacttagtctttaactttgtaaggttcggtttaaggtttcagggttagcactatagttttggttcattttctcattaacgataaaatatgctgtaaggcactataagaatataaatgattctattacaattgaaagttacttgacattacatgaattgaactgcctttcattatcttcagacactttgttttagtatttttttttaatttgctaggtttgtatatagaagatcctttcattatcaagaatgagtatggttgcttttgccatggttgcttttactattaataaatgtatctagcctacccaaactctgtagtaacttttgagattctcttaatttcccctcagattaaaatagagaaggttgaaggtactttttgatgaaatttttttctagtctggttagaaaaaaaaagttgtgacatattcattgtgttaccgtaactagaaccttgctttgtgaactgtctttcattgggatgtatggtttctctcaatgtgaaatctggaaacttcatgtaaactacccatgccgttatttcatgtgactccagtgcccttgtattccataacatgctgatgagagggatttctcacggtttctttctttgctaaattttttaaccataaagcagcttaccctttattttcccatcttggaagtaaaattgaccaaagaatgtacgttctagcctggtggaatgtgcatactttaggtttgtatgttacattgtccaaagccctttactttcttattagtaaactgaatctaatatgacacaaatgttttcacccaatctcttgcaactggtcaaattcgagaaggtgttgggccttagcagtaggccttttcagtgaaaattcattcaaagttttggtaggtggaacacttgatatttaaataggacttgaaaattttgaaaagagtatcagagacctcatttttttcctttgcaataagctgaagaaactttctttttcaggagagatggcaaaggtatatgctgttgccagagtcctgtggtataagcatctgtttttattatagtatgtcaaagttagggaaatgggactggcaagtaaaaaatggaatttaatttcaatgttttatgggaactctgatttaatgggaagcaaactagttcatattagcaggaattattttattttttcgagacagagtttcactctcgttggccaggctggagtgcaatggcgtgatctcggctcaccgcaacctctgcttcccgggttcaagcgattctcctgcctcagcctcccaagtagctgggattacaggcatacaccaccacacccagctaatttttttgtatttttgttagagacagggtttctccatgttggtcaggctggtctcgaactcccgacctcaggtgatccgcccacctcggcctcccaaagtgatgattttatttttatttttaattgtattaatctgcatctagataatgactttgtgaagggtgtgtgttgtgtgcaaaacttaaggtattggttgagagttaaatacattatttttataatatgttgggtatagtctagttactaatgattttttttaagtacttttataaaaagttcatttttaaaattgtttgtttttaaaagccaatatacgttgcagaattaggaacagtatttatatttatttacacaagacattgtgccatagcatcctagtaaaacaccttcatgaatgagtaatgttatctcccagaattacattaaaattatttctaaaaagtagcaaagtcattaccttttgcttttaatgacccacacctcaccagctcctggtcttttcttcactgttgcccttattttgaggcaatttttcttaaaatatgacttttatgcaccacatttagtagaggcagtgacatcagtgatctcagtacccatcagctgtccccctcctctgcccttcttcatctcttctaccttgtgaccatttcccttaccggttcatgttctcctttatctctgcttttctttcttagccaggatacttccctcacaactctcactcccaaattcttttagatatacatttttctggatattggctgctgaaatctgaagctctggtaaagttcctagtatcagagatcaatcctggaggaggcctagttcactattagattacaaagactcctcacaaagtaaaggaaaatcaccttcaaaaccacaaccctttatgttgtcaagtctaatatgagtgtttttacgaagtatttctttctacccattgttcaagaatgtaaatgtgttttcctacttgtatccccagttcagttgaatttacaaggacctacaagatggtcatgtttgtcttggtatgtgctaccccaattttagtgtttctttctttattttaaatcagtaattattcagttgattgtttatactatataatgaagtaacaaaaacattttggtttgtatgttttaagtaacagttgtgcaaattcctcttgtttgttaggtgctccctttgaatattttgtgaactgtgtcagagggagaggggtggtggctaggaagagggtcagaaagaagctagagggaggtcaggagaagggtaacagggaggatgcaaagcagacatctaccctggtcaccccaggatcaggatatctgtccttgtttcatgttgaattcaaaaattggatctcacttaggctttgaaggtgacagccatctctgatagctgagcataagtaaagaaaggtggagtgccgatgcagaaaggaaaatattcagctttcctctcttagatcgcactttgaagatggccttttggagacaatctgacaggttaaaacaggaactgttggaattattctagctgtaactacctattggctatgtgttgattgatcctagaaagaaaaaataatttttcattttagatcttgattgaatttaagatgtatttatatgcctacaaaaggtctgtcttgtaactgttgtataaaataaacctaatctatggtttcatttttaatctaaaaaaagttgtgccttaacaatagggcattgtatgttaataagggaaaacaacctttttagtagatgggggaaaataggaactttttgccattaaaacttaagttcttttgatgtttttaatattatagttgggggagattcattaaaattaaattgaaataaaattatttttgcataacctagcatttacaactaaagtatgttttttataagaactggcatcttgatgtatataggtctgaaataatatttcatcttttgatttttaattttaataatattagaccaggatagatcacagttttacaaatcttagttttaaataaattatttcagtgtgctgttagtcctctacagtcattttggtttaaaaagtgactatttatttatggtagcatatcaataatttattaatgttaaaaaatactgtgtatgacattacaaaccagaacagttcctgggggagaggattctaattgattggcagttctgagagggcaagaagaatggaactttatacttcaaaaggaggttttggttttaccaggtactgcttatgtaaatcgtttatttttatttcatcaaagcctggcaagtatatgcattccaatttaccattggcaaagctttatttatttttaaggttggatgttgaattaattttgtgggaaaatgagatttgtaagtagttttctttctagataagataacataaaccaaactttcagaagttaaggatgatgaataatattgaaatgacttgttatatattgtaagggttcccttaagtatcataattaacaatttgtggaaattgaaaaagcataaactgtgttatttgattagtaatatgttcccttaaaattcattttgaggtgtatgttatacacacagtaaatttttgttcaggaatgacttgctcattctgtgtttttaaaaataggaaataaggcatagtgagtcatcattacatcaattaaccaaaaaatatttcatcccctccgtcactgaaattatctacttcagccacctttcttattctcgtgttaggagggcacgtttatggactttttaatttccatgtgccatattgtccactaccggcagtagccaaagctagctgtttcagtcccacagaagagacagtgctctgccatgatgacagggcactgctagggctggtttttcttgtttttcccttttggcagtgtggacttcaggaactagatgtatatgcacaagggattgagtttacactaaaactaggaaatggagttttcaatctatgttcttgcctcttcatacttttatttattttttgtcatcctgccttatactgggctaacaatgagataaaataaaaatacctttgaatactcttttccctttcatgcatttaaagccatggaggaactagaccattagctgttgccgtcacatgcttagacaccagtttacttagcgtgttatgaccttcctcacccatactaccaaatttaaatgggtcccgacttcaccctctggaaggaagtaaactcttctctccccatggtttcagagcagtttttacctgcaagcaccatctctgtatgtgctcttactagattatacagttcttgagagggattgcatcttggtgtttttgtatttccacctcacccccagcacatagcccagtctcttgcacaaattaagtacttaatgtgtgttgagctaaattgaataaaggattattagcattagcatattttgtgccttggttgtataagctggttgtttgttttgttacctttgcaaatatttatgattatcacccccccacatactaaattgtttttaaaagttttgcctttccttcagatactaccccaggcaatttgctgtagataatgtgattgcttccaatgacataattatcccaaactctctgccccggatatactttgccaaacgaaatttgaattctctgaataaattggtcatgtctaaaa

SEQ ID NO: 29451 - DNA, 7122 bp, Homo sapiens
acgctcccctttcacctcgcggccgtaggctaacgtggaagtcggaccagccggccggcggaagaacctagagcgcgctgcctggcgagtcaggcgcgcggggcggcgttggtggtcttcgcggcgcaactcggcctttcctgggagggagtgatggggcgcaccggggccggggagcgggcgccagtgtagcccgcgcggcgcctggcccggagcgcggcggctgcggcggcggcggcggcgggcgctggaggcctgtgagagccgcagcccggagcgcccggcttcccacgccatggcccccatgggcatccgcctttccccactgggggtggcagtgttttgcctgctggggctcggcgtgctctaccacctctactcgggcttcttggccggccgcttcagcctcttcggcctgggcggcgagcctggcggcggcgcggcggggcccgcggccgcggccgatgggggcaccgtggacttgcgcgagatgctggctgtgtcagtgctggccgcagtccgcggcggcgacgaggtgaggcgcgtccgcgagagcaacgtcctccacgagaagtccaaggggaagacgcgcgagggagccgaggacaagatgaccagcggcgacgtgctgtccaaccgcaagatgttctacctgctcaagaccgccttccccagcgtccagattaatactgaggaacacgtggatgcagctgatcaggaggttatcttgtgggatcataagattcctgaggatatcctaaaggaagtaactactcctaaagaggtaccagcagaaagtgttactgtctggattgacccacttgatgctacacaggaatatacagaggatcttcgaaagtacgtcactactatggtgtgtgtggctgtaaatggtaaacccatgctaggagttatacataagccattttccgaatatacagcttgggcaatggtagatggtggttcaaatgtgaaagcccgctcttcctacaatgagaagaccccaaggatcgttgtgtctcgttcccattcagggatggtcaaacaggtcgctcttcagacttttggaaaccagactacaattatcccagctggtggtgctggttataaagttttagcacttttggatgtgcctgataagagtcaagaaaaagctgatttatacatccatgtgacatacatcaaaaagtgggatatatgtgctggtaatgccatcttaaaagccctaggggggcatatgactaccctgagtggtgaagaaatcagttacactggttcagacggcattgaagggggactccttgctagcatcagaatgaaccaccaggccctggtcagaaaactcccagatctagaaaagacaggacataaatgagcataactgattacagggtacagttcttcacagctgaaatggttagcctgagatgctggaagcttcaaaggattggtggagactatgcatggttaaggccatcccgaactttttaaagtatttatgaagcatcagagacttattttccctgtaatagaatgcaaaatcagggaaaatgggttgctttgtgtctcaagtattgtctttatttttgagactattttcatacagttgtcatacacaaggcgcatatatatatttgtgaattaaaatctgtagctgagtctacattgttatgagtcaccattttcacacaacatcatgaatcttcactgttagtactttcatatagaattcggttgaaggaaagattgatttttgtgtagatgtttaatataactttacaactatatctcattgaaaataaagtcattggggatttttacctctaatttggatggaaagcacaagaagccacacattcattaatatgcaacaaatgttgtatttatgttactgaatatttctatggattaaaatagaaaaagtttaattgattttttcttttaaattttaataacaggttcaccagctggtagaaaatagagacacatgatgatttgcattgtaataatttctgtgtgtatgtgtgtgtgttgttttgtttttataaagaaaagtgtgtttgtacccatgagttcagcatttctgccatcttgctattttcattttccctgtggaagatgcatggttgcatccttttccttctgaccaacacttagtctttaactttgtaaggttcggtttaaggtttcagggttagcactatagttttggttcattttctcattaacgataaaatatgctgtaaggcactataagaatataaatgattctattacaattgaaagttacttgacattacatgaattgaactgcctttcattatcttcagacactttgttttagtatttttttttaatttgctaggtttgtatatagaagatcctttcattatcaagaatgagtatggttgcttttgccatggttgcttttactattaataaatgtatctagcctacccaaactctgtagtaacttttgagattctcttaatttcccctcagattaaaatagagaaggttgaaggtactttttgatgaaatttttttctagtctggttagaaaaaaaaagttgtgacatattcattgtgttaccgtaactagaaccttgctttgtgaactgtctttcattgggatgtatggtttctctcaatgtgaaatctggaaacttcatgtaaactacccatgccgttatttcatgtgactccagtgcccttgtattccataacatgctgatgagagggatttctcacggtttctttctttgctaaattttttaaccataaagcagcttaccctttattttcccatcttggaagtaaaattgaccaaagaatgtacgttctagcctggtggaatgtgcatactttaggtttgtatgttacattgtccaaagccctttactttcttattagtaaactgaatctaatatgacacaaatgttttcacccaatctcttgcaactggtcaaattcgagaaggtgttgggccttagcagtaggccttttcagtgaaaattcattcaaagttttggtaggtggaacacttgatatttaaataggacttgaaaattttgaaaagagtatcagagacctcatttttttcctttgcaataagctgaagaaactttctttttcaggagagatggcaaaggtatatgctgttgccagagtcctgtggtataagcatctgtttttattatagtatgtcaaagttagggaaatgggactggcaacaaactagttcatattagcaggaattattttattttttcgagacagagtttcactctcgttggccaggctggagtgcaatggcgtgatctcggctcaccgcaacctctgcttcccgggttcaagcgattctcctgcctcagcctcccaagtagctgggattacaggcatacaccaccacacccagctaatttttttgtatttttgttagagacagggtttctccatgttggtcaggctggtctcgaactcccgacctcaggtgatccgcccacctcggcctcccaaagtgatgattttatttttatttttaattgtattaatctgcatctagataatgactttgtgaagggtgtgtgttgtgtgcaaaacttaaggtattggttgagagttaaatacattatttttataatatgttgggtatagtctagttactaatgattttttttaagtacttttataaaaagttcatttttaaaattgtttgtttttaaaagccaatatacgttgcagaattaggaacagtatttatatttatttacacaagacattgtgccatagcatcctagtaaaacaccttcatgaatgagtaatgttatctcccagaattacattaaaattatttctaaaaagtagcaaagtcattaccttttgcttttaatgacccacacctcaccagctcctggtcttttcttcactgttgcccttattttgaggcaatttttcttaaaatatgacttttatgcaccacatttagtagaggcagtgacatcagtgatctcagtacccatcagctgtccccctcctctgcccttcttcatctcttctaccttgtgaccatttcccttaccggttcatgttctcctttatctctgcttttctttcttagccaggatacttccctcacaactctcactcccaaattcttttagatatacatttttctggatattggctgctgaaatctgaagctctggtaaagttcctagtatcagagatcaatcctggaggaggcctagttcactattagattacaaagactcctcacaaagtaaaggaaaatcaccttcaaaaccacaaccctttatgttgtcaagtctaatatgagtgtttttacgaagtatttctttctacccattgttcaagaatgtaaatgtgttttcctacttgtatccccagttcagttgaatttacaaggacctacaagatggtcatgtttgtcttggtatgtgctaccccaattttagtgtttctttctttattttaaatcagtaattattcagttgattgtttatactatataatgaagtaacaaaaacattttggtttgtatgttttaagtaacagttgtgcaaattcctcttgtttgttaggtgctccctttgaatattttgtgaactgtgtcagagggagaggggtggtggctaggaagagggtcagaaagaagctagagggaggtcaggagaagggtaacagggaggatgcaaagcagacatctaccctggtcaccccaggatcaggatatctgtccttgtttcatgttgaattcaaaaattggatctcacttaggctttgaaggtgacagccatctctgatagctgagcataagtaaagaaaggtggagtgccgatgcagaaaggaaaatattcagctttcctctcttagatcgcactttgaagatggccttttggagacaatctgacaggttaaaacaggaactgttggaattattctagctgtaactacctattggctatgtgttgattgatcctagaaagaaaaaataatttttcattttagatcttgattgaatttaagatgtatttatatgcctacaaaaggtctgtcttgtaactgttgtataaaataaacctaatctatggtttcatttttaatctaaaaaaagttgtgccttaacaatagggcattgtatgttaataagggaaaacaacctttttagtagatgggggaaaataggaactttttgccattaaaacttaagttcttttgatgtttttaatattatagttgggggagattcattaaaattaaattgaaataaaattatttttgcataacctagcatttacaactaaagtatgttttttataagaactggcatcttgatgtatataggtctgaaataatatttcatcttttgatttttaattttaataatattagaccaggatagatcacagttttacaaatcttagttttaaataaattatttcagtgtgctgttagtcctctacagtcattttggtttaaaaagtgactatttatttatggtagcatatcaataatttattaatgttaaaaaatactgtgtatgacattacaaaccagaacagttcctgggggagaggattctaattgattggcagttctgagagggcaagaagaatggaactttatacttcaaaaggaggttttggttttaccaggtactgcttatgtaaatcgtttatttttatttcatcaaagcctggcaagtatatgcattccaatttaccattggcaaagctttatttatttttaaggttggatgttgaattaattttgtgggaaaatgagatttgtaagtagttttctttctagataagataacataaaccaaactttcagaagttaaggatgatgaataatattgaaatgacttgttatatattgtaagggttcccttaagtatcataattaacaatttgtggaaattgaaaaagcataaactgtgttatttgattagtaatatgttcccttaaaattcattttgaggtgtatgttatacacacagtaaatttttgttcaggaatgacttgctcattctgtgtttttaaaaataggaaataaggcatagtgagtcatcattacatcaattaaccaaaaaatatttcatcccctccgtcactgaaattatctacttcagccacctttcttattctcgtgttaggagggcacgtttatggactttttaatttccatgtgccatattgtccactaccggcagtagccaaagctagctgtttcagtcccacagaagagacagtgctctgccatgatgacagggcactgctagggctggtttttcttgtttttcccttttggcagtgtggacttcaggaactagatgtatatgcacaagggattgagtttacactaaaactaggaaatggagttttcaatctatgttcttgcctcttcatacttttatttattttttgtcatcctgccttatactgggctaacaatgagataaaataaaaatacctttgaatactcttttccctttcatgcatttaaagccatggaggaactagaccattagctgttgccgtcacatgcttagacaccagtttacttagcgtgttatgaccttcctcacccatactaccaaatttaaatgggtcccgacttcaccctctggaaggaagtaaactcttctctccccatggtttcagagcagtttttacctgcaagcaccatctctgtatgtgctcttactagattatacagttcttgagagggattgcatcttggtgtttttgtatttccacctcacccccagcacatagcccagtctcttgcacaaattaagtacttaatgtgtgttgagctaaattgaataaaggattattagcattagcatattttgtgccttggttgtataagctggttgtttgttttgttacctttgcaaatatttatgattatcacccccccacatactaaattgtttttaaaagttttgcctttccttcagatactaccccaggcaatttgctgtagataatgtgattgcttccaatgacataattatcccaaactctctgccccggatatactttgccaaacgaaatttgaattctctgaataaattggtcatgtctaaaa

SEQ ID NO: 29452 - DNA, 7116 bp, Homo sapiens
acgctcccctttcacctcgcggccgtaggctaacgtggaagtcggaccagccggccggcggaagaacctagagcgcgctgcctggcgagtcaggcgcgcggggcggcgttggtggtcttcgcggcgcaactcggcctttcctgggagggagtgatggggcgcaccggggccggggagcgggcgccagtgtagcccgcgcggcgcctggcccggagccgcccggcttcccacgccatggcccccatgggcatccgcctttccccactgggggtggcagtgttttgcctgctggggctcggcgtgctctaccacctctactcgggcttcttggccggccgcttcagcctcttcggcctgggcggcgagcctggcggcggcgcggcggggcccgcggccgcggccgatgggggcaccgtggacttgcgcgagatgctggctgtgtcagtgctggccgcagtccgcggcggcgacgaggtgaggcgcgtccgcgagagcaacgtcctccacgagaagtccaaggggaagacgcgcgagggagccgaggacaagatgaccagcggcgacgtgctgtccaaccgcaagatgttctacctgctcaagaccgccttccccagcgtccagattaatactgaggaacacgtggatgcagctgatcaggaggttatcttgtgggatcataagattcctgaggatatcctaaaggaagtaactactcctaaagaggtaccagcagaaagtgttactgtctggattgacccacttgatgctacacaggaatatacagaggatcttcgaaagtacgtcactactatggtgtgtgtggctgtaaatggtaaacccatgctaggagttatacataagccattttccgaatatacagcttgggcaatggtagatggtggttcaaatgtgaaagcccgctcttcctacaatgagaagaccccaaggatcgttgtgtctcgttcccattcagggatggtcaaacaggtcgctcttcagacttttggaaaccagactacaattatcccagctggtggtgctggttataaagttttagcacttttggatgtgcctgataagagtcaagaaaaagctgatttatacatccatgtgacatacatcaaaaagtgggatatatgtgctggtaatgccatcttaaaagccctaggggggcatatgactaccctgagtggtgaagaaatcagttacactggttcagacggcattgaagggggactccttgctagcatcagaatgaaccaccaggccctggtcagaaaactcccagatctagaaaagacaggacataaatgagcataactgattacagggtacagttcttcacagctgaaatggttagcctgagatgctggaagcttcaaaggattggtggagactatgcatggttaaggccatcccgaactttttaaagtatttatgaagcatcagagacttattttccctgtaatagaatgcaaaatcagggaaaatgggttgctttgtgtctcaagtattgtctttatttttgagactattttcatacagttgtcatacacaaggcgcatatatatatttgtgaattaaaatctgtagctgagtctacattgttatgagtcaccattttcacacaacatcatgaatcttcactgttagtactttcatatagaattcggttgaaggaaagattgatttttgtgtagatgtttaatataactttacaactatatctcattgaaaataaagtcattggggatttttacctctaatttggatggaaagcacaagaagccacacattcattaatatgcaacaaatgttgtatttatgttactgaatatttctatggattaaaatagaaaaagtttaattgattttttcttttaaattttaataacaggttcaccagctggtagaaaatagagacacatgatgatttgcattgtaataatttctgtgtgtatgtgtgtgtgttgttttgtttttataaagaaaagtgtgtttgtacccatgagttcagcatttctgccatcttgctattttcattttccctgtggaagatgcatggttgcatccttttccttctgaccaacacttagtctttaactttgtaaggttcggtttaaggtttcagggttagcactatagttttggttcattttctcattaacgataaaatatgctgtaaggcactataagaatataaatgattctattacaattgaaagttacttgacattacatgaattgaactgcctttcattatcttcagacactttgttttagtatttttttttaatttgctaggtttgtatatagaagatcctttcattatcaagaatgagtatggttgcttttgccatggttgcttttactattaataaatgtatctagcctacccaaactctgtagtaacttttgagattctcttaatttcccctcagattaaaatagagaaggttgaaggtactttttgatgaaatttttttctagtctggttagaaaaaaaaagttgtgacatattcattgtgttaccgtaactagaaccttgctttgtgaactgtctttcattgggatgtatggtttctctcaatgtgaaatctggaaacttcatgtaaactacccatgccgttatttcatgtgactccagtgcccttgtattccataacatgctgatgagagggatttctcacggtttctttctttgctaaattttttaaccataaagcagcttaccctttattttcccatcttggaagtaaaattgaccaaagaatgtacgttctagcctggtggaatgtgcatactttaggtttgtatgttacattgtccaaagccctttactttcttattagtaaactgaatctaatatgacacaaatgttttcacccaatctcttgcaactggtcaaattcgagaaggtgttgggccttagcagtaggccttttcagtgaaaattcattcaaagttttggtaggtggaacacttgatatttaaataggacttgaaaattttgaaaagagtatcagagacctcatttttttcctttgcaataagctgaagaaactttctttttcaggagagatggcaaaggtatatgctgttgccagagtcctgtggtataagcatctgtttttattatagtatgtcaaagttagggaaatgggactggcaagtaaaaaatggaatttaatttcaatgttttatgggaactctgatttaatgggaagcaaactagttcatattagcaggaattattttattttttcgagacagagtttcactctcgttggccaggctggagtgcaatggcgtgatctcggctcaccgcaacctctgcttcccgggttcaagcgattctcctgcctcagcctcccaagtagctgggattacaggcatacaccaccacacccagctaatttttttgtatttttgttagagacagggtttctccatgttggtcaggctggtctcgaactcccgacctcaggtgatccgcccacctcggcctcccaaagtgatgattttatttttatttttaattgtattaatctgcatctagataatgactttgtgaagggtgtgtgttgtgtgcaaaacttaaggtattggttgagagttaaatacattatttttataatatgttgggtatagtctagttactaatgattttttttaagtacttttataaaaagttcatttttaaaattgtttgtttttaaaagccaatatacgttgcagaattaggaacagtatttatatttatttacacaagacattgtgccatagcatcctagtaaaacaccttcatgaatgagtaatgttatctcccagaattacattaaaattatttctaaaaagtagcaaagtcattaccttttgcttttaatgacccacacctcaccagctcctggtcttttcttcactgttgcccttattttgaggcaatttttcttaaaatatgacttttatgcaccacatttagtagaggcagtgacatcagtgatctcagtacccatcagctgtccccctcctctgcccttcttcatctcttctaccttgtgaccatttcccttaccggttcatgttctcctttatctctgcttttctttcttagccaggatacttccctcacaactctcactcccaaattcttttagatatacatttttctggatattggctgctgaaatctgaagctctggtaaagttcctagtatcagagatcaatcctggaggaggcctagttcactattagattacaaagactcctcacaaagtaaaggaaaatcaccttcaaaaccacaaccctttatgttgtcaagtctaatatgagtgtttttacgaagtatttctttctacccattgttcaagaatgtaaatgtgttttcctacttgtatccccagttcagttgaatttacaaggacctacaagatggtcatgtttgtcttggtatgtgctaccccaattttagtgtttctttctttattttaaatcagtaattattcagttgattgtttatactatataatgaagtaacaaaaacattttggtttgtatgttttaagtaacagttgtgcaaattcctcttgtttgttaggtgctccctttgaatattttgtgaactgtgtcagagggagaggggtggtggctaggaagagggtcagaaagaagctagagggaggtcaggagaagggtaacagggaggatgcaaagcagacatctaccctggtcaccccaggatcaggatatctgtccttgtttcatgttgaattcaaaaattggatctcacttaggctttgaaggtgacagccatctctgatagctgagcataagtaaagaaaggtggagtgccgatgcagaaaggaaaatattcagctttcctctcttagatcgcactttgaagatggccttttggagacaatctgacaggttaaaacaggaactgttggaattattctagctgtaactacctattggctatgtgttgattgatcctagaaagaaaaaataatttttcattttagatcttgattgaatttaagatgtatttatatgcctacaaaaggtctgtcttgtaactgttgtataaaataaacctaatctatggtttcatttttaatctaaaaaaagttgtgccttaacaatagggcattgtatgttaataagggaaaacaacctttttagtagatgggggaaaataggaactttttgccattaaaacttaagttcttttgatgtttttaatattatagttgggggagattcattaaaattaaattgaaataaaattatttttgcataacctagcatttacaactaaagtatgttttttataagaactggcatcttgatgtatataggtctgaaataatatttcatcttttgatttttaattttaataatattagaccaggatagatcacagttttacaaatcttagttttaaataaattatttcagtgtgctgttagtcctctacagtcattttggtttaaaaagtgactatttatttatggtagcatatcaataatttattaatgttaaaaaatactgtgtatgacattacaaaccagaacagttcctgggggagaggattctaattgattggcagttctgagagggcaagaagaatggaactttatacttcaaaaggaggttttggttttaccaggtactgcttatgtaaatcgtttatttttatttcatcaaagcctggcaagtatatgcattccaatttaccattggcaaagctttatttatttttaaggttggatgttgaattaattttgtgggaaaatgagatttgtaagtagttttctttctagataagataacataaaccaaactttcagaagttaaggatgatgaataatattgaaatgacttgttatatattgtaagggttcccttaagtatcataattaacaatttgtggaaattgaaaaagcataaactgtgttatttgattagtaatatgttcccttaaaattcattttgaggtgtatgttatacacacagtaaatttttgttcaggaatgacttgctcattctgtgtttttaaaaataggaaataaggcatagtgagtcatcattacatcaattaaccaaaaaatatttcatcccctccgtcactgaaattatctacttcagccacctttcttattctcgtgttaggagggcacgtttatggactttttaatttccatgtgccatattgtccactaccggcagtagccaaagctagctgtttcagtcccacagaagagacagtgctctgccatgatgacagggcactgctagggctggtttttcttgtttttcccttttggcagtgtggacttcaggaactagatgtatatgcacaagggattgagtttacactaaaactaggaaatggagttttcaatctatgttcttgcctcttcatacttttatttattttttgtcatcctgccttatactgggctaacaatgagataaaataaaaatacctttgaatactcttttccctttcatgcatttaaagccatggaggaactagaccattagctgttgccgtcacatgcttagacaccagtttacttagcgtgttatgaccttcctcacccatactaccaaatttaaatgggtcccgacttcaccctctggaaggaagtaaactcttctctccccatggtttcagagcagtttttacctgcaagcaccatctctgtatgtgctcttactagattatacagttcttgagagggattgcatcttggtgtttttgtatttccacctcacccccagcacatagcccagtctcttgcacaaattaagtacttaatgtgtgttgagctaaattgaataaaggattattagcattagcatattttgtgccttggttgtataagctggttgtttgttttgttacctttgcaaatatttatgattatcacccccccacatactaaattgtttttaaaagttttgcctttccttcagatactaccccaggcaatttgctgtagataatgtgattgcttccaatgacataattatcccaaactctctgccccggatatactttgccaaacgaaatttgaattctctgaataaattggtcatgtctaaaa

SEQ ID NO: 29453 - DNA, 7317 bp, Homo sapiens
acgctcccctttcacctcgcggccgtaggctaacgtggaagtcggaccagccggccggcggaagaacctagagcgcgctgcctggcgagtcaggcgcgcggggcggcgttggtggtcttcgcggcgcaactcggcctttcctgggagggagtgatggggcgcaccggggccggggagcgggcgccagtgtagcccgcgcggcgcctggcccggagcgcggcggctgcggcggcggcggcggcgggcgctggaggcctgtgagagccgcagcccggagcgcccggcttcccacgccatggcccccatgggcatccgcctttccccactgggggtggcagtgttttgcctgctggggctcggcgtgctctaccacctctactcgggcttcttggccggccgcttcagcctcttcggcctgggcggcgagcctggcggcggcgcggcggggcccgcggccgcggccgatgggggcaccgtggacttgcgcgagatgctggctgtgtcagtgctggccgcagtccgcggcggcgacgaggtgaggcgcgtccgcgagagcaacgtcctccacgagaagtccaaggggaagacgcgcgagggagccgaggacaagatgaccagcggcgacgtgctgtccaaccgcaagatgttctacctgctcaagaccgccttccccagcgtccagattaatactgaggaacacgtggatgcagctgatcaggaggttatcttgtgggatcataagattcctgaggatatcctaaaggaagtaactactcctaaagaggtaccagcagaaagtgttactgtctggattgacccacttgatgctacacaggaatatacagaggatcttcgaaagtacgtcactactatggtgtgtgtggctgtaaatggtaaacccatgctaggagttatacataagccattttccgaatatacagcttgggcaatggtagatggtggttcaaatgtgaaagcccgctcttcctacaatgagaagaccccaaggatcgttgtgtctcgttcccattcagggatggtcaaacaggtcgctcttcagacttttggaaaccagactacaattatcccagctggtggtgctggttataaagttttagcacttttggatgtgcctgataagagtcaagaaaaagctgatttatacatccatgtgacatacatcaaaaagtgggatatatgtgctggtaatgccatcttaaaagccctaggggggcatatgactaccctgagtggtgaagaaatcagttacactggttcagacggcattgaagggggactccttgctagcatcagaatgaaccaccaggccctggtcagaaaactcccagatctagaaaagacaggacataaatgagcataactgattacagggtacagttcttcacagctgaaatggttagcctgagatgctggaagcttcaaaggattggtggagactatgcatggttaaggccatcccgaactttttaaagtatttatgaagcatcagagacttattttccctgtaatagaatgcaaaatcagggaaaatgggttgctttgtgtctcaagtattgtctttatttttgagactattttcatacagttgtcatacacaaggcgcatatatatatttgtgaattaaaatctgtagctgagtctacattgttatgagtcaccattttcacacaacatcatgaatcttcactgttagtactttcatatagaattcggttgaaggaaagattgatttttgtgtagatgtttaatataactttacaactatatctcattgaaaataaagtcattggggatttttacctctaatttggatggaaagcacaagaagccacacattcattaatatgcaacaaatgttgtatttatgttactgaatatttctatggattaaaatagaaaaagtttaattgattttttcttttaaattttaataacaggttcaccagctggtagaaaatagagacacatgatgatttgcattgtaataatttctgtgtgtatgtgtgtgtgttgttttgtttttataaagaaaagtgtgtttgtacccatgagttcagcatttctgccatcttgctattttcattttccctgtggaagatgcatggttgcatccttttccttctgaccaacacttagtctttaactttgtaaggttcggtttaaggtttcagggttagcactatagttttggttcattttctcattaacgataaaatatgctgtaaggcactataagaatataaatgattctattacaattgaaagttacttgacattacatgaattgaactgcctttcattatcttcagacactttgttttagtatttttttttaatttgctaggtttgtatatagaagatcctttcattatcaagaatgagtatggttgcttttgccatggttgcttttactattaataaatgtatctagcctacccaaactctgtagtaacttttgagattctcttaatttcccctcagattaaaatagagaaggttgaaggtactttttgatgaaatttttttctagtctggttagaaaaaaaaagttgtgacatattcattgtgttaccgtaactagaaccttgctttgtgaactgtctttcattgggatgtatggtttctctcaatgtgaaatctggaaacttcatgtaaactacccatgccgttatttcatgtgactccagtgcccttgtattccataacatgctgatgagagggatttctcacggtttctttctttgctaaattttttaaccataaagcagcttaccctttattttcccatcttggaagtaaaattgaccaaagaatgtacgttctagcctggtggaatgtgcatactttaggtttgtatgttacattgtccaaagccctttactttcttattagtaaactgaatctaatatgacacaaatgttttcacccaatctcttgcaactggtcaaattcgagaaggtgttgggccttagcagtaggccttttcagtgaaaattcattcaaagttttggtaggtggaacacttgatatttaaataggacttgaaaattttgaaaagagtatcagagacctcatttttttcctttgcaataagctgaagaaactttctttttcaggagagatggcaaaggtatatgctgttgccagagtcctgtggtataagcatctgtttttattatagtatgtcaaagttagggaaatgggactggcaagtaaaaaatggaatttaatttcaatgttttatgggaactctgatttaatgggaagcaaactagttcatattagcaggaattattttattttttcgagacagagtttcactctcgttggccaggctggagtgcaatggcgtgatctcggctcaccgcaacctctgcttcccgggttcaagcgattctcctgcctcagcctcccaagtagctgggattacaggcatacaccaccacacccagctaatttttttgtatttttgttagagacagggtttctccatgttggtcaggctggtctcgaactcccgacctcaggtgatccgcccacctcggcctcccaaagtgatgattttatttttatttttaattgtattaatctgcatctagataatgactttgtgaagggtgtgtgttgtgtgcaaaacttaaggtattggttgagagttaaatacattatttttataatatgttgggtatagtctagttactaatgattttttttaagtacttttataaaaagttcatttttaaaattgtttgtttttaaaagccaatatacgttgcagaattaggaacagtatttatatttatttacacaagacattgtgccatagcatcctagtaaaacaccttcatgaatgagtaatgttatctcccagaattacattaaaattatttctaaaaagtagcaaagtcattaccttttgcttttaatgacccacacctcaccagctcctggtcttttcttcactgttgcccttattttgaggcaatttttcttaaaatatgacttttatgcaccacatttagtagaggcagtgacatcagtgatctcagtacccatcagctgtccccctcctctgcccttcttcatctcttctaccttgtgaccatttcccttaccggttcatgttctcctttatctctgcttttctttcttagccaggatacttccctcacaactctcactcccaaattcttttagatatacatttttctggatattggctgctgaaatctgaagctctggtaaagttcctagtatcagagatcaatcctggaggaggcctagttcactattagattacaaagactcctcacaaagtaaaggaaaatcaccttcaaaaccacaaccctttatgttgtcaagtctaatatgagtgtttttacgaagtatttctttctacccattgttcaagaatgtaaatgtgttttcctacttgtatccccagttcagttgaatttacaaggacctacaagatggtcatgtttgtcttggtatgtgctaccccaattttagtgtttctttctttattttaaatcagtaattattcagttgattgtttatactatataatgaagtaacaaaaacattttggtttgtatgttttaagtaacagttgtgcaaattcctcttgtttgttaggtgctccctttgaatattttgtgaactgtgtcagagggagaggggtggtggctaggaagagggtcagaaagaagctagagggaggtcaggagaagggtaacagggaggatgcaaagcagacatctaccctggtcaccccaggatcaggatatctgtccttgtttcatgttgaattcaaaaattggatctcacttaggctttgaaggtgacagccatctctgatagctgagcataagtaaagaaaggtggagtgccgatgcagaaaggaaaatattcagctttcctctcttagatcgcactttgaagatggccttttggagacaatctgacaggttaaaacaggaactgttggaattattctagctgtaactacctattggctatgtgttgattgatcctagaaagaaaaaataatttttcattttagatcttgattgaatttaagatgtatttatatgcctacaaaaggtctgtcttgtaactgttgtataaaataaacctaatctatggtttcatttttaatctaaaaaaagttgtgccttaacaatagggcattgtatgttaataagggaaaacaacctttttagtagatgggggaaaataggaactttttgccattaaaacttaagttcttttgatgtttttaatattatagttgggggagattcattaaaattaaattgaaataaaattatttttgcataacctagcatttacaactaaagtatgttttttataagaactggcatcttgatgtatataggtctgaaataatatttcatcttttgatttttaattttaataatattagaccaggatagatcacagttttacaaatcttagttttaaataaattatttcagtgtgctgttagtcctctacagtcattttggtttaaaaagtgactatttatttatggtagcatatcaataatttattaatgttaaaaaatactgtgtatgacattacaaaccagaacagttcctgggggagaggattctaattgattggcagttctgagagggcaagaagaatggaactttatacttcaaaaggaggttttggttttaccaggtactgcttatgtaaatcgtttatttttatttcatcaaagcctggcaagtatatgcattccaatttaccattggcaaagctttatttatttttaaggttggatgttgaattaattttgtgggaaaatgagatttgtaagtagttttctttctagataagataacataaaccaaactttcagaagttaaggatgatgaataatattgaaatgacttgttatatattgtaagggttcccttaagtatcataattaacaatttgtggaaattgaaaaagcataaactgtgttatttgattagtaatatgttcccttaaaattcattttgaggtgtatgttatacacacagtaaatttttgttcaggaatgacttgctcattctgtgtttttaaaaataggaaataaggcatagtgagtcatcattacatcaattaaccaaaaaatatttcatcccctccgtcactgaaattatctacttcagccacctttcttattctcgtgttaggagggcacgtttatggactttttaatttccatgtgccatattgtccactaccggcagtagccaaagctagctgtttcagtcccacagaagagacagtgctctgccatgatgacagggcactgctagggctggtttttcttgtttttcccttttggcagtgtggacttcaggaactagatgtatatgcacaagggattgagtttacactaaaactaggaaatggagttttcaatctatgttcttgcctcttcatacttttatttattttttgtcatcctgccttatactgggctaacaatgagataaaataaaaatacctttgaatactcttttccctttcatgcatttaaagccatggaggaactagaccattagctgttgccgtcacatgcttagacaccagtttacttagcgtgttatgaccttcctcacccatactaccaaatttaaatgggtcccgacttcaccctctggaaggaagtaaactcttctctccccatggtttcagagcagtttttacctgcaagcaccatctctgtatgtgctcttactagattatacagttcttgagagggattgcatcttggtgtttttgtatttccacctcacccccagcacatagcccagtctcttgcacaaattaagtacttaatgtgtgttgagctaaattgaataaaggattattagcattagcatattttgtgccttggttgtataagctggttgtttgttttgttacctttgcaaatatttatgattatcacccccccacatactaaattgtttttaaaagttttgcctttccttcagatactaccccaggcaatttgctgtagataatgtgattgcttccaatgacataattatcccaaactctctgccccggatatactttgccaaacgaaatttgaattctctgaataaattggtcatgtctaaaaaaaaaaaaaaaaaaaaattgggggcgggcgaaaaattttaaacatgtgggggggggcaatgaaagaaggcaggtccaagacggggaagggggtcacaaaaagcggggggttgaaaagggggggtggtataggtaacgggg

SEQ ID NO: 29454 - DNA, 7149 bp, Homo sapiens
acgctcccctttcacctcgcggccgtaggctaacgtggaagtcggaccagccggccggcggaagaacctagagcgcgctgcctggcgagtcaggcgcgcggggcggcgttggtggtcttcgcggcgcaactcggcctttcctgggagggagtgatggggcgcaccggggccggggagcgggcgccagtgtagcccgcgcggcgcctggcccggagcgcggcggctgcggcggcggcggcggcgggcgctggaggcctgtgagagccgcagcccggagcgcccggcttcccacgccatggcccccatgggcatccgcctttccccactgggggtggcagtgttttgcctgctggggctcggcgtgctctaccacctctactcgggcttcttggccggccgcttcagcctcttcggcctgggcggcgagcctggcggcggcgcggcggggcccgcggccgcggccgatgggggcaccgtggacttgcgcgagatgctggctgtgtcagtgctggccgcagtccgcggcggcgacgaggtgaggcgcgtccgcgagagcaacgtcctccacgagaagtccaaggggaagacgcgcgagggagccgaggacaagatgaccagcggcgacgtgctgtccaaccgcaagatgttctacctgctcaagaccgccttccccagcgtccagattaatactgaggaacacgtggatgcagctgatcaggaggctggggcaggagaatcgcttgaacccgagaggtggaggttgcagtgagccaagatcgcgctgttgcactccagcctgagtgacagagcgagactctgtctcaaaaaataaataaataaataaaaataaacaataagttactttgcaatgtatttttgttctgagtttaatgtttatacagttactttaaaatttttttaatttgaaataattttaaacttaagcagttgcagagactgcagcaagctcctgcacactccatcctgctattttaacaggatacttaatcaaaaaagtatgctactttcttaaaattttttgaataataacctaaattctttgtttatcttttaggttataaagttttagcacttttggatgtgcctgataagagtcaagaaaaagctgatttatacatccatgtgacatacatcaaaaagtgggatatatgtgctggtaatgccatcttaaaagccctaggggggcatatgactaccctgagtggtgaagaaatcagttacactggttcagacggcattgaagggggactccttgctagcatcagaatgaaccaccaggccctggtcagaaaactcccagatctagaaaagacaggacataaatgagcataactgattacagggtacagttcttcacagctgaaatggttagcctgagatgctggaagcttcaaaggattggtggagactatgcatggttaaggccatcccgaactttttaaagtatttatgaagcatcagagacttattttccctgtaatagaatgcaaaatcagggaaaatgggttgctttgtgtctcaagtattgtctttatttttgagactattttcatacagttgtcatacacaaggcgcatatatatatttgtgaattaaaatctgtagctgagtctacattgttatgagtcaccattttcacacaacatcatgaatcttcactgttagtactttcatatagaattcggttgaaggaaagattgatttttgtgtagatgtttaatataactttacaactatatctcattgaaaataaagtcattggggatttttacctctaatttggatggaaagcacaagaagccacacattcattaatatgcaacaaatgttgtatttatgttactgaatatttctatggattaaaatagaaaaagtttaattgattttttcttttaaattttaataacaggttcaccagctggtagaaaatagagacacatgatgatttgcattgtaataatttctgtgtgtatgtgtgtgtgttgttttgtttttataaagaaaagtgtgtttgtacccatgagttcagcatttctgccatcttgctattttcattttccctgtggaagatgcatggttgcatccttttccttctgaccaacacttagtctttaactttgtaaggttcggtttaaggtttcagggttagcactatagttttggttcattttctcattaacgataaaatatgctgtaaggcactataagaatataaatgattctattacaattgaaagttacttgacattacatgaattgaactgcctttcattatcttcagacactttgttttagtatttttttttaatttgctaggtttgtatatagaagatcctttcattatcaagaatgagtatggttgcttttgccatggttgcttttactattaataaatgtatctagcctacccaaactctgtagtaacttttgagattctcttaatttcccctcagattaaaatagagaaggttgaaggtactttttgatgaaatttttttctagtctggttagaaaaaaaaagttgtgacatattcattgtgttaccgtaactagaaccttgctttgtgaactgtctttcattgggatgtatggtttctctcaatgtgaaatctggaaacttcatgtaaactacccatgccgttatttcatgtgactccagtgcccttgtattccataacatgctgatgagagggatttctcacggtttctttctttgctaaattttttaaccataaagcagcttaccctttattttcccatcttggaagtaaaattgaccaaagaatgtacgttctagcctggtggaatgtgcatactttaggtttgtatgttacattgtccaaagccctttactttcttattagtaaactgaatctaatatgacacaaatgttttcacccaatctcttgcaactggtcaaattcgagaaggtgttgggccttagcagtaggccttttcagtgaaaattcattcaaagttttggtaggtggaacacttgatatttaaataggacttgaaaattttgaaaagagtatcagagacctcatttttttcctttgcaataagctgaagaaactttctttttcaggagagatggcaaaggtatatgctgttgccagagtcctgtggtataagcatctgtttttattatagtatgtcaaagttagggaaatgggactggcaagtaaaaaatggaatttaatttcaatgttttatgggaactctgatttaatgggaagcaaactagttcatattagcaggaattattttattttttcgagacagagtttcactctcgttggccaggctggagtgcaatggcgtgatctcggctcaccgcaacctctgcttcccgggttcaagcgattctcctgcctcagcctcccaagtagctgggattacaggcatacaccaccacacccagctaatttttttgtatttttgttagagacagggtttctccatgttggtcaggctggtctcgaactcccgacctcaggtgatccgcccacctcggcctcccaaagtgatgattttatttttatttttaattgtattaatctgcatctagataatgactttgtgaagggtgtgtgttgtgtgcaaaacttaaggtattggttgagagttaaatacattatttttataatatgttgggtatagtctagttactaatgattttttttaagtacttttataaaaagttcatttttaaaattgtttgtttttaaaagccaatatacgttgcagaattaggaacagtatttatatttatttacacaagacattgtgccatagcatcctagtaaaacaccttcatgaatgagtaatgttatctcccagaattacattaaaattatttctaaaaagtagcaaagtcattaccttttgcttttaatgacccacacctcaccagctcctggtcttttcttcactgttgcccttattttgaggcaatttttcttaaaatatgacttttatgcaccacatttagtagaggcagtgacatcagtgatctcagtacccatcagctgtccccctcctctgcccttcttcatctcttctaccttgtgaccatttcccttaccggttcatgttctcctttatctctgcttttctttcttagccaggatacttccctcacaactctcactcccaaattcttttagatatacatttttctggatattggctgctgaaatctgaagctctggtaaagttcctagtatcagagatcaatcctggaggaggcctagttcactattagattacaaagactcctcacaaagtaaaggaaaatcaccttcaaaaccacaaccctttatgttgtcaagtctaatatgagtgtttttacgaagtatttctttctacccattgttcaagaatgtaaatgtgttttcctacttgtatccccagttcagttgaatttacaaggacctacaagatggtcatgtttgtcttggtatgtgctaccccaattttagtgtttctttctttattttaaatcagtaattattcagttgattgtttatactatataatgaagtaacaaaaacattttggtttgtatgttttaagtaacagttgtgcaaattcctcttgtttgttaggtgctccctttgaatattttgtgaactgtgtcagagggagaggggtggtggctaggaagagggtcagaaagaagctagagggaggtcaggagaagggtaacagggaggatgcaaagcagacatctaccctggtcaccccaggatcaggatatctgtccttgtttcatgttgaattcaaaaattggatctcacttaggctttgaaggtgacagccatctctgatagctgagcataagtaaagaaaggtggagtgccgatgcagaaaggaaaatattcagctttcctctcttagatcgcactttgaagatggccttttggagacaatctgacaggttaaaacaggaactgttggaattattctagctgtaactacctattggctatgtgttgattgatcctagaaagaaaaaataatttttcattttagatcttgattgaatttaagatgtatttatatgcctacaaaaggtctgtcttgtaactgttgtataaaataaacctaatctatggtttcatttttaatctaaaaaaagttgtgccttaacaatagggcattgtatgttaataagggaaaacaacctttttagtagatgggggaaaataggaactttttgccattaaaacttaagttcttttgatgtttttaatattatagttgggggagattcattaaaattaaattgaaataaaattatttttgcataacctagcatttacaactaaagtatgttttttataagaactggcatcttgatgtatataggtctgaaataatatttcatcttttgatttttaattttaataatattagaccaggatagatcacagttttacaaatcttagttttaaataaattatttcagtgtgctgttagtcctctacagtcattttggtttaaaaagtgactatttatttatggtagcatatcaataatttattaatgttaaaaaatactgtgtatgacattacaaaccagaacagttcctgggggagaggattctaattgattggcagttctgagagggcaagaagaatggaactttatacttcaaaaggaggttttggttttaccaggtactgcttatgtaaatcgtttatttttatttcatcaaagcctggcaagtatatgcattccaatttaccattggcaaagctttatttatttttaaggttggatgttgaattaattttgtgggaaaatgagatttgtaagtagttttctttctagataagataacataaaccaaactttcagaagttaaggatgatgaataatattgaaatgacttgttatatattgtaagggttcccttaagtatcataattaacaatttgtggaaattgaaaaagcataaactgtgttatttgattagtaatatgttcccttaaaattcattttgaggtgtatgttatacacacagtaaatttttgttcaggaatgacttgctcattctgtgtttttaaaaataggaaataaggcatagtgagtcatcattacatcaattaaccaaaaaatatttcatcccctccgtcactgaaattatctacttcagccacctttcttattctcgtgttaggagggcacgtttatggactttttaatttccatgtgccatattgtccactaccggcagtagccaaagctagctgtttcagtcccacagaagagacagtgctctgccatgatgacagggcactgctagggctggtttttcttgtttttcccttttggcagtgtggacttcaggaactagatgtatatgcacaagggattgagtttacactaaaactaggaaatggagttttcaatctatgttcttgcctcttcatacttttatttattttttgtcatcctgccttatactgggctaacaatgagataaaataaaaatacctttgaatactcttttccctttcatgcatttaaagccatggaggaactagaccattagctgttgccgtcacatgcttagacaccagtttacttagcgtgttatgaccttcctcacccatactaccaaatttaaatgggtcccgacttcaccctctggaaggaagtaaactcttctctccccatggtttcagagcagtttttacctgcaagcaccatctctgtatgtgctcttactagattatacagttcttgagagggattgcatcttggtgtttttgtatttccacctcacccccagcacatagcccagtctcttgcacaaattaagtacttaatgtgtgttgagctaaattgaataaaggattattagcattagcatattttgtgccttggttgtataagctggttgtttgttttgttacctttgcaaatatttatgattatcacccccccacatactaaattgtttttaaaagttttgcctttccttcagatactaccccaggcaatttgctgtagataatgtgattgcttccaatgacataattatcccaaactctctgccccggatatactttgccaaacgaaatttgaattctctgaataaattggtcatgtctaaaa

SEQ ID NO: 29455 - DNA, 7256 bp, Homo sapiens
acgctcccctttcacctcgcggccgtaggctaacgtggaagtcggaccagccggccggcggaagaacctagagcgcgctgcctggcgagtcaggcgcgcggggcggcgttggtggtcttcgcggcgcaactcggcctttcctgggagggagtgatggggcgcaccggggccggggagcgggcgccagtgtagcccgcgcggcgcctggcccggagcgcggcggctgcggcggcggcggcggcgggcgctggaggcctgtgagagccgcagcccggagcgcccggcttcccacgccatggcccccatgggcatccgcctttccccactgggggtggcagtgttttgcctgctggggctcggcgtgctctaccacctctactcgggcttcttggccggccgcttcagcctcttcggcctgggcggcgagcctggcggcggcgcggcggggcccgcggccgcggccgatgggggcaccgtggacttgcgcgagatgctggctgtgtcagtgctggccgcagtccgcggcggcgacgaggtgaggcgcgtccgcgagagcaacgtcctccacgagaagtccaaggggaagacgcgcgagggagccgaggacaagatgaccagcggcgacgtgctgtccaaccgcaagatgttctacctgctcaagaccgccttccccagcgtccagattaatactgaggaacacgtggatgcagctgatcaggaggttatcttgtgggatcataagattcctgaggatatcctaaaggaagtaactactcctaaagaggtaccagcagaaagtgttactgtctggattgacccacttgatgctacacaggaatatacagaggatcttcgaaagtacgtcactactatggtgtgtgtggctgtaaatggtaaacccatgctaggagttatacataagccattttccgaatatacagcttgggcaatggtagatggtggttcaaatgtgaaagcccgctcttcctacaatgagaagaccccaaggatcgttgtgtctcgttcccattcagggatggtcaaacaggtcgctcttcagacttttggaaaccagactacaattatcccagctggtggtgctggttataaagttttagcacttttggatgtgcctgataagagtcaagaaaaagctgatttatacatccatgtgacatacatcaaaaagtgggatatatgtgctggtaatgccatcttaaaagccctaggggggcatatgactaccctgagtggtgaagaaatcagttacactggttcagacggcattgaagggggactccttgctagcatcagaatgaaccaccaggccctggtcagaaaactcccagatctagaaaagacaggacataaatgagcataactgattacagggtacagttcttcacagctgaaatggttagcctgagatgctggaagcttcaaaggattggtggagactatgcatggttaaggccatcccgaactttttaaagtatttatgaagcatcagagacttattttccctgtaatagaatgcaaaatcagggaaaatgggttgctttgtgtctcaagtattgtctttatttttgagactattttcatacagttgtcatacacaaggcgcatatatatatttgtgaattaaaatctgtagctgagtctacattgttatgagtcaccattttcacacaacatcatgaatcttcactgttagtactttcatatagaattcggttgaaggaaagattgatttttgtgtagatgtttaatataactttacaactatatctcattgaaaataaagtcattggggatttttacctctaatttggatggaaagcacaagaagccacacattcattaatatgcaacaaatgttgtatttatgttactgaatatttctatggattaaaatagaaaaagtttaattgattttttcttttaaattttaataacaggttcaccagctggtagaaaatagagacacatgatgatttgcattgtaataatttctgtgtgtatgtgtgtgtgttgttttgtttttataaagaaaagtgtgtttgtacccatgagttcagcatttctgccatcttgctattttcattttccctgtggaagatgcatggttgcatccttttccttctgaccaacacttagtctttaactttgtaaggttcggtttaaggtttcagggttagcactatagttttggttcattttctcattaacgataaaatatgctgtaaggcactataagaatataaatgattctattacaattgaaagttacttgacattacatgaattgaactgcctttcattatcttcagacactttgttttagtatttttttttaatttgctaggtttgtatatagaagatcctttcattatcaagaatgagtatggttgcttttgccatggttgcttttactattaataaatgtatctagcctacccaaactctgtagtaacttttgagattctcttaatttcccctcagattaaaatagagaaggttgaaggtactttttgatgaaatttttttctagtctggttagaaaaaaaaagttgtgacatattcattgtgttaccgtaactagaaccttgctttgtgaactgtctttcattgggatgtatggtttctctcaatgtgaaatctggaaacttcatgtaaactacccatgccgttatttcatgtgactccagtgcccttgtattccataacatgctgatgagagggatttctcacggtttctttctttgctaaattttttaaccataaagcagcttaccctttattttcccatcttggaagtaaaattgaccaaagaatgtacgttctagcctggtggaatgtgcatactttaggtttgtatgttacattgtccaaagccctttactttcttattagtaaactgaatctaatatgacacaaatgttttcacccaatctcttgcaactggtcaaattcgagaaggtgttgggccttagcagtaggccttttcagtgaaaattcattcaaagttttggtaggtggaacacttgatatttaaataggacttgaaaattttgaaaagagtatcagagacctcatttttttcctttgcaataagctgaagaaactttctttttcaggagagatggcaaaggtatatgctgttgccagagtcctgtggtataagcatctgtttttattatagtatgtcaaagttagggaaatgggactggcaagtaaaaaatggaatttaatttcaatgttttatgggaactctgatttaatgggaagcaaactagttcatattagcaggaattattttattttttcgagacagagtttcactctcgttggccaggctggagtgcaatggcgtgatctcggctcaccgcaacctctgcttcccgggttcaagcgattctcctgcctcagcctcccaagtagctgggattacaggcatacaccaccacacccagctaatttttttgtatttttgttagagacagggtttctccatgttggtcaggctggtctcgaactcccgacctcaggtgatccgcccacctcggcctcccaaagtgatgattttatttttatttttaattgtattaatctgcatctagataatgactttgtgaagggtgtgtgttgtgtgcaaaacttaaggtattggttgagagttaaatacattatttttataatatgttgggtatagtctagttactaatgattttttttaagtacttttataaaaagttcatttttaaaattgtttgtttttaaaagccaatatacgttgcagaattaggaacagtatttatatttatttacacaagacattgtgccatagcatcctagtaaaacaccttcatgaatgagtaatgttatctcccagaattacattaaaattatttctaaaaagtagcaaagtcattaccttttgcttttaatgacccacacctcaccagctcctggtcttttcttcactgttgcccttattttgaggcaatttttcttaaaatatgacttttatgcaccacatttagtagaggcagtgacatcagtgatctcagtacccatcagctgtccccctcctctgcccttcttcatctcttctaccttgtgaccatttcccttaccggttcatgttctcctttatctctgcttttctttcttagccaggatacttccctcacaactctcactcccaaattcttttagatatacatttttctggatattggctgctgaaatctgaagctctggtaaagttcctagtatcagagatcaatcctggaggaggcctagttcactattagattacaaagactcctcacaaagtaaaggaaaatcaccttcaaaaccacaaccctttatgttgtcaagtctaatatgagtgtttttacgaagtatttctttctacccattgttcaagaatgtaaatgtgttttcctacttgtatccccagttcagttgaatttacaaggacctacaagatggtcatgtttgtcttggtatgtgctaccccaattttagtgtttctttctttattttaaatcagtaattattcagttgattgtttatactatataatgaagtaacaaaaacattttggtttgtatgttttaagtaacagttgtgcaaattcctcttgtttgttaggtgctccctttgaatattttgtgaactgtgtcagagggagaggggtggtggctaggaagagggtcagaaagaagctagagggaggtcaggagaagggtaacagggaggatgcaaagcagacatctaccctggtcaccccaggatcaggatatctgtccttgtttcatgttgaattcaaaaattggatctcacttaggctttgaaggtgacagccatctctgatagctgagcataagtaaagaaaggtggagtgccgatgcagaaaggaaaatattcagctttcctctcttagatcgcactttgaagatggccttttggagacaatctgacaggttaaaacaggaactgttggaattattctagctgtaactacctattggctatgtgttgattgatcctagaaagaaaaaataatttttcattttagatcttgattgaatttaagatgtatttatatgcctacaaaaggtctgtcttgtaactgttgtataaaataaacctaatctatggtttcatttttaatctaaaaaaagttgtgccttaacaatagggcattgtatgttaataagggaaaacaacctttttagtagatgggggaaaataggaactttttgccattaaaacttaagttcttttgatgtttttaatattatagttgggggagattcattaaaattaaattgaaataaaattatttttgcataacctagcatttacaactaaagtatgttttttataagaactggcatcttgatgtatataggtctgaaataatatttcatcttttgatttttaattttaataatattagaccaggatagatcacagttttacaaatcttagttttaaataaattatttcagtgtgctgttagtcctctacagtcattttggtttaaaaagtgactatttatttatggtagcatatcaataatttattaatgttaaaaaatactgtgtatgacattacaaaccagaacagttcctgggggagaggattctaattgattggcagttctgagagggcaagaagaatggaactttatacttcaaaaggaggttttggttttaccaggtactgcttatgtaaatcgtttatttttatttcatcaaagcctggcaagtatatgcattccaatttaccattggcaaagctttatttatttttaaggttggatgttgaattaattttgtgggaaaatgagatttgtaagtagttttctttctagataagataacataaaccaaactttcagaagttaaggatgatgaataatattgaaatgacttgttatatattgtaagggttcccttaagtatcataattaacaatttgtggaaattgaaaaagcataaactgtgttatttgattagtaatatgttcccttaaaattcattttgaggtgtatgttatacacacagtaaatttttgttcaggaatgacttgctcattctgtgtttttaaaaataggaaataaggcatagtgagtcatcattacatcaattaaccaaaaaatatttcatcccctccgtcactgaaattatctacttcagccacctttcttattctcgtgttaggagggcacgtttatggactttttaatttccatgtgccatattgtccactaccggcagtagccaaagctagctgtttcagtcccacagaagagacagtgctctgccatgatgacagggcactgctagggctggtttttcttgtttttcccttttggcagtgtggacttcaggaactagatgtatatgcacaagggattgagtttacactaaaactaggaaatggagttttcaatctatgttcttgcctcttcatacttttatttattttttgtcatcctgccttatactgggctaacaatgagataaaataaaaatacctttgaatactcttttccctttcatgcatttaaagccatggaggaactagaccattagctgttgccgtcacatgcttagacaccagtttacttagcgtgttatgaccttcctcacccatactaccaaatttaaatgggtcccgacttcaccctctggaaggaagtaaactcttctctccccatggtttcagagcagtttttacctgcaagcaccatctctgtatgtgctcttactagattatacagttcttgagagggattgcatcttggtgtttttgtatttccacctcacccccagcacatagcccagtctcttgcacaaattaagtacttaatgtgtgttgagctaaattgaataaaggattattagcattagcatattttgtgccttggttgtataagctggttgtttgttttgttacctttgcaaatatttatgattatcacccccccacatactaaattgtttttaaaagttttgcctttccttcagatataaccaggatgtgtgatatgtggtggttcaggcataatttccaatcttgcggattattggcaagaaatgattttgataatgggtgttcaaaaaaaagggggggaataccaggggaaggcaccttgaagccaaaaggtaaaagggggtaaggaaaggtggacatggtggacacaccagaaatttgtgtgtggataaaataagttgcca

SEQ ID NO: 29456 - DNA, 5665 bp, Homo sapiens
tcaactttctacacgcttcaatttctacccacgggaaaatgggttgctttgtgtctcaagtattgtctttatttttgagactattttcatacagttgtcatacacaaggcgcatatatatatttgtgaattaaaatctgtagctgagtctacattgttatgagtcaccattttcacacaacatcatgaatcttcactgttagtactttcatatagaattcggttgaaggaaagattgatttttgtgtagatgtttaatataactttacaactatatctcattgaaaataaagtcattggggatttttacctctaatttggatggaaagcacaagaagccacacattcattaatatgcaacaaatgttgtatttatgttactgaatatttctatggattaaaatagaaaaagtttaattgattttttcttttaaattttaataacaggttcaccagctggtagaaaatagagacacatgatgatttgcattgtaataatttctgtgtgtatgtgtgtgtgttgttttgtttttataaagaaaagtgtgtttgtacccatgagttcagcatttctgccatcttgctattttcattttccctgtggaagatgcatggttgcatccttttccttctgaccaacacttagtctttaactttgtaaggttcggtttaaggtttcagggttagcactatagttttggttcattttctcattaacgataaaatatgctgtaaggcactataagaatataaatgattctattacaattgaaagttacttgacattacatgaattgaactgcctttcattatcttcagacactttgttttagtatttttttttaatttgctaggtttgtatatagaagatcctttcattatcaagaatgagtatggttgcttttgccatggttgcttttactattaataaatgtatctagcctacccaaactctgtagtaacttttgagattctcttaatttcccctcagattaaaatagagaaggttgaaggtactttttgatgaaatttttttctagtctggttagaaaaaaaaagttgtgacatattcattgtgttaccgtaactagaaccttgctttgtgaactgtctttcattgggatgtatggtttctctcaatgtgaaatctggaaacttcatgtaaactacccatgccgttatttcatgtgactccagtgcccttgtattccataacatgctgatgagagggatttctcacggtttctttctttgctaaattttttaaccataaagcagcttaccctttattttcccatcttggaagtaaaattgaccaaagaatgtacgttctagcctggtggaatgtgcatactttaggtttgtatgttacattgtccaaagccctttactttcttattagtaaactgaatctaatatgacacaaatgttttcacccaatctcttgcaactggtcaaattcgagaaggtgttgggccttagcagtaggccttttcagtgaaaattcattcaaagttttggtaggtggaacacttgatatttaaataggacttgaaaattttgaaaagagtatcagagacctcatttttttcctttgcaataagctgaagaaactttctttttcaggagagatggcaaaggtatatgctgttgccagagtcctgtggtataagcatctgtttttattatagtatgtcaaagttagggaaatgggactggcaagtaaaaaatggaatttaatttcaatgttttatgggaactctgatttaatgggaagcaaactagttcatattagcaggaattattttattttttcgagacagagtttcactctcgttggccaggctggagtgcaatggcgtgatctcggctcaccgcaacctctgcttcccgggttcaagcgattctcctgcctcagcctcccaagtagctgggattacaggcatacaccaccacacccagctaatttttttgtatttttgttagagacagggtttctccatgttggtcaggctggtctcgaactcccgacctcaggtgatccgcccacctcggcctcccaaagtgatgattttatttttatttttaattgtattaatctgcatctagataatgactttgtgaagggtgtgtgttgtgtgcaaaacttaaggtattggttgagagttaaatacattatttttataatatgttgggtatagtctagttactaatgattttttttaagtacttttataaaaagttcatttttaaaattgtttgtttttaaaagccaatatacgttgcagaattaggaacagtatttatatttatttacacaagacattgtgccatagcatcctagtaaaacaccttcatgaatgagtaatgttatctcccagaattacattaaaattatttctaaaaagtagcaaagtcattaccttttgcttttaatgacccacacctcaccagctcctggtcttttcttcactgttgcccttattttgaggcaatttttcttaaaatatgacttttatgcaccacatttagtagaggcagtgacatcagtgatctcagtacccatcagctgtccccctcctctgcccttcttcatctcttctaccttgtgaccatttcccttaccggttcatgttctcctttatctctgcttttctttcttagccaggatacttccctcacaactctcactcccaaattcttttagatatacatttttctggatattggctgctgaaatctgaagctctggtaaagttcctagtatcagagatcaatcctggaggaggcctagttcactattagattacaaagactcctcacaaagtaaaggaaaatcaccttcaaaaccacaaccctttatgttgtcaagtctaatatgagtgtttttacgaagtatttctttctacccattgttcaagaatgtaaatgtgttttcctacttgtatccccagttcagttgaatttacaaggacctacaagatggtcatgtttgtcttggtatgtgctaccccaattttagtgtttctttctttattttaaatcagtaattattcagttgattgtttatactatataatgaagtaacaaaaacattttggtttgtatgttttaagtaacagttgtgcaaattcctcttgtttgttaggtgctccctttgaatattttgtgaactgtgtcagagggagaggggtggtggctaggaagagggtcagaaagaagctagagggaggtcaggagaagggtaacagggaggatgcaaagcagacatctaccctggtcaccccaggatcaggatatctgtccttgtttcatgttgaattcaaaaattggatctcacttaggctttgaaggtgacagccatctctgatagctgagcataagtaaagaaaggtggagtgccgatgcagaaaggaaaatattcagctttcctctcttagatcgcactttgaagatggccttttggagacaatctgacaggttaaaacaggaactgttggaattattctagctgtaactacctattggctatgtgttgattgatcctagaaagaaaaaataatttttcattttagatcttgattgaatttaagatgtatttatatgcctacaaaaggtctgtcttgtaactgttgtataaaataaacctaatctatggtttcatttttaatctaaaaaaagttgtgccttaacaatagggcattgtatgttaataagggaaaacaacctttttagtagatgggggaaaataggaactttttgccattaaaacttaagttcttttgatgtttttaatattatagttgggggagattcattaaaattaaattgaaataaaattatttttgcataacctagcatttacaactaaagtatgttttttataagaactggcatcttgatgtatataggtctgaaataatatttcatcttttgatttttaattttaataatattagaccaggatagatcacagttttacaaatcttagttttaaataaattatttcagtgtgctgttagtcctctacagtcattttggtttaaaaagtgactatttatttatggtagcatatcaataatttattaatgttaaaaaatactgtgtatgacattacaaaccagaacagttcctgggggagaggattctaattgattggcagttctgagagggcaagaagaatggaactttatacttcaaaaggaggttttggttttaccaggtactgcttatgtaaatcgtttatttttatttcatcaaagcctggcaagtatatgcattccaatttaccattggcaaagctttatttatttttaaggttggatgttgaattaattttgtgggaaaatgagatttgtaagtagttttctttctagataagataacataaaccaaactttcagaagttaaggatgatgaataatattgaaatgacttgttatatattgtaagggttcccttaagtatcataattaacaatttgtggaaattgaaaaagcataaactgtgttatttgattagtaatatgttcccttaaaattcattttgaggtgtatgttatacacacagtaaatttttgttcaggaatgacttgctcattctgtgtttttaaaaataggaaataaggcatagtgagtcatcattacatcaattaaccaaaaaatatttcatcccctccgtcactgaaattatctacttcagccacctttcttattctcgtgttaggagggcacgtttatggactttttaatttccatgtgccatattgtccactaccggcagtagccaaagctagctgtttcagtcccacagaagagacagtgctctgccatgatgacagggcactgctagggctggtttttcttgtttttcccttttggcagtgtggacttcaggaactagatgtatatgcacaagggattgagtttacactaaaactaggaaatggagttttcaatctatgttcttgcctcttcatacttttatttattttttgtcatcctgccttatactgggctaacaatgagataaaataaaaatacctttgaatactcttttccctttcatgcatttaaagccatggaggaactagaccattagctgttgccgtcacatgcttagacaccagtttacttagcgtgttatgaccttcctcacccatactaccaaatttaaatgggtcccgacttcaccctctggaaggaagtaaactcttctctccccatggtttcagagcagtttttacctgcaagcaccatctctgtatgtgctcttactagattatacagttcttgagagggattgcatcttggtgtttttgtatttccacctcacccccagcacatagcccagtctcttgcacaaattaagtacttaatgtgtgttgagctaaattgaataaaggattattagcattagcatattttgtgccttggttgtataagctggttgtttgttttgttacctttgcaaatatttatgattatcacccccccacatactaaattgtttttaaaagttttgcctttccttcagatactaccccaggcaatttgctgtagataatgtgattgcttccaatgacataattatcccaaactctctgccccggatatactttgccaaacgaaatttgaattctctgaataaattggtcatgtctaaaa

SEQ ID NO: 29457 - DNA, 2617 bp, Homo sapiens
acgctcccctttcacctcgcggccgtaggctaacgtggaagtcggaccagccggccggcggaagaacctagagcgcgctgcctggcgagtcaggcgcgcggggcggcgttggtggtcttcgcggcgcaactcggcctttcctgggagggagtgatggggcgcaccggggccggggagcgggcgccagtgtagcccgcgcggcgcctggcccggagcgcggcggctgcggcggcggcggcggcgggcgctggaggcctgtgagagccgcagcccggagcgcccggcttcccacgccatggcccccatgggcatccgcctttccccactgggggtggcagtgttttgcctgctggggctcggcgtgctctaccacctctactcgggcttcttggccggccgcttcagcctcttcggcctgggcggcgagcctggcggcggcgcggcggggcccgcggccgcggccgatgggggcaccgtggacttgcgcgagatgctggctgtgtcagtgctggccgcagtccgcggcggcgacgaggtgaggcgcgtccgcgagagcaacgtcctccacgagaagtccaaggggaagacgcgcgagggagccgaggacaagatgaccagcggcgacgtgctgtccaaccgcaagatgttctacctgctcaagaccgccttccccagcgtccagattaatactgaggaacacgtggatgcagctgatcaggaggttatcttgtgggatcataagattcctgaggatatcctaaaggaagtaactactcctaaagaggtaccagcagaaagtgttactgtctggattgacccacttgatgctacacaggaatatacagaggatcttcgaaagtacgtcactactatggtgtgtgtggctgtaaatggtaaacccatgctaggagttatacataagccattttccgaatatacagcttgggcaatggtagatggtggttcaaatgtgaaagcccgctcttcctacaatgagaagaccccaaggatcgttgtgtctcgttcccattcagggatggtcaaacaggtcgctcttcagacttttggaaaccagactacaattatcccagctggtggtgctggttataaagttttagcacttttggatgtgcctgataagagtcaagaaaaagctgatttatacatccatgtgacatacatcaaaaagtgggatatatgtgctggtaatgccatcttaaaagccctaggggggcatatgactaccctgagtggtgaagaaatcagttacactggttcagacggcattgaagggggactccttgctagcatcagaatgaaccaccaggccctggtcagaaaactcccagatctagaaaagacaggacataaatgagcataactgattacagggtacagttcttcacagctgaaatggttagcctgagatgctggaagcttcaaaggattggtggagactatgcatggttaaggccatcccgaactttttaaagtatttatgaagcatcagagacttattttccctgtaatagaatgcaaaatcagggaaaatgggttgctttgtgtctcaagtattgtctttatttttgagactattttcatacagttgtcatacacaaggcgcatatatatatttgtgaattaaaatctgtagctgagtctacattgttatgagtcaccattttcacacaacatcatgaatcttcactgttagtactttcatatagaattcggttgaaggaaagattgatttttgtgtagatgtttaatataactttacaactatatctcattgaaaataaagtcattggggatttttacctctaatttggatggaaagcacaagaagccacacattcattaatatgcaacaaatgttgtatttatgttactgaatatttctatggattaaaatagaaaaagtttaattgattttttcttttaaattttaataacaggttcaccagctggtagaaaatagagacacatgatgatttgcattgtaataatttctgtgtgtatgtgtgtgtgttgttttgtttttataaagaaaagtgtgtttgtacccatgagttcagcatttctgccatcttgctattttcattttccctgtggaagatgcatggttgcatccttttccttctgaccaacacttagtctttaactttgtaaggttcggtttaaggtttcagggttagcactatagttttggttcattttctcattaacgataaaatatgctgtaaggcactataagaatataaatgattctattacaattgaaagttacttgacattacatgaattgaactgcctttcattatcttcagacactttgttttagtatttttttttaatttgctaggtttgtatatagaagatcctttcattatcaagaatgagtatggttgcttttgccatggttgcttttactattaataaatgtatctagcctacccaaactctgtagtaacttttgagattctcttaatttcccctcagattaaaatagagaaggttgaaggtactttttgatgaaatttttttctagtctggttagaaaaaaaaagttgtgacatattcattgtgtaactgattgggatcctctagaatgccc

SEQ ID NO: 29458 - DNA, 1147 bp, Homo sapiens
acgctcccctttcacctcgcggccgtaggctaacgtggaagtcggaccagccggccggcggaagaacctagagcgcgctgcctggcgagtcaggcgcgcggggcggcgttggtggtcttcgcggcgcaactcggcctttcctgggagggagtgatggggcgcaccggggccggggagcgggcgccagtgtagcccgcgcggcgcctggcccggagcgcggcggctgcggcggcggcggcggcgggcgctggaggcctgtgagagccgcagcccggagcgcccggcttcccacgccatggcccccatgggcatccgcctttccccactgggggtggcagtgttttgcctgctggggctcggcgtgctctaccacctctactcgggcttcttggccggccgcttcagcctcttcggcctgggcggcgagcctggcggcggcgcggcggggcccgcggccgcggccgatgggggcaccgtggacttgcgcgagatgctggctgtgtcagtgctggccgcagtccgcggcggcgacgaggtgaggcgcgtccgcgagagcaacgtcctccacgagaagtccaaggggaagacgcgcgagggagccgaggacaagatgaccagcggcgacgtgctgtccaaccgcaagatgttctacctgctcaagaccgccttccccagcgtccagattaatactgaggaacacgtggatgcagctgatcaggaggttatcttgtgggatcataagattcctgaggatatcctaaaggaagtaactactcctaaagaggtaccagcagaaagtgttactgtctggattgacccacttgatgctacacaggaatatacagaggatcttcgaaagtacgtcactactatggtgtgtgtggctgtaaatggtaaacccatgctaggagttatacataagccattttccgaatatacagcttgggcaatggtagatggtggttcaaatgtgaaagcccgctcttcctacaatgagaagaccccaaggatcgttgtgtctcgttcccattcagggatggtcaaacaggtcgctcttcagacttttggaaaccagactacaattatcccagctggtggtgctggttataaagttttcgcacttttgacggccatcgtgcgggggtcc

SEQ ID NO: 29459 - DNA, 599 bp, Homo sapiens
accggtccggctatacattatctagaccattagctgttgccgtcacatgcttagacaccagtttacttagcgtgttatgaccttcctcacccatactaccaaatttaaatgggtcccgacttcaccctctggaaggaagtaaactcttctctccccatggtttcagagcagtttttacctgcaagcaccatctctgtatgtgctcttactagattatacagttcttgagagggattgcatcttggtgtttttgtatttccacctcacccccagcacatagcccagtctcttgcacaaattaagtacttaatgtgtgttgagctaaattgaataaaggattattagcattagcatattttgtgccttggttgtataagctggttgtttgttttgttacctttgcaaatatttatgattatcacccccccacatactaaattgtttttaaaagttttgcctttccttcagatactaccccaggcaatttgctgtagataatgtgattgcttccaatgacataattatcccaaactctctgccccggatatactttgccaaacgaaatttgaattctctgaataaattggtcatgtctaaaa

SEQ ID NO: 29460 - DNA, 528 bp, Homo sapiens
gcggccgcggccgatgggggcaccgtggacttgcgcgagatgctggctgtgtcagtgctggccgcagtccgcggcggcgacgaggtgaggcgcgtccgcgagagcaacgtcctccacgagaagtccaaggggaagacgcgcgagggagccgaggacaagatgaccagcggcgacgtgctgtccaaccgcaagatgttctacctgctcaagaccgccttccccagcgtccaggtgggagcccacgggcggagcgcccactcgagccgggtagcgcgtctcggcccgtcgactcttaacagtatgggatgtggagcttctggttccattttgtagatgtggaaattgagacgcagaagttaacgtgcacaaggtcagacagacagcagaggagctgggtgaggttgcacgtagtctgactcagggcccgtgcccttttggctcgtcctgggtcgggtgtgcgccgtgtgtacctgggatcagaaggccttgaaacgaaaaggctgacaaagttaattgcacccgcagctt

SEQ ID NO: 29461 - DNA, 243 bp, Homo sapiens
caaaaccacaaccctttatgttgtcaagtctaatatgagtgtttttacgaagtatttctttctacccattgttcaagaatgtaaatgtaaaaaaaaatacaagagagttgggtagatatgcatgcttgaggaaacttgcttttacgtgttttcctacttgtatccccagttcagttgaatttacaaggacctacaagatggtcatgtttgtcttggtatgtgctaccccaattttagtgtttc

SEQ ID NO: 29462 - DNA, 373 bp, Homo sapiens
ttttgtatttccacctcacccccagcacatagcccagtctcttgcacaaattaagtacttaatgtgtgttgagctaaattgaataaaggattattagcattagcatattttgtgccttggttgtataagctggttgtttgttttgttacctttgcaaatatttatgattatcacccccccacatactaaattgtttttaaaagttttgcctttccttcagatactaccccaggcaatttgctgtagataatgtgattgcttccaatgacataattatcccaaactctctgccccggatatactttgccaaacgaaatttgaattctctgaataaattggtcatgtctaaaagagatggtgtgctgcatctgct

SEQ ID NO: 29463 - DNA, 480 bp, Homo sapiens
gcaactgccttctgggaagggcacagcctagaaagggactcagctgtgagccatttcagcctccgatattcctggaggctgggggaacaagcgcctcctccacaaaagggatctgggcaacatagcactgcatctaccctcgatggcaagtggggcacaggaccataggcaagtgtttcagagcgactagaaccccctacagagagtgccaggccgagcatggtggctcacacctataatcccagcactttgggaagccaaggctggcagatcacttgaggtctgaagttcgagaccagcctggccaacatggtgaaaccctgtctctactaaaaatacaaaaattagccacgcctgtaatcccagctactcaggaggctgaggcacaagaatctcttgaacccgggaggctgaggttgcagtgagcagagatcgcgccaccgcactccagcctgggcgacagagtgagactcgatctca

SEQ ID NO: 29464 - DNA, 442 bp, Homo sapiens
gaaacggagtctcgctctgtcacccagactggagtgcaatggcacgatctccactcactgcaacctctgcttcccgggttcaagcgattctcctgcccaagcctcctgagtagctgggattacaggcacacaccaccacgcccggctaattttttgtaactttagtagagacgaggtttccccatattggccaggctgctctggaactcctgaccttgtgatctgcccaccttggccaagaaatctctttaagtattcatttgtactttaaggtaatgctcgatctcgctcttagtacagctgaattgtccttcaaaaagatgatctggttatgtttgacctcttcctcaagggaccaaaaagggaagttctcagctttttatagtatgaggtccctagaggttttcactttggggatttaaaaacaagtttcctgtagcta

SEQ ID NO: 29465 - DNA, 359 bp, Homo sapiens
aattaacattttaacgtaaaacattttctacataatacctgccacaatgtcaaatgagtttggaaaatacccttttaacctaaaggcattctgggaacaagaaaagccttaagtgttttgaatggaggagttttatttaattaagatttctaatggaaagagcaaatttgtaatttgatacctataattttattttatattttattgtttctaagaataatttttgttttactagagatggggtagtgataattgcatcctaccctttcttttttttttgagatgggaatcttgcagtgagccgagatcacaccattgcactccaccttggggcaacaaaaggcaaaactctgtcttca

SEQ ID NO: 29466 - DNA, 709 bp, Homo sapiens
gttcagacctttcctctacacggtgggatccactagattctcatctgaaagagctgcatacccttaggccaaaaccaggatattttgctggtgagacggctagctccacacatggtcatcccagccagaggagctgcccagtacccagatgagaaagaggtcttggtggctgacgacgcaaggtggggctggtacagcgggaactttgcagtttctgtgaaagctagccttggagcatgtgacccacactgccttggctggaaccagaagtcaaacgcctggggggtgttggggctgccagaagaggagtggctgcagagacctggagcgccccactaccaaacccctcacaaccgagtgtcccacccacctctctcatctcaggcccctctacctccccccaaacgtttccctcccaaaatcaagtttcagagtagaagactttggagaccaagtcccactcccattgaacagatgggccactgaggccaggagggaagctgccccccaccagccagcactgtgtcaccactcacttgcctgcaccacagcgccaggtgttaggccaggccagcagtttcccagaccggtgctcctgtttcctaagatgtctgccaggtgatcagccaccccgcatttgcctcagcggtggaagaaaaacaagtatttactggagggaatggaaggccccaactctccttaaaaaaaa

SEQ ID NO: 29467 - DNA, 411 bp, Homo sapiens
cctcagccccggtggaccccagagccagcaggcccttcagaatggaaggtgccaaacaccatcggaaggcgtggttcttttcagagaaccagactctgagactgtggcctcccactatgagtcaccacctctgattcctgaggtcccctccagtcattggctctctcccaagccagccagctgatcagccttgaggacagcagagtgtctgccaagagagatctgtgaagtttcccatcaccgtggcagtccacaatgtgaagcccctgaggccacccttctccatgtgtcccccacactgtccctgaccctcccaccatcctagaaaaccagcctcccaggtcctctgtcatggaagtaatttacagcaaggcagaaagagctgaaagatttataaatgtgtaaaattta

SEQ ID NO: 29468 - DNA, 437 bp, Homo sapiens
ttattacctgagaccctgaaaggaagcactaaagaaatgaagacagaggaataccaggagagaaaggaggtccagttagacctaaaggtgggcaagaagaagaagaagaggagtttggatgcttcatctctgctgagacccagtgcctggcactgaaggtgctcaggaaataccttctgaatgatcggaagcccctgccatctgctaaactggatctatgatgacagaagccgaggaatgtgaggttcatctagagagttcttgtgaattttccaagggaggcacctgttgaattcaggcatcggcatgtgacttgatttggtcaatgaaatgtgagagaagtgacatccactttgaggcaggcactttccgagttgccccgacggccactctccatactgctgccagaagaaccttgaaatatcgctctttttaat

SEQ ID NO: 29469 - DNA, 257 bp, Homo sapiens
  misc_feature (80)..(80): n is a, c, g, or t
gcctagtcttcctgaggtagctcctgtcagcccactgatcccaccacccgctccctactgccccgcggtcttcgcgtgantcggagactgagggacaacaaaaatggcggaggggagccagtcggcgcctgaggcaggcaatgatatgggaaatgatgatgccattggagggaatgtgagcaaatatatagtgcttccaactggctattgtggacagcccaagaaaggacatcttatctttgatgcttgctttgaaa

SEQ ID NO: 29470 - DNA, 477 bp, Homo sapiens
gtcatctttctcaatattttctcagagctctagaatttaagagtattcctctagtgctagtagtacattccttcatatttcttgaagtgcctttgaacttaaatggtattaacattctagcaatttcaagggatctattatcatcatggtgggagacatttcctcccatgtttttgaaaaatgggaaattaagaacccaaaacattaaaatttaattagaaggtaaatttgctacagcagtacatagaaatttagcctcatgccttctgttacatggctaaatccctaccatgccacagtgatgccttacccctaagtgtttaatgtaatcacctcaattcctgacttactaagatctttaaaagcacttctttacagtttcatttaacacaatgtatttttatttgtgtaaataacaaaactccattaagaaaatcctccttttgtgtgtgtgtgtgtgtgtgtgagtgtgtgtgt

SEQ ID NO: 29471 - DNA, 492 bp, Homo sapiens
ttggctgtccaggtctccagtttcttattgggcatgaagatgtgtgcacagtggagtggacaggatacaggctaacacagaggtcaaggctctgctcccactttctccctaaatggctctgtgacgtcatttctctgtgcttcagttttctcttctgtaaaaaccagttagttagatcagtttgtctctgaacttcctgcaaactaagaatcactaacgtggatgtataattctgttttcctttttttaactcaggaactcacatgactttatgtaaatcacattttcctccaccattattaagtctctgtagatatatcgaccataaatctttgtgaaaagatatctaaagctggtcttcaggcgttttcagaaaattctacacagattgtgcctggaaatttgaaggctgcctttagaattcagctgacattcatgagtccttaagaattaggataacatgaggccaggtgcagtggctcacacctgtaa

SEQ ID NO: 29472 - DNA, 213 bp, Homo sapiens
gtttcgccatgttgcccaggctggcctccaactcctgacctcaactgatccacctgccttggcctccccaagtattagtattacaggtatgaaccaccatgctcggccatattcactattttgaatttcagttatttatgttcctgagaaaaagaggcaagaagaaacaaaggatagatggtacagatagataacaaataacaagaccaaaag

SEQ ID NO: 29473 - DNA, 427 bp, Homo sapiens
cagactagaaggtaccagaaaccagccaggagggaccgaatgcaatggtccttcagagaacagatacagtttctgaccaatgagctatatcccttgacagtgaagtgaattatgcctttcgtggattccaaagtcccacatttctctgaagtgggtttcatgtgccacaaaaagacattggtggcctgtataggaaaggaagtggctcttcaagcaccatatgtggtgagttgagggcagagctgtggagagcgctgggtcagagggttgtacaaagagtgaatcaacctggaagcatgtgatggggatcatgaggactcaggaaacaagactcctggactacagccaagaagaagttagaagtaaagcctatgcggtggctgacacctgtaatcccagcactttgggaggccaaggagagagcatc

SEQ ID NO: 29474 - DNA, 384 bp, Homo sapiens
ggagaatgactgaaataaagaggaatctgagtcatgatgaattgaatcgacagttactggggcttgagtcttcactgtctgtcttcgagtctagtgctgggtcccaaagttagggatgataggagtggaaagctgaagttatgggacaggtttaacacaggaccagactgagggctctattttaaaatgtctgatgctgtctttgttgatgactgttggtgactgtcaatgataatgactgttggtaattatcgagataattcaatgtactcatctcagcccttaactgtcttttttaagtatgaagcctttctccctcctgaaacatacaatttttctaaaactgtgtggtgaattcacaaggctaagggttaatccctgcct

SEQ ID NO: 29475 - DNA, 589 bp, Homo sapiens
ctaacgtcctgcattatgaaactttttttttaaatgcagctattttttccttcatctatgttcaatttctttgaagataaaaatttcaagtgcagtgaaactattttcatctttttcgatattacagtctccccatgtatggaattcattttgcatggcctcagaccaaatatttccaagtcccgtccttatatatagcaaagccatgtattttgctcatgccttcaagcctgggagtaacacagttttgctgtcagaagaagatggttgctgaggcaagtgggaacaggcatcccgcaccatgccatcccacctgcccttcccgactggagctgaggccacagggtttttcaccgccaaattgatatgcttttgaaggaagcatctggttctttggcagctccataggagtaatcttggtggttggagagtttctcctgcatctatcacatagtctagttattgaaagggttcctggcattttcacgtcccagtttctgggcataggaatgtgaaaaagctgaagtctgtttgcacttgcaaagcctctttgaaatttgtcaggctaaaaaaaaattctctgtgttta

SEQ ID NO: 29476 - DNA, 392 bp, Homo sapiens
acaccagtgattaaaacaaaaccctgtacattgaacacacagaaccacaaataataacgatggcaggtatcttttgttaagtaacttatgctcaatactatatggtcagttgaaattgtaggctgggtgtggtggctcatgcctgtaatcccagcactttgggaggccaaggcgggtggatcacctgaggtcgggagttcaagaccagcccgaccaacacagagaaaccctgtctctactaaaaatacaaaattagccaggcgtggtggcgcatgcctgtaatcccagctactagggaggctgaggcaggagaatcacttgaacctgggaggcggaggttaggttgcagtgagctgagatcacaccattgcactccagcctgggcaacaaga

SEQ ID NO: 29477 - DNA, 2447 bp, Homo sapiens
agacgaccaaccacttatgtgctaggtacgaggctgggtggtggcgagtccaaaatggcggctctcaggctggcgcgctccgtgctgctggggctttgaggtggtcgccgggggtccgggggaccctttccccgccgcggaagccctagaggatgaatcggggaccctgctaaggtctggcggcggggctggagagcagtggcagcaagggctgcggtggcgtccacgcagcgggatgtgcgagagttactccaggtcgttgttgagggtctcggtggcgcagatctgccaggcgctgggctgggactcggtgcagctcagcgcctgccacctcctcacggacgtgctgcagcgctatctgcagcagctgggccggggctgccatcggtactctgagctctatggccgaacagacccaattttggatgatgttggtgaagctttccagctgatgggggttagtctacatgaactagaagactatattcacaacattgagcctgtcaccttcccacaccaaattccgtcatttcctgttagcaagaacaatgtacttcagtttcctcaacctggaagtaaagatgcagaggaaagaaaagaatacattcctgattacctgccacccattgtgtcttctcaagaagaagaagaagaagagcaggtgcccactgatggaggcacatcagcagaagccatgcaggttcccttggaagaagatgatgaattggaggaggaagaaattattaatgatgagaatttcctgggcaagagaccactggatagtcctgaagctgaagaactgccagccatgaagcggcctcggctattaagcactaaaggggacacgctagatgttgtgttattggaagctcgagagccactcagctcaataaatactcaaaagatcccaccaatgctttctccagtccatgtacaggacagtacagacttggcacctccctcacccgagccgccaatgttggctccagttgcaaaatcacaaatgccaactgcaaaaccattagaaacaaagtcatttacacctaaaacaaagactaaaactagctctccaggacagaagactaaatcacctaaaaccgcccagtcaccagcaatggtcggaagtcctattcgatcaccaaaaactgtatccaaagaaaagaaatcacctggacgttccaagagccccaagagtcccaagagccccaaggtcacgactcacattccccaaacacctgtgagacctgaaacgcccaacaggactccttcagctacactcagtgaaaaaatcagtaaagagactatccaggtaaaacaaatacagacaccccctgatgctgggaaactgaacagtgagaatcagccgaaaaaggctgtggtagcagataaaacgattgaggcctctatcgatgctgtgattgcacgagcctgtgctgagcgagagccagatcctttcgaattttcttctggatcggaatctgaaggagacatttttactagccctaagagaatttcaggcccggagtgtactactcccaaagcttccacttccgcgaacaatttcacaaagtcaggatccactcctctgcctctttccggtggaacctcaagttccgataactcatggacaatggatgcctccattgatgaggttgtacgtaaagcaaaactgggaacaccttcaaatatgccccccaactttccttatatctcttctccgtcagtgtctcctcccactcccgaacctctccacaaggtgtatgaggagaaaaccaagctgccttcctccgtggaggtaaagaagaagttgaaaaaggaactaaagactaaaatgaaaaagaaagaaaagcagagagatagggagagggaaaaagacaagaacaaggacaaaagtaaggagaaggataaagtgaaagagaaagagaaagacaaggaaactggcagggaaacaaagtatccctggaaggaatttcttaaagaggaagaggcagatccctacaagtttaaaatcaaagaatttgaagatgttgatcccaaagtgaaattgaaagatggacttgtgaggaaggagaaagagaagcataaagataagaagaaagatagagagaaaggcaagaaagataaagataagagagagaaagaaaaagtgaaagataaaggcagagaagataagatgaaagccccagcacccccactggtgttgcccccaaaagagttggccctgcccttgttcagccctgccacagcctccagggtcccagccatgctgccatctttgttgccagtgcttccggaaaaactgtttgaggagaaagagaaggtgaaggagaaagaaaagaaaaaggacaaaaaggagaagaagaaaaagaaggaaaaagagaaggagaagaaggagaaggaaagagagaaagagaagagagagcgagagaagagagaaaaagagaagg

SEQ ID NO: 29478 - DNA, 1996 bp, Homo sapiens
agacgaccaaccacttatgtgctaggtacgaggctgggtggtggcgagtccaaaatggcggctctcaggctggcgcgctccgtgctgctggggctttgaggtggtcgccgggggtccgggggaccctttccccgccgcggaagccctagaggatgaatcggggaccctgctaaggtctggcggcggggctggagagcagtggcagcaagggctgcggtggcgtccacgcagcgggatgtgcgagagttactccaggtcgttgttgagggtctcggtggcgcagatctgccaggcgctgggctgggactcggtgcagctcagcgcctgccacctcctcacggacgtgctgcagcgctatctgcagcagctgggccggggctgccatcggtactctgagctctatggccgaacagacccaattttggatgatgttggtgaagctttccagctgatgggggttagtctacatgaactagaagactatattcacaacattgagcctgtcaccttcccacaccaaattccgtcatttcctgttagcaagaacaatgtacttcagtttcctcaacctggaagtaaagatgcagaggaaagaaaagaatacattcctgattacctgccacccattgtgtcttctcaagaagaagaagaagaagagcaggtgcccactgatggaggcacatcagcagaagccatgcaggttcccttggaagaagatgatgaattggaggaggaagaaattattaatgatgagaatttcctgggcaagagaccactggatagtcctgaagctgaagaactgccagccatgaagcggcctcggctattaagcactaaaggggacacgctagatgttgtgttattggaagctcgagagccactcagctcaataaatactcaaaagatcccaccaatgctttctccagtccatgtacaggacagtacagacttggcacctccctcacccgagccgccaatgttggctccagttgcaaaatcacaaatgccaactgcaaaaccattagaaacaaagtcatttacacctaaaacaaagactaaaactagctctccaggacagaagactaaatcacctaaaaccgcccagtcaccagcaatggtcggaagtcctattcgatcaccaaaaactgtatccaaagaaaagaaatcacctggacgttccaagagccccaagagtcccaagagccccaaggtcacgactcacattccccaaacacctgtgagacctgaaacgcccaacaggactccttcagctacactcagtgaaaaaatcagtaaagagactatccaggtaaaacaaatacagacaccccctgatgctgggaaactgaacagtgagaatcagccgaaaaaggctgtggtagcagataaaacgattgaggcctctatcgatgctgtgattgcacgagcctgtgctgagcgagagccagatcctttcgaattttcttctggatcggaatctgaaggagacatttttactagccctaagagaatttcaggcccggagtgtactactcccaaagcttccacttccgcgaacaatttcacaaagtcaggatccactcctctgcctctttccggtggaacctcaagttccgataactcatggacaatggatgcctccattgatgaggttgtacgtaaagcaaaactgggaacaccttcaaatatgccccccaactttccttatatctcttctccgtcagtgtctcctcccactcccgaacctctgcagcatcgactgtatagaatccgcccgctctccacccacccctcactgatactagaagagaagacccacaggcatgacccaagtctctcaaatacacactcacaaacacacactcctcgctacctgaatcatcaaaaataatcttattctctaatttcatttctttctcttctccttcctagaatacctctctttgtagtccctaaccaaaataagtcatggtggtgaggcgggatcctctagaca

SEQ ID NO: 29479 - DNA, 407 bp, Homo sapiens
agagattattttttctttatagctctcaatgaattttaaaaagttcacaccttcccctagctgtaagcattcttcacgtgaggcagcctatggaatgcatgtgtcatgcccaggcgatgttgtatgcagaagccacagaactttgaagtacagtggagtctgtagtatgtgcctggcacctaggaatccttgtatatttctttctggaaagctacagggagggttacagctttataaaaaggaatggtgcatcaagaaagcaatgcagtgctgggattacaggcctaaggcactgcacctggcccaaatattttttaatggaggtacaattcaacccataacagcctctgtgtgtgtgtgtatctgtgcttatgtgtctgagaactatggtgatgcttgtagttaaa

SEQ ID NO: 29480 - DNA, 163 bp, Homo sapiens
atccatccacccacccatccatccactcatccatccatccacttatccacccacccgtccatctgcttatccatccatccatccatccacccgtccattcatccatccactcacccatgcattcactcatctatccatccattcacccatctatccatccacc

SEQ ID NO: 29481 - DNA, 329 bp, Homo sapiens
ttgtcttgaccttcgttttgtaagtatcttgaagattcctttctcatccaaatctgttagaatcaccgcagtttccaaagttggctaaacatcagaatcacctgaggtgcttgttaaacacagggaatgtcctgatagcctctggagattctgattaagtggaccagttaccagaaagcagccccaatccaggccccatgagaggattcttggatcttgcgcaagacagaattcgaggcaagtccacagattaaagtgaaagcaagtttattaggaaattaaaggaataaaagaatgaccactccataggcagagcagccccagggctg

SEQ ID NO: 29482 - DNA, 507 bp, Homo sapiens
agagcatcctggtttgaaagaacaaaaggatctaaggcagtagccctgggaatgtacttcaaaagttcaggatcaatgagtatccagtttagctaaagaaaacaattctagtgaaagaagtaaacaaacgtttggtaggatgaaatggttccatcttatggagaagcttaaatattgatccaagaattttgaacaccctagtggacttcaggagaaccttgtgactctgagcaaagataaaaataaattgatatgggaaatgatgttcctttcagattagagaaactcctgaattaatctcaaatttggaggccgcttagtataacaaaaaagtatattttcaatattgctgatatgtaatctaagaatggttctctcttcctgtcactgaaattcatctattatttattccaagctttaaaaaaaaagtactaaaataaaattgtgtgattgagcattgcaaaagagtgggtttttataatgtggaagccaaaattttttatcaga

SEQ ID NO: 29483 - DNA, 991 bp, Homo sapiens
acagcaaaggtggtttgaggtagtcacctgcttacagataacagccaaagatagaattccaagttataaagcataaaaaagagccaacagaagtaactaatccgggaaaagtgaacatatgggccctttaaagactacaagatttgctagataaactggaaatggagaagttattgcagacagtcatgaaccacaaatcactgtgattaaaattttcttctgatcgtaatccacgaatgcattcattttttggacattgcttacttatcttttaaatgtttcttttattacaaagcctattttgagtagcttttaaaactgaatttcctttaattggtttgaagcctagagatgaatttcgttttcaaatatctggtgggatggtaatggggattagagaactgacatgagaaaagaggagctgttttggtattaaacgaataaaatcttaagcaaatataggtgtcttttattcttaaaaaatagcagatacagtttatccacatttgtaaatatttgtataaagaaagtagcaaaacagttttggtttaaaaagttccaagtctcattgcaatcattctttgtaaaggctgacttgtaatgaatatgtattaagcaatatttattgactatacaccatcttgttctagaagagtttaaagccacttaagaagataaataagatataaaaagaaaacagcagtcaaaagcagatgagaagaaatgggaaaaacaaaaaaaaaagaaaataatgaggctaatataatgctgtgtgtacatgaacatgaatgtgcctgtgttacacattttcaggccacaaatgtttctttgtgcccctgcatgcacaagggtatttccaggtcatttatcattgtgaacagtgttgcttatgataaaaaatagattctataaactctaaatatactttttttctaccactctgtgtaaaagatcatgaacgtaaataaattttagatatgaaaagggttag

SEQ ID NO: 29484 - DNA, 521 bp, Homo sapiens
ctccatattaaacctgttctttttttttttttgagacggagtcttgctcttatcccccaggtggagtgcaatggcgcgacctcggctcactgcaacctctgccttccgggtttaagcgattgtcctgcctcagcctcctgagtagctgggattacaggtgcctgccaccatgcccggctaatttttgtatttttagtagagacggggtttcaccatgttggccaggctggtctcgaactcctgacctcaggtgatctgcccgcctcggcctcccaaagtgctgggattacaagtatgagccaccgtgcctggcctaaaactgttcttatgctgactctatcacttattgaatcaaagttggcattaatttcactttatagtttaattaactataaacactaacattttaaaaattaagcaactttgtctaaattggagtctttgtcattaatgtgtatttagacactggtaaatgtttttaagtctgcttctgttgtctataaacatgacttttgatctac

SEQ ID NO: 29485 - DNA, 438 bp, Homo sapiens
gtaaaccacgagcatgatacaacactcataaaactggcatttgggaaagccaccacagtaaagctatttataaacaaggaaattatacagagttctttgccactgaatgtacaacacagaaacaaagccaaaaggccctaccaacatacatcgggccaggcacagtggcttgtgcctgtaatttcagcactttgggaggctaaagcaggtagattacttgggctcagaagtttgaggccagactggaaaacatgacaaaaccccatctctactaaaaagacaaaaaaaatgctgggcatggtgacgtgtgcttgtagttccaactacttgagaggctgagataggaggattgcttgagcctggggaagtcaaggctgcagtgagccaagatcatgccactgtattcctgcctgagcaaaagagtgggatcctgtctca

SEQ ID NO: 29486 - DNA, 273 bp, Homo sapiens
aaattttctaatatccaaacagattttgaaattccatcatgattttggtgtgaatttttcttatcatctcttgggagaaaacgtccaggattctgttggtggcagaatccatgtcaaagagttaaggtatgagggagggaatgcccaccccatctggcctggaataccttctagatgcttttatccagtgtggcaacagagcagcaacactggcatcaccaggcatgcagaatctcgggccgtatcccaggcctcctaagtcatatctgaatt

SEQ ID NO: 29487 - DNA, 626 bp, Homo sapiens
ttggccaggctggtctggaactcctgacctcgtgatccacccacctcggcctcccaaagtaccaggattacaggcgtgacacgcgcgcccggccttcacttttatataatttatatgactcgagagttttgcccatgatcccaccaccccagcacatcagtgttgaaacgcttccagggagttcggtgccctgaccacagcctctccttctctagccctctctatccccacttccctgttctttgggccttcatcagggactctcatctgttccccagtccattcctccctgggttcagcactttacctttcctacgcataattaatgatttgtcttcactcatgactcatcaaatatttgagtgtcagctggggataccatgaggcagacaaggcctcttgtctttttggagcttgcattcaatgcgtagagacgccaacaacatcatcacataggctggtaagatagtaaggccattattatgtgtcaacagtgactcatgcctgtaatccccgtgctttgggaggctgaggcaggaggatcatttgggcctggaagtttgaggcttcggtgagttataacagccccattgcactccagcctaggtgacagagcaagaccctgc

SEQ ID NO: 29488 - DNA, 336 bp, Homo sapiens
atgaaagaaacaatcatgaaccaaaaactcaccaaacggcaagcagaagtgcacactggtcggaaaggaactgctcacaggaaaaaggtggttcacacgacagcagaggataaaaaatttcagttctccttaaagaaattaggggtaaacaatatccctggtattgaagaggtgaatatgtttacacaccaaggaacagtgattcactttaacaaccctgaagttcaggcatcgctggcagcaaacactttcaccatgacaggccatgctgagacaaagcagctgacagaaatgctactcagcatcgatcataaaccagtgctgcagatggtctga

SEQ ID NO: 29489 - DNA, 443 bp, Homo sapiens
ttaatttgtctaagggcatgcaagtataaagtttgtgtttgattccacgtactcaagaggcacagtttgtgctgttactcttatgcttcgttacctacctgcttgctactattatctccatatttagctaaagaaatagaagctcagaaaagttaaagtaacttgttggaacattagtttttagcaaaccaataaatatctgttattgaactgaaatgagaggcacagctaatacatgctagacccaggattcgaacaatggctatctgtcctgaaagcttatccttttctcactactctgtactgaggataacaaaagggcattttttaggaagaaggaggcagtattaatttttagttacacaagtgatatataagtacagtctgcttttttaaaaagtggcacaaatcagataacactaaagacccctttgacgctatgc

SEQ ID NO: 29490 - DNA, 1161 bp, Homo sapiens
gccatgccgcttcatactattgcaatggtattagatttcaacatatgaagttgtgaaggggacatacattcagaccatagcactaagtattttattttactgaatactaccataaatggaattattttctgaatttccttttggattgttcattgttggagtattttttttaaaaaaacctaattgttgtgtgttgattttgtactctgcaactatgccaaaactatttgttagctcatagatgttttgtggattatatgctaaataatgttatctgcaaatagagtagttttacttctgcctttcaatttgaatgtcttttattttttttttcttgcctatttgctctggctagaacttttaatacagtgttgaattgcagtggtgtgaaagcactatcattgcctgttcatgatcttagggggggatctttcagtctttcactatggagtatgttacctatgagttttttgtatatgtgctttattatgtggaggaacaggcagcagtctttgctgtttggcagcctccactggtgataccgaggcaaacagggtctggagtggacctccagcaaactccagcagacctgcagcagaggggcctgactattagaaggaaaactaacaaagagaaaggaataacatcaacatcaacaaaaaggacatccattcagaaaccccatctgaaggtcaccaacatcaaacaccaaaggtaaataaatccacgaagatggggagaaaccagcacaaaaggctgaaaattccaaaaaccagtacacctcttctcctccaacacactcctccacacaactccttgcctgcaagggaacaaaactggacagagaatgagtttgacaaattgtcagaagtaggcttcagaaggtgggtaataataactaactcctccaagttaaaggagcatgttctatccaatgcagggaagctaagaatcttgataaaaggatagacaaattgctaactagaataaccaggttagagaagaacataaatcacctgatggagctgaaaaacacagcacaagaacttcgtgaagcatacataagtatcaatagctgaatcaatcaagtggaagaaaggacataagagattgaagatcaaattaatgaaataaagtgagaaaacaagattagagaaaaaa

SEQ ID NO: 29491 - DNA, 456 bp, Homo sapiens
tcaagcgatcttcctgccccatcctcctagagcactgggattacaggtatgagccaccacacccagtcccaagcctcatgttttcaccaacacactcctccacacaactccttgcctgcaagggaacaaaactggacagagaatgagtttgacaaattgtcagaagtaggcttcagaaggtgggtaataataactaactcctccaagttaaaggagcatgttctatccaatgcagggaagctaagaatcttgataaaaggatagacaaattgctaactagaataaccaggttagagaagaacataaatcacctgatggagctgaaaaacacagcacaagaacttcgtgaagcatacataagtatcaatagctgaatcaatcaagtggaagaaaggacataagagattgaagatcaaattaatgaaataaagtgagaaaacaagattagagaaaaaa

SEQ ID NO: 29492 - DNA, 301 bp, Homo sapiens
tgttcatgggctcatatctcaacagttactggatatttattgaattttatatgcaacacagacacggcatttatctttaagatattttttgcctctcatgttttagctccaagacatctaagtcactttggtagaaagaagccagggcaggcagtgcccacacctcctactcgaggcttcatttctgaactagagcagttacagagaacatcacaggaccctgagtagggcagccagggtaaaataataaaactgaacacagtaacatcttctattattatattatattatattatattat

SEQ ID NO: 29493 - DNA, 178 bp, Homo sapiens
ggcccaatgaatccttaagctctcatttgttcctagcaaaactgtgcctttgggaaagtcgtttggcagaaaataatctagcttgctttgctattctgaaattggtttcaggaaattaaaagcgaaggtctgaattatatccccagaactgtaacatttaagactgaattctacttca

SEQ ID NO: 29494 - DNA, 494 bp, Homo sapiens
ttttttgtaattactttttgtgttgaactcttacagactcacaggaaattgcatggtacatacagtcccacgtaacattcatccagtattcccacagtgggaacatcttacataaccatagtataatatcaaaaccaggaaagtgacatgggtacattactgttaactagattacagaggaccttattcagtattcaccagtttcacatgcattcctgtgtgtgtgtgcacgcatgtgcatgtgtgtttctatgcaatctgatccatataaatatttgtatacctaccgccacaatcaagatagagacccacaaaggaatccccttgtgttaccactatagtggcaggcacacacacatatacatgcacatacacaaacacactgtatctgtccctttgcaaataccaatctgttctccatctctgttgtgttctcattgtaagaatgttatataggctgggcgctgtggctcatacgtgtaatcacagcactt

SEQ ID NO: 29495 - DNA, 223 bp, Homo sapiens
tcttctctgttttccttcagtgctttcacggtttcatgtcttaactttaaaagtctttaatccatgttccattgattttcctatatggtatgagttaagagtccagtgctagtcgtctgcccgtgggtatcaagttcttccaacacagtttcttaaagagactgtgcttttctcattttatggtcttgacatctgtcaaaaatcactccatcacaaatgcatg

SEQ ID NO: 29496 - DNA, 340 bp, Homo sapiens
ctagaaagcatatttactctcaaatctttaattattaccagagcaataattttcaaactttttaaaagctgaaacctcctttgcttcccaccaaaataaacttaacaagggaccgggtgcagtggttcacgcctgtaatcccagaacttttggaggctgaggcaggcagatcacgaggccaggagttcgagaccagtctggccaacatggtgaaaccccatctctactaaaaatacaaaagaaattagctgggcttggtggcacaagcctgtaatcccagctacttgggaggctgaggcaggagaatcactcgaacccgagaggcagaggttgcagtgag

SEQ ID NO: 29497 - DNA, 478 bp, Homo sapiens
cgggctcaagtgatcctcccacctcagccccctgagtagctgagactacaggaacatgccaccatgccgagtaattttaaaattttttgtagagacattatgctgcccaagctggtctcaaactcctggcctcaagcaattctcccgccttggcctcccaaggcactagaattacagatgtgagccactgcaccctgcccagatgaacacttgctttgctcaccactgtgtctctatgtagcatcagagcatcgtcctggtacaaagagtggggcctgaataaagatttactggttaatggatggataggtcaaatgggtattcattcttttgttcctgagcacaacaggtgtaataggtcctgtgccaggtggcacggggaggcagagattagtcaaatgggggccaggtgcggtggctcacacctataatcccagcactttgggaggccgaggcgggcagatcacctgagtgcttc

SEQ ID NO: 29498 - DNA, 537 bp, Homo sapiens
ataagggagtatagcaagagaaagacaaaggatttaggaacacagggaaaccaataaaaacatctgaagatcgtggtgaacggaaaagtcccaggtagtagctatatgtcaaacttacagaacaactaacttggggtaggaggaggagaactgaagacttcagatgaaattccccaagataaatatgcaacagatagaacacttacacatgttcaaaagctatttttacttacattagagaaccatggtatgaattagtaataaaagcacacaaaaccaagcaaataaaaaaatggatttattaactagtggaaacagttatacaagagaagaaatagaatcatgatatactctgtgacttagctataaataatacttatataatcaaaatcatattagccctagatactgatttaaccaaaaattatgatataaatatatcagaaggataggaggaagggaaatgtatgcaagaatgcaagaagaggaggtataggaaagtaaatcctcatcttccatagaaggaagtcaatggac

SEQ ID NO: 29499 - DNA, 6238 bp, Homo sapiens
gcagacacgcgtggcgcgggccgccgtttccgcaaacagaatcgcgtttggctgtgctggatgtgtgaacctattgggtactgtacaacttcaagcctcgaaatcagataggcaccaccaacctcatttcctgtttcaccttgattttctgtgataccaaaatctcagcttcacaaagtcattgaaagtgttggttcatgaagttttaccatcaattcaagtaatcataaatggcaaattctgcaaaagcagaagaatatgaaaagatgtctcttgaacaggcaaaagcgtcagtgaattctgaaacagagtcttcattcaatattaatgaaaacacaacagcttctgggactgggctttctgaaaagacttctgtctgtaggcaagtagacatagcaagaaagagaaaagagtttgaagatgatcttgtaaaggaaagttctagttgtgggaaagacactccatccaagaagagaaaacttgatcctgaaattgtcccagaggaaaaagattgtggtgatgctgaaggcaattcaaagaaaagaaaaagagaaactgaggatgttccaaaagataaatcttctactggagatggcactcaaaataagagaaaaatagcacttgaggatgttcctgaaaagcagaaaaatctggaagaaggacacagctcaacagtggctgcccattacaatgaacttcaggaagttggtttggagaagcgtagtcaaagtcgtattttttacctaagaaactttaataattggatgaaaagtgttctcattggagaatttttggaaaaggtacgacagaagaaaaaacgtgatatcactgttttggacctgggatgtggtaaaggtggagatttgctgaaatggaaaaaaggaagaattaacaagctagtttgtactgatattgccgatgtttctgtcaaacagtgtcagcagcggtatgaggacatgaaaaatcgtcgtgatagtgaatatattttcagtgcagaatttataactgctgacagctcaaaggaacttctgattgacaaatttcgtgacccacaaatgtgttttgacatctgcagttgtcagtttgtctgtcattactcatttgagtcttatgagcaggctgacatgatgctgagaaatgcgtgtgagagacttagccctgggggctattttattggtactactcccaatagctttgaattgataagacgccttgaagcttcagaaacagaatcatttggaaatgaaatatatactgtgaaatttcagaagaaaggagattatcctttatttggctgcaaatatgacttcaacttggaaggtgttgtggatgttcctgaattcttggtctattttccattgctaaatgaaatggcaaagaagtacaatatgaaactagtctacaaaaaaacatttctggaattctacgaagaaaagattaagaacaatgaaaataaaatgctcttaaaacgaatgcaggccttggagccatatcctgcaaatgagagttctaaacttgtctctgagaaggtggatgactatgaacatgcagcaaagtacatgaagaacagtcaagtaaggttacctttgggaaccttaagtaaatcagaatgggaagctacaagtatttacttggtgtttgcctttgagaaacagcagtgagcacataggcagtagtcccagaggggccgtgttctgtcctgcacaaatttgaacaactcatctcgatatatttgatatttctctgtctgttgattttaattctaaatgtgcaggatgctgccagaaactccaatgtagaaattcaacatttgctgtctgtgacagatgaacttttgcatgtgtatataagaatgagttgggacctctgtctttaaaaatctatttttaggtaatgttctaagaattccatttgcctctatgatcttagctcataaaaatataatatgacttgataaagcaactaaactctttccacagtgttcagatttgtcctgtgtgtgtttacagtattcaatttattgcagttatagaattggtcagagagcattttcatagtgtgctcatttctatggttttgttatatagcatttttcaacatttaatggtctgtacagttgaatgtaagtgttcaatatgtattgctgaagttataagtttaaaactcaatttcagatgctcataaaagttacttagctaaaattttagcaatttattgcattttgaaataatcattaacatgctgcaattcaggagctggttagaacattttaagtggcagcatagaattttggaattttggggctttcttttcagaaattgctaccatagtaattaatgtttccagttatcaagattgtgattagacacatttacctttcttcattgaacaaatggtgccatagttatttttctcaaaatttagtgaaaatccctcccatgtagacatgttgcacattttttccaaatttatacatggaactgcagtaggaatattctcaccatctgatgccatgtacccacttcagaaataagcaatacttgttcctctgttacaacctcagcactttgcaccgtaggagccattgttaaagttgtcacttgtgtaactgactgcttttccaaaactggtacttacgtgaactgttgtccttgctttacaccaccatttggaaaacttaccagtttttagatgtagatgtagtgaaaaacttcaagaatgaagcagagcaattgagtattcttttttaaattattaagccatgatttacaaaaacattactttctgtaattcacaatacttgttttaaaaacatagtgtcttcattagtgtgcatctattaactgttcatggtgttagagttgcaaactttttagcaagaaaatatggatttcctcatttcagttccttctgcagcctgtgaatctccacaaagtgttaccagtttacaaaaataagtctttttgccttaagtcattttggaaataagtaatactgcatctgactctggtggctgtattagctaggaaaggtttgtaaatggtgtcagtgaggtggggaaaggaagtcttcctgtcacatatgcaggttcgttttcattctagggcagtgccaggaagtatattgatagctttgtaggtacaggaaaaacatcatcattatttcctctgttcacatttactggtcttaattaacaggtaataataatacatgtacttttagcctgaaacctcttccacgccatgggtaacttgggggagagaagaatcctccaaacgatggagtagccagtggtaatacaaagcagggagaacagaaaggtagagttactaaggccttcagtgaacagaaaggagcagagagcaagattagatctgagaagatgctctggggactgagcccactgttgttggtgtcagggaggcttactggagccacacctgcaggcgctgtgttcaggcaccaccttcctccttgagctttgcctgtctcttgccttatcagttcttcctccaccaccctacacccccctccccccggccccaagcccctgtgtctccttgttacaattaagtttctggatattgacttaagaactgttaggaagaggactagaaaaggcttcccctgcctatcctctccgatcaccaaggtggaagggagctagtaggactcttccttgacacaccttgtagtctaaatgttcggtattctattcaggacttacggtaactattatgagggaggcatggctttccaccgtcgggccaggaagagcacctgttgctgcaagctcagtgaagtggggcactcccagacctgccatgcagtttatcctctgagaatggaattggaaatgaagacctaaccagctattggtgggaatgacggaactggggattgcgatgattgatctgggaacatggctggattgtgatttaaccaagaatgctgatgttgaattctttgggcctagaatatacttgagaaagcactagtggcttgtgttcagggagaggagctggcagtttttaaccacttctgtgggagccgtgttctaacctgtggaaagtattgcaattctgtgagagtgactctgcagagtcactgcaccatcaggcttggccctgctgtgccttcagtacccagccaggttctctgggtccagggtgactctccaaagaaattggccttcagctggagaaaacattgggtggagactctcacttatgttaatgcaatcttgaaatgactgaaaggtagattgccagcacagtgagtttcccagcctgctcccccatccacacttggaaattgagggagcatgaccgctctctgacttcacatgttaatagaggatcagagcagagttgggagtatattggtcaggatcatagaaaagaagacaaagcttgctcagccatgagatggccaggtatccagttttgttaactctctttgggaatttctttttcagcctgttttttagcttagtgccattatgtcattttgatttgtattcaagtactcttcaagtatctttgtaatgaaggtttggctacttgtataggtctgcctgcagggtgaaaatgccagtgtgaatattctagctaccaaacattgttttttgttgaaaaactgactttctgttgtctacctcaggccttgtgcatttgggttatctcaagccagtcaccacagagggtctctagggtctgcaaaatagaggccaaatccagggaccaggccctaataatagaagttgtaccaaaatgcctgtggtacttgatggcctgttggtcaaataggaagtacaagtgtgtgatgttagaacctccctagttgctgctatatcaaacactgcacacttgacaagtgttttcattccccgccctctgacagaacaacattcctaattctttgaaggcaaccagtgcaaaggctactacacttgtgtaatgatatttagcagatgcatacaggactggatcccagggcactgtcagttcttccctccctctcgtgctgctcagtttgtcctctgctcccatgtaggcctaaagtcaccccactccttagtgcctgcacctcaccacgatattgaggaagcacaggacatccaagggtactctccagtttggctgtggagacttgagcaagccctaaagtcccctgctccctggacttctcctgggttgtgcttttttgggggcaacataccttggacaaagctgagctgacagctaatgtttattagcctcctacctaagtcagtcactttgctaaattcttcacctgtggtaactcattttgattgttataacatctcagcaccattattcccattttaatgatgaggaaactgagtcatagaggatacagacttgcccaaaggagagccaggattttcacaccccctcctcaagctgggcctgccctccaagtgcttgttatatacctccacgggtgtcagcccagatgactcctcacccatccaccacctgcagcttgagatgttaactattagagctccattcttttggttcaaaacgttgatacttacttagatgttccctgagaggagtgtttatttctgagtaaggggctttgttgaaagagggggttagagagagcaagacagcacttgagtgcactggcaggaagcagagataagacttgaatttcagtttggtagacctccttctttagcagcccaacctgtagcaaatctagtttagcctgcatggcagggagagggattctcttcccaccctcaccatttgcaagtggcaggagctgagaatgccagtacgagagtgtagccaaagtgagaggctgagagcaaaggagacatttttttcagttttgagtcgagtatccagacagaggcaaatcattttgtttaactttttattaaagtgtaactatagaaacacatcaatgatttttcacaagtggagcacgtgcatacaatcggcaccccagaagccccccgtcagattcccttccagttaactacctctccaagggaaaccactatcctgagttctaagcgcatagattagttctgtctggtttggggagatatataaatggaattatgcattcttcgtatctggtttcttttcaccaatattatgtttgtgagatttttgttgcatgtatttgtacatggattttcattctcatggttgtataatatttcattgtgtgaataaaccacatactgtttatctga

SEQ ID NO: 29500 - DNA, 4176 bp, Homo sapiens
tttgtccctcggccgccgtggaggggtggaactggcactcccacccctgacatgggctcacttcgcattagccctgtgcttcactacccaacgcgatgtgtgaacctattgggtactgtacaacttcaagcctcgaaatcagataggcaccaccaacctcatttcctgtttcaccttgattttctgtgataccaaaatctcagcttcacaaagtcattgaaagtgttggttcatgaagttttaccatcaattcaagtaatcataaatggcaaattctgcaaaagcagaagaatatgaaaagatgtctcttgaacaggcaaaagcgtcagtgaattctgaaacagagtcttcattcaatattaatgaaaacacaacagcttctgggactgggctttctgaaaagacttctgtctgtaggcaagtagacatagcaagaaagagaaaagagtttgaagatgatcttgtaaaggaaagttctagttgtgggaaagacactccatccaagaagagaaaacttgatcctgaaattgtcccagaggaaaaagattgtggtgatgctgaaggcaattcaaagaaaagaaaaagagaaactgaggatgttccaaaagataaatcttctactggagatggcactcaaaataagagaaaaatagcacttgaggatgttcctgaaaagcagaaaaatctggaagaaggacacagctcaacagtggctgcccattacaatgaacttcaggaagttggtttggagaagcgtagtcaaagtcgtattttttacctaagaaactttaataattggatgaaaagtgttctcattggagaatttttggaaaaggtacgacagaagaaaaaacgtgatatcactgttttggacctgggatgtggtaaaggtggagatttgctgaaatggaaaaaaggaagaattaacaagctagtttgtactgatattgccgatgtttctgtcaaacagtgtcagcagcggtatgaggacatgaaaaatcgtcgtgatagtgaatatattttcagtgcagaatttataactgctgacagctcaaaggaacttctgattgacaaatttcgtgacccacaaatgtgttttgacatctgcagttgtcagtttgtctgtcattactcatttgagtcttatgagcaggctgacatgatgctgagaaatgcgtgtgagagacttagccctgggggctattttattggtactactcccaatagctttgaattgataagacgccttgaagcttcagaaacagaatcatttggaaatgaaatatatactgtgaaatttcagaagaaaggagattatcctttatttggctgcaaatatgacttcaacttggaaggtgttgtggatgttcctgaattcttggtctattttccattgctaaatgaaatggcaaagaagtacaatatgaaactagtctacaaaaaaacatttctggaattctacgaagaaaagattaagaacaatgaaaataaaatgctcttaaaacgaatgcaggccttggagccatatcctgcaaatgagagttctaaacttgtctctgagaaggtggatgactatgaacatgcagcaaagtacatgaagaacagtcaagtaaggttacctttgggaaccttaagtaaatcagaatgggaagctacaagacttacggtaactattatgagggaggcatggctttccaccgtcgggccaggaagagcacctgttgctgcaagctcagtgaagtggggcactcccagacctgccatgcagtttatcctctgagaatggaattggaaatgaagacctaaccagctattggtgggaatgacggaactggggattgcgatgattgatctgggaacatggctggattgtgatttaaccaagaatgctgatgttgaattctttgggcctagaatatacttgagaaagcactagtggcttgtgttcagggagaggagctggcagtttttaaccacttctgtgggagccgtgttctaacctgtggaaagtattgcaattctgtgagagtgactctgcagagtcactgcaccatcaggcttggccctgctgtgccttcagtacccagccaggttctctgggtccagggtgactctccaaagaaattggccttcagctggagaaaacattgggtggagactctcacttatgttaatgcaatcttgaaatgactgaaaggtagattgccagcacagtgagtttcccagcctgctcccccatccacacttggaaattgagggagcatgaccgctctctgacttcacatgttaatagaggatcagagcagagttgggagtatattggtcaggatcatagaaaagaagacaaagcttgctcagccatgagatggccaggtatccagttttgttaactctctttgggaatttctttttcagcctgttttttagcttagtgccattatgtcattttgatttgtattcaagtactcttcaagtatctttgtaatgaaggtttggctacttgtataggtctgcctgcagggtgaaaatgccagtgtgaatattctagctaccaaacattgttttttgttgaaaaactgactttctgttgtctacctcaggccttgtgcatttgggttatctcaagccagtcaccacagagggtctctagggtctgcaaaatagaggccaaatccagggaccaggccctaataatagaagttgtaccaaaatgcctgtggtacttgatggcctgttggtcaaataggaagtacaagtgtgtgatgttagaacctccctagttgctgctatatcaaacactgcacacttgacaagtgttttcattccccgccctctgacagaacaacattcctaattctttgaaggcaaccagtgcaaaggctactacacttgtgtaatgatatttagcagatgcatacaggactggatcccagggcactgtcagttcttccctccctctcgtgctgctcagtttgtcctctgctcccatgtaggcctaaagtcaccccactccttagtgcctgcacctcaccacgatattgaggaagcacaggacatccaagggtactctccagtttggctgtggagacttgagcaagccctaaagtcccctgctccctggacttctcctgggttgtgcttttttgggggcaacataccttggacaaagctgagctgacagctaatgtttattagcctcctacctaagtcagtcactttgctaaattcttcacctgtggtaactcattttgattgttataacatctcagcaccattattcccattttaatgatgaggaaactgagtcatagaggatacagacttgcccaaaggagagccaggattttcacaccccctcctcaagctgggcctgccctccaagtgcttgttatatacctccacgggtgtcagcccagatgactcctcacccatccaccacctgcagcttgagatgttaactattagagctccattcttttggttcaaaacgttgatacttacttagatgttccctgagaggagtgtttatttctgagtaaggggctttgttgaaagagggggttagagagagcaagacagcacttgagtgcactggcaggaagcagagataagacttgaatttcagtttggtagacctccttctttagcagcccaacctgtagcaaatctagtttagcctgcatggcagggagagggattctcttcccaccctcaccatttgcaagtggcaggagctgagaatgccagtacgagagtgtagccaaagtgagaggctgagagcaaaggagacatttttttcagttttgagtcgagtatccagacagaggcaaatcattttgtttaactttttattaaagtgtaactatagaaacacatcaatgatttttcacaagtggagcacgtgcatacaatcggcaccccagaagccccccgtcagattcccttccagttaactacctctccaagggaaaccactatcctgagttctaagcgcatagattagttctgtctggtttggggagatatataaatggaattatgcattcttcgtatctggtttcttttcaccaatattatgtttgtgagatttttgttgcatgtatttgtacatggattttcattctcatggttgtataatatttcattgtgtgaataaaccacatactgtttatctga

SEQ ID NO: 29501 - DNA, 6109 bp, Homo sapiens
gcagacacgcgtggcgcgggccgccgtttccgcaaacagaatcgcgtttggctgtgctgtgttggttcatgaagttttaccatcaattcaagtaatcataaatggcaaattctgcaaaagcagaagaatatgaaaagatgtctcttgaacaggcaaaagcgtcagtgaattctgaaacagagtcttcattcaatattaatgaaaacacaacagcttctgggactgggctttctgaaaagacttctgtctgtaggcaagtagacatagcaagaaagagaaaagagtttgaagatgatcttgtaaaggaaagttctagttgtgggaaagacactccatccaagaagagaaaacttgatcctgaaattgtcccagaggaaaaagattgtggtgatgctgaaggcaattcaaagaaaagaaaaagagaaactgaggatgttccaaaagataaatcttctactggagatggcactcaaaataagagaaaaatagcacttgaggatgttcctgaaaagcagaaaaatctggaagaaggacacagctcaacagtggctgcccattacaatgaacttcaggaagttggtttggagaagcgtagtcaaagtcgtattttttacctaagaaactttaataattggatgaaaagtgttctcattggagaatttttggaaaaggtacgacagaagaaaaaacgtgatatcactgttttggacctgggatgtggtaaaggtggagatttgctgaaatggaaaaaaggaagaattaacaagctagtttgtactgatattgccgatgtttctgtcaaacagtgtcagcagcggtatgaggacatgaaaaatcgtcgtgatagtgaatatattttcagtgcagaatttataactgctgacagctcaaaggaacttctgattgacaaatttcgtgacccacaaatgtgttttgacatctgcagttgtcagtttgtctgtcattactcatttgagtcttatgagcaggctgacatgatgctgagaaatgcgtgtgagagacttagccctgggggctattttattggtactactcccaatagctttgaattgataagacgccttgaagcttcagaaacagaatcatttggaaatgaaatatatactgtgaaatttcagaagaaaggagattatcctttatttggctgcaaatatgacttcaacttggaaggtgttgtggatgttcctgaattcttggtctattttccattgctaaatgaaatggcaaagaagtacaatatgaaactagtctacaaaaaaacatttctggaattctacgaagaaaagattaagaacaatgaaaataaaatgctcttaaaacgaatgcaggccttggagccatatcctgcaaatgagagttctaaacttgtctctgagaaggtggatgactatgaacatgcagcaaagtacatgaagaacagtcaagtaaggttacctttgggaaccttaagtaaatcagaatgggaagctacaagtatttacttggtgtttgcctttgagaaacagcagtgagcacataggcagtagtcccagaggggccgtgttctgtcctgcacaaatttgaacaactcatctcgatatatttgatatttctctgtctgttgattttaattctaaatgtgcaggatgctgccagaaactccaatgtagaaattcaacatttgctgtctgtgacagatgaacttttgcatgtgtatataagaatgagttgggacctctgtctttaaaaatctatttttaggtaatgttctaagaattccatttgcctctatgatcttagctcataaaaatataatatgacttgataaagcaactaaactctttccacagtgttcagatttgtcctgtgtgtgtttacagtattcaatttattgcagttatagaattggtcagagagcattttcatagtgtgctcatttctatggttttgttatatagcatttttcaacatttaatggtctgtacagttgaatgtaagtgttcaatatgtattgctgaagttataagtttaaaactcaatttcagatgctcataaaagttacttagctaaaattttagcaatttattgcattttgaaataatcattaacatgctgcaattcaggagctggttagaacattttaagtggcagcatagaattttggaattttggggctttcttttcagaaattgctaccatagtaattaatgtttccagttatcaagattgtgattagacacatttacctttcttcattgaacaaatggtgccatagttatttttctcaaaatttagtgaaaatccctcccatgtagacatgttgcacattttttccaaatttatacatggaactgcagtaggaatattctcaccatctgatgccatgtacccacttcagaaataagcaatacttgttcctctgttacaacctcagcactttgcaccgtaggagccattgttaaagttgtcacttgtgtaactgactgcttttccaaaactggtacttacgtgaactgttgtccttgctttacaccaccatttggaaaacttaccagtttttagatgtagatgtagtgaaaaacttcaagaatgaagcagagcaattgagtattcttttttaaattattaagccatgatttacaaaaacattactttctgtaattcacaatacttgttttaaaaacatagtgtcttcattagtgtgcatctattaactgttcatggtgttagagttgcaaactttttagcaagaaaatatggatttcctcatttcagttccttctgcagcctgtgaatctccacaaagtgttaccagtttacaaaaataagtctttttgccttaagtcattttggaaataagtaatactgcatctgactctggtggctgtattagctaggaaaggtttgtaaatggtgtcagtgaggtggggaaaggaagtcttcctgtcacatatgcaggttcgttttcattctagggcagtgccaggaagtatattgatagctttgtaggtacaggaaaaacatcatcattatttcctctgttcacatttactggtcttaattaacaggtaataataatacatgtacttttagcctgaaacctcttccacgccatgggtaacttgggggagagaagaatcctccaaacgatggagtagccagtggtaatacaaagcagggagaacagaaaggtagagttactaaggccttcagtgaacagaaaggagcagagagcaagattagatctgagaagatgctctggggactgagcccactgttgttggtgtcagggaggcttactggagccacacctgcaggcgctgtgttcaggcaccaccttcctccttgagctttgcctgtctcttgccttatcagttcttcctccaccaccctacacccccctccccccggccccaagcccctgtgtctccttgttacaattaagtttctggatattgacttaagaactgttaggaagaggactagaaaaggcttcccctgcctatcctctccgatcaccaaggtggaagggagctagtaggactcttccttgacacaccttgtagtctaaatgttcggtattctattcaggacttacggtaactattatgagggaggcatggctttccaccgtcgggccaggaagagcacctgttgctgcaagctcagtgaagtggggcactcccagacctgccatgcagtttatcctctgagaatggaattggaaatgaagacctaaccagctattggtgggaatgacggaactggggattgcgatgattgatctgggaacatggctggattgtgatttaaccaagaatgctgatgttgaattctttgggcctagaatatacttgagaaagcactagtggcttgtgttcagggagaggagctggcagtttttaaccacttctgtgggagccgtgttctaacctgtggaaagtattgcaattctgtgagagtgactctgcagagtcactgcaccatcaggcttggccctgctgtgccttcagtacccagccaggttctctgggtccagggtgactctccaaagaaattggccttcagctggagaaaacattgggtggagactctcacttatgttaatgcaatcttgaaatgactgaaaggtagattgccagcacagtgagtttcccagcctgctcccccatccacacttggaaattgagggagcatgaccgctctctgacttcacatgttaatagaggatcagagcagagttgggagtatattggtcaggatcatagaaaagaagacaaagcttgctcagccatgagatggccaggtatccagttttgttaactctctttgggaatttctttttcagcctgttttttagcttagtgccattatgtcattttgatttgtattcaagtactcttcaagtatctttgtaatgaaggtttggctacttgtataggtctgcctgcagggtgaaaatgccagtgtgaatattctagctaccaaacattgttttttgttgaaaaactgactttctgttgtctacctcaggccttgtgcatttgggttatctcaagccagtcaccacagagggtctctagggtctgcaaaatagaggccaaatccagggaccaggccctaataatagaagttgtaccaaaatgcctgtggtacttgatggcctgttggtcaaataggaagtacaagtgtgtgatgttagaacctccctagttgctgctatatcaaacactgcacacttgacaagtgttttcattccccgccctctgacagaacaacattcctaattctttgaaggcaaccagtgcaaaggctactacacttgtgtaatgatatttagcagatgcatacaggactggatcccagggcactgtcagttcttccctccctctcgtgctgctcagtttgtcctctgctcccatgtaggcctaaagtcaccccactccttagtgcctgcacctcaccacgatattgaggaagcacaggacatccaagggtactctccagtttggctgtggagacttgagcaagccctaaagtcccctgctccctggacttctcctgggttgtgcttttttgggggcaacataccttggacaaagctgagctgacagctaatgtttattagcctcctacctaagtcagtcactttgctaaattcttcacctgtggtaactcattttgattgttataacatctcagcaccattattcccattttaatgatgaggaaactgagtcatagaggatacagacttgcccaaaggagagccaggattttcacaccccctcctcaagctgggcctgccctccaagtgcttgttatatacctccacgggtgtcagcccagatgactcctcacccatccaccacctgcagcttgagatgttaactattagagctccattcttttggttcaaaacgttgatacttacttagatgttccctgagaggagtgtttatttctgagtaaggggctttgttgaaagagggggttagagagagcaagacagcacttgagtgcactggcaggaagcagagataagacttgaatttcagtttggtagacctccttctttagcagcccaacctgtagcaaatctagtttagcctgcatggcagggagagggattctcttcccaccctcaccatttgcaagtggcaggagctgagaatgccagtacgagagtgtagccaaagtgagaggctgagagcaaaggagacatttttttcagttttgagtcgagtatccagacagaggcaaatcattttgtttaactttttattaaagtgtaactatagaaacacatcaatgatttttcacaagtggagcacgtgcatacaatcggcaccccagaagccccccgtcagattcccttccagttaactacctctccaagggaaaccactatcctgagttctaagcgcatagattagttctgtctggtttggggagatatataaatggaattatgcattcttcgtatctggtttcttttcaccaatattatgtttgtgagatttttgttgcatgtatttgtacatggattttcattctcatggttgtataatatttcattgtgtgaataaaccacatactgtttatctga

SEQ ID NO: 29502 - DNA, 4408 bp, Homo sapiens
gcagacacgcgtggcgcgggccgccgtttccgcaaacagaatcgcgtttggctgtgctggatgtgtgaacctattgggtactgtacaacttcaagcctcgaaatcagataggcaccaccaacctcatttcctgtttcaccttgattttctgtgataccaaaatctcagcttcacaaagtcattgaaagtgttggttcatgaagttttaccatcaattcaagtaatcataaatggcaaattctgcaaaagcagaagaatatgaaaagatgtctcttgaacaggcaaaagcgtcagtgaattctgaaacagagtcttcattcaatattaatgaaaacacaacagcttctgggactgggctttctgaaaagacttctgtctgtaggcaagtagacatagcaagaaagagaaaagagtttgaagatgatcttgtaaaggaaagttctagttgtgggaaagacactccatccaagaagagaaaacttgatcctgaaattgtcccagaggaaaaagattgtggtgatgctgaaggcaattcaaagaaaagaaaaagagaaactgaggatgttccaaaagataaatcttctactggagatggcactcaaaataagagaaaaatagcacttgaggatgttcctgaaaagcagaaaaatctggaagaaggacacagctcaacagtggctgcccattacaatgaacttcaggaagttggtttggagaagcgtagtcaaagtcgtattttttacctaagaaactttaataattggatgaaaagtgttctcattggagaatttttggaaaaggtacgacagaagaaaaaacgtgatatcactgttttggacctgggatgtggtaaaggtggagatttgctgaaatggaaaaaaggaagaattaacaagctagtttgtactgatattgccgatgtttctgtcaaacagtgtcagcagcggtatgaggacatgaaaaatcgtcgtgatagtgaatatattttcagtgcagaatttataactgctgacagctcaaaggaacttctgattgacaaatttcgtgacccacaaatgtgttttgacatctgcagttgtcagtttgtctgtcattactcatttgagtcttatgagcaggctgacatgatgctgagaaatgcgtgtgagagacttagccctgggggctattttattggtactactcccaatagctttgaattgataagacgccttgaagcttcagaaacagaatcatttggaaatgaaatatatactgtgaaatttcagaagaaaggagattatcctttatttggctgcaaatatgacttcaacttggaaggtgttgtggatgttcctgaattcttggtctattttccattgctaaatgaaatggcaaagaagtacaatatgaaactagtctacaaaaaaacatttctggaattctacgaagaaaagattaagaacaatgaaaataaaatgctcttaaaacgaatgcaggccttggagccatatcctgcaaatgagagttctaaacttgtctctgagaaggtggatgactatgaacatgcagcaaagtacatgaagaacagtcaagtaaggttacctttgggaaccttaagtaaatcagaatgggaagctacaagtatttacttggtgtttgcctttgagaaacagcagtgagcacataggcagtagtcccagaggggccgtgttctgtcctgcacaaatttgaacaactcatctcgatatatttgatatttctctgtctgttgattttaattctaaatgtgcaggatgctgccagaaactccaatgtagaaattcaacatttgctgtctgtgacagatgaacttttgcatgtgtatataagaatgagttgggacctctgtctttaaaaatctatttttaggacttacggtaactattatgagggaggcatggctttccaccgtcgggccaggaagagcacctgttgctgcaagctcagtgaagtggggcactcccagacctgccatgcagtttatcctctgagaatggaattggaaatgaagacctaaccagctattggtgggaatgacggaactggggattgcgatgattgatctgggaacatggctggattgtgatttaaccaagaatgctgatgttgaattctttgggcctagaatatacttgagaaagcactagtggcttgtgttcagggagaggagctggcagtttttaaccacttctgtgggagccgtgttctaacctgtggaaagtattgcaattctgtgagagtgactctgcagagtcactgcaccatcaggcttggccctgctgtgccttcagtacccagccaggttctctgggtccagggtgactctccaaagaaattggccttcagctggagaaaacattgggtggagactctcacttatgttaatgcaatcttgaaatgactgaaaggtagattgccagcacagtgagtttcccagcctgctcccccatccacacttggaaattgagggagcatgaccgctctctgacttcacatgttaatagaggatcagagcagagttgggagtatattggtcaggatcatagaaaagaagacaaagcttgctcagccatgagatggccaggtatccagttttgttaactctctttgggaatttctttttcagcctgttttttagcttagtgccattatgtcattttgatttgtattcaagtactcttcaagtatctttgtaatgaaggtttggctacttgtataggtctgcctgcagggtgaaaatgccagtgtgaatattctagctaccaaacattgttttttgttgaaaaactgactttctgttgtctacctcaggccttgtgcatttgggttatctcaagccagtcaccacagagggtctctagggtctgcaaaatagaggccaaatccagggaccaggccctaataatagaagttgtaccaaaatgcctgtggtacttgatggcctgttggtcaaataggaagtacaagtgtgtgatgttagaacctccctagttgctgctatatcaaacactgcacacttgacaagtgttttcattccccgccctctgacagaacaacattcctaattctttgaaggcaaccagtgcaaaggctactacacttgtgtaatgatatttagcagatgcatacaggactggatcccagggcactgtcagttcttccctccctctcgtgctgctcagtttgtcctctgctcccatgtaggcctaaagtcaccccactccttagtgcctgcacctcaccacgatattgaggaagcacaggacatccaagggtactctccagtttggctgtggagacttgagcaagccctaaagtcccctgctccctggacttctcctgggttgtgcttttttgggggcaacataccttggacaaagctgagctgacagctaatgtttattagcctcctacctaagtcagtcactttgctaaattcttcacctgtggtaactcattttgattgttataacatctcagcaccattattcccattttaatgatgaggaaactgagtcatagaggatacagacttgcccaaaggagagccaggattttcacaccccctcctcaagctgggcctgccctccaagtgcttgttatatacctccacgggtgtcagcccagatgactcctcacccatccaccacctgcagcttgagatgttaactattagagctccattcttttggttcaaaacgttgatacttacttagatgttccctgagaggagtgtttatttctgagtaaggggctttgttgaaagagggggttagagagagcaagacagcacttgagtgcactggcaggaagcagagataagacttgaatttcagtttggtagacctccttctttagcagcccaacctgtagcaaatctagtttagcctgcatggcagggagagggattctcttcccaccctcaccatttgcaagtggcaggagctgagaatgccagtacgagagtgtagccaaagtgagaggctgagagcaaaggagacatttttttcagttttgagtcgagtatccagacagaggcaaatcattttgtttaactttttattaaagtgtaactatagaaacacatcaatgatttttcacaagtggagcacgtgcatacaatcggcaccccagaagccccccgtcagattcccttccagttaactacctctccaagggaaaccactatcctgagttctaagcgcatagattagttctgtctggtttggggagatatataaatggaattatgcattcttcgtatctggtttcttttcaccaatattatgtttgtgagatttttgttgcatgtatttgtacatggattttcattctcatggttgtataatatttcattgtgtgaataaaccacatactgtttatctga

SEQ ID NO: 29503 - DNA, 5650 bp, Homo sapiens
gcagacacgcgtggcgcgggccgccgtttccgcaaacagaatcgcgtttggctgtgctgaatctggaagaaggacacagctcaacagtggctgcccattacaatgaacttcaggaagttggtttggagaagcgtagtcaaagtcgtattttttacctaagaaactttaataattggatgaaaagtgttctcattggagaatttttggaaaaggtacgacagaagaaaaaacgtgatatcactgttttggacctgggatgtggtaaaggtggagatttgctgaaatggaaaaaaggaagaattaacaagctagtttgtactgatattgccgatgtttctgtcaaacagtgtcagcagcggtatgaggacatgaaaaatcgtcgtgatagtgaatatattttcagtgcagaatttataactgctgacagctcaaaggaacttctgattgacaaatttcgtgacccacaaatgtgttttgacatctgcagttgtcagtttgtctgtcattactcatttgagtcttatgagcaggctgacatgatgctgagaaatgcgtgtgagagacttagccctgggggctattttattggtactactcccaatagctttgaattgataagacgccttgaagcttcagaaacagaatcatttggaaatgaaatatatactgtgaaatttcagaagaaaggagattatcctttatttggctgcaaatatgacttcaacttggaaggtgttgtggatgttcctgaattcttggtctattttccattgctaaatgaaatggcaaagaagtacaatatgaaactagtctacaaaaaaacatttctggaattctacgaagaaaagattaagaacaatgaaaataaaatgctcttaaaacgaatgcaggccttggagccatatcctgcaaatgagagttctaaacttgtctctgagaaggtggatgactatgaacatgcagcaaagtacatgaagaacagtcaagtaaggttacctttgggaaccttaagtaaatcagaatgggaagctacaagtatttacttggtgtttgcctttgagaaacagcagtgagcacataggcagtagtcccagaggggccgtgttctgtcctgcacaaatttgaacaactcatctcgatatatttgatatttctctgtctgttgattttaattctaaatgtgcaggatgctgccagaaactccaatgtagaaattcaacatttgctgtctgtgacagatgaacttttgcatgtgtatataagaatgagttgggacctctgtctttaaaaatctatttttaggtaatgttctaagaattccatttgcctctatgatcttagctcataaaaatataatatgacttgataaagcaactaaactctttccacagtgttcagatttgtcctgtgtgtgtttacagtattcaatttattgcagttatagaattggtcagagagcattttcatagtgtgctcatttctatggttttgttatatagcatttttcaacatttaatggtctgtacagttgaatgtaagtgttcaatatgtattgctgaagttataagtttaaaactcaatttcagatgctcataaaagttacttagctaaaattttagcaatttattgcattttgaaataatcattaacatgctgcaattcaggagctggttagaacattttaagtggcagcatagaattttggaattttggggctttcttttcagaaattgctaccatagtaattaatgtttccagttatcaagattgtgattagacacatttacctttcttcattgaacaaatggtgccatagttatttttctcaaaatttagtgaaaatccctcccatgtagacatgttgcacattttttccaaatttatacatggaactgcagtaggaatattctcaccatctgatgccatgtacccacttcagaaataagcaatacttgttcctctgttacaacctcagcactttgcaccgtaggagccattgttaaagttgtcacttgtgtaactgactgcttttccaaaactggtacttacgtgaactgttgtccttgctttacaccaccatttggaaaacttaccagtttttagatgtagatgtagtgaaaaacttcaagaatgaagcagagcaattgagtattcttttttaaattattaagccatgatttacaaaaacattactttctgtaattcacaatacttgttttaaaaacatagtgtcttcattagtgtgcatctattaactgttcatggtgttagagttgcaaactttttagcaagaaaatatggatttcctcatttcagttccttctgcagcctgtgaatctccacaaagtgttaccagtttacaaaaataagtctttttgccttaagtcattttggaaataagtaatactgcatctgactctggtggctgtattagctaggaaaggtttgtaaatggtgtcagtgaggtggggaaaggaagtcttcctgtcacatatgcaggttcgttttcattctagggcagtgccaggaagtatattgatagctttgtaggtacaggaaaaacatcatcattatttcctctgttcacatttactggtcttaattaacaggtaataataatacatgtacttttagcctgaaacctcttccacgccatgggtaacttgggggagagaagaatcctccaaacgatggagtagccagtggtaatacaaagcagggagaacagaaaggtagagttactaaggccttcagtgaacagaaaggagcagagagcaagattagatctgagaagatgctctggggactgagcccactgttgttggtgtcagggaggcttactggagccacacctgcaggcgctgtgttcaggcaccaccttcctccttgagctttgcctgtctcttgccttatcagttcttcctccaccaccctacacccccctccccccggccccaagcccctgtgtctccttgttacaattaagtttctggatattgacttaagaactgttaggaagaggactagaaaaggcttcccctgcctatcctctccgatcaccaaggtggaagggagctagtaggactcttccttgacacaccttgtagtctaaatgttcggtattctattcaggacttacggtaactattatgagggaggcatggctttccaccgtcgggccaggaagagcacctgttgctgcaagctcagtgaagtggggcactcccagacctgccatgcagtttatcctctgagaatggaattggaaatgaagacctaaccagctattggtgggaatgacggaactggggattgcgatgattgatctgggaacatggctggattgtgatttaaccaagaatgctgatgttgaattctttgggcctagaatatacttgagaaagcactagtggcttgtgttcagggagaggagctggcagtttttaaccacttctgtgggagccgtgttctaacctgtggaaagtattgcaattctgtgagagtgactctgcagagtcactgcaccatcaggcttggccctgctgtgccttcagtacccagccaggttctctgggtccagggtgactctccaaagaaattggccttcagctggagaaaacattgggtggagactctcacttatgttaatgcaatcttgaaatgactgaaaggtagattgccagcacagtgagtttcccagcctgctcccccatccacacttggaaattgagggagcatgaccgctctctgacttcacatgttaatagaggatcagagcagagttgggagtatattggtcaggatcatagaaaagaagacaaagcttgctcagccatgagatggccaggtatccagttttgttaactctctttgggaatttctttttcagcctgttttttagcttagtgccattatgtcattttgatttgtattcaagtactcttcaagtatctttgtaatgaaggtttggctacttgtataggtctgcctgcagggtgaaaatgccagtgtgaatattctagctaccaaacattgttttttgttgaaaaactgactttctgttgtctacctcaggccttgtgcatttgggttatctcaagccagtcaccacagagggtctctagggtctgcaaaatagaggccaaatccagggaccaggccctaataatagaagttgtaccaaaatgcctgtggtacttgatggcctgttggtcaaataggaagtacaagtgtgtgatgttagaacctccctagttgctgctatatcaaacactgcacacttgacaagtgttttcattccccgccctctgacagaacaacattcctaattctttgaaggcaaccagtgcaaaggctactacacttgtgtaatgatatttagcagatgcatacaggactggatcccagggcactgtcagttcttccctccctctcgtgctgctcagtttgtcctctgctcccatgtaggcctaaagtcaccccactccttagtgcctgcacctcaccacgatattgaggaagcacaggacatccaagggtactctccagtttggctgtggagacttgagcaagccctaaagtcccctgctccctggacttctcctgggttgtgcttttttgggggcaacataccttggacaaagctgagctgacagctaatgtttattagcctcctacctaagtcagtcactttgctaaattcttcacctgtggtaactcattttgattgttataacatctcagcaccattattcccattttaatgatgaggaaactgagtcatagaggatacagacttgcccaaaggagagccaggattttcacaccccctcctcaagctgggcctgccctccaagtgcttgttatatacctccacgggtgtcagcccagatgactcctcacccatccaccacctgcagcttgagatgttaactattagagctccattcttttggttcaaaacgttgatacttacttagatgttccctgagaggagtgtttatttctgagtaaggggctttgttgaaagagggggttagagagagcaagacagcacttgagtgcactggcaggaagcagagataagacttgaatttcagtttggtagacctccttctttagcagcccaacctgtagcaaatctagtttagcctgcatggcagggagagggattctcttcccaccctcaccatttgcaagtggcaggagctgagaatgccagtacgagagtgtagccaaagtgagaggctgagagcaaaggagacatttttttcagttttgagtcgagtatccagacagaggcaaatcattttgtttaactttttattaaagtgtaactatagaaacacatcaatgatttttcacaagtggagcacgtgcatacaatcggcaccccagaagccccccgtcagattcccttccagttaactacctctccaagggaaaccactatcctgagttctaagcgcatagattagttctgtctggtttggggagatatataaatggaattatgcattcttcgtatctggtttcttttcaccaatattatgtttgtgagatttttgttgcatgtatttgtacatggattttcattctcatggttgtataatatttcattgtgtgaataaaccacatactgtttatctga

SEQ ID NO: 29504 - DNA, 4647 bp, Homo sapiens
cgtgacgcgtgggtcgacccacgcgatcgtaggtatttacttggtgtttgcctttgagaaacagcagtgagcacataggcagtagtcccagaggggccgtgttctgtcctgcacaaatttgaacaactcatctcgatatatttgatatttctctgtctgttgattttaattctaaatgtgcaggatgctgccagaaactccaatgtagaaattcaacatttgctgtctgtgacagatgaacttttgcatgtgtatataagaatgagttgggacctctgtctttaaaaatctatttttaggtaatgttctaagaattccatttgcctctatgatcttagctcataaaaatataatatgacttgataaagcaactaaactctttccacagtgttcagatttgtcctgtgtgtgtttacagtattcaatttattgcagttatagaattggtcagagagcattttcatagtgtgctcatttctatggttttgttatatagcatttttcaacatttaatggtctgtacagttgaatgtaagtgttcaatatgtattgctgaagttataagtttaaaactcaatttcagatgctcataaaagttacttagctaaaattttagcaatttattgcattttgaaataatcattaacatgctgcaattcaggagctggttagaacattttaagtggcagcatagaattttggaattttggggctttcttttcagaaattgctaccatagtaattaatgtttccagttatcaagattgtgattagacacatttacctttcttcattgaacaaatggtgccatagttatttttctcaaaatttagtgaaaatccctcccatgtagacatgttgcacattttttccaaatttatacatggaactgcagtaggaatattctcaccatctgatgccatgtacccacttcagaaataagcaatacttgttcctctgttacaacctcagcactttgcaccgtaggagccattgttaaagttgtcacttgtgtaactgactgcttttccaaaactggtacttacgtgaactgttgtccttgctttacaccaccatttggaaaacttaccagtttttagatgtagatgtagtgaaaaacttcaagaatgaagcagagcaattgagtattcttttttaaattattaagccatgatttacaaaaacattactttctgtaattcacaatacttgttttaaaaacatagtgtcttcattagtgtgcatctattaactgttcatggtgttagagttgcaaactttttagcaagaaaatatggatttcctcatttcagttccttctgcagcctgtgaatctccacaaagtgttaccagtttacaaaaataagtctttttgccttaagtcattttggaaataagtaatactgcatctgactctggtggctgtattagctaggaaaggtttgtaaatggtgtcagtgaggtggggaaaggaagtcttcctgtcacatatgcaggttcgttttcattctagggcagtgccaggaagtatattgatagctttgtaggtacaggaaaaacatcatcattatttcctctgttcacatttactggtcttaattaacaggtaataataatacatgtacttttagcctgaaacctcttccacgccatgggtaacttgggggagagaagaatcctccaaacgatggagtagccagtggtaatacaaagcagggagaacagaaaggtagagttactaaggccttcagtgaacagaaaggagcagagagcaagattagatctgagaagatgctctggggactgagcccactgttgttggtgtcagggaggcttactggagccacacctgcaggcgctgtgttcaggcaccaccttcctccttgagctttgcctgtctcttgccttatcagttcttcctccaccaccctacacccccctccccccggccccaagcccctgtgtctccttgttacaattaagtttctggatattgacttaagaactgttaggaagaggactagaaaaggcttcccctgcctatcctctccgatcaccaaggtggaagggagctagtaggactcttccttgacacaccttgtagtctaaatgttcggtattctattcaggacttacggtaactattatgagggaggcatggctttccaccgtcgggccaggaagagcacctgttgctgcaagctcagtgaagtggggcactcccagacctgccatgcagtttatcctctgagaatggaattggaaatgaagacctaaccagctattggtgggaatgacggaactggggattgcgatgattgatctgggaacatggctggattgtgatttaaccaagaatgctgatgttgaattctttgggcctagaatatacttgagaaagcactagtggcttgtgttcagggagaggagctggcagtttttaaccacttctgtgggagccgtgttctaacctgtggaaagtattgcaattctgtgagagtgactctgcagagtcactgcaccatcaggcttggccctgctgtgccttcagtacccagccaggttctctgggtccagggtgactctccaaagaaattggccttcagctggagaaaacattgggtggagactctcacttatgttaatgcaatcttgaaatgactgaaaggtagattgccagcacagtgagtttcccagcctgctcccccatccacacttggaaattgagggagcatgaccgctctctgacttcacatgttaatagaggatcagagcagagttgggagtatattggtcaggatcatagaaaagaagacaaagcttgctcagccatgagatggccaggtatccagttttgttaactctctttgggaatttctttttcagcctgttttttagcttagtgccattatgtcattttgatttgtattcaagtactcttcaagtatctttgtaatgaaggtttggctacttgtataggtctgcctgcagggtgaaaatgccagtgtgaatattctagctaccaaacattgttttttgttgaaaaactgactttctgttgtctacctcaggccttgtgcatttgggttatctcaagccagtcaccacagagggtctctagggtctgcaaaatagaggccaaatccagggaccaggccctaataatagaagttgtaccaaaatgcctgtggtacttgatggcctgttggtcaaataggaagtacaagtgtgtgatgttagaacctccctagttgctgctatatcaaacactgcacacttgacaagtgttttcattccccgccctctgacagaacaacattcctaattctttgaaggcaaccagtgcaaaggctactacacttgtgtaatgatatttagcagatgcatacaggactggatcccagggcactgtcagttcttccctccctctcgtgctgctcagtttgtcctctgctcccatgtaggcctaaagtcaccccactccttagtgcctgcacctcaccacgatattgaggaagcacaggacatccaagggtactctccagtttggctgtggagacttgagcaagccctaaagtcccctgctccctggacttctcctgggttgtgcttttttgggggcaacataccttggacaaagctgagctgacagctaatgtttattagcctcctacctaagtcagtcactttgctaaattcttcacctgtggtaactcattttgattgttataacatctcagcaccattattcccattttaatgatgaggaaactgagtcatagaggatacagacttgcccaaaggagagccaggattttcacaccccctcctcaagctgggcctgccctccaagtgcttgttatatacctccacgggtgtcagcccagatgactcctcacccatccaccacctgcagcttgagatgttaactattagagctccattcttttggttcaaaacgttgatacttacttagatgttccctgagaggagtgtttatttctgagtaaggggctttgttgaaagagggggttagagagagcaagacagcacttgagtgcactggcaggaagcagagataagacttgaatttcagtttggtagacctccttctttagcagcccaacctgtagcaaatctagtttagcctgcatggcagggagagggattctcttcccaccctcaccatttgcaagtggcaggagctgagaatgccagtacgagagtgtagccaaagtgagaggctgagagcaaaggagacatttttttcagttttgagtcgagtatccagacagaggcaaatcattttgtttaactttttattaaagtgtaactatagaaacacatcaatgatttttcacaagtggagcacgtgcatacaatcggcaccccagaagccccccgtcagattcccttccagttaactacctctccaagggaaaccactatcctgagttctaagcgcatagattagttctgtctggtttggggagatatataaatggaattatgcattcttcgtatctggtttcttttcaccaatattatgtttgtgagatttttgttgcatgtatttgtacatggattttcattctcatggttgtataatatttcattgtgtgaataaaccacatactgtttatctga

SEQ ID NO: 29505 - DNA, 4564 bp, Homo sapiens
gcagacacgcgtggcgcgggccgccgtttccgcaaacagaatcgcgtttggctgtgctggatgtgtgaacctattgggtactgtacaacttcaagcctcgaaatcagataggcaccaccaacctcatttcctgtttcaccttgattttctgtgataccaaaatctcagcttcacaaagtcattgaaagtgttggttcatgaagttttaccatcaattcaagtaatcataaatggcaaattctgcaaaagcagaagaatatgaaaagatgtctcttgaacaggcaaaagcgtcagtgaattctgaaacagagtcttcattcaatattaatgaaaacacaacagcttctgggactgggctttctgaaaagacttctgtctgtaggcaagtagacatagcaagaaagagaaaagagtttgaagatgatcttgtaaaggaaagttctagttgtgggaaagacactccatccaagaagagaaaacttgatcctgaaattgtcccagaggaaaaagattgtggtgatgctgaaggcaattcaaagaaaagaaaaagagaaactgaggatgttccaaaagataaatcttctactggagatggcactcaaaataagagaaaaatagcacttgaggatgttcctgaaaagcagaaaaatctggaagaaggacacagctcaacagtggctgcccattacaatgaacttcaggaagttggtttggagaagcgtagtcaaagtcgtattttttacctaagaaactttaataattggatgaaaagtgttctcattggagaatttttggaaaaggtacgacagaagaaaaaacgtgatatcactgttttggacctgggatgtggtaaaggtggagatttgctgaaatggaaaaaaggaagaattaacaagctagtttgtactgatattgccgatgtttctgtcaaacagtgtcagcagcggtatgaggacatgaaaaatcgtcgtgatagtgaatatattttcagtgcagaatttataactgctgacagctcaaaggaacttctgattgacaaatttcgtgacccacaaatgtgttttgacatctgcagttgtcagtttgtctgtcattactcatttgagtcttatgagcaggctgacatgatgctgagaaatgcgtgtgagagacttagccctgggggctattttattggtactactcccaatagctttgaattgataagacgccttgaagcttcagaaacagaatcatttggaaatgaaatatatactgtgaaatttcagaagaaaggagattatcctttatttggctgcaaatatgacttcaacttggaaggtgttgtggatgttcctgaattcttggtctattttccattgctaaatgaaatggcaaagaagtacaatatgaaactagtctacaaaaaaacatttctggaattctacgaagaaaagattaagaacaatgaaaataaaatgctcttaaaacgaatgcaggccttggagccatatcctgcaaatgagagttctaaacttgtctctgagaaggtggatgactatgaacatgcagcaaagtacatgaagaacagtcaagtaaggttacctttgggaaccttaagtaaatcagaatgggaagctacaagtatttacttggtgtttgcctttgagaaacagcagtgagcacataggcagtagtcccagaggggccgtgttctgtcctgcacaaatttgaacaactcatctcgatatatttgatatttctctgtctgttgattttaattctaaatgtgcaggatgctgccagaaactccaatgtagaaattcaacatttgctgtctgtgacagatgaacttttgcatgtgtatataagaatgagttgggacctctgtctttaaaaatctatttttaggtaatgttctaagaattccatttgcctctatgatcttagctcataaaaatataatatgacttgataaagcaactaaactctttccacagtgttcagatttgtcctgtgtgtgtttacagtattcaatttattgcagttatagaattggtcagagagcattttcatagtgtgctcatttctatggttttgttatatagcatttttcaacatttaatggtctgtacagttgaatgtaagtgttcaatatgtattgctgaagttataagtttaaaactcaatttcagatgctcataaaagttacttagctaaaattttagcaatttattgcattttgaaataatcattaacatgctgcaattcaggagctggttagaacattttaagtggcagcatagaattttggaattttggggctttcttttcagaaattgctaccatagtaattaatgtttccagttatcaagattgtgattagacacatttacctttcttcattgaacaaatggtgccatagttatttttctcaaaatttagtgaaaatccctcccatgtagacatgttgcacattttttccaaatttatacatggaactgcagtaggaatattctcaccatctgatgccatgtacccacttcagaaataagcaatacttgttcctctgttacaacctcagcactttgcaccgtaggagccattgttaaagttgtcacttgtgtaactgactgcttttccaaaactggtacttacgtgaactgttgtccttgctttacaccaccatttggaaaacttaccagtttttagatgtagatgtagtgaaaaacttcaagaatgaagcagagcaattgagtattcttttttaaattattaagccatgatttacaaaaacattactttctgtaattcacaatacttgttttaaaaacatagtgtcttcattagtgtgcatctattaactgttcatggtgttagagttgcaaactttttagcaagaaaatatggatttcctcatttcagttccttctgcagcctgtgaatctccacaaagtgttaccagtttacaaaaataagtctttttgccttaagtcattttggaaataagtaatactgcatctgactctggtggctgtattagctaggaaaggtttgtaaatggtgtcagtgaggtggggaaaggaagtcttcctgtcacatatgcaggttcgttttcattctagggcagtgccaggaagtatattgatagctttgtaggtacaggaaaaacatcatcattatttcctctgttcacatttactggtcttaattaacaggtaataataatacatgtacttttagcctgaaacctcttccacgccatgggtaacttgggggagagaagaatcctccaaacgatggagtagccagtggtaatacaaagcagggagaacagaaaggtagagttactaaggccttcagtgaacagaaaggagcagagagcaagattagatctgagaagatgctctggggactgagcccactgttgttggtgtcagggaggcttactggagccacacctgcaggcgctgtgttcaggcaccaccttcctccttgagctttgcctgtctcttgccttatcagttcttcctccaccaccctacacccccctccccccggccccaagcccctgtgtctccttgttacaattaagtttctggatattgacttaagaactgttaggaagaggactagaaaaggcttcccctgcctatcctctccgatcaccaaggtggaagggagctagtaggactcttccttgacacaccttgtagtctaaatgttcggtattctattcaggacttacggtaactattatgagggaggcatggctttccaccgtcgggccaggaagagcacctgttgctgcaagctcagtgaagtggggcactcccagacctgccatgcagtttatcctctgagaatggaattggaaatgaagacctaaccagctattggtgggaatgacggaactggggattgcgatgattgatctgggaacatggctggattgtgatttaaccaagaatgctgatgttgaattctttgggcctagaatatacttgagaaagcactagtggcttgtgttcagggagaggagctggcagtttttaaccacttctgtgggagccgtgttctaacctgtggaaagtattgcaattctgtgagagtgactctgcagagtcactgcaccatcaggagctgagaatgccagtacgagagtgtagccaaagtgagaggctgagagcaaaggagacatttttttcagttttgagtcgagtatccagacagaggcaaatcattttgtttaactttttattaaagtgtaactatagaaacacatcaatgatttttcacaagtggagcacgtgcatacaatcggcaccccagaagccccccgtcagattcccttccagttaactacctctccaagggaaaccactatcctgagttctaagcgcatagattagttctgtctggtttggggagatatataaatggaattatgcattcttcgtatctggtttcttttcaccaatattatgtttgtgagatttttgttgcatgtatttgtacatggattttcattctcatggttgtataatatttcattgtgtgaataaaccacatactgtttatctga

SEQ ID NO: 29506 - DNA, 1958 bp, Homo sapiens
gcagacacgcgtggcgcgggccgccgtttccgcaaacagaatcgcgtttggctgtgctggatgtgtgaacctattgggtactgtacaacttcaagcctcgaaatcagataggcaccaccaacctcatttcctgtttcaccttgattttctgtgataccaaaatctcagcttcacaaagtcattgaaagtgttggttcatgaagttttaccatcaattcaagtaatcataaatggcaaattctgcaaaagcagaagaatatgaaaagatgtctcttgaacaggcaaaagcgtcagtgaattctgaaacagagtcttcattcaatattaatgaaaacacaacagcttctgggactgggctttctgaaaagacttctgtctgtaggcaagtagacatagcaagaaagagaaaagagtttgaagatgatcttgtaaaggaaagttctagttgtgggaaagacactccatccaagaagagaaaacttgatcctgaaattgtcccagaggaaaaagattgtggtgatgctgaaggcaattcaaagaaaagaaaaagagaaactgaggatgttccaaaagataaatcttctactggagatggcactcaaaataagagaaaaatagcacttgaggatgttcctgaaaagcagaaaaatctggaagaaggacacagctcaacagtggctgcccattacaatgaacttcaggaagttggtttggagaagcgtagtcaaagtcgtattttttacctaagaaactttaataattggatgaaaagtgttctcattggagaatttttggaaaaggtacgacagaagaaaaaacgtgatatcactgttttggacctgggatgtggtaaaggtggagatttgctgaaatggaaaaaaggaagaattaacaagctagtttgtactgatattgccgatgtttctgtcaaacagtgtcagcagcggtatgaggacatgaaaaatcgtcgtgatagtgaatatattttcagtgcagaatttataactgctgacagctcaaaggaacttctgattgacaaatttcgtgacccacaaatgtgttttgacatctgcagttgtcagtttgtctgtcattactcatttgagtcttatgagcaggctgacatgatgctgagaaatgcgtgtgagagacttagccctgggggctattttattggtactactcccaatagctttgaattgataagacgccttgaagcttcagaaacagaatcatttggaaatgaaatatatactgtgaaatttcagaagaaaggagattatcctttatttggctgcaaatatgacttcaacttggaaggtgttgtggatgttcctgaattcttggtctattttccattgctaaatgaaatggcaaagaagtacaatatgaaactagtctacaaaaaaacatttctggaattctacgaagaaaagattaagaacaatgaaaataaaatgctcttaaaacgaatgcaggccttggagccatatcctgcaaatgagagttctaaacttgtctctgagaaggtggatgactatgaacatgcagcaaagtacatgaagaacagtcaagtaaggttacctttgggaaccttaagtaaatcagaatgggaagctacaagtatttacttggtgtttgcctttgagaaacagcagtgagcacataggcagtagtcccagaggggccgtgttctgtcctgcacaaatttgaacaactcatctcgatatatttgatatttctctgtctgttgattttaattctaaatgtgcaggatgctgccagaaactccaatgtagaaattcaacatttgctgtctgtgacagatgaacttttgcatgtgtatataagaatgagttgggacctctgtctttaaaaatctatttttaggtaatgttctaagaattccatttgcctctatgatcttagctcataaaaatataatatgacttgataaa

SEQ ID NO: 29507 - DNA, 422 bp, Homo sapiens
acagattgttttatttattgtaatcatatgagaaactgaactcttatttatttcttctttaggtatttacttggtgtttgcctttgagaaacagcagtgagcacataggcagtagtcccagaggggccgtgttctgtcctgcacaaatttgaacaactcatctcgatatatttgatatttctctgtctgttgattttaattctaaatgtgcaggatgctgccagaaactccaatgtagaaattcaacatttgctgtctgtgacagatgaacttttgcatgtgtatataagaatgagttgggacctctgtctttaaaaatctatttttaggtaatgttctaagaattccatttgcctctatgatcttagctcataaaaatataatatgacttgataaagcaactaaactctttccacagtgtt

SEQ ID NO: 29508 - DNA, 4141 bp, Homo sapiens
gcagacacgcgtggcgcgggccgccgtttccgcaaacagaatcgcgtttggctgtgctggatgtgtgaacctattgggtactgtacaacttcaagcctcgaaatcagataggcaccaccaacctcatttcctgtttcaccttgattttctgtgataccaaaatctcagcttcacaaagtcattgaaagtgttggttcatgaagttttaccatcaattcaagtaatcataaatggcaaattctgcaaaagcagaagaatatgaaaagatgtctcttgaacaggcaaaagcgtcagtgaattctgaaacagagtcttcattcaatattaatgaaaacacaacagcttctgggactgggctttctgaaaagacttctgtctgtaggcaagtagacatagcaagaaagagaaaagagtttgaagatgatcttgtaaaggaaagttctagttgtgggaaagacactccatccaagaagagaaaacttgatcctgaaattgtcccagaggaaaaagattgtggtgatgctgaaggcaattcaaagaaaagaaaaagagaaactgaggatgttccaaaagataaatcttctactggagatggcactcaaaataagagaaaaatagcacttgaggatgttcctgaaaagcagaaaaatctggaagaaggacacagctcaacagtggctgcccattacaatgaacttcaggaagttggtttggagaagcgtagtcaaagtcgtattttttacctaagaaactttaataattggatgaaaagtgttctcattggagaatttttggaaaaggtacgacagaagaaaaaacgtgatatcactgttttggacctgggatgtggtaaaggtggagatttgctgaaatggaaaaaaggaagaattaacaagctagtttgtactgatattgccgatgtttctgtcaaacagtgtcagcagcggtatgaggacatgaaaaatcgtcgtgatagtgaatatattttcagtgcagaatttataactgctgacagctcaaaggaacttctgattgacaaatttcgtgacccacaaatgtgttttgacatctgcagttgtcagtttgtctgtcattactcatttgagtcttatgagcaggctgacatgatgctgagaaatgcgtgtgagagacttagccctgggggctattttattggtactactcccaatagctttgaattgataagacgccttgaagcttcagaaacagaatcatttggaaatgaaatatatactgtgaaatttcagaagaaaggagattatcctttatttggctgcaaatatgacttcaacttggaaggtgttgtggatgttcctgaattcttggtctattttccattgctaaatgaaatggcaaagaagtacaatatgaaactagtctacaaaaaaacatttctggaattctacgaagaaaagattaagaacaatgaaaataaaatgctcttaaaacgaatgcaggccttggagccatatcctgcaaatgagagttctaaacttgtctctgagaaggtggatgactatgaacatgcagcaaagtacatgaagaacagtcaagtaaggttacctttgggaaccttaagtaaatcagaatgggaagctacaagacttacggtaactattatgagggaggcatggctttccaccgtcgggccaggaagagcacctgttgctgcaagctcagtgaagtggggcactcccagacctgccatgcagtttatcctctgagaatggaattggaaatgaagacctaaccagctattggtgggaatgacggaactggggattgcgatgattgatctgggaacatggctggattgtgatttaaccaagaatgctgatgttgaattctttgggcctagaatatacttgagaaagcactagtggcttgtgttcagggagaggagctggcagtttttaaccacttctgtgggagccgtgttctaacctgtggaaagtattgcaattctgtgagagtgactctgcagagtcactgcaccatcaggcttggccctgctgtgccttcagtacccagccaggttctctgggtccagggtgactctccaaagaaattggccttcagctggagaaaacattgggtggagactctcacttatgttaatgcaatcttgaaatgactgaaaggtagattgccagcacagtgagtttcccagcctgctcccccatccacacttggaaattgagggagcatgaccgctctctgacttcacatgttaatagaggatcagagcagagttgggagtatattggtcaggatcatagaaaagaagacaaagcttgctcagccatgagatggccaggtatccagttttgttaactctctttgggaatttctttttcagcctgttttttagcttagtgccattatgtcattttgatttgtattcaagtactcttcaagtatctttgtaatgaaggtttggctacttgtataggtctgcctgcagggtgaaaatgccagtgtgaatattctagctaccaaacattgttttttgttgaaaaactgactttctgttgtctacctcaggccttgtgcatttgggttatctcaagccagtcaccacagagggtctctagggtctgcaaaatagaggccaaatccagggaccaggccctaataatagaagttgtaccaaaatgcctgtggtacttgatggcctgttggtcaaataggaagtacaagtgtgtgatgttagaacctccctagttgctgctatatcaaacactgcacacttgacaagtgttttcattccccgccctctgacagaacaacattcctaattctttgaaggcaaccagtgcaaaggctactacacttgtgtaatgatatttagcagatgcatacaggactggatcccagggcactgtcagttcttccctccctctcgtgctgctcagtttgtcctctgctcccatgtaggcctaaagtcaccccactccttagtgcctgcacctcaccacgatattgaggaagcacaggacatccaagggtactctccagtttggctgtggagacttgagcaagccctaaagtcccctgctccctggacttctcctgggttgtgcttttttgggggcaacataccttggacaaagctgagctgacagctaatgtttattagcctcctacctaagtcagtcactttgctaaattcttcacctgtggtaactcattttgattgttataacatctcagcaccattattcccattttaatgatgaggaaactgagtcatagaggatacagacttgcccaaaggagagccaggattttcacaccccctcctcaagctgggcctgccctccaagtgcttgttatatacctccacgggtgtcagcccagatgactcctcacccatccaccacctgcagcttgagatgttaactattagagctccattcttttggttcaaaacgttgatacttacttagatgttccctgagaggagtgtttatttctgagtaaggggctttgttgaaagagggggttagagagagcaagacagcacttgagtgcactggcaggaagcagagataagacttgaatttcagtttggtagacctccttctttagcagcccaacctgtagcaaatctagtttagcctgcatggcagggagagggattctcttcccaccctcaccatttgcaagtggcaggagctgagaatgccagtacgagagtgtagccaaagtgagaggctgagagcaaaggagacatttttttcagttttgagtcgagtatccagacagaggcaaatcattttgtttaactttttattaaagtgtaactatagaaacacatcaatgatttttcacaagtggagcacgtgcatacaatcggcaccccagaagccccccgtcagattcccttccagttaactacctctccaagggaaaccactatcctgagttctaagcgcatagattagttctgtctggtttggggagatatataaatggaattatgcattcttcgtatctggtttcttttcaccaatattatgtttgtgagatttttgttgcatgtatttgtacatggattttcattctcatggttgtataatatttcattgtgtgaataaaccacatactgtttatctga

SEQ ID NO: 29509 - DNA, 6183 bp, Homo sapiens
gcagacacgcgtggcgcgggccgccgtttccgcaaacagaatcgcgtttggctgtgctggatgtgtgaacctattgggtactgtacaacttcaagcctcgaaatcagataggcaccaccaacctcatttcctgtttcaccttgattttctgtgataccaaaatctcagcttcacaaagtcattgaaagtgttggttcatgaagttttaccatcaattcaagtaatcataaatggcaaattctgcaaaagcagaagaatatgaaaagatgtctcttgaacaggcaaaagcgtcagtgaattctgaaacagagtcttcattcaatattaatgaaaacacaacagcttctgggactgggctttctgaaaagacttctgtctgtaggcaagtagacatagcaagaaagagaaaagagtttgaagatgatcttgtaaaggaaagttctagttgtgggaaagacactccatccaagaagagaaaacttgatcctgaaattgtcccagaggaaaaagattgtggtgatgctgaaggcaattcaaagaaaagaaaaagagaaactgaggatgttccaaaagataaatcttctactggagatggcactcaaaataagagaaaaatagcacttgaggatgttcctgaaaagcagaaaaatctggaagaaggacacagctcaacagtggctgcccattacaatgaacttcaggaagttggtttggagaagcgtagtcaaagtcgtattttttacctaagaaactttaataattggatgaaaagtgttctcattggagaatttttggaaaaggtacgacagaagaaaaaacgtgatatcactgttttggacctgggatgtggtaaaggtggagatttgctgaaatggaaaaaaggaagaattaacaagctagtttgtactgatattgccgatgtttctgtcaaacagtgtcagcagcggtatgaggacatgaaaaatcgtcgtgatagtgaatatattttcagtgcagaatttataactgctgacagctcaaaggaacttctgattgacaaatttcgtgacccacaaatgtgttttgacatctgcagttgtcagtttgtctgtcattactcatttgagtcttatgagcaggctgacatgatgctgagaaatgcgtgtgagagacttagccctgggggctattttattggtactactcccaatagctttgaattgataagacgccttgaagcttcagaaacagaatcatttggaaatgaaatatatactgtgaaatttcagaagaaaggagattatcctttatttggctgcaaatatgacttcaacttggaaggtgttgtggatgttcctgaattcttggtctattttccattgctaaatgaaatggcaaagaagtacaatatgaaactagtctacaaaaaaacatttctggaattctacgaagaaaagattaagaacaatgaaaataaaatgctcttaaaacgaatgcaggccttggagccatatcctgcaaatgagagttctaaacttgtctctgagaaggtggatgactatgaacatgcagcaaagtacatgaagaacagtcaagtaaggttacctttgggaaccttaagtaaatcagaatgggaagctacaagtatttacttggtgtttgcctttgagaaacagcagtgagcacataggcagtagtcccagaggggccgtgttctgtcctgcacaaatttgaacaactcatctcgatatatttgatatttctctgtctgttgattttaattctaaatgtgcaggatgctgccagaaactccaatgtagaaattcaacatttgctgtctgtgacagatgaacttttgcatgtgtatataagaatgagttgggacctctgtctttaaaaatctatttttaggtaatgttctaagaattccatttgcctctatgatcttagctcataaaaatataatatgacttgataaagcaactaaactctttccacagtgttcagatttgtcctgtgtgtgtttacagtattcaatttattgcagttatagaattggtcagagagcattttcatagtgtgctcatttctatggttttgttatatagcatttttcaacatttaatggtctgtacagttgaatgtaagtgttcaatatgtattgctgaagttataagtttaaaactcaatttcagatgctcataaaagttacttagctaaaattttagcaatttattgcattttgaaataatcattaacatgctgcaattcaggagctggttagaacattttaagtggcagcatagaattttggaattttggggctttcttttcagaaattgctaccatagtaattaatgtttccagttatcaagattgtgattagacacatttacctttcttcattgaacaaatggtgccatagttatttttctcaaaatttagtgaaaatccctcccatgtagacatgttgcacattttttccaaatttatacatggaactgcagtaggaatattctcaccatctgatgccatgtacccacttcagaaataagcaatacttgttcctctgttacaacctcagcactttgcaccgtaggagccattgttaaagttgtcacttgtgtaactgactgcttttccaaaactggtacttacgtgaactgttgtccttgctttacaccaccatttggaaaacttaccagtttttagatgtagatgtagtgaaaaacttcaagaatgaagcagagcaattgagtattcttttttaaattattaagccatgatttacaaaaacattactttctgtaattcacaatacttgttttaaaaacatagtgtcttcattagtgtgcatctattaactgttcatggtgttagagttgcaaactttttagcaagaaaatatggatttcctcatttcagttccttctgcagcctgtgaatctccacaaagtgttaccagtttacaaaaataagtctttttgccttaagtcattttggaaataagtaatactgcatctgactctggtggctgtattagctaggaaaggtttgtaaatggtgtcagtgaggtggggaaaggaagtcttcctgtcacatatgcaggttcgttttcattctagggcagtgccaggaagtatattgatagctttgtaggtacaggaaaaacatcatcattatttcctctgttcacatttactggtcttaattaacaggtaataataatacatgtacttttagcctgaaacctcttccacgccatgggtaacttgggggagagaagaatcctccaaacgatggagtagccagtggtaatacaaagcagggagaacagaaaggtagagttactaaggccttcagtgaacagaaaggagcagagagcaagattagatctgagaagatgctctggggactgagcccactgttgttggtgtcagggaggcttactggagccacacctgcaggcgctgtgttcaggcaccaccttcctccttgagctttgcctgtctcttgccttatcagttcttcctccaccaccctacacccccctccccccggccccaagcccctgtgtctccttgttacaattaagtttctggatattgacttaagaactgttaggaagaggactaggactcttccttgacacaccttgtagtctaaatgttcggtattctattcaggacttacggtaactattatgagggaggcatggctttccaccgtcgggccaggaagagcacctgttgctgcaagctcagtgaagtggggcactcccagacctgccatgcagtttatcctctgagaatggaattggaaatgaagacctaaccagctattggtgggaatgacggaactggggattgcgatgattgatctgggaacatggctggattgtgatttaaccaagaatgctgatgttgaattctttgggcctagaatatacttgagaaagcactagtggcttgtgttcagggagaggagctggcagtttttaaccacttctgtgggagccgtgttctaacctgtggaaagtattgcaattctgtgagagtgactctgcagagtcactgcaccatcaggcttggccctgctgtgccttcagtacccagccaggttctctgggtccagggtgactctccaaagaaattggccttcagctggagaaaacattgggtggagactctcacttatgttaatgcaatcttgaaatgactgaaaggtagattgccagcacagtgagtttcccagcctgctcccccatccacacttggaaattgagggagcatgaccgctctctgacttcacatgttaatagaggatcagagcagagttgggagtatattggtcaggatcatagaaaagaagacaaagcttgctcagccatgagatggccaggtatccagttttgttaactctctttgggaatttctttttcagcctgttttttagcttagtgccattatgtcattttgatttgtattcaagtactcttcaagtatctttgtaatgaaggtttggctacttgtataggtctgcctgcagggtgaaaatgccagtgtgaatattctagctaccaaacattgttttttgttgaaaaactgactttctgttgtctacctcaggccttgtgcatttgggttatctcaagccagtcaccacagagggtctctagggtctgcaaaatagaggccaaatccagggaccaggccctaataatagaagttgtaccaaaatgcctgtggtacttgatggcctgttggtcaaataggaagtacaagtgtgtgatgttagaacctccctagttgctgctatatcaaacactgcacacttgacaagtgttttcattccccgccctctgacagaacaacattcctaattctttgaaggcaaccagtgcaaaggctactacacttgtgtaatgatatttagcagatgcatacaggactggatcccagggcactgtcagttcttccctccctctcgtgctgctcagtttgtcctctgctcccatgtaggcctaaagtcaccccactccttagtgcctgcacctcaccacgatattgaggaagcacaggacatccaagggtactctccagtttggctgtggagacttgagcaagccctaaagtcccctgctccctggacttctcctgggttgtgcttttttgggggcaacataccttggacaaagctgagctgacagctaatgtttattagcctcctacctaagtcagtcactttgctaaattcttcacctgtggtaactcattttgattgttataacatctcagcaccattattcccattttaatgatgaggaaactgagtcatagaggatacagacttgcccaaaggagagccaggattttcacaccccctcctcaagctgggcctgccctccaagtgcttgttatatacctccacgggtgtcagcccagatgactcctcacccatccaccacctgcagcttgagatgttaactattagagctccattcttttggttcaaaacgttgatacttacttagatgttccctgagaggagtgtttatttctgagtaaggggctttgttgaaagagggggttagagagagcaagacagcacttgagtgcactggcaggaagcagagataagacttgaatttcagtttggtagacctccttctttagcagcccaacctgtagcaaatctagtttagcctgcatggcagggagagggattctcttcccaccctcaccatttgcaagtggcaggagctgagaatgccagtacgagagtgtagccaaagtgagaggctgagagcaaaggagacatttttttcagttttgagtcgagtatccagacagaggcaaatcattttgtttaactttttattaaagtgtaactatagaaacacatcaatgatttttcacaagtggagcacgtgcatacaatcggcaccccagaagccccccgtcagattcccttccagttaactacctctccaagggaaaccactatcctgagttctaagcgcatagattagttctgtctggtttggggagatatataaatggaattatgcattcttcgtatctggtttcttttcaccaatattatgtttgtgagatttttgttgcatgtatttgtacatggattttcattctcatggttgtataatatttcattgtgtgaataaaccacatactgtttatctga

SEQ ID NO: 29510 - DNA, 5822 bp, Homo sapiens
  misc_feature (5771)..(5771): n is a, c, g, or t
  misc_feature (5804)..(5804): n is a, c, g, or t
  misc_feature (5807)..(5807): n is a, c, g, or t
gcagacacgcgtggcgcgggccgccgtttccgcaaacagaatcgcgtttggctgtgctggatgtgtgaacctattgggtactgtacaacttcaagcctcgaaatcagataggcaccaccaacctcatttcctgtttcaccttgattttctgtgataccaaaatctcagcttcacaaagtcattgaaagtgttggttcatgaagttttaccatcaattcaagtaatcataaatggcaaattctgcaaaagcagaagaatatgaaaagatgtctcttgaacaggcaaaagcgtcagtgaattctgaaacagagtcttcattcaatattaatgaaaacacaacagcttctgggactgggctttctgaaaagacttctgtctgtaggcaagtagacatagcaagaaagagaaaagagtttgaagatgatcttgtaaaggaaagttctagttgtgggaaagacactccatccaagaagagaaaacttgatcctgaaattgtcccagaggaaaaagattgtggtgatgctgaaggcaattcaaagaaaagaaaaagagaaactgaggatgttccaaaagataaatcttctactggagatggcactcaaaataagagaaaaatagcacttgaggatgttcctgaaaagcagaaaaatctggaagaaggacacagctcaacagtggctgcccattacaatgaacttcaggaagttggtttggagaagcgtagtcaaagtcgtattttttacctaagaaactttaataattggatgaaaagtgttctcattggagaatttttggaaaaggtacgacagaagaaaaaacgtgatatcactgttttggacctgggatgtggtaaaggtggagatttgctgaaatggaaaaaaggaagaattaacaagctagtttgtactgatattgccgatgtttctgtcaaacagtgtcagcagcggtatgaggacatgaaaaatcgtcgtgatagtgaatatattttcagtgcagaatttataactgctgacagctcaaaggaacttctgattgacaaatttcgtgacccacaaatgtgttttgacatctgcagttgtcagtttgtctgtcattactcatttgagtcttatgagcaggctgacatgatgctgagaaatgcgtgtgagagacttagccctgggggctattttattggtactactcccaatagctttgaattgataagacgccttgaagcttcagaaacagaatcatttggaaatgaaatatatactgtgaaatttcagaagaaaggagattatcctttatttggctgcaaatatgacttcaacttggaaggtgttgtggatgttcctgaattcttggtctattttccattgctaaatgaaatggcaaagaagtacaatatgaaactagtctacaaaaaaacatttctggaattctacgaagaaaagattaagaacaatgaaaataaaatgctcttaaaacgaatgcaggccttggagccatatcctgcaaatgagagttctaaacttgtctctgagaaggtggatgactatgaacatgcagcaaagtacatgaagaacagtcaagtaaggttacctttgggaaccttaagtaaatcagaatgggaagctacaagtatttacttggtgtttgcctttgagaaacagcagtgagcacataggcagtagtcccagaggggccgtgttctgtcctgcacaaatttgaacaactcatctcgatatatttgatatttctctgtctgttgattttaattctaaatgtgcaggatgctgccagaaactccaatgtagaaattcaacatttgctgtctgtgacagatgaacttttgcatgtgtatataagaatgagttgggacctctgtctttaaaaatctatttttaggtaatgttctaagaattccatttgcctctatgatcttagctcataaaaatataatatgacttgataaagcaactaaactctttccacagtgttcagatttgtcctgtgtgtgtttacagtattcaatttattgcagttatagaattggtcagagagcattttcatagtgtgctcatttctatggttttgttatatagcatttttcaacatttaatggtctgtacagttgaatgtaagtgttcaatatgtattgctgaagttataagtttaaaactcaatttcagatgctcataaaagttacttagctaaaattttagcaatttattgcattttgaaataatcattaacatgctgcaattcaggagctggttagaacattttaagtggcagcatagaattttggaattttggggctttcttttcagaaattgctaccatagtaattaatgtttccagttatcaagattgtgattagacacatttacctttcttcattgaacaaatggtgccatagttatttttctcaaaatttagtgaaaatccctcccatgtagacatgttgcacattttttccaaatttatacatggaactgcagtaggaatattctcaccatctgatgccatgtacccacttcagaaataagcaatacttgttcctctgttacaacctcagcactttgcaccgtaggagccattgttaaagttgtcacttgtgtaactgactgcttttccaaaactggtacttacgtgaactgttgtccttgctttacaccaccatttggaaaacttaccagtttttagatgtagatgtagtgaaaaacttcaagaatgaagcagagcaattgagtattcttttttaaattattaagccatgatttacaaaaacattactttctgtaattcacaatacttgttttaaaaacatagtgtcttcattagtgtgcatctattaactgttcatggtgttagagttgcaaactttttagcaagaaaatatggatttcctcatttcagttccttctgcagcctgtgaatctccacaaagtgttaccagtttacaaaaataagtctttttgccttaagtcattttggaaataagtaatactgcatctgactctggtggctgtattagctaggaaaggtttgtaaatggtgtcagtgaggtggggaaaggaagtcttcctgtcacatatgcaggttcgttttcattctagggcagtgccaggaagtatattgatagctttgtaggtacaggaaaaacatcatcattatttcctctgttcacatttactggtcttaattaacaggtaataataatacatgtacttttagcctgaaacctcttccacgccatgggtaacttgggggagagaagaatcctccaaacgatggagtagccagtggtaatacaaagcagggagaacagaaaggtagagttactaaggccttcagtgaacagaaaggagcagagagcaagattagatctgagaagatgctctggggactgagcccactgttgttggtgtcagggaggcttactggagccacacctgcaggcgctgtgttcaggcaccaccttcctccttgagctttgcctgtctcttgccttatcagttcttcctccaccaccctacacccccctccccccggccccaagcccctgtgtctccttgttacaattaagtttctggatattgacttaagaactgttaggaagaggactagaaaaggcttcccctgcctatcctctccgatcaccaaggtggaagggagctagtaggactcttccttgacacaccttgtagtctaaatgttcggtattctattcaggacttacggtaactattatgagggaggcatggctttccaccgtcgggccaggaagagcacctgttgctgcaagctcagtgaagtggggcactcccagacctgccatgcagtttatcctctgagaatggaattggaaatgaagacctaaccagctattggtgggaatgacggaactggggattgcgatgattgatctgggaacatggctggattgtgatttaaccaagaatgctgatgttgaattctttgggcctagaatatacttgagaaagcactagtggcttgtgttcagggagaggagctggcagtttttaaccacttctgtgggagccgtgttctaacctgtggaaagtattgcaattctgtgagagtgactctgcagagtcactgcaccatcaggcttggccctgctgtgccttcagtacccagccaggttctctgggtccagggtgactctccaaagaaattggccttcagctggagaaaacattgggtggagactctcacttatgttaatgcaatcttgaaatgactgaaaggtagattgccagcacagtgagtttcccagcctgctcccccatccacacttggaaattgagggagcatgaccgctctctgacttcacatgttaatagaggatcagagcagagttgggagtatattggtcaggatcatagaaaagaagacaaagcttgctcagccatgagatggccaggtatccagttttgttaactctctttgggaatttctttttcagcctgttttttagcttagtgccattatgtcattttgatttgtattcaagtactcttcaagtatctttgtaatgaaggtttggctacttgtataggtctgcctgcagggtgaaaatgccagtgtgaatattctagctaccaaacattgttttttgttgaaaaactgactttctgttgtctacctcaggccttgtgcatttgggttatctcaagccagtcaccacagagggtctctagggtctgcaaaatagaggccaaatccagggaccaggccctaataatagaagttgtaccaaaatgcctgtggtacttgatggcctgttggtcaaataggaagtacaagtgtgtgatgttagaacctccctagttgctgctatatcaaacactgcacacttgacaagtgttttcattccccgccctctgacagaacaacattcctaattctttgaaggcaaccagtgcaaaggctactacacttgtgtaatgatatttagcagatgcatacaggactggatcccagggcactgtcagttcttccctccctctcgtgctgctcagtttgtcctctgctcccatgtaggcctaaagtcaccccactccttagtgcctgcacctcaccacgatattgaggaagcacaggacatccaagggtactctccagtttggctgtggagacttgagcaagccctaaagtcccctgctccctggacttctcctgggttgtgcttttttgggggcaacataccttggacaaagctgagctgacagctaatgtttattagcctcctacctaagtcagtcactttgctaaattcttcacctgtggtaactcattttgattgttataacatctcagcaccattattcccattttaatgatgaggaaactgagtcatagaggatacagacttgcccaaaggagagccaggattttcacaccccctcctcaagctgggcctgccctccaagtgcttgttatatacctccacgggtgtcagcccagatgactcctcacccatccaccacctgcagcttgagatgttaactattagagctccattcttttggttcaaaacgttgatacttacttagatgttccctgagaggagtgtttatttctgagtaaggggctttgttgaaagagggggttagagagagcaagacagcacttgagtgcactggcaggaagcagagataagacttgaatttcagtttggtagacctccttctttagcagcccaacctgtagcaaatctagtttagcctggctatcctttccgatcaccaaggtggaanggaactagtaggactctttcttgaacaccttgnagnctaaaaggtcggatt

SEQ ID NO: 29511 - DNA, 1333 bp, Homo sapiens
aatcgagctcggtacctgtggaggtgcagtgcaaaggctactacacttgtgtaatgatatttagcagatgcatacaggactggatcccagggcactgtcagttcttccctccctctcgtgctgctcagtttgtcctctgctcccatgtaggcctaaagtcaccccactccttagtgcctgcacctcaccacgatattgaggaagcacaggacatccaagggtactctccagtttggctgtggagacttgagcaagccctaaagtcccctgctccctggacttctcctgggttgtgcttttttgggggcaacataccttggacaaagctgagctgacagctaatgtttattagcctcctacctaagtcagtcactttgctaaattcttcacctgtggtaactcattttgattgttataacatctcagcaccattattcccattttaatgatgaggaaactgagtcatagaggatacagacttgcccaaaggagagccaggattttcacaccccctcctcaagctgggcctgccctccaagtgcttgttatatacctccacgggtgtcagcccagatgactcctcacccatccaccacctgcagcttgagatgttaactattagagctccattcttttggttcaaaacgttgatacttacttagatgttccctgagaggagtgtttatttctgagtaaggggctttgttgaaagagggggttagagagagcaagacagcacttgagtgcactggcaggaagcagagataagacttgaatttcagtttggtagacctccttctttagcagcccaacctgtagcaaatctagtttagcctgcatggcagggagagggattctcttcccaccctcaccatttgcaagtggcaggagctgagaatgccagtacgagagtgtagccaaagtgagaggctgagagcaaaggagacatttttttcagttttgagtcgagtatccagacagaggcaaatcattttgtttaactttttattaaagtgtaactatagaaacacatcaatgatttttcacaagtggagcacgtgcatacaatcggcaccccagaagccccccgtcagattcccttccagttaactacctctccaagggaaaccactatcctgagttctaagcgcatagattagttctgtctggtttggggagatatataaatggaattatgcattcttcgtatctggtttcttttcaccaatattatgtttgtgagatttttgttgcatgtatttgtacatggattttcattctcatggttgtataatatttcattgtgtgaataaaccacatactgtttatctga

SEQ ID NO: 29512 - DNA, 1995 bp, Homo sapiens
gcagacacgcgtggcgcgggccgccgtttccgcaaacagaatcgcgtttggctgtgctggatgtgtgaacctattgggtactgtacaacttcaagcctcgaaatcagataggcaccaccaacctcatttcctgtttcaccttgattttctgtgataccaaaatctcagcttcacaaagtcattgaaagtgttggttcatgaagttttaccatcaattcaagtaatcataaatggcaaattctgcaaaagcagaagaatatgaaaagatgtctcttgaacaggcaaaagcgtcagtgaattctgaaacagagtcttcattcaatattaatgaaaacacaacagcttctgggactgggctttctgaaaagacttctgtctgtaggcaagtagacatagcaagaaagagaaaagagtttgaagatgatcttgtaaaggaaagttctagttgtgggaaagacactccatccaagaagagaaaacttgatcctgaaattgtcccagaggaaaaagattgtggtgatgctgaaggcaattcaaagaaaagaaaaagagaaactgaggatgttccaaaagataaatcttctactggagatggcactcaaaataagagaaaaatagcacttgaggatgttcctgaaaagcagaaaaatctggaagaaggacacagctcaacagtggctgcccattacaatgaacttcaggaagttggtttggagaagcgtagtcaaagtcgtattttttacctaagaaactttaataattggatgaaaagtgttctcattggagaatttttggaaaaggtacgacagaagaaaaaacgtgatatcactgttttggacctgggatgtggtaaaggtggagatttgctgaaatggaaaaaaggaagaattaacaagctagtttgtactgatattgccgatgtttctgtcaaacagtgtcagcagcggtatgaggacatgaaaaatcgtcgtgatagtgaatatattttcagtgcagaatttataactgctgacagctcaaaggaacttctgattgacaaatttcgtgacccacaaatgtgttttgacatctgcagttgtcagtttgtctgtcattactcatttgagtcttatgagcaggctgacatgatgctgagaaatgcgtgtgagagacttagccctgggggctattttattggtactactcccaatagctttgaattgataagacgccttgaagcttcagaaacagaatcatttggaaatgaaatatatactgtgaaatttcagaagaaaggagattatcctttatttggctgcaaatatgacttcaacttggaaggtgttgtggatgttcctgaattcttggtctattttccattgctaaatgaaatggcaaagaagtacaatatgaaactagtctacaaaaaaacatttctggaattctacgaagaaaagattaagaacaatgaaaataaaatgctcttaaaacgaatgcaggccttggagccatatcctgcaaatgagagttctaaacttgtctctgagaaggtggatgactatgaacatgcagcaaagtacatgaagaacagtcaagtaaggttacctttgggaaccttaagtaaatcagaatgggaagctacaagtatttacttggtgtttgcctttgagaaacagcagtgagcacataggcagtagtcccagaggggccgtgttctgtcctgcacaaatttgaacaactcatctcgatatatttgatatttctctgtctgttgattttaattctaaatgtgcaggatgctgccagaaactccaatgtagaaattcaacatttgctgtctgtgacagatgaacttttgcatgtgtatataagaatgagttgggacctctgtctttaaaaatctatttttaggtaatgttctaagaattccatttgcctctatgatcttagctcataaaaatataatatgacttgataaacccacctaacaaaaacaaaaaaacacaacaacaaaac

SEQ ID NO: 29513 - DNA, 347 bp, Homo sapiens
gagaactacttaattaatgctcttttgcatgacagactgaccctgtagatgctgaaaagacaccataagcagaagcagatggttctggaagagacagaacctacattgccattttcccagttatagtctacttcagaactggtttagataattggctgtgaaaagtttctgattccaagtaggccacaatattctggttaagagaaagctgatttgaatgacactttgctacttaaagctaaatggaggagccaaaaaaagtgtcatgggaaaaatacacctcttatataatatcctataatacacctattttatataatatatacctattatatatacacctatat

SEQ ID NO: 29514 - DNA, 430 bp, Homo sapiens
acagcagagatggggccaggagtagaatattcactggacagatcccaagtctgtagtagaaaacagcttgttcattatcctctgaatttcctttgccagaagagttgtagggaagaaatggggtggtcctcccattggtctaacttcttgagtgtaaggctttggttctcaactttggctatatgttgaagccactcttgattcctaagtctaatccccagggtttctgatttaattggtgtagggtgtggccaggaccaaataattgtaatgtgtagccaagattgagaaccactgccttaggagatgacaacccccagtctcagttaagaaattagcaggcttattttgcttaactctaggtaatatacgtactgagaaggtctgggaaccatcccaatagtaatgaggatccatagctccctgatct

SEQ ID NO: 29515 - DNA, 675 bp, Homo sapiens
ctaggagttaatgaagaatccatcagcagtctgtttgactttacccctgagtgcagaacaaccgatcaagaccaaaagattaagaaggcaaacgagtgtgcttcaaggctgatgtacggcatggagctagacgacatggatgaggtcgaattcttacggataaaatactgggacaggagacgccgggcggcaccgcattcttatagtgcacagcgtgggaggataaggtatggaccatggtacttcgagcctaagttggggaaaaagctaagaagtgatgaacctttgattgaccccaagcccgtacttgaaaagcctgatgaacccgacattcttgacggtctttatggaccaattgcctttaaggatttcattctaagcaagggctacagaatgcctggcgtcattgaaaagctgtttgccaagaagggatggacttacgactctgttaagactcctattcaacgtgcagtgcaagtttacaagtacaaagaagacgtcacagatgcatcaaaagaagattagatggttttcaatttactgcttaattgggtatttcttgctctcattctaaacatcaatcagaatttatgatgactggccccgtgaatgtacaactttggcaacatctgtaaattcaatacccaatgcttataaatatgtcttaatgacctg

SEQ ID NO: 29516 - DNA, 284 bp, Homo sapiens
atgattaacataaccattcttattttttcctatcctcaaaatggtactcctgccccctcttccacccccgtgtttcccaggatgtgctgagttttctttctactctggaacatgctgagagaaagagaaactaaatatatggagcagagaaaaaacttatctgaatattcttcaaaatactttccttgtagtccttcaaatttaaatttctaaaagtatttgctgttatgtaaaagatgtaaacttattttgatccttttgcaaatattaagtattgtcttatc

SEQ ID NO: 29517 - DNA, 416 bp, Homo sapiens
tttaaacagcctggtgtttttacagtttttgcattattgctttcattcaaaagggaatttgaagaaataaatggcagcaagaagcgaattgaatactgctgggaggttgtaaatgagcattcctcccggatggggaggggggcaaggagaagaaagagatgcctacaccaatcaatcctaccacacatccgacatcagccaatcccaccacacttggctaaggttcagtgatacacgatgttaagtcgtagatgtcttttattagcacacttgacagaccaggaaatgatttttctctacaattcaagaaaactgctgtttaataaaaatttcaattgctgattcaaatagacactttaagcaaagtttactgtatgaaagcttgtgaggataagtggaaatgtattatactgcct

SEQ ID NO: 29518 - DNA, 491 bp, Homo sapiens
cagctccattataatcttatgagaccatcatatatgtggtccaacattgaccaaagtgtcattatgccacacaggactgtatacaattcagcagcattagttacattcatgatgttgtgcaacccttacctctatctagttcaataactttttatcaccccaaaaagaaaccccatacctgttactactgcctgtttttcaaaataacggtgtggctgggtgtggtggctcacacctgtgatcccagcactttgggaggccgaggtgggcagatcacctgaggtcaggagttcgagaccagcctggccagcatggtgaaaccccatctctactaaaaatacaaaaaatagctgggtgtggtggcaggcacttgtaatcccagctactcgggaggctgaggcaggagaatcacttaaacccaggaggcggagcttgcagtgagccgagatcacaccactgcactccagcctgggccacggagcgagactgtc

SEQ ID NO: 29519 - DNA, 414 bp, Homo sapiens
gtcttgaactcctgggttcaagcagtccacccacctcagcctcccaaagttctgggactgtaggcatgagccactgcagctggcttaccacacgattttgaatggtgggagatatataaattattccattgaacaaaaaagccatatttaatttagccaatccctttctacggtaaccatcctcacagaagaggctttgtgagcccaccttttctaaatgctccgtattaatgctgtcagttggacacaaaagtgtcagggagctgtactgggtagttcttgctaaatatactcaggatctccatgcccattgagatcaggaatagatccagtcacctgttaaaaaagtaaatagaaatcatcacctagatagaattgatccattgaagctaaaaaatcaagcccttcaagtta

SEQ ID NO: 29520 - DNA, 772 bp, Homo sapiens
aacaaagcattgcagctatccttccccaacctggcccataaatgccttcatcagcaccctcacctgttacgaactccccactctgtctctgttcctactgggtgacacccgtagagcatttactgcacactaggcatcctcaaatacattatctgatcctacaacagagcccagagctagcacagggaccaaggtctcagaggttccaaacagcatagctggggttagaatgcaggcgtgtctgttcaaaaattcaatgtgtttttctgcatttttctttcctatcctgcccgagaatacaaagcttagtgttatctcaagtctcttctcaaatctcaattttaaatgctctatttctgatatttatttcttcctgaattgtgtggtcttatcggtccataccagttagttctcacaattagtatttaaactacaagggcgttcccaaagtcccccgacctggggttttattccatttacacccatcttccgtgattagactctcacatccttgaagcagggactggctcttatgtttcgaggtggccaaacgtcggagtcaaacagatcagtgtccccagccatgtgacctaagacaaaacaactccctttctttttttgagatggagttttgctcttatggcccaggctggagtgcaatggtgtgatttcagttcactgcaatctctgcctctcgggttcaagtgattctcctgcctcagcttcccaagtagctgggattacaggcacacaccaccatggccagctaatt

SEQ ID NO: 29521 - DNA, 522 bp, Homo sapiens
gtatttgcacagaaaattacaatcatttaattagtttcttctcacaccagctcgaagatcttaaaataacagcactctccttccttagtaattttcttgcaaaagcagataatttcctgcaatgttgagctcgccttgactcacaccgagcacatttcttgcaagtcaccatgcctggcttatgttaagtttttgattgagcctgaggttttatctgcatcagaagtcactcttgtggctgccttgtgttgtacccacttgccggtcagtaagcacaattgcaacccccaaggaaatccacaggaggagaaacatgtgtggcattaggacaatcccgtgcctagaagggacacggtggcaaggctgcgtcgtgggagtcacctttccctgttctgttctcataacctctgaattctgccacttgtgacccaaggagggggtatctctctgagcccaggaaatccagatctgtcaattttgggaagtcagaaataggctggtctggtgctgcgccaagggtgg

SEQ ID NO: 29522 - DNA, 439 bp, Homo sapiens
cctcaagtacacacgtacctaactggaaaaggcagggaccctgatcaccccttgcaaagttctcagagacagacaacggtcctcagatcacacactgagaattgctgatctaagggggctctaatctgtgtacaactcgggaagcagaaagatatagctttactgaatttaggtgacaccggacaaagtttgagggtgacaggacagttctaacattgaggtgtaaattctggaagggaagaagccaaaagggggtaagtcccccaaatttatatataaactgtcccaaaccttggctatctgctaaaccatgcatgtgcagaggagattctagggtacgatgacaaagaaaaagctggaaagaaaagatttcagctgctgccatcactgaaaagagaatgcagttttaatctagccaagcaaaccactctctacaacc

SEQ ID NO: 29523 - DNA, 805 bp, Homo sapiens
tcctcagtggcccagggcaggtggatatgctctttgaggtgctccttcagcaggctgactcattgatggcgtttgcaaaaaggatgtggttttttccaattccactgaaggcaaatcctagcacaaatatgggtactagtatgccgtctgagacagaaccatgacattgttggccagatgcagtggctcatgcctgtaatcccagcactttggaaggccaaggcgggtggatcacgaggtcaggagatcaagcccatcctggccaacatggtgaaaccctgtctctacaaaaaatacaaaaattagctgggcgtggcagcgtgtgcctgtaatcccagttactcaggaggctgaggcaggagaaccacttgaacccaggaggtggaggttgcagtgagccgagaacacaccactgcactccagcctaggtgacagagggatactccttctcaaaaaaaaaaaaaaaaaaaaaaaaggaaaaagaaaagaaccgcaatattgttatattaaccatatgtttaggaaatgagattcgaaataaatgttatggctgactgctgtgtttctatgtcctaccatagcaatagaaacctttaatctctgagagaaattatttctgagtcttgccttaccatttttataggcctgaggattgacttctaaagtgcctagatgtggccgggcgtaatggcttacgcctgtaatcctagcactttggaaggccaaggcgggtggatcacttgaggtcaggagttcgagaccagcctggccaacatggtgaaaccctgtctctactaaaaataca

SEQ ID NO: 29524 - DNA, 2492 bp, Homo sapiens
  misc_feature (427)..(427): n is a, c, g, or t
gttttccctgctgaaaacccaacaccagacggaaatgccaagtgcccaccccagaccccaaaccctaaggttggaccccaactcggaaccaggagtggagcgtggaaggtggggacagtgctcagggcccagtccagttggcactgacagcttccagtgtccccgctccatttccactagttcccctgggacaagcggcccctcactgggtgtcattcctacccaatgagttgatggaaaagtgggattcgtgccccacccaccatcatgcaagaaaaacaagcaaaacgaaacccagactgtagtttgccatcagggcaaaccactttctcaacatttttttgtggggggatgaacagtaaaccttgtggggccactgtggaaacttaaccgtgggtctcaaaccttgatgagcctcatctgtaanatgggttcaagaaagtcatctccccagagacggcggaaacggtccacctagggaacagagtggggcatcttttcgcagccgagcccagaacccatcacctaaagagttctggatgattcgttttgattttttttttttttaaatcaccatcgctgtcgtcatcagagtctcgcctagggcctggcacagagtagacgctcagttagaagctgtctggccttttcaccttctcccgggtcagcacacacagatttgggagtatttacctgcacagaacgcaccttcaggaactgccaaccagaagcaaaatccaaagctgctctctgcgatcccttcacttttaactctcagtctgcactttttttttttaactgagcatctattatgtgctaggcactgttccagtgctcggggacgcagctgtgaatgaacagaaacgggggatggaggacaggggagaaacccccttcacgggccttagatggcagggggtagggaaggagagacagaaaataaacagaaatatctgtccccagctgccagaggaggaggaaatgggcttggtgatggtgacattaagttctttgaaagctgggtttgttggcctctgaactctggcctttgtgggatctgttcttttggaaaagatgggagcccctgtgttcctagatcccagcctggccgggtggagtagggtggggaggtggtgtccacctgtgtggccccgttctcactccctaacgcccgtcccttctcccccaggtgaggggccttcccatcccaggagggttttctgcttccaaccgatccaggacttacccataaattccaaccgttctttggacaccagccctttcctcccctcttctccccttgccctgcccctctactggaggccacctggagtggcgaggggcctttggggtctgtcctggggcaggggcgggggtgggggaggctcctgaatcgtgggcagaagtgttcacacgccccccctgctttgggaaacgctctcgcttcttccccacaaaacttggtgacttccccaaactaaatcacaccttttcctatatatatatatatgcatatatatatagatctatagacagtatatatatattttgagtacggatcatgggaccaaacttttccgacttccttccatccgagtagagtgaccctgggccggtcactcagcgggggacacaggaagggctgaggttggcgggaccccgcgcaacacataccaggtgccccacccccacccccaccacctcctggctggcacatcccaccaggaacccgccaacacaacatacctccaggacttttggcaccccccaccaccaattctccagggccgttgggctctgccagcttcagtgtccctggtcccagctgcagcctccagaccccacctcgccccttcgtcccagagccctgccctccgggatggatataggtacaacagagacgctctggcctgcctcagcccttctctgctcccctgcccgagtcatagccttactcatgtgaccaatagcccttagctttccgtcggagggggggggcggacagggttggggggagcccccctgcccctcaccaccccctcccaaggccaggcagccattgtccctgcccttcgaatcaccagcctcgaatttaaggtcttgtaaccaggattgccaagcgtagcggaagaccctacccggaccggccaagcacccctttaactggagacgaacttgataatgaccttcatacctctacagagatttttttttttttccggtctttctgagcaggtacaaagaagaaaagagaagaaaaagatggggggaaaaaatcaaaccacaatggatttttgtttcctagttgggagtggggtggggtggggtgtctttgtgagggtgcctctgtacagctgcccaatccgcgacacccacgtcaaagcacagcatcaagttcgtttggacatccggcaaggcctcttaccaaatgaggcgccagataacttaataagctcaaaagaaaaaaacatttaaaaagaaagaaaaaaaaa

SEQ ID NO: 29525 - DNA, 1555 bp, Homo sapiens
  misc_feature (1551)..(1551): n is a, c, g, or t
cgcccgccatggcccgcctgacggagagcgaggcgcgccggcagcagcagcagctcctgcagccgcggccctcgcccgtgggcagcagcgggcccgagccccccggggggcagcccgacggcatgaaggacctggacgccatcaaactcttcgtgggccagatcccccggcacctggacgagaaggacctcaagccgctcttcgagcagttcggccgcatctacgagctcacggtgctcaaagacccctacacggggatgcacaaaggctgtgccttcctcacctactgtgccagggattccgccatcaaagctcagactgccctgcacgagcagaagaccttgcccggaatggcgcggccaatccaggtgaagcctgcggacagtgaaagccgcggaggtagggaccggaagctgttcgtggggatgctgaacaagcagcagtcggaggaggacgtgctgcggctgttccagcccttcggggtcattgacgagtgcaccgtgctccgggggcctgacggcagcagcaaaggctgtgctttcgtgaagttctcctcccacacggaggcgcaggcggccatccacgccttgcatgggagccagaccatgccgggagcctcctccagcctggtggtcaagttcgccgacacggacaaggagcggacgctccggcgcatgcagcagatggtgggccagctgggcatcctgacgccgtccctcacattgcccttcagcccctacagtgcctacgcccaggctctcatgcaacagcagacaacagtcctgtccacctcgggcagctacctgagtcccggcgtggccttctcaccctgtcacatccagcagataggcgccgtcagcctcaacgggctgcctgccacacccatcgctcctgcctctgggctgcactcacccccgctgctgggcaccaccgctgtgcctggcctcgtggctcccatcaccaatggctttgcaggtgtcgtgccctttccaggtgggcaccctgccctggaaaccgtctatgccaatggccttgtgccctacccagctcagagcccgactgtggccgagacactgcatcctgccttctccggagtccagcagtacacagccatgtaccccaccgcggccatcacgcccatcgcgcacagcgtcccccagccgccgcccctcctgcagcagcagcagcgagaaggtcccgagggctgtaacctgtttatctaccacctcccccaggagtttggagacacggagctgacgcagatgttcctacccttcggcaatatcatttcctccaaggtgtttatggatcgagctaccaaccagagcaagtgtttcggcttcgtgagctttgataacccggccagcgcccaggcagccatccaggccatgaacggcttccagatcggcatgaagaggctcaaagtccagctgaagcggcccaaagacccgtgaagggggtttctcccctgtcctccatcccccgtttctgttcattcacagctgcgtccccgagcactggaaacaggcctagcacataatagatgctcanacta

SEQ ID NO: 29526 - DNA, 2509 bp, Homo sapiens
cgggcggcggcacgtggatgccagcctggcgcgcgtctccaggccggtggatggcgcggccaatccaggtgaagcctgcggacagtgaaagccgcggaggtagggaccggaagctgttcgtggggatgctgaacaagcagcagtcggaggaggacgtgctgcggctgttccagcccttcggggtcattgacgagtgcaccgtgctccgggggcctgacggcagcagcaaaggctgtgctttcgtgaagttctcctcccacacggaggcgcaggcggccatccacgccttgcatgggagccagaccatgccgggagcctcctccagcctggtggtcaagttcgccgacacggacaaggagcggacgctccggcgcatgcagcagatggtgggccagctgggcatcctgacgccgtccctcacattgcccttcagcccctacagtgcctacgcccaggctctcatgcaacagcagacaacagtcctgtccacctcgggcagctacctgagtcccggcgtggccttctcaccctgtcacatccagcagataggcgccgtcagcctcaacgggctgcctgccacacccatcgctcctgcctctgggctgcactcacccccgctgctgggcaccaccgctgtgcctggcctcgtggctcccatcaccaatggctttgcaggtgtcgtgccctttccaggtgggcaccctgccctggaaaccgtctatgccaatggccttgtgccctacccagctcagagcccgactgtggccgagacactgcatcctgccttctccggagtccagcagtacacagccatgtaccccaccgcggccatcacgcccatcgcgcacagcgtcccccagccgccgcccctcctgcagcagcagcagcgagaaggtcccgagggctgtaacctgtttatctaccacctcccccaggagtttggagacacggagctgacgcagatgttcctacccttcggcaatatcatttcctccaaggtgtttatggatcgagctaccaaccagagcaagtgtttcggcttcgtgagctttgataacccggccagcgcccaggcagccatccaggccatgaacggcttccagatcggcatgaagaggctcaaagtccagctgaagcggcccaaagacccgggacacccctactgaccgcgcccacagccgccctgaggctgtaggcatggcccaggtgaggggccttcccatcccaggagggttttctgcttccaaccgatccaggacttacccataaattccaaccgttctttggacaccagccctttcctcccctcttctccccttgccctgcccctctactggaggccacctggagtggcgaggggcctttggggtctgtcctggggcaggggcgggggtgggggaggctcctgaatcgtgggcagaagtgttcacacgccccccctgctttgggaaacgctctcgcttcttccccacaaaacttggtgacttccccaaactaaatcacaccttttcctatatatatatatatgcatatatatatagatctatagacagtatatatatattttgagtacggatcatgggaccaaacttttccgacttccttccatccgagtagagtgaccctgggccggtcactcagcgggggacacaggaagggctgaggttggcgggaccccgcgcaacacataccaggtgccccacccccacccccaccacctcctggctggcacatcccaccaggaacccgccaacacaacatacctccaggacttttggcaccccccaccaccaattctccagggccgttgggctctgccagcttcagtgtccctggtcccagctgcagcctccagaccccacctcgccccttcgtcccagagccctgccctccgggatggatataggtacaacagagacgctctggcctgcctcagcccttctctgctcccctgcccgagtcatagccttactcatgtgaccaatagcccttagctttccgtcggagggggggggcggacagggttggggggagcccccctgcccctcaccaccccctcccaaggccaggcagccattgtccctgcccttcgaatcaccagcctcgaatttaaggtcttgtaaccaggattgccaagcgtagcggaagaccctacccggaccggccaagcacccctttaactggagacgaacttgataatgaccttcatacctctacagagatttttttttttttccggtctttctgagcaggtacaaagaagaaaagagaagaaaaagatggggggaaaaaatcaaaccacaatggatttttgtttcctagttgggagtggggtggggtggggtgtctttgtgagggtgcctctgtacagctgcccaatccgcgacacccacgtcaaagcacagcatcaagttcgtttggacatccggcaaggcctcttaccaaatgaggcgccagataacttaataagctcaaaagaaaaaaacatttaaaaagaaagaaaaaaaaa

SEQ ID NO: 29527 - DNA, 1861 bp, Homo sapiens
ttcctggtcctacagagggtttagcacagaggagaagctgggcggggtgtttgttgctgtccttgcggctcttaaggatcgggggtggatggaagacttctgctgctcccgccccactcagcccctctgtctgcccgcagctcagagcccgactgtggccgagacactgcatcctgccttctccggagtccagcagtacacagccatgtaccccaccgcggccatcacgcccatcgcgcacagcgtcccccagccgccgcccctcctgcagcagcagcagcgagaaggagtttggagacacggagctgacgcagatgttcctacccttcggcaatatcatttcctccaaggtgtttatggatcgagctaccaaccagagcaagtgtttcggcttcgtgagctttgataacccggccagcgcccaggcagccatccaggccatgaacggcttccagatcggcatgaagaggctcaaagtccagctgaagcggcccaaagacccgggacacccctactgaccgcgcccacagccgccctgaggctgtaggcatggcccaggtgaggggccttcccatcccaggagggttttctgcttccaaccgatccaggacttacccataaattccaaccgttctttggacaccagccctttcctcccctcttctccccttgccctgcccctctactggaggccacctggagtggcgaggggcctttggggtctgtcctggggcaggggcgggggtgggggaggctcctgaatcgtgggcagaagtgttcacacgccccccctgctttgggaaacgctctcgcttcttccccacaaaacttggtgacttccccaaactaaatcacaccttttcctatatatatatatatgcatatatatatagatctatagacagtatatatatattttgagtacggatcatgggaccaaacttttccgacttccttccatccgagtagagtgaccctgggccggtcactcagcgggggacacaggaagggctgaggttggcgggaccccgcgcaacacataccaggtgccccacccccacccccaccacctcctggctggcacatcccaccaggaacccgccaacacaacatacctccaggacttttggcaccccccaccaccaattctccagggccgttgggctctgccagcttcagtgtccctggtcccagctgcagcctccagaccccacctcgccccttcgtcccagagccctgccctccgggatggatataggtacaacagagacgctctggcctgcctcagcccttctctgctcccctgcccgagtcatagccttactcatgtgaccaatagcccttagctttccgtcggagggggggggcggacagggttggggggagcccccctgcccctcaccaccccctcccaaggccaggcagccattgtccctgcccttcgaatcaccagcctcgaatttaaggtcttgtaaccaggattgccaagcgtagcggaagaccctacccggaccggccaagcacccctttaactggagacgaacttgataatgaccttcatacctctacagagatttttttttttttccggtctttctgagcaggtacaaagaagaaaagagaagaaaaagatggggggaaaaaatcaaaccacaatggatttttgtttcctagttgggagtggggtggggtggggtgtctttgtgagggtgcctctgtacagctgcccaatccgcgacacccacgtcaaagcacagcatcaagttcgtttggacatccggcaaggcctcttaccaaatgaggcgccagataacttaataagctcaaaagaaaaaaacatttaaaaagaaagaaaaaaaaa

SEQ ID NO: 29528 - DNA, 308 bp, Homo sapiens
gccccgcccctcaggcaatagcccctccccgtttcgtctgtgatcttggccccgccctctggcctggccccgcccccaaaccctccccacaaaggccatgatcacacccactcctgccttggccccaccctcttatggccccgccccctccccgcccagcggcccaggccgcccacgtggcctcacgcccctcctcgccctgtgtctcgctccggtctccgcagccatgtaccccaccgcggccatcacgcccatcgcgcacagcgtcccccagccgccgcccctcctgcagcagcagcagcgagaag

SEQ ID NO: 29529 - DNA, 646 bp, Homo sapiens
cataattttttttttgagaggggatctcacgctgttgcccaggctggagtgcagtggtaccatcatagctcactgcagcctggacttcctgggctcaaccaatcctcccacctcaacctccccagtagttgggactacacatatgcaccactacacctggcttttcttttttttttttctttaaatagaaataaggtctcactatgttgcccaggctgtatgtaaccttttttattagttcgttcccttcaaaatacacattttttgtaacagaactgaaaatcatccatcaaaaccttcaaaaaaaggtttgatttcttcatcctgtactaatcaatccaaacataacatgctgttttatatacacacaaatagcaggaagaagtatgcctttgtgttgaaaacaataagtgaaacaaaaaaataaaaataaaataaaaaatatatgcatacatacatatacacatacatgtagagaaagggacttaactcactggctccagtaagcatctagaggtctgcctccataggctcagcagaggatccagctagagaaaacttattttatttttttgagacagagtttcgttctgtcacccaggctggagtgcagtggcgtgatctcagctcactgcaacctccacct

SEQ ID NO: 29530 - DNA, 383 bp, Homo sapiens
ctggactcaactgcaaagatggctaccagcttttggggccccctcacacagagggctatccacttcacgtcccctctcattgtcaagagcttttctgttgctcaataacattcttctctgccttcctcactctctggtgtccacgtacctcattattcttggtcactggacaaaaacccagaactcgccaaacggtgggaacaaagaacggctgtaacacgcacctggctggctcctggagctgtgggcagtgggcatgaaaagagctgttacacactcccaattgctggaatatgggagtgatgagccgcgacccctctgggggcccaaacatcaggacccctcgaactagaaccataatacacccccattcacaaagccat

SEQ ID NO: 29531 - DNA, 1453 bp, Homo sapiens
atattctggtaactgaaacacacttaaggtgttggatgcctgccccatcacgctgcactgtctgctgtcacatgtgtcctgaactcaccctgtttttgccctgggtttcccaggataccaagcccctgaggatggagatgatgcaacaaacctcagctttgcttggattgtgacttgaaccctatttctcaatggtgaaaggctagcctgcaataaaagctgcttttaaaacagaagtaaagcagctttatatatgggactcactagatatgagggtaagtagccccaccacatgtaaaacttggtcctcaaacgtttctgcagaataagaagccaaacttatggttatcttgtttctgttagaaacaaagttgtatatagaaataacttcgtcagaatcgacacaaatcacatcgaatagttgactgtttaattccttctacattcaaatatctaattaaaatactgtgtgctttgttggaagcatctgctcaaacttttgactgttgtaaatatgcatgcagctgggaagggattcatctaagggataagaaatgaaaaagacactctaaggacctgagggaattcaaatagaggacttcgattttttaaaaagaatgacgtggaaatgatctgttttccttgtaaaatcatatctcgtagaaaacattttaccactaccatcacccctagttggttgtgaagtgattgcctcttatccctgaaaggaaactcctgttctgaaaagttgggatgcattagccatcagtgttaggtgacgtctgttgtagtctgaagagtccttaaccttgattaaggaaggcttcctgggagaggtgggcttttggggcaattatatgatagagaagagagagaaaaatggcagatggaagtgggagacaattccacacacagggggtggagaatgatgtggaggcagcagtgggtgtaaggacaatggtgccaagagatttatttggctagaacacaaggggcagctgggtagttaggagtgggaggatggtaggacagtctgacagaaaccttggaaacagttgaactctgaaaagctgatggcaaatcagatttcatgaggaaaatggcatggttgaaaatagtaatagaaaaataagactgaagttttaaatgactggatttttgaaagtaggattattatttctttggtataccgaactttgcaaagatacgtagcattgcatccttcctctttgcttctagacagggttggccataaaccaactacactgatagaggtctctccagattgtctcagaagagagagtttaccctgaaacttaatgacatgaataaaacctgtttactgaaatttttattgcaatttaacgttaaaagtttctgctggagttttatgcatatttttctctctaagtggtgggaaataaagaacaaatctctttccaaaaaaaaaaaa

SEQ ID NO: 29532 - DNA, 960 bp, Homo sapiens
atggaaagaggaaaccaaacagaagttggaaactttctcctcctgggattcgcagaggactctgacatgcagcttctcctccatgggctgttcctctccatgtacctggttaccatcatcggaaacctgctcatcatcctgaccatcagttcagactcccacctccacacccccatgtacttcttcctctccaacctgtcctttgctgacatctgtttcacatccacgactgtcccaaagatgctggtgaatatccaaacacaaagcaaaatgatcacttttgcaggctgcctcactcagatattttttttcattgcatttggatgcctggacaatttgctcctgaccatgacggcctatgaccgcttcgtggccatctgttaccccctgcactacacggtcatcatgaacccccggctctgtggactgctggttctggggtcctggtgcatcagtgtcatgggttccttgcttgagaccttgaccattttgaggctgtccttctgcacaaatatggaaattccgcactttttttgtgatccttccgaagtcctgaagctggcctgttctgacaccttcatcaataacatcgtgatgtattttgtgaccattgtcctgggtgtttttcctctctgtggaatcctattctcttattctcagattttctcctccgtcctaagagtatctgccagaggccagcacaaagccttttccacctgtggttcccacctctcagtggtcagcttgttctatggcactggccttggggtctatctcagttctgcagttacaccaccttctaggacaagtctggcagcctcggtgatgtacaccatggtcacccccatgctgaaccccttcatctacagcctgaggaacaaggacatgaaggggtcactggggagactcctcctcagggcaacgtctctcaaagaggggaccattgctaagctctcatga

SEQ ID NO: 29533 - DNA, 121 bp, Homo sapiens
taaataactaatttcttagcggtactatgcctttacgttgctttaccactgcaggttgccgatggacctgtaacttacttcctgaacattataaaaggacagctgaccagattccttttga

SEQ ID NO: 29534 - DNA, 394 bp, Homo sapiens
aagagaaaatcagaattctcttctggaacctacattgggactgtcctcagagcaggttgtgatgtgaggaatcaaatctacaggggtatttcgcagcttggagcgcagcagactgttcccgaccccatgcatttgggggtgagaccagagacagttgaaaaactatggaatcttgacattctgcactctcaagcctggcctctccctgaatttcacagattaacatcagaccaatttattccgactattaaaagtattagaacaaaaaccaaggaggaccagtgagcagaagcaataaaccattaaaatggacatcctaaagatttaaaattttgccatcataagatgtgaacgtttgaagagctgcatttaaatgaatacaagaagggactga

SEQ ID NO: 29535 - DNA, 293 bp, Homo sapiens
ctactactactaaattctcggccgctacgacggcagagctagtctctaattcttgggctcaagctatcctcctgtctctctctgtgtctgtcttctgtcttactgtctttctctgcctgtctgtctgtctctctctctccttgcctgtttctctctctctctgtctctgtttctctctgtctccctctgtctgtctctgtctttctctctctgtctctttctctctgtctgtctctctctttctttctctctgtctgtccatctgtctctgtctctgtgtgtgtgtgtgtttc

SEQ ID NO: 29536 - DNA, 1801 bp, Homo sapiens
gcttgcaaactgctttccttgctccgtcgctcctggcctccgcttccctccctcctctttttcctcgcctcttcttccttcccttcccctgtccttctgggtaactccgggaggcaaaaagggaggctgcccgctcgctcgccccgctggctctcttccatcggcctcggtcttttagattccctgccttcgagccgaaccgagatttggaaggaaaaaatgcaagcgaactctttgggtttttgtttttgtttttttggtcataaatccagatgagatgaagtatcgtgtctactatttcctttcagagccgtgatcttcctaacgagagccgagtgttttggtgttccctgcccctgtgttttggggagcttgggggcggggatgttgaacactttgaaaattattctttcttggttgtagtcgagggagtcgggaacctccgcgcgctctccctgctcatcccgaggagagagactgatggcgggacagggcttcttggggtgggtgggaaaggggtgcgcactgcacctgcgatgccttttcagtgtgcggggggactcagggaacctcgacaggacagcctgggagaacgagaaaggtggcgggatttctggccgctgcggtgtttgtattttgggcgctgcgtgactctgtgttggctcccaatggctgttgcctccctttcctaaattttattttattttttcccatggtgcaagctctgtaaaaagggaactgcgggcctgagcgtagtggacgccaggcttcagattcccgaggtccttaccttgggcgaggagaaagacgaacagagccccagcccgcgttccttatgtgcaagactcaggaggagagaagggcactttgtggccgtggctgaggggacccggcgcgggaggagcgggcgcgggcgcgaaagggagatctttgtgagtgattttgcaaaaatagattgcgaggttggttggatttgcaacctgtggctctcctcgagggagtaagaatgggggaaggcgcggcggcggcggcccggggagggagtgggtagagttggagcctcagaaatcggctgagctccgggggcgggcggggagaaagggcgggggggcagcaggagctaggggccaccccgctgccggatgtagtgaccgtggtaaatgtcttgagaactgtgggttgcgttgcctttatgatgccgtgttattggaaccctggcgaaaaatggaactagtgttgcaataatgagttttaaagctcccccatggaaaacaaaaacacaaccaaaccgatttttaaaaaaaatgaaaaaagaccctctgtgttgtgttcccttctacgatggttgtgttggtggctggggtttgggggtggggggtcctgacagttgagcagataaatgaccccaaaccaggtgctgaaagtcccaagctgtcacagggcccctgaccacctcagagagccaatctccactccgcgccccctccccgccggcccccgccaccccacaacccgccaggatttaatcttttatggatttttttttcagtttatagtttccaggaggaaagtcttgtaacgctttactttttctcttctttttttaaagtaaagtgagtgtcagtagatgtgttttttacagtctggattttaaaaaaagtggggcaggagagagggaaccagggaaagggctgtttagaaatacagtttgtggctctgagcgatgccaccggcttcctctacagagactgccagtttccctttttctttgcaaggtgtgtgtggttttaataaataactt

SEQ ID NO: 29537 - DNA, 567 bp, Homo sapiens
agtggcatgatcatagtttactataacctgtaactcctgggctcaagcaatcctcttgcctcagactccctagtagctaggactacaaggatgcctcaccacacacaactaattttttaaagaatgttttgtagagacagggttctgtgatgttgtcctgactggtcatgaattcctggcctcaagtgatcctctcaccacggcctcctgaagtgcagggattgcaggcatgagccactgcacccagccccaaatcatttaaaataataatactaaatctatcatattactatagtataaataacatttttatgaaaaataactattttcgaaaatcagaaaaaaagtatgaagagtggcattatatcatatttttataaatcatttcaatgtttggcttaatagaagacagctagattcccatatatacttttgcattcagtatattctgatatcacacattacattatgtagcctctgcaaaagtccactacattacactcatgagaacatgagaatgaaaaagttaaataatgttttagtatgattatgaaaacaattttcacc

SEQ ID NO: 29538 - DNA, 355 bp, Homo sapiens
ttttactaatatctgtaaagaacagagctttctgttgttgtgtttgtttgtttataactggaagagaaaataacaaaaggacattgtgtaaatctcacccctactctcctgaaatatacaatacaattacttttaggaaatgcactttttttcccccactgatccaaacaagactacatataccttaatatttaagaaattgacactgatattaaactcaacattacatgtttgctcaaagatgagttaattataaaaaaaagaaccatatcctaagcatttcaaattgattatttttagagatattagaattatttggtttaaacctattaaaatgttattaccatagaccttt

SEQ ID NO: 29539 - DNA, 422 bp, Homo sapiens
catcacagaagccgacttaaaaattacattccccatacttcctcaaagctagtaaattaggttccgccagtaagatttccttgtgtgtgatctggaaggtggaagtgaagctgaatcttcctgctactatttctactggcaagcaataccagggaatcatgaagggcaaaaggacactccataggccaatccagtgccccatcactaactattaagatgttgagaaaagtttctgaggcctcagcagtggcttcctaatcacatcttccttatccctggattgtggctaaccagcctgaccaatatgatgaaaccccgtctccactaaaaatacaaaaattagtggggcatggtggcatgtgcctgtaatcacagttactcgggaggctgagacaggagaatctcttgaacctgggaggcag

SEQ ID NO: 29540 - DNA, 439 bp, Homo sapiens
ctgcacaaatcaataaagccttttctgtcagccccaggtaaattccaattccaagcaacttgggcaaggaaacaaacaagtgaaaaaaaaaatcacattggctttaagatgctaaatttaagacatgcagttggagctgacagctgacaggttatcaaccagaaatcattctctgatcacttattcaacaactccaaaagaattgcagccacatgaggcttgtaacgaagagggctgtatttccaaggaggataacagaagggcacatgtggaatgtggataatttccagaagatactgagagacagtgctggtttctgacttcttattctagggcaatgccttttgatgtcctgattcaatgccgttgtaagcctgaactaatctgatgtaataaaagcttaattgtctacttgcaattatcatttccctttaatctg

SEQ ID NO: 29541 - DNA, 543 bp, Homo sapiens
ttccatatatatacttttttctacttgtatacatctttcaatgtcaaatatatgcccatatatatatatggaatgtcattttaaagtctgtatgggtattgtattttatgaatgtatcaaattatcctcagtcacttattgctgattatttctggttttcggtattataaacaaaaccacattacaaatcactgagtactgtacaattgtctaatgttttcttgatttctagaagaaatgtgcacgttaaggcattttataagactgcctcactgacctccagaaaagctaggcaatttacacgcctatcatctgtatttaagtatccatttctctctgcactaggtatagtttgtcatgtttacatatttttaatctgactgaaatacttcaatttttacttactgttaatttgaaatcctgacatattcatttactatttgtatttgcttcatggattatatgttcatagttttcacccatttttctgcttaagtgtatcttattgattttttgaaaaatctttataaatttaaaatcgtc

SEQ ID NO: 29542 - DNA, 477 bp, Homo sapiens
agagctcaagcaatccagctacgtcagcctcccaaagtgctgggatgacatgcatgagccactgtgcacagccaatatggacattcttgttcttcagtatccatttgtaagaccatactttaattcacctttttttttttttgaaacagtctctctcttgtcacccaggctggagtgcaatggtgcaatctcagttcactgcaacctccatatcccgggtttaagcaattcttctgcctcagcctcccgagtagctgagattacaggtgtgccaccgtgcctgggtaatttttgtatttttagtagagacagtttcaccatgttggctaggctggtctcgaactcctaacctcaggtagtccacctgcctcggccttccaaagtgctgggattacaggcttgagccactgcgccaggccatattttttttaataactaataattgtttttacaattaattgtagttgtaaaaaatcg

SEQ ID NO: 29543 - DNA, 867 bp, Homo sapiens
tccacatctagagttgactctagaaggctgaggaatgcgaggcccagcttcaggtccaaaactaccaacttaggccctcgatttccctccttcacgacccagttccttcgagtctggaagactctgcaataccctttgtgaaggtgttaaaaagggtgactcactccccagagcgagtcacacctggactcttaatgccttcgttgttggatggcatcctgcttcctaccaggttatcctggcctcagtgacctcagaagcagcaagggtctgacttacagtgggcacgtgctacttctttaattaattgaaagtaaagttgttgtttttaagttggcattctggcttgaaaacagaaagatggcatgaaaatattaatgggagtacttcaactattttcattatgccaaaaatacttggagaagtagcacattttctgcaaagtctaaaatgtcaattttctttggggccaaaaatgcatcatttctgtgtggtaatacttatgtggataaaaaactctggtagacagttatgcatatatatattttttggtgaattacaatgagaaaaagtccaggtgcaatggctcacatctgtaactccagcactttaggaggcggatccaggaggatggctttagcccaggagttcaagaccagcatgggcaacatagtgagacacctctgcctcccccaccccaccccgcctctacaaaaaaatttaaaaattagctgggtgtggtggtgtgcacctgtagtcccagctacttgggaggttgacgcaggaggactgcttgagcctgggaggcagaggttgcagtgagccaagacagcaccattggactccagcctgggtaacagagaccct

SEQ ID NO: 29544 - DNA, 777 bp, Homo sapiens
acatggtgcaacatttgataatagtatcaatttacgtttgtctttcccttgcaatttccctcctcctctagcttgctcacgtttctgccttcttcttgctggcaagagtacagactataattctccagttcactaacatctggagcgactgcactgtttgcaatttcattgattgactacatgtgtacagttcctttattgcaagtcacttttctgtataatcttttttgagacgaagtcctgctctgtcgcccaggctgcagtagcgcaatcttggctcactgcaacttccgcctcccgggttcaagcgattctcctgcctcagcctcctgagtagctgggattataggcgcccgccaccatgcccagctaatttttttgtatttttagtagagatggggtttcactatgttggccaggcttgttttgaactcctgacctcaagagatctgccagccttggcctcccaaagtgctgggattacaggtgtgaactactgtgcctggccatataatctatttttaaaatgtttttatatgaaaataaacagagacagagtctcactgtgttgcccaggctgatctcgaactcttgggttcaagtgatcctcccaccctggcctcccaaagtgctggggttacaggcgtgaaccacctcatgtggcctcgctttcctatataatttaaacaatagaactatagtgccatttgtagagtttcccagtttatactgcatgtagcactccccatagtcgtatgttctcacagcagaacggaa

SEQ ID NO: 29545 - DNA, 310 bp, Homo sapiens
acatggtgcaacatttgataatagtatcaatttacgtttgtctttcccttgcaatttccctcctcctctagcttgctcacgtttctgccttcttcttgctggcaagagtacagactataattctccagttcactaacatctggagcgactgcactgtttgcaatttcattgattgactacatgtgtacagttcctttattgcaagtcacttttctgtataatcttttttgagacgaagtcctgctctgtcgcccaggctgcatgagccaagacagcaccattggactccagcctgggtaacagagaccct

SEQ ID NO: 29546 - DNA, 479 bp, Homo sapiens
tagccaatgttttcttgtttgtgtctctgtatcctacaacggtgtgaagaactaagatcaaattcatgaaatgaacatttactacactgtccgggattacattcgttatctcatttaatgctcataacaaacctttgaggttatcttttgttccaactttacacatgagaaaatgcaggctaaaagaggttatttaacattgcccatagctggtggatatcagagcctgaaatggaacccaaaattgtcagattctaaattccttgttattagcctcagtgttatatgggagtctacagcatcataaaagatgttggctcctatttatttgcctccctctctttccactcaaagggcttgaagctctcacttgtggctaagatcttgggtactgggataagctctctgaggaaaagtcatacctcatctcagtgctacatagattgcagtatgttcagacagagagttagtggaagagt

SEQ ID NO: 29547 - DNA, 2529 bp, Homo sapiens
agacactggccgcgggccaccatctggacgcgatcccccgctagggcctccctggtctgggccaaagttggtggccaccttcgcgcgggctgcgccctccttctcttccctgccctcctcccccggggcccgcgcccgctgcctccagcacgcgcgtcggcaggctcggcaagcgaagaggagcggctcgccccagggcgcccctcgcccagcctgccggccaggcgagcgcgacgagagtctccccgcaccccttcctctcccgggggccgagagggttgggctccgccccggcgccgcagctcccgactccccgccgctcgggctgccgccgctgccccgcgcccggcgctcggggcagccgggggcgcaggcggagagcgcagggcggggagaggcgtggggagcagagcggcgctgaggggagggcagaggaggagagagcctggcagcggaggagcagaggcgggcgccgcaccgccccgcacgctcgctcgctcgggagagtcgcgggcggccgcttgggcgcacttgccgggtcaccttgtcccggaggagaaatggcttccctgaggcaagtgtaacctacattcccagcccaccagcctgacgcccagccagggagagagtaccatggatggcatcattgaacagaagagcatgctggtgcacagtaaaatcagtgatgctggcaagaggaatggtttaattaacaccagaaacttgatggccgagagcagagatggtctggtgtctgtttacccagcgccccagtaccagagccaccgggtgggggccagcacagtgccggccagcctggacagcagcaggagtgagccgatgcagcagctgctggaccccaacaccctgcagcagtcagtggagtcccgctaccggcccaacatcatcctctattcagagggcgtgctgcgctcctggggggacggtgtggccgccgactgctgcgagaccaccttcatcgaggaccggtcgcccaccaaagacagcctcgagtacccggatgggaagttcattgacctctcagctgatgacataaaaatccacaccctgtcctacgatgtggaggaggaggaggagttccaggagctggagagcgactactcaagcgacacagagagtgaggacaatttcctcatgatgcccccgcgggaccacctgggcctcagtgtcttctccatgctctgctgcttctggcctctgggcatcgcagccttctacttgtcccatgagaccaacaaagccgtggccaagggggacttgcaccaggccagcaccagctcccggcgggccctattcctggcagtgctgtccatcaccattgggactggcgtctatgtgggcgtggccgtggccctcatcgcctacctctccaagaacaaccacctgtgagcttcctgcgaatggagggggagcacccggggccaggtctgtgtggacgtggaggaagcaggcataccgcatgatgctgtacagtacaaatgattgccaaatgatgccacgaagccctgggatttcctacccatggatttattttgtttttatcctttaatttcatgttcacagcactgtgtagagcaccagacagacgggcactgctaatccttccaaaggaaagctccaaagatcccagcccgcaaggctgtctctggatggattctggtggatgaatggcaacgcggctctctgcagcctgccagtgcccagagtgccaccgcattagcaatatacaaacagtccaaaaaagtgtttattttttatggaatacggtgcaataggcagaggacaagggacacatcactcttctgtctgtggccctgctggagtcctttgtgccccccggagtccacacgccttccctgcaagacgagaatggggctgggaagaaagaggcaacaccacggctggcaggagccccgctgcactgctctgcagacccattggcctgaccctgagaagcagagccagcaaagcccgggacctgcccctctttctttcccttcacaccaccccagcctcaggatgtcaagccacctccggaacgtgtctacactccacagctaccccgcagcaatacgcactcttgggacctcgctgatctaggatggggaggcaggccaccgcccctcccaagactcctcaagaaagagccccgcggttgctccggaaactcgaggcactgcagctatgggcactgcctcagcctaaagacacaggggcgcctcccaatcaccgcgctggcggatgctcaccccgtcataagcagaaactagtgatcctggaaatgagatgggccttactctgtcgactaaatgaatagctattttcttgtcattttttaaagtgcaactcttgcttcatgctgcttaagttaccagatgaatgctgagaaataagtaatcacagacattttaataccatttcattgctgttttacgagtgttcattacttaacaaaaaattatcttttagctttttcgcttaagacttttctttctgatgaatagctgt

SEQ ID NO: 29548 - DNA, 393 bp, Homo sapiens
gccttctctgcatcaacaatgcctttttctgaatcaggagccgtagatgagccctccactcactgcttgttccgacttgcttacaatgacttcctttttcttctccaactctgcagaccaacaaagccgtggccaagggggacttgcaccaggccagcaccagctcccggcgggccctattcctggcagtgctgtccatcaccattgggactggcgtctatgtgggcgtggccgtggccctcatcgcctacctctccaagaacaaccacctgtgagcttcctgcgaatggagggggagcacccggggccaggtctgtgtggacgtggaggaagcaggcataccgcatgatgctgtacagtacaaatgattgccaaatgatgccacgaagccct

SEQ ID NO: 29549 - DNA, 854 bp, Homo sapiens
ttccgcctcgagcgtgtggcgggattgcggaagccctccacagttcataaccgttggctggttatgaaccgttcataacgggcgttaataaccataccctgttagactaagcatggtccacccgcgaatcctctacagagatggccaagcgctggggtcgtggctgcgtcctctaggccaggccttggtgggcagctgttgacatgtccagaaccccaggaagtgctgaaggtacctgcagttcaggccccatggaagcccagacctccttcacccttcggggacactgaaattggccaaatgtttaggccatgaggatggctgctgagtaagcccataatccctacatcggacacaaccttgtgcaaaggaccttctcaccacagatcagccagaccatcttcctccttccaagtcatcaaagagttccaagctggtcacctgtcccttgatgttcccaggaaaccaggaaagaggacccctgcattttatcttcccatccagagtggcaggatctctgcctgggaaacaggcttcattcagcacagctgtggtagcatttaaacaaaaggcaaaaggttggggcaccaatgtacgcaaacgttgaaagctaaaaacatttcaaagaaacctcccaggtcttggtgtcctgtgcgatggttcaacgccggcggtggaacgcacttagaaccaaatgggacagggttgcactggaagcgcacgtgaataaacctttggcaaagcaaccaaggttttataaaaggtccacaggtggaaatacccaaaggaaattggcaacggcacgaacagggcaaaggggtgccttgtgattttgcaaccttaaaggaaaaaaa

SEQ ID NO: 29550 - DNA, 2525 bp, Homo sapiens
ttccgcctcgagcgtgtggcgggattgcggaagccctccacagttcataaccgttggctggttatgaaccgttcataacgggcgttaataaccataccctgttagactaagcatggtccacccgcgaatcctctacagagatggccaagcgctggggtcgtggctgcgtcctctaggccagccttgtgcaaaggaccttctcaccacagatcagccagaccatcttcctccttccaagtcatcaaagagttccaagctggtcacctgtcccttgatgttcccaggaaaccaggaaagaggacccctgcattttatcttcccatccagagtggcaggatctctgcctgggaaacaggcttcattcagcacagctgtggtagcattaacaaagcaaagtgggcacatgtagaagttgaagctaaaacattcaagaactccagtctgtttctgtggatgttaagggggtgaagataaaacaatggaggtgatgaggaggaataacttgaagacagtttaaagccacagtgatacaaagaatgaagagaaggaaggtgctggattttactaagaaaacagactgagttcaggagtctcaccagtagaactttatagtattgcgtttcgattacatgtgtgtgaattttaaaaactgattaccctccagtaaaaatgtggaaccaatttgcatttggattaaaacattaggtttggggacaaaagtggaccccatgctgcctgagatgaagagagagagcaggatggcagaggaatcaccagctcaagaaaccccaagacttggacagtcttccagcagaagaggccagggtctctcagtgtactactccaaacaggcctctcctagagatgtagtctgggaaggtccaaaacccaccagacaggcacatccagtggggaaaagacttcccattccagtgtggcctgcatccctcacctctgcttcccagtcttctgctgacctcagaggagcagggtggccattgctgatctgggttagggagatgccagaaacacacccaggtttgaaccacaggttagtggtacaaagtcacagtccttgtgccttcagaaaacccagaggccccaaatacgagtgggaagagagttgggaaaaactgaaccagactcttccaatggccattaaagagaaaattcagcaacgcttgcctttgtctttgaccctgagaagttaagggacacagattgtggcgccgtgatggaacatggagggaaggcatggtgtgcttcctgcagagatgcctctggagtccctgtggccacgggatctcactggccccctcttcaggcaccttgatggggctcagtggggccaggccgaagggtggaagtagaaaagcatcaacaggctgtccagatcaattggcaccatccaaggccctgctgcacccacacatggaggtcaccagctcagccccaggggttctttcacacacaagctccttccctaaggagtcctgtggggttccacactcagtgtgctgcccaagtcagagatttaccacagatctgtctccccctcaacctggactcaagttactgtggtgagaaacctcactgtccatggttaactgaagaaatccctccttcagaaagaacttgagtagtagatgaggtggttagacaggatctttttccctcaagctgtttggacgccacagccaggaccaactctgacagctgcgagagagagagcccctccaatgtggaacctcctacacagccccccttttgggtccctggatatgagcccccagcaggaccaccactctagggggaagtctccctcccatccctcagatccccacattgttcctcctgtaggagaaaagtcagccctgcccctggagcttctccaagatggcactggactcgccgttatcttgaggagccaggagctgaaatggctccggcttagcaacccagtatggccaaagtggaaaggttctctgtcctttgcagtcaccaaaaaaaaaaaaaaaaaaaaaaaaaaaaaaaaaaaaaaaaaaaaaaaaaaaggggggggggtaaaattttccccgggggggcccacacgttaaatgcacgctaccccatgcttttagtagtaagaaagggggccgccccattgaatgggggcgcggcgattataataaaagcaagggcaccgggcgcgcggcgtgtttaacaaacggctggcggagtggaaaaacactgcgatgccgtgggacatcttggtggagagggaacccatattatgctgtggggggggggggcacatatatgtggggcacaaaatcatcctatcagaagaaatatttatagcgccttgagggggaaaatatataaatttttcagaggtgtttaattagggtggtttacacaaacgcggtataattgacgtggagatggttgaagaaaaatttgtgggtactcagggggagtatgtagttttgatgaaaaaaatttttatattaccaggagggactttttataatataatagaggtg

SEQ ID NO: 29551 - DNA, 2702 bp, Homo sapiens
ttccgcctcgagcgtgtggcgggattgcggaagccctccacagttcataaccgttggctggttatgaaccgttcataacgggcgttaataaccataccctgttagactaagcatggtccacccgcgaatcctctacagagatggccaagcgctggggtcgtggctgcgtcctctaggccaggccttggtgggcagctgttgacatgtccagaaccccaggaagtgctgaaggtacctgcagttcaggccccatggaagcccagacctccttcacccttcggggacactgaaattggccaaatgtttaggccatgaggatggctgctgagtaagcccataatccctacatcggacacaaccttgtgcaaaggaccttctcaccacagatcagccagaccatcttcctccttccaagtcatcaaagagttccaagctggtcacctgtcccttgatgttcccaggaaaccaggaaagaggacccctgcattttatcttcccatccagagtggcaggatctctgcctgggaaacaggcttcattcagcacagctgtggtagcattaacaaagcaaagtgggcacatgtagaagttgaagctaaaacattcaagaactccagtctgtttctgtggatgttaagggggtgaagataaaacaatggaggtgatgaggaggaataacttgaagacagtttaaagccacagtgatacaaagaatgaagagaaggaaggtgctggattttactaagaaaacagactgagttcaggagtctcaccagtagaactttatagtattgcgtttcgattacatgtgtgtgaattttaaaaactgattaccctccagtaaaaatgtggaaccaatttgcatttggattaaaacattaggtttggggacaaaagtggaccccatgctgcctgagatgaagagagagagcaggatggcagaggaatcaccagctcaagaaaccccaagacttggacagtcttccagcagaagaggccagggtctctcagtgtactactccaaacaggcctctcctagagatgtagtctgggaaggtccaaaacccaccagacaggcacatccagtggggaaaagacttcccattccagtgtggcctgcatccctcacctctgcttcccagtcttctgctgacctcagaggagcagggtggccattgctgatctgggttagggagatgccagaaacacacccaggtttgaaccacaggttagtggtacaaagtcacagtccttgtgccttcagaaaacccagaggccccaaatacgagtgggaagagagttgggaaaaactgaaccagactcttccaatggccattaaagagaaaattcagcaacgcttgcctttgtctttgaccctgagaagttaagggacacagattgtggcgccgtgatggaacatggagggaaggcatggtgtgcttcctgcagagatgcctctggagtccctgtggccacgggatctcactggccccctcttcaggcaccttgatggggctcagtggggccaggccgaagggtggaagtagaaaagcatcaacaggctgtccagatcaattggcaccatccaaggccctgctgcacccacacatggaggtcaccagctcagccccaggggttctttcacacacaagctccttccctaaggagtcctgtggggttccacactcagtgtgctgcccaagtcagagatttaccacagatctgtctccccctcaacctggactcaagttactgtggtgagaaacctcactgtccatggttaactgaagaaatccctccttcagaaagaacttgagtagtagatgaggtggttagacaggatctttttccctcaagctgtttggacgccacagccaggaccaactctgacagctgcgagagagagagcccctccaatgtggaacctcctacacagccccccttttgggtccctggatatgagcccccagcaggaccaccactctagggggaagtctccctcccatccctcagatccccacattgttcctcctgtaggagaaaagtcagccctgcccctggagcttctccaagatggcactggactcgccgttatcttgaggagccaggagctgaaatggctccggcttagcaacccagtatggccaaagtggaaaggttctctgtcctttgcagtcaccaaaaaaaaaaaaaaaaaaaaaaaaaaaaaaaaaaaaaaaaaaaaaaaaaaaggggggggggtaaaattttccccgggggggcccacacgttaaatgcacgctaccccatgcttttagtagtaagaaagggggccgccccattgaatgggggcgcggcgattataataaaagcaagggcaccgggcgcgcggcgtgtttaacaaacggctggcggagtggaaaaacactgcgatgccgtgggacatcttggtggagagggaacccatattatgctgtggggggggggggcacatatatgtggggcacaaaatcatcctatcagaagaaatatttatagcgccttgagggggaaaatatataaatttttcagaggtgtttaattagggtggtttacacaaacgcggtataattgacgtggagatggttgaagaaaaatttgtgggtactcagggggagtatgtagttttgatgaaaaaaatttttatattaccaggagggactttttataatataatagaggtg

SEQ ID NO: 29552 - DNA, 364 bp, Homo sapiens
tgacagagcgagactctgtctcaacaacaacaacaacaataaataaataaataaattttagaatgaaataatttcttatactatttctcttaccagcttaaagtgccagagcctaaaaatagacaaagttaaatgacatttaaaatgatcaataaatactaaaaaaaaataaaaataaaaaaaaaatgaaaaacggtgcccaccacaaactatagacacaaagagtgttcagttatcaccagtgtagacagggcaatttaaagagcacatttcatagtgttcctacccaagattcagtttgcttacagcaggtgagaacacaagtaggataaacccctcagaatgccatcatctcagtaggttc

SEQ ID NO: 29553 - DNA, 642 bp, Homo sapiens
tgtgttagcttagtggttatggtattactgcagggacatggatcacttagggagagagcgtttcaggcttgggtcagtcttaaagcagatctcatgtggagggtttctgctaacctgcatctcttacaacacagtactagtcagtatgctgtagtattaatcagtaggtcaagttcagtgaagtaaaggagaattgaattcttgaagttcacatttaggcaaaaatttggcgttttaggaggtgagtataagacatgatctttatagaaaacgctgatgataaaaacagcgctctctgttaggtgcttttatgcttgactccattgtcatcttttcttaagaaactaagctcaggactgggtgcaatggctcatgtctgtaatcccagcactttgggaggctgaggctataggatcagttgagctcaggagttcaagatcagcctgggcaacatagctagacctcgtctctactaaaaaacaaacaaacaaaaaacaaaaaaaaacccccaaaaaaaccaacaaaccagcttggcatggtggtgcgtgcctgtggtcccagctgctcaagaagctgaagcgggaggatagcttgagcccaggagatcaaggctgcacttagctatgatcgcaccatcgcact

SEQ ID NO: 29554 - DNA, 389 bp, Homo sapiens
gtctcactatgttgtccaggcgggtctcaaacacccagcctggagcaatcctcctgccttagcttcctgaagtgaggggattacaggcttgagctactgtgctggacccaatttcaaacacttaaaaaaatcaagtactaccatgtcaaaagaaaacaatttaacaataaaacaaaacaatgtgaggaactacagaaaacaaagctgagtaaacaggccaaggtccttaccttcatgaattttttttttttaaatgtggtaaaatatacgtaaaatttaccatcttaaccctttttgggtatacaattcagtggcattaagtacattcacattattgtgtaaccatcatcactatccatctccagaactttcccatcatcacaaactct

SEQ ID NO: 29555 - DNA, 3193 bp, Homo sapiens
cgcggatcggctgagggagccgcaatgtctcttgacagcggcggcggcgcagccggttccgggttcggcgcggggcggggatgtgaatcccgatggagcggcccgaggaaggcaagcagtcgccgccgccgcagccctggggacggctcctgcgtctgggcgcggaggagggcgagccgcacgtcctcctgaggaagcgggagtggaccatcgggcggagacgaggttgcgacctttccttccccagcaataaactggtctctggagatcactgtagaattgtagtggatgaaaaatcaggtcaggtgacactggaagataccagcaccagtggaacagtgattaacaagctgaaggttgttaagaagcagacatgccctttacagactggggatgtcatctacttggtgtacaggaagaatgaaccggaacacaacgtggcatacctctatgaatctttaagtgaaaagcaaggcatgacacaagaatcctttgagatggtgccttgctgtgttgcccaggctggtctaaaactcctgggatcaagtgatcctcccaccttggcctcccaaagtattgtgattacagggtctgggggtggtggcatctcccctaaaggaagtggtccctctgtggcaagtgatgaagtctccagctttgcctcagctctcccagacagaaagactgcgtccttttcgtcgttggaaccccaggatcaggaggatttggagcccgtgaagaagaaaatgagaggagatggggaccttgacctgaacgggcagttgttggtcgcacaaccgcgtagaaatgcccaaaccgtccacgaggacgtcagagcagcggctgggaagccagacaagatggaggagacgctgacatgcatcatctgccaggacctgctgcacgactgcgtgagtttgcagccctgcatgcacacgttctgcgcggcttgctactcgggctggatggagcgctcgtccctgtgtcctacctgccgctgtcccgtggagcggatctgtaaaaaccacatcctcaacaacctcgtggaagcatacctcatccagcatccagacaagagtcgcagtgaagaagatgtgcaaagtatggatgccaggaataaaatcactcaagacatgctgcagcccaaagtcaggcggtctttttctgatgaagaagggagttcagaggacctgctggagctgtcagacgttgacagtgagtcctcagacattagccagccatacgtcgtgtgccggcagtgtcctgagtacagaaggcaggcggcgcagcctccccactgcccagcacccgagggcgagccaggagccccacaggccctgggggatgcaccctccacgtccgtcagcctgacgacagcagtccaggattacgtgtgccctctgcaaggaagccacgccctgtgcacctgctgcttccagcccatgcccgaccggagagcggagcgcgagcaggacccgcgtgtcgcccctcagcagtgtgcggtctgcctgcagcctttctgccacctgtactggggctgcacccggaccggctgctacggctgcctggccccgttttgtgagctcaacctgggtgacaagtgtctggacggcgtgctgaacaacaacagctacgagtcagacatcctgaagaattacctggcaaccagaggtttgacatggaaaaacatgttgaccgagagcctcgtggctctccagcggggagtgtttctgctgtctgattacagagtcacgggagacaccgttctgtgttactgctgtggcctgcgcagcttccgtgagctgacctatcagtatcggcagaacattcctgcttccgagttgccagtggccgtaacatcccgtcctgactgctactggggccgtaactgccgcactcaggtgaaagctcaccacgccatgaaattcaatcatatctgtgaacagacaaggttcaaaaactaagcatccagaggccctgagcagctttcagcactggaggtgaagagagcgtgtttttaaaatacagagacaagcacgtcaaggtgttttcacagccccctgagggaagggacgcagggtctccgacaggtgctctggggtgactcttctgtggagctttttaccctctgagtgagaccctccccagagccccgggggccgcagcccgccctcctggtgagcgctgggcagggctcgtggtggcatcagcagcagagacgaagcctttctgtaacatgcggccgtcccgccgagaggggcagttttgctcttttgtacattttccgaaactacagttaaagcagaagtctgttttcaggaaaagtttcaagggagaagggcaagtttatcaaaaacattgtttcaggagaagggagcataagtttacagcctacaggacgtacacaatatcctgctgctgggaaaaccacagcattttatctattttttattttaataggtttggtgcttatcttctaataagatttaaatgtcacaaactgtagcacaaataatataatttataatttacaaattgactaaaattgggtatagtatggtatttgaaagaataagcatatgcttctgtttattaaaaaaagaaaccttccaatgtccaaaactgctaaccctcgacgtggccgccaagttagtcgctccttgctaaccggtgagtgaccgcggccccgagcctggggctggacgcaggtcccaggacatgctgctcccttgtgtgagtgaccacggccccgagcctggggctggacgcaggtcccaggacgtgctgctcccttgtgtgagtgaccacggccccaagcccagggctggaggcaggtcccaggacgcgccgctccctcatgctgcccgggcccttcctccaagaccctacagagcctgaggggcaccttggcttccgcctgtgctagctttgccatgtcatctggaataatacttgaaattttgatttttggaaaaaaaagttttttatcttttgttgaaatcacctgttatccttgtttgtaaactgataacttttttgcttcttctcaggaatacagttttcaactgttgtcttgctcttgatagaaactgagaagcagcaatctgtatttgtggaggaaagtcctctcttttgcatattctaataaatgagccgcgtttgctcctccgctctcgtgttgggctcgtgtctg

SEQ ID NO: 29556 - DNA, 439 bp, Homo sapiens
accactgcccggacccagccctggcccaatggggctcgcacctccaaagcccacgtccacacgttccgagcccgccgtcccatcgcaaacatccgggggccgccactgcgcctaacgaccgcccatctctgacgcctcgggtcggcgtttgatttttaacccaagaaaagagtaaaagtcaagcggaaatcaacgcagaagcggtgctgcagcctctgagcttcctgacggccgtgtccagagccgggctcctcctcccgcggcagccgccgggctcacttcagtgcgctcagcttctcgcggggacaagcgtctgggcggggacggcccgaggcgggggtgtggcgaggctggagaacgctgaaagctggtgggcttgggaagacaaacgacgctctgaaatttggctcccaggtaatacgttccggcacttcgcggc

SEQ ID NO: 29557 - DNA, 3280 bp, Homo sapiens
cgcggatcggctgagggagccgcaatgtctcttgacagcggcggcggcgcagccggttccgggttcggcgcggggcggggatgtgaatcccgatggagcggcccgaggaaggcaagcagtcgccgccgccgcagccctggggacggctcctgcgtctgggcgcggaggagggcgagccgcacgtcctcctgaggaagcgggagtggaccatcgggcggagacgaggttgcgacctttccttccccagcaataaactggtctctggagatcactgtagaattgtagtggatgaaaaatcaggtcaggtgacactggaagataccagcaccagtggaacagtgattaacaagctgaaggttgttaagaagcagacatgccctttacagactggggatgtcatctacttggtgtacaggaagaatgaaccggaacacaacgtggcatacctctatgaatctttaagtgaaaagcaaggcatgacacaagaatcctttgatacctcaggtgcaggtgcagggcgaggggccgatccccgggtccctccgtcgtcgcccgccactcaggtgtgctttgaggaaccacagccatcaacatcgacgtcagacctcttccccacagcctcggcctcttccacggagccttctcctgcagggcgagagcgttcctccagttgtgggtctgggggtggtggcatctcccctaaaggaagtggtccctctgtggcaagtgatgaagtctccagctttgcctcagctctcccagacagaaagactgcgtccttttcgtcgttggaaccccaggatcaggaggatttggagcccgtgaagaagaaaatgagaggagatggggaccttgacctgaacgggcagttgttggtcgcacaaccgcgtagaaatgcccaaaccgtccacgaggacgtcagagcagcggctgggaagccagacaagatggaggagacgctgacatgcatcatctgccaggacctgctgcacgactgcgtgagtttgcagccctgcatgcacacgttctgcgcggcttgctactcgggctggatggagcgctcgtccctgtgtcctacctgccgctgtcccgtggagcggatctgtaaaaaccacatcctcaacaacctcgtggaagcatacctcatccagcatccagacaagagtcgcagtgaagaagatgtgcaaagtatggatgccaggaataaaatcactcaagacatgctgcagcccaaagtcaggcggtctttttctgatgaagaagggagttcagaggacctgctggagctgtcagacgttgacagtgagtcctcagacattagccagccatacgtcgtgtgccggcagtgtcctgagtacagaaggcaggcggcgcagcctccccactgcccagcacccgagggcgagccaggagccccacaggccctgggggatgcaccctccacgtccgtcagcctgacgacagcagtccaggattacgtgtgccctctgcaaggaagccacgccctgtgcacctgctgcttccagcccatgcccgaccggagagcggagcgcgagcaggacccgcgtgtcgcccctcagcagtgtgcggtctgcctgcagcctttctgccacctgtactggggctgcacccggaccggctgctacggctgcctggccccgttttgtgagctcaacctgggtgacaagtgtctggacggcgtgctgaacaacaacagctacgagtcagacatcctgaagaattacctggcaaccagaggtttgacatggaaaaacatgttgaccgagagcctcgtggctctccagcggggagtgtttctgctgtctgattacagagtcacgggagacaccgttctgtgttactgctgtggcctgcgcagcttccgtgagctgacctatcagtatcggcagaacattcctgcttccgagttgccagtggccgtaacatcccgtcctgactgctactggggccgtaactgccgcactcaggtgaaagctcaccacgccatgaaattcaatcatatctgtgaacagacaaggttcaaaaactaagcatccagaggccctgagcagctttcagcactggaggtgaagagagcgtgtttttaaaatacagagacaagcacgtcaaggtgttttcacagccccctgagggaagggacgcagggtctccgacaggtgctctggggtgactcttctgtggagctttttaccctctgagtgagaccctccccagagccccgggggccgcagcccgccctcctggtgagcgctgggcagggctcgtggtggcatcagcagcagagacgaagcctttctgtaacatgcggccgtcccgccgagaggggcagttttgctcttttgtacattttccgaaactacagttaaagcagaagtctgttttcaggaaaagtttcaagggagaagggcaagtttatcaaaaacattgtttcaggagaagggagcataagtttacagcctacaggacgtacacaatatcctgctgctgggaaaaccacagcattttatctattttttattttaataggtttggtgcttatcttctaataagatttaaatgtcacaaactgtagcacaaataatataatttataatttacaaattgactaaaattgggtatagtatggtatttgaaagaataagcatatgcttctgtttattaaaaaaagaaaccttccaatgtccaaaactgctaaccctcgacgtggccgccaagttagtcgctccttgctaaccggtgagtgaccgcggccccgagcctggggctggacgcaggtcccaggacatgctgctcccttgtgtgagtgaccacggccccgagcctggggctggacgcaggtcccaggacgtgctgctcccttgtgtgagtgaccacggccccaagcccagggctggaggcaggtcccaggacgcgccgctccctcatgctgcccgggcccttcctccaagaccctacagagcctgaggggcaccttggcttccgcctgtgctagctttgccatgtcatctggaataatacttgaaattttgatttttggaaaaaaaagttttttatcttttgttgaaatcacctgttatccttgtttgtaaactgataacttttttgcttcttctcaggaatacagttttcaactgttgtcttgctcttgatagaaactgagaagcagcaatctgtatttgtggaggaaagtcctctcttttgcatattctaataaatgagccgcgtttgctcctccgctctcgtgttgggctcgtgtctg

SEQ ID NO: 29558 - DNA, 3384 bp, Homo sapiens
ctgcggcgggcggcgaagggggacctggttgcggccgtgggagggggcgcccgccggcgtccaggccgggctgcggggctgcgtgggcgcgggcggccgggccggggcccgcggggtggggcgggcgccgagtctcggcctctggggtcgggagtctccatgggcgtttccggggtctccgcagatgtgaatcccgatggagcggcccgaggaaggcaagcagtcgccgccgccgcagccctggggacggctcctgcgtctgggcgcggaggagggcgagccgcacgtcctcctgaggaagcgggagtggaccatcgggcggagacgaggttgcgacctttccttccccagcaataaactggtctctggagatcactgtagaattgtagtggatgaaaaatcaggtcaggtgacactggaagataccagcaccagtggaacagtgattaacaagctgaaggttgttaagaagcagacatgccctttacagactggggatgtcatctacttggtgtacaggaagaatgaaccggaacacaacgtggcatacctctatgaatctttaagtgaaaagcaaggcatgacacaagaatcctttgatacctcaggtgcaggtgcagggcgaggggccgatccccgggtccctccgtcgtcgcccgccactcaggtgtgctttgaggaaccacagccatcaacatcgacgtcagacctcttccccacagcctcggcctcttccacggagccttctcctgcagggcgagagcgttcctccagttgtgggtctgggggtggtggcatctcccctaaaggaagtggtccctctgtggcaagtgatgaagtctccagctttgcctcagctctcccagacagaaagactgcgtccttttcgtcgttggaaccccaggatcaggaggatttggagcccgtgaagaagaaaatgagaggagatggggaccttgacctgaacgggcagttgttggtcgcacaaccgcgtagaaatgcccaaaccgtccacgaggacgtcagagcagcggctgggaagccagacaagatggaggagacgctgacatgcatcatctgccaggacctgctgcacgactgcgtgagtttgcagccctgcatgcacacgttctgcgcggcttgctactcgggctggatggagcgctcgtccctgtgtcctacctgccgctgtcccgtggagcggatctgtaaaaaccacatcctcaacaacctcgtggaagcatacctcatccagcatccagacaagagtcgcagtgaagaagatgtgcaaagtatggatgccaggaataaaatcactcaagacatgctgcagcccaaagtcaggcggtctttttctgatgaagaagggagttcagaggacctgctggagctgtcagacgttgacagtgagtcctcagacattagccagccatacgtcgtgtgccggcagtgtcctgagtacagaaggcaggcggcgcagcctccccactgcccagcacccgagggcgagccaggagccccacaggccctgggggatgcaccctccacgtccgtcagcctgacgacagcagtccaggattacgtgtgccctctgcaaggaagccacgccctgtgcacctgctgcttccagcccatgcccgaccggagagcggagcgcgagcaggacccgcgtgtcgcccctcagcagtgtgcggtctgcctgcagcctttctgccacctgtactggggctgcacccggaccggctgctacggctgcctggccccgttttgtgagctcaacctgggtgacaagtgtctggacggcgtgctgaacaacaacagctacgagtcagacatcctgaagaattacctggcaaccagaggtttgacatggaaaaacatgttgaccgagagcctcgtggctctccagcggggagtgtttctgctgtctgattacagagtcacgggagacaccgttctgtgttactgctgtggcctgcgcagcttccgtgagctgacctatcagtatcggcagaacattcctgcttccgagttgccagtggccgtaacatcccgtcctgactgctactggggccgtaactgccgcactcaggtgaaagctcaccacgccatgaaattcaatcatatctgtgaacagacaaggttcaaaaactaagcatccagaggccctgagcagctttcagcactggaggtgaagagagcgtgtttttaaaatacagagacaagcacgtcaaggtgttttcacagccccctgagggaagggacgcagggtctccgacaggtgctctggggtgactcttctgtggagctttttaccctctgagtgagaccctccccagagccccgggggccgcagcccgccctcctggtgagcgctgggcagggctcgtggtggcatcagcagcagagacgaagcctttctgtaacatgcggccgtcccgccgagaggggcagttttgctcttttgtacattttccgaaactacagttaaagcagaagtctgttttcaggaaaagtttcaagggagaagggcaagtttatcaaaaacattgtttcaggagaagggagcataagtttacagcctacaggacgtacacaatatcctgctgctgggaaaaccacagcattttatctattttttattttaataggtttggtgcttatcttctaataagatttaaatgtcacaaactgtagcacaaataatataatttataatttacaaattgactaaaattgggtatagtatggtatttgaaagaataagcatatgcttctgtttattaaaaaaagaaaccttccaatgtccaaaactgctaaccctcgacgtggccgccaagttagtcgctccttgctaaccggtgagtgaccgcggccccgagcctggggctggacgcaggtcccaggacatgctgctcccttgtgtgagtgaccacggccccgagcctggggctggacgcaggtcccaggacgtgctgctcccttgtgtgagtgaccacggccccaagcccagggctggaggcaggtcccaggacgcgccgctccctcatgctgcccgggcccttcctccaagaccctacagagcctgaggggcaccttggcttccgcctgtgctagctttgccatgtcatctggaataatacttgaaattttgatttttggaaaaaaaagttttttatcttttgttgaaatcacctgttatccttgtttgtaaactgataacttttttgcttcttctcaggaatacagttttcaactgttgtcttgctcttgatagaaactgagaagcagcaatctgtatttgtggaggaaagtcctctcttttgcatattctaataaatgagccgcgtttgctcctccgctctcgtgttgggctcgtgtctg

SEQ ID NO: 29559 - DNA, 3316 bp, Homo sapiens
cgcggatcggctgagggagccgcaatgtctcttgacagcggcggcggcgcagccggttccgggttcggcgcggggcggggatgtgaatcccgatggagcggcccgaggaaggcaagcagtcgccgccgccgcagccctggggacggctcctgcgtctgggcgcggaggagggcgagccgcacgtcctcctgaggaagcgggagtggaccatcgggcggagacgaggttgcgacctttccttccccagcaataaactggtctctggagatcactgtagaattgtagtggatgaaaaatcaggtcaggtgacactggaagataccagcaccagtggaacagtgattaacaagctgaaggttgttaagaagcagacatgccctttacagactggggatgtcatctacttggtgtacaggaagaatgaaccggaacacaacgtggcatacctctatgaatctttaagtgaaaagcaaggcatgacacaagaatcctttgaagctaacaaggaaaatgtgttccatgggaccaaagatacctcaggtgcaggtgcagggcgaggggccgatccccgggtccctccgtcgtcgcccgccactcaggtgtgctttgaggaaccacagccatcaacatcgacgtcagacctcttccccacagcctcggcctcttccacggagccttctcctgcagggcgagagcgttcctccagttgtgggtctgggggtggtggcatctcccctaaaggaagtggtccctctgtggcaagtgatgaagtctccagctttgcctcagctctcccagacagaaagactgcgtccttttcgtcgttggaaccccaggatcaggaggatttggagcccgtgaagaagaaaatgagaggagatggggaccttgacctgaacgggcagttgttggtcgcacaaccgcgtagaaatgcccaaaccgtccacgaggacgtcagagcagcggctgggaagccagacaagatggaggagacgctgacatgcatcatctgccaggacctgctgcacgactgcgtgagtttgcagccctgcatgcacacgttctgcgcggcttgctactcgggctggatggagcgctcgtccctgtgtcctacctgccgctgtcccgtggagcggatctgtaaaaaccacatcctcaacaacctcgtggaagcatacctcatccagcatccagacaagagtcgcagtgaagaagatgtgcaaagtatggatgccaggaataaaatcactcaagacatgctgcagcccaaagtcaggcggtctttttctgatgaagaagggagttcagaggacctgctggagctgtcagacgttgacagtgagtcctcagacattagccagccatacgtcgtgtgccggcagtgtcctgagtacagaaggcaggcggcgcagcctccccactgcccagcacccgagggcgagccaggagccccacaggccctgggggatgcaccctccacgtccgtcagcctgacgacagcagtccaggattacgtgtgccctctgcaaggaagccacgccctgtgcacctgctgcttccagcccatgcccgaccggagagcggagcgcgagcaggacccgcgtgtcgcccctcagcagtgtgcggtctgcctgcagcctttctgccacctgtactggggctgcacccggaccggctgctacggctgcctggccccgttttgtgagctcaacctgggtgacaagtgtctggacggcgtgctgaacaacaacagctacgagtcagacatcctgaagaattacctggcaaccagaggtttgacatggaaaaacatgttgaccgagagcctcgtggctctccagcggggagtgtttctgctgtctgattacagagtcacgggagacaccgttctgtgttactgctgtggcctgcgcagcttccgtgagctgacctatcagtatcggcagaacattcctgcttccgagttgccagtggccgtaacatcccgtcctgactgctactggggccgtaactgccgcactcaggtgaaagctcaccacgccatgaaattcaatcatatctgtgaacagacaaggttcaaaaactaagcatccagaggccctgagcagctttcagcactggaggtgaagagagcgtgtttttaaaatacagagacaagcacgtcaaggtgttttcacagccccctgagggaagggacgcagggtctccgacaggtgctctggggtgactcttctgtggagctttttaccctctgagtgagaccctccccagagccccgggggccgcagcccgccctcctggtgagcgctgggcagggctcgtggtggcatcagcagcagagacgaagcctttctgtaacatgcggccgtcccgccgagaggggcagttttgctcttttgtacattttccgaaactacagttaaagcagaagtctgttttcaggaaaagtttcaagggagaagggcaagtttatcaaaaacattgtttcaggagaagggagcataagtttacagcctacaggacgtacacaatatcctgctgctgggaaaaccacagcattttatctattttttattttaataggtttggtgcttatcttctaataagatttaaatgtcacaaactgtagcacaaataatataatttataatttacaaattgactaaaattgggtatagtatggtatttgaaagaataagcatatgcttctgtttattaaaaaaagaaaccttccaatgtccaaaactgctaaccctcgacgtggccgccaagttagtcgctccttgctaaccggtgagtgaccgcggccccgagcctggggctggacgcaggtcccaggacatgctgctcccttgtgtgagtgaccacggccccgagcctggggctggacgcaggtcccaggacgtgctgctcccttgtgtgagtgaccacggccccaagcccagggctggaggcaggtcccaggacgcgccgctccctcatgctgcccgggcccttcctccaagaccctacagagcctgaggggcaccttggcttccgcctgtgctagctttgccatgtcatctggaataatacttgaaattttgatttttggaaaaaaaagttttttatcttttgttgaaatcacctgttatccttgtttgtaaactgataacttttttgcttcttctcaggaatacagttttcaactgttgtcttgctcttgatagaaactgagaagcagcaatctgtatttgtggaggaaagtcctctcttttgcatattctaataaatgagccgcgtttgctcctccgctctcgtgttgggctcgtgtctg

SEQ ID NO: 29560 - DNA, 3406 bp, Homo sapiens
cgcggatcggctgagggagccgcaatgtctcttgacagcggcggcggcgcagccggttccgggttcggcgcggggcggggatgtgaatcccgatggagcggcccgaggaaggcaagcagtcgccgccgccgcagccctggggacggctcctgcgtctgggcgcggaggagggcgagccgcacgtcctcctgaggaagcgggagtggaccatcgggcggagacgaggttgcgacctttccttccccagcaataaactggtctctggagatcactgtagaattgtagtggatgaaaaatcaggtcaggtgacactggaagataccagcaccagtggaacagtgattaacaagctgaaggttgttaagaagcagacatgccctttacagactggggatgtcatctacttggtgtacaggaagaatgaaccggaacacaacgtggcatacctctatgaatctttaagtgaaaagcaaggcatgacacaagaatcctttgatacctcaggtgcaggtgcagggcgaggggccgatccccgggtccctccgtcgtcgcccgccactcaggtgtgctttgaggaaccacagccatcaacatcgacgtcagacctcttccccacagcctcggcctcttccacggagccttctcctgcagggcgagagcgttcctccagttgtgggtctgggggtggtggcatctcccctaaaggaagtggtccctctgtggcaagtgatgaagtctccagctttgcctcagctctcccagacagaaagactgcgtccttttcgtcgttggaaccccaggatcaggaggatttggagcccgtgaagaagaaaatgagaggagatggggaccttgacctgaacgggcagttgttggtcgcacaaccgcgtagaaatgcccaaaccgtccacgaggacgtcagagcagcggctgggaagccagacaagatggaggagacgctgacatgcatcatctgccaggacctgctgcacgactgcgtgagtttgcagccctgcatgcacacgttctgcgcggcttgctactcgggctggatggagcgctcgtccctgtgtcctacctgccgctgtcccgtggagcggatctgtaaaaaccacatcctcaacaacctcgtggaagcatacctcatccagcatccagacaagagtcgcagtgaagaagatgtgcaaagtatggatgccaggaataaaatcactcaagacatgctgcagcccaaagtcaggcggtctttttctgatgaagaagggagttcagaggacctgctggagctgtcagacgttgacagtgagtcctcagacattagccagccatacgtcgtgtgccggcagtgtcctgagtacagaaggcaggcggcgcagcctccccactgcccagcacccgagggcgagccaggagccccacaggccctgggggatgcaccctccacgtccgtcagcctgacgacagcagtccaggattacgtgtgccctctgcaaggaagccacgccctgtgcacctgctgcttccagcccatgcccgaccggagagcggagcgcgagcaggacccgcgtgtcgcccctcagcagtgtgcggtctgcctgcagcctttctgccacctgtactggggctgcacccggaccggctgctacggctgcctggccccgttttgtgagctcaacctgggtgacaagtgtctggacggcgtgctgaacaacaacagctacgagtcagacatcctgaagaattacctggcaaccagaggtttgacatggaaaaacatgttgaccgagagcctcgtggctctccagcggggagtgtttctgctgtctgattacagagtcacgggagacaccgttctgtgttactgctgtggcctgcgcagcttccgtgagctgacctatcagtatcggcagaacattcctgcttccgagttgccagtggccgtaacatcccgtcctgactgctactggggccgtaactgccgcactcaggtgaaagctcaccacgccatgaaattcaatcatatctgtgaacagacaaggttcaaaaactaagcatccagaggccctgagcagctttcagcactggaggtgaagagagcgtgtttttaaaatacagagacaagcacgtcaaggtgttttcacagccccctgagggaagggacgcagggtctccgacaggtgctctggggtgactcttctgtggagctttttaccctctgagtgagaccctccccagagccccgggggccgcagcccgccctcctggtgagcgctgggcagggctcgtggtggcatcagcagcagagacgaagcctttctgtaacatgcggccgtcccgccgagaggggcagttttgctcttttgtacattttccgaaactacagttaaagcagaagtctgttttcaggaaaagtttcaagggagaagggcaagtttatcaaaaacattgtttcaggagaagggagcataagtttacagcctacaggacgtacacaatatcctgctgctgggaaaaccacagcattttatctattttttattttaataggtttggtgcttatcttctaataagatttaaatgtcacaaactgtagcacaaataatataatttataatttacaaattgactaaaattgggtatagtatggtatttgaaagaataagcatatgcttctgtttattaaaaaaagaaaccttccaatgtccaaaactgctaaccctcgacgtggccgccaagttagtcgctccttgctaaccggtgagtgaccgcggccccgagcctggggctggacgcaggtcccaggacatgctgctcccttgtgtgagtgaccacggccccgagcctggggctggacgcaggtcccaggacgtgctgctcccttctgtgagtgaccacggccccgagcctggggctggacgcaggtcccaggacatgctgctcccttgtgtgagtgaccacggccccgagcctggggctggacgcaggtcccaggacgtgctgctcccttgtgtgagtgaccacggccccaagcccagggctggaggcaggtcccaggacgcgccgctccctcatgctgcccgggcccttcctccaagaccctacagagcctgaggggcaccttggcttccgcctgtgctagctttgccatgtcatctggaataatacttgaaattttgatttttggaaaaaaaagttttttatcttttgttgaaatcacctgttatccttgtttgtaaactgataacttttttgcttcttctcaggaatacagttttcaactgttgtcttgctcttgatagaaactgagaagcagcaatctgtatttgtggaggaaagtcctctcttttgcatattctaataaatgagccgcgtttgctcctccgctctcgtgttgggctcgtgtctg

SEQ ID NO: 29561 - DNA, 3100 bp, Homo sapiens
cgcggatcggctgagggagccgcaatgtctcttgacagcggcggcggcgcagccggttccgggttcggcgcggggcggggatgtgaatcccgatggagcggcccgaggaaggcaagcagtcgccgccgccgcagccctggggacggctcctgcgtctgggcgcggaggagggcgagccgcacgtcctcctgaggaagcgggagtggaccatcgggcggagacgaggttgcgacctttccttccccagcaataaactggtctctggagatcactgtagaattgtagtggatgaaaaatcaggtcaggtgacactggaagataccagcaccagtggaacagtgattaacaagctgaaggttgttaagaagcagacatgccctttacagactggggatgtcatctacttggtgtacaggaagaatgaaccggaacacaacgtggcatacctctatgaatctttaagtgaaaagcaaggcatgacacaagaatcctttgggtctgggggtggtggcatctcccctaaaggaagtggtccctctgtggcaagtgatgaagtctccagctttgcctcagctctcccagacagaaagactgcgtccttttcgtcgttggaaccccaggatcaggaggatttggagcccgtgaagaagaaaatgagaggagatggggaccttgacctgaacgggcagttgttggtcgcacaaccgcgtagaaatgcccaaaccgtccacgaggacgtcagagcagcggctgggaagccagacaagatggaggagacgctgacatgcatcatctgccaggacctgctgcacgactgcgtgagtttgcagccctgcatgcacacgttctgcgcggcttgctactcgggctggatggagcgctcgtccctgtgtcctacctgccgctgtcccgtggagcggatctgtaaaaaccacatcctcaacaacctcgtggaagcatacctcatccagcatccagacaagagtcgcagtgaagaagatgtgcaaagtatggatgccaggaataaaatcactcaagacatgctgcagcccaaagtcaggcggtctttttctgatgaagaagggagttcagaggacctgctggagctgtcagacgttgacagtgagtcctcagacattagccagccatacgtcgtgtgccggcagtgtcctgagtacagaaggcaggcggcgcagcctccccactgcccagcacccgagggcgagccaggagccccacaggccctgggggatgcaccctccacgtccgtcagcctgacgacagcagtccaggattacgtgtgccctctgcaaggaagccacgccctgtgcacctgctgcttccagcccatgcccgaccggagagcggagcgcgagcaggacccgcgtgtcgcccctcagcagtgtgcggtctgcctgcagcctttctgccacctgtactggggctgcacccggaccggctgctacggctgcctggccccgttttgtgagctcaacctgggtgacaagtgtctggacggcgtgctgaacaacaacagctacgagtcagacatcctgaagaattacctggcaaccagaggtttgacatggaaaaacatgttgaccgagagcctcgtggctctccagcggggagtgtttctgctgtctgattacagagtcacgggagacaccgttctgtgttactgctgtggcctgcgcagcttccgtgagctgacctatcagtatcggcagaacattcctgcttccgagttgccagtggccgtaacatcccgtcctgactgctactggggccgtaactgccgcactcaggtgaaagctcaccacgccatgaaattcaatcatatctgtgaacagacaaggttcaaaaactaagcatccagaggccctgagcagctttcagcactggaggtgaagagagcgtgtttttaaaatacagagacaagcacgtcaaggtgttttcacagccccctgagggaagggacgcagggtctccgacaggtgctctggggtgactcttctgtggagctttttaccctctgagtgagaccctccccagagccccgggggccgcagcccgccctcctggtgagcgctgggcagggctcgtggtggcatcagcagcagagacgaagcctttctgtaacatgcggccgtcccgccgagaggggcagttttgctcttttgtacattttccgaaactacagttaaagcagaagtctgttttcaggaaaagtttcaagggagaagggcaagtttatcaaaaacattgtttcaggagaagggagcataagtttacagcctacaggacgtacacaatatcctgctgctgggaaaaccacagcattttatctattttttattttaataggtttggtgcttatcttctaataagatttaaatgtcacaaactgtagcacaaataatataatttataatttacaaattgactaaaattgggtatagtatggtatttgaaagaataagcatatgcttctgtttattaaaaaaagaaaccttccaatgtccaaaactgctaaccctcgacgtggccgccaagttagtcgctccttgctaaccggtgagtgaccgcggccccgagcctggggctggacgcaggtcccaggacatgctgctcccttgtgtgagtgaccacggccccgagcctggggctggacgcaggtcccaggacgtgctgctcccttgtgtgagtgaccacggccccaagcccagggctggaggcaggtcccaggacgcgccgctccctcatgctgcccgggcccttcctccaagaccctacagagcctgaggggcaccttggcttccgcctgtgctagctttgccatgtcatctggaataatacttgaaattttgatttttggaaaaaaaagttttttatcttttgttgaaatcacctgttatccttgtttgtaaactgataacttttttgcttcttctcaggaatacagttttcaactgttgtcttgctcttgatagaaactgagaagcagcaatctgtatttgtggaggaaagtcctctcttttgcatattctaataaatgagccgcgtttgctcctccgctctcgtgttgggctcgtgtctg

SEQ ID NO: 29562 - DNA, 3040 bp, Homo sapiens
cgcggatcggctgagggagccgcaatgtctcttgacagcggcggcggcgcagccggttccgggttcggcgcggggcggggatgtgaatcccgatggagcggcccgaggaaggcaagcagtcgccgccgccgcagccctggggacggctcctgcgtctgggcgcggaggagggcgagccgcacgtcctcctgaggaagcgggagtggaccatcgggcggagacgaggttgcgacctttccttccccagcaataaactggtctctggagatcactgtagaattgtagtggatgaaaaatcaggtcaggtgacactggaagataccagcaccagtggaacagtgattaacaagctgaaggttgttaagaagcagacatgccctttacagactggggatgtcatctacttggtgtacaggaagaatgaaccggaacacaggtctgggggtggtggcatctcccctaaaggaagtggtccctctgtggcaagtgatgaagtctccagctttgcctcagctctcccagacagaaagactgcgtccttttcgtcgttggaaccccaggatcaggaggatttggagcccgtgaagaagaaaatgagaggagatggggaccttgacctgaacgggcagttgttggtcgcacaaccgcgtagaaatgcccaaaccgtccacgaggacgtcagagcagcggctgggaagccagacaagatggaggagacgctgacatgcatcatctgccaggacctgctgcacgactgcgtgagtttgcagccctgcatgcacacgttctgcgcggcttgctactcgggctggatggagcgctcgtccctgtgtcctacctgccgctgtcccgtggagcggatctgtaaaaaccacatcctcaacaacctcgtggaagcatacctcatccagcatccagacaagagtcgcagtgaagaagatgtgcaaagtatggatgccaggaataaaatcactcaagacatgctgcagcccaaagtcaggcggtctttttctgatgaagaagggagttcagaggacctgctggagctgtcagacgttgacagtgagtcctcagacattagccagccatacgtcgtgtgccggcagtgtcctgagtacagaaggcaggcggcgcagcctccccactgcccagcacccgagggcgagccaggagccccacaggccctgggggatgcaccctccacgtccgtcagcctgacgacagcagtccaggattacgtgtgccctctgcaaggaagccacgccctgtgcacctgctgcttccagcccatgcccgaccggagagcggagcgcgagcaggacccgcgtgtcgcccctcagcagtgtgcggtctgcctgcagcctttctgccacctgtactggggctgcacccggaccggctgctacggctgcctggccccgttttgtgagctcaacctgggtgacaagtgtctggacggcgtgctgaacaacaacagctacgagtcagacatcctgaagaattacctggcaaccagaggtttgacatggaaaaacatgttgaccgagagcctcgtggctctccagcggggagtgtttctgctgtctgattacagagtcacgggagacaccgttctgtgttactgctgtggcctgcgcagcttccgtgagctgacctatcagtatcggcagaacattcctgcttccgagttgccagtggccgtaacatcccgtcctgactgctactggggccgtaactgccgcactcaggtgaaagctcaccacgccatgaaattcaatcatatctgtgaacagacaaggttcaaaaactaagcatccagaggccctgagcagctttcagcactggaggtgaagagagcgtgtttttaaaatacagagacaagcacgtcaaggtgttttcacagccccctgagggaagggacgcagggtctccgacaggtgctctggggtgactcttctgtggagctttttaccctctgagtgagaccctccccagagccccgggggccgcagcccgccctcctggtgagcgctgggcagggctcgtggtggcatcagcagcagagacgaagcctttctgtaacatgcggccgtcccgccgagaggggcagttttgctcttttgtacattttccgaaactacagttaaagcagaagtctgttttcaggaaaagtttcaagggagaagggcaagtttatcaaaaacattgtttcaggagaagggagcataagtttacagcctacaggacgtacacaatatcctgctgctgggaaaaccacagcattttatctattttttattttaataggtttggtgcttatcttctaataagatttaaatgtcacaaactgtagcacaaataatataatttataatttacaaattgactaaaattgggtatagtatggtatttgaaagaataagcatatgcttctgtttattaaaaaaagaaaccttccaatgtccaaaactgctaaccctcgacgtggccgccaagttagtcgctccttgctaaccggtgagtgaccgcggccccgagcctggggctggacgcaggtcccaggacatgctgctcccttgtgtgagtgaccacggccccgagcctggggctggacgcaggtcccaggacgtgctgctcccttgtgtgagtgaccacggccccaagcccagggctggaggcaggtcccaggacgcgccgctccctcatgctgcccgggcccttcctccaagaccctacagagcctgaggggcaccttggcttccgcctgtgctagctttgccatgtcatctggaataatacttgaaattttgatttttggaaaaaaaagttttttatcttttgttgaaatcacctgttatccttgtttgtaaactgataacttttttgcttcttctcaggaatacagttttcaactgttgtcttgctcttgatagaaactgagaagcagcaatctgtatttgtggaggaaagtcctctcttttgcatattctaataaatgagccgcgtttgctcctccgctctcgtgttgggctcgtgtctg

SEQ ID NO: 29563 - DNA, 3289 bp, Homo sapiens
accactgcccggacccagccctggcccaatggggctcgcacctccaaagcccacgtccacacgttccgagcccgccgtcccatcgcaaacatccgggggccgccactgcgcctaacgaccgcccatctctgacgcctcgggtcggcgtttgatttttaacccaagaaaagagtaaaagtcaagcggaaatcaacgcagaagcggtgctgcagcctctgagcttcctgacggccgtgtccagagccgggctcctcctcccgcggcagccgccgggctcacttcagtgcgctcagcttctcgcggggacaagcgtctgggcggggacggcccgaggcgggggtgtggcgaggctggagaacgctgaaagctggtgggcttgggaagacaaacgacgctctgaaatttggctcccaggttgcgacctttccttccccagcaataaactggtctctggagatcactgtagaattgtagtggatgaaaaatcaggtcaggtgacactggaagataccagcaccagtggaacagtgattaacaagctgaaggttgttaagaagcagacatgccctttacagactggggatgtcatctacttggtgtacaggaagaatgaaccggaacacaacgtggcatacctctatgaatctttaagtgaaaagcaaggcatgacacaagaatcctttgggtctgggggtggtggcatctcccctaaaggaagtggtccctctgtggcaagtgatgaagtctccagctttgcctcagctctcccagacagaaagactgcgtccttttcgtcgttggaaccccaggatcaggaggatttggagcccgtgaagaagaaaatgagaggagatggggaccttgacctgaacgggcagttgttggtcgcacaaccgcgtagaaatgcccaaaccgtccacgaggacgtcagagcagcggctgggaagccagacaagatggaggagacgctgacatgcatcatctgccaggacctgctgcacgactgcgtgagtttgcagccctgcatgcacacgttctgcgcggcttgctactcgggctggatggagcgctcgtccctgtgtcctacctgccgctgtcccgtggagcggatctgtaaaaaccacatcctcaacaacctcgtggaagcatacctcatccagcatccagacaagagtcgcagtgaagaagatgtgcaaagtatggatgccaggaataaaatcactcaagacatgctgcagcccaaagtcaggcggtctttttctgatgaagaagggagttcagaggacctgctggagctgtcagacgttgacagtgagtcctcagacattagccagccatacgtcgtgtgccggcagtgtcctgagtacagaaggcaggcggcgcagcctccccactgcccagcacccgagggcgagccaggagccccacaggccctgggggatgcaccctccacgtccgtcagcctgacgacagcagtccaggattacgtgtgccctctgcaaggaagccacgccctgtgcacctgctgcttccagcccatgcccgaccggagagcggagcgcgagcaggacccgcgtgtcgcccctcagcagtgtgcggtctgcctgcagcctttctgccacctgtactggggctgcacccggaccggctgctacggctgcctggccccgttttgtgagctcaacctgggtgacaagtgtctggacggcgtgctgaacaacaacagctacgagtcagacatcctgaagaattacctggcaaccagaggtttgacatggaaaaacatgttgaccgagagcctcgtggctctccagcggggagtgtttctgctgtctgattacagagtcacgggagacaccgttctgtgttactgctgtggcctgcgcagcttccgtgagctgacctatcagtatcggcagaacattcctgcttccgagttgccagtggccgtaacatcccgtcctgactgctactggggccgtaactgccgcactcaggtgaaagctcaccacgccatgaaattcaatcatatctgtgaacagacaaggttcaaaaactaagcatccagaggccctgagcagctttcagcactggaggtgaagagagcgtgtttttaaaatacagagacaagcacgtcaaggtgttttcacagccccctgagggaagggacgcagggtctccgacaggtgctctggggtgactcttctgtggagctttttaccctctgagtgagaccctccccagagccccgggggccgcagcccgccctcctggtgagcgctgggcagggctcgtggtggcatcagcagcagagacgaagcctttctgtaacatgcggccgtcccgccgagaggggcagttttgctcttttgtacattttccgaaactacagttaaagcagaagtctgttttcaggaaaagtttcaagggagaagggcaagtttatcaaaaacattgtttcaggagaagggagcataagtttacagcctacaggacgtacacaatatcctgctgctgggaaaaccacagcattttatctattttttattttaataggtttggtgcttatcttctaataagatttaaatgtcacaaactgtagcacaaataatataatttataatttacaaattgactaaaattgggtatagtatggtatttgaaagaataagcatatgcttctgtttattaaaaaaagaaaccttccaatgtccaaaactgctaaccctcgacgtggccgccaagttagtcgctccttgctaaccggtgagtgaccgcggccccgagcctggggctggacgcaggtcccaggacatgctgctcccttgtgtgagtgaccacggccccgagcctggggctggacgcaggtcccaggacgtgctgctcccttgtgtgagtgaccacggccccaagcccagggctggaggcaggtcccaggacgcgccgctccctcatgctgcccgggcccttcctccaagaccctacagagcctgaggggcaccttggcttccgcctgtgctagctttgccatgtcatctggaataatacttgaaattttgatttttggaaaaaaaagttttttatcttttgttgaaatcacctgttatccttgtttgtaaactgataacttttttgcttcttctcaggaatacagttttcaactgttgtcttgctcttgatagaaactgagaagcagcaatctgtatttgtggaggaaagtcctctcttttgcatattctaataaatgagccgcgtttgctcctccgctctcgtgttgggctcgtgtctg

SEQ ID NO: 29564 - DNA, 2729 bp, Homo sapiens
cgcggatcggctgagggagccgcaatgtctcttgacagcggcggcggcgcagccggttccgggttcggcgcggggcggggatgtgaatcccgatggagcggcccgaggaaggcaagcagtcgccgccgccgcagccctggggacggctcctgcgtctgggcgcggaggagggcgagccgcacgtcctcctgaggaagcgggagtggaccatcgggcggagacgaggttgcgacctttccttccccagcaataaactggtctctggagatcactgtagaattgtagtggatgaaaaatcaggtcaggtgacactggaagataccagcaccagtggaacagtgattaacaagctgaaggttgttaagaagcagacatgccctttacagactggggatgtcatctacttggtgtacaggaagaatgaaccggaacacaacgtggcatacctctatgaatctttaagtgaaaagcaaggcatgacacaagaatcctttgatacctcaggtgcaggtgcagggcgaggggccgatccccgggtccctccgtcgtcgcccgccactcaggtgtgctttgaggaaccacagccatcaacatcgacgtcagacctcttccccacagcctcggcctcttccacggagccttctcctgcagggcgagagcgttcctccagttgtgggtctgggggtggtggcatctcccctaaaggaagtggtccctctgtggcaagtgatgaagtctccagctttgcctcagctctcccagacagaaagactgcgtccttttcgtcgttggaaccccaggatcaggaggatttggagcccgtgaagaagaaaatgagaggagatggggaccttgacctgaacgggcagttgttggtcgcacaaccgcgtagaaatgcccaaaccgtccacgaggacgtcagagcagcggctgggaagccagacaagatggaggagacgctgacatgcatcatctgccaggaccccacaggccctgggggatgcaccctccacgtccgtcagcctgacgacaggtgcggtctgcctgcagcctttctgccacctgtactggggctgcacccggaccggctgctacggctgcctggccccgttttgtgagctcaacctgggtgacaagtgtctggacggcgtgctgaacaacaacagctacgagtcagacatcctgaagaattacctggcaaccagaggtttgacatggaaaaacatgttgaccgagagcctcgtggctctccagcggggagtgtttctgctgtctgattacagagtcacgggagacaccgttctgtgttactgctgtggcctgcgcagcttccgtgagctgacctatcagtatcggcagaacattcctgcttccgagttgccagtggccgtaacatcccgtcctgactgctactggggccgtaactgccgcactcaggtgaaagctcaccacgccatgaaattcaatcatatctgtgaacagacaaggttcaaaaactaagcatccagaggccctgagcagctttcagcactggaggtgaagagagcgtgtttttaaaatacagagacaagcacgtcaaggtgttttcacagccccctgagggaagggacgcagggtctccgacaggtgctctggggtgactcttctgtggagctttttaccctctgagtgagaccctccccagagccccgggggccgcagcccgccctcctggtgagcgctgggcagggctcgtggtggcatcagcagcagagacgaagcctttctgtaacatgcggccgtcccgccgagaggggcagttttgctcttttgtacattttccgaaactacagttaaagcagaagtctgttttcaggaaaagtttcaagggagaagggcaagtttatcaaaaacattgtttcaggagaagggagcataagtttacagcctacaggacgtacacaatatcctgctgctgggaaaaccacagcattttatctattttttattttaataggtttggtgcttatcttctaataagatttaaatgtcacaaactgtagcacaaataatataatttataatttacaaattgactaaaattgggtatagtatggtatttgaaagaataagcatatgcttctgtttattaaaaaaagaaaccttccaatgtccaaaactgctaaccctcgacgtggccgccaagttagtcgctccttgctaaccggtgagtgaccgcggccccgagcctggggctggacgcaggtcccaggacatgctgctcccttgtgtgagtgaccacggccccgagcctggggctggacgcaggtcccaggacgtgctgctcccttgtgtgagtgaccacggccccaagcccagggctggaggcaggtcccaggacgcgccgctccctcatgctgcccgggcccttcctccaagaccctacagagcctgaggggcaccttggcttccgcctgtgctagctttgccatgtcatctggaataatacttgaaattttgatttttggaaaaaaaagttttttatcttttgttgaaatcacctgttatccttgtttgtaaactgataacttttttgcttcttctcaggaatacagttttcaactgttgtcttgctcttgatagaaactgagaagcagcaatctgtatttgtggaggaaagtcctctcttttgcatattctaataaatgagccgcgtttgctcctccgctctcgtgttgggctcgtgtctg

SEQ ID NO: 29565 - DNA, 2462 bp, Homo sapiens
taggatccccctgtagctgggcacagagcgagactccatctctaaaaataacaaaccagaaaatgtgagcctcgccttttttcagggatacaactcctcgccatcacagtccatcacaacctgggtggcgttagctggatgtggccccgccccgatttccatgagacccctcctgaacaatgtttccagaaagagttgagctcctgagcctggtgctgacgaattgtgttggagacagccctcagcgctgagtgcgtgtaacgagtgtcctctctccacaggtgcggtctgcctgcagcctttctgccacctgtactggggctgcacccggaccggctgctacggctgcctggccccgttttgtggtaatactggctcttcaggccccagttgctttgacctttgcatgttctcttggtgaacttgagggcaggggatggtggggtccatagcctgatgtttatagggatgaggccactgttggtcatcaaatgatacctattcctggctggactgcagaggtgtgtcaaattcgtgttagctcaaaatcaagccttaacagaattattaggggagatactcccaggacagaatccttgcagcggggttctgctgttacgataccaagaccaggtgctggggagactcggagagctgatctttttaaggagggagtggaatggaaatcatttctgcttgtcctctgtttaaaattgagttttatcattgaacttcttattctttctagaatctgtaatgaaaagaaatatgtttatcctcagtgtcgggcagacagtgctttcctgcgacatcattataaacaggtaacattgccccttcatctcggcagagctcaacctgggtgacaagtgtctggacggcgtgctgaacaacaacagctacgagtcagacatcctgaagaattacctggcaaccagaggtttgacatggaaaaacatgttgaccgagagcctcgtggctctccagcggggagtgtttctgctgtctgattacagagtcacgggagacaccgttctgtgttactgctgtggcctgcgcagcttccgtgagctgacctatcagtatcggcagaacattcctgcttccgagttgccagtggccgtaacatcccgtcctgactgctactggggccgtaactgccgcactcaggtgaaagctcaccacgccatgaaattcaatcatatctgtgaacagacaaggttcaaaaactaagcatccagaggccctgagcagctttcagcactggaggtgaagagagcgtgtttttaaaatacagagacaagcacgtcaaggtgttttcacagccccctgagggaagggacgcagggtctccgacaggtgctctggggtgactcttctgtggagctttttaccctctgagtgagaccctccccagagccccgggggccgcagcccgccctcctggtgagcgctgggcagggctcgtggtggcatcagcagcagagacgaagcctttctgtaacatgcggccgtcccgccgagaggggcagttttgctcttttgtacattttccgaaactacagttaaagcagaagtctgttttcaggaaaagtttcaagggagaagggcaagtttatcaaaaacattgtttcaggagaagggagcataagtttacagcctacaggacgtacacaatatcctgctgctgggaaaaccacagcattttatctattttttattttaataggtttggtgcttatcttctaataagatttaaatgtcacaaactgtagcacaaataatataatttataatttacaaattgactaaaattgggtatagtatggtatttgaaagaataagcatatgcttctgtttattaaaaaaagaaaccttccaatgtccaaaactgctaaccctcgacgtggccgccaagttagtcgctccttgctaaccggtgagtgaccgcggccccgagcctggggctggacgcaggtcccaggacatgctgctcccttgtgtgagtgaccacggccccgagcctggggctggacgcaggtcccaggacgtgctgctcccttgtgtgagtgaccacggccccaagcccagggctggaggcaggtcccaggacgcgccgctccctcatgctgcccgggcccttcctccaagaccctacagagcctgaggggcaccttggcttccgcctgtgctagctttgccatgtcatctggaataatacttgaaattttgatttttggaaaaaaaagttttttatcttttgttgaaatcacctgttatccttgtttgtaaactgataacttttttgcttcttctcaggaatacagttttcaactgttgtcttgctcttgatagaaactgagaagcagcaatctgtatttgtggaggaaagtcctctcttttgcatattctaataaatgagccgcgtttgctcctccgctctcgtgttgggctcgtgtctg

SEQ ID NO: 29566 - DNA, 2025 bp, Homo sapiens
  misc_feature (40)..(40): n is a, c, g, or t
agtgatgctgaggtgatctagaggatcccgggagcagganctgttggtcatcaaatgatacctattcctggctggactgcagaggtgtgtcaaattcgtgttagctcaaaatcaagccttaacagaattattaggggagatactcccaggacagaatccttgcagcggggttctgctgttacgataccaagaccaggtgctggggagactcggagagctgatctttttaaggagggagtggaatggaaatcatttctgcttgtcctctgtttaaaattgagttttatcattgaacttcttattctttctagaatctgtaatgaaaagaaatatgtttatcctcagtgtcgggcagacagtgctttcctgcgacatcattataaacaggtaacattgccccttcatctcggcagagctcaacctgggtgacaagtgtctggacggcgtgctgaacaacaacagctacgagtcagacatcctgaagaattacctggcaaccagaggtttgacatggaaaaacatgttgaccgagagcctcgtggctctccagcggggagtgtttctgctgtctgattacagagtcacgggagacaccgttctgtgttactgctgtggcctgcgcagcttccgtgagctgacctatcagtatcggcagaacattcctgcttccgagttgccagtggccgtaacatcccgtcctgactgctactggggccgtaactgccgcactcaggtgaaagctcaccacgccatgaaattcaatcatatctgtgaacagacaaggttcaaaaactaagcatccagaggccctgagcagctttcagcactggaggtgaagagagcgtgtttttaaaatacagagacaagcacgtcaaggtgttttcacagccccctgagggaagggacgcagggtctccgacaggtgctctggggtgactcttctgtggagctttttaccctctgagtgagaccctccccagagccccgggggccgcagcccgccctcctggtgagcgctgggcagggctcgtggtggcatcagcagcagagacgaagcctttctgtaacatgcggccgtcccgccgagaggggcagttttgctcttttgtacattttccgaaactacagttaaagcagaagtctgttttcaggaaaagtttcaagggagaagggcaagtttatcaaaaacattgtttcaggagaagggagcataagtttacagcctacaggacgtacacaatatcctgctgctgggaaaaccacagcattttatctattttttattttaataggtttggtgcttatcttctaataagatttaaatgtcacaaactgtagcacaaataatataatttataatttacaaattgactaaaattgggtatagtatggtatttgaaagaataagcatatgcttctgtttattaaaaaaagaaaccttccaatgtccaaaactgctaaccctcgacgtggccgccaagttagtcgctccttgctaaccggtgagtgaccgcggccccgagcctggggctggacgcaggtcccaggacatgctgctcccttgtgtgagtgaccacggccccgagcctggggctggacgcaggtcccaggacgtgctgctcccttgtgtgagtgaccacggccccaagcccagggctggaggcaggtcccaggacgcgccgctccctcatgctgcccgggcccttcctccaagaccctacagagcctgaggggcaccttggcttccgcctgtgctagctttgccatgtcatctggaataatacttgaaattttgatttttggaaaaaaaagttttttatcttttgttgaaatcacctgttatccttgtttgtaaactgataacttttttgcttcttctcaggaatacagttttcaactgttgtcttgctcttgatagaaactgagaagcagcaatctgtatttgtggaggaaagtcctctcttttgcatattctaataaatgagccgcgtttgctcctccgctctcgtgttgggctcgtgtctg

SEQ ID NO: 29567 - DNA, 1330 bp, Homo sapiens
ttcctctcctcccacctcagcttccttcattgctcttattttataccctatcctgcaggaaattcaatcatatctgtgaacagacaaggttcaaaaactaagcatccagaggccctgagcagctttcagcactggaggtgaagagagcgtgtttttaaaatacagagacaagcacgtcaaggtgttttcacagccccctgagggaagggacgcagggtctccgacaggtgctctggggtgactcttctgtggagctttttaccctctgagtgagaccctccccagagccccgggggccgcagcccgccctcctggtgagcgctgggcagggctcgtggtggcatcagcagcagagacgaagcctttctgtaacatgcggccgtcccgccgagaggggcagttttgctcttttgtacattttccgaaactacagttaaagcagaagtctgttttcaggaaaagtttcaagggagaagggcaagtttatcaaaaacattgtttcaggagaagggagcataagtttacagcctacaggacgtacacaatatcctgctgctgggaaaaccacagcattttatctattttttattttaataggtttggtgcttatcttctaataagatttaaatgtcacaaactgtagcacaaataatataatttataatttacaaattgactaaaattgggtatagtatggtatttgaaagaataagcatatgcttctgtttattaaaaaaagaaaccttccaatgtccaaaactgctaaccctcgacgtggccgccaagttagtcgctccttgctaaccggtgagtgaccgcggccccgagcctggggctggacgcaggtcccaggacatgctgctcccttgtgtgagtgaccacggccccgagcctggggctggacgcaggtcccaggacgtgctgctcccttgtgtgagtgaccacggccccaagcccagggctggaggcaggtcccaggacgcgccgctccctcatgctgcccgggcccttcctccaagaccctacagagcctgaggggcaccttggcttccgcctgtgctagctttgccatgtcatctggaataatacttgaaattttgatttttggaaaaaaaagttttttatcttttgttgaaatcacctgttatccttgtttgtaaactgataacttttttgcttcttctcaggaatacagttttcaactgttgtcttgctcttgatagaaactgagaagcagcaatctgtatttgtggaggaaagtcctctcttttgcatattctaataaatgagccgcgtttgctcctccgctctcgtgttgggctcgtgtctg

SEQ ID NO: 29568 - DNA, 2397 bp, Homo sapiens
cgcggatcggctgagggagccgcaatgtctcttgacagcggcggcggcgcagccggttccgggttcggcgcggggcggggatgtgaatcccgatggagcggcccgaggaaggcaagcagtcgccgccgccgcagccctggggacggctcctgcgtctgggcgcggaggagggcgagccgcacgtcctcctgaggaagcgggagtggaccatcgggcggagacgaggttgcgacctttccttccccagcaataaactggtctctggagatcactgtagaattgtagtggatgaaaaatcaggtcaggtgacactggaagataccagcaccagtggaacagtgattaacaagctgaaggttgttaagaagcagacatgccctttacagactggggatgtcatctacttggtgtacaggaagaatgaaccggaacacaacgtggcatacctctatgaatctttaagtgaaaagcaaggcatgacacaagaatcctttgatacctcaggtgcaggtgcagggcgaggggccgatccccgggtccctccgtcgtcgcccgccactcaggtgtgctttgaggaaccacagccatcaacatcgacgtcagacctcttccccacagcctcggcctcttccacggagccttctcctgcagggcgagagcgttcctccagttgtgggtctgggggtggtggcatctcccctaaaggaagtggtccctctgtggcaagtgatgaagtctccagctttgcctcagctctcccagacagaaagactgcgtccttttcgtcgttggaaccccaggatcaggaggatttggagcccgtgaagaagaaaatgagaggagatggggaccttgacctgaacgggcagttgttggtcgcacaaccgcgtagaaatgcccaaaccgtccacgaggacgtcagagcagcggctgggaagccagacaagatggaggagacgctgacatgcatcatctgccaggacctgctgcacgactgcgtgagtttgcagccctgcatgcacacgttctgcgcggcttgctactcgggctggatggagcgctcgtccctgtgtcctacctgccgctgtcccgtggagcggatctgtaaaaaccacatcctcaacaacctcgtggaagcatacctcatccagcatccagacaagagtcgcagtgaagaagatgtgcaaagtatggatgccaggaataaaatcactcaagacatgctgcagcccaaagtcaggcggtctttttctgatgaagaagggagttcagaggacctgctggagctgtcagacgttgacagtgagtcctcagacattagccagccatacgtcgtgtgccggcagtgtcctgagtacagaaggcaggcggcgcagcctccccactgcccagcacccgagggcgagccaggagccccacaggccctgggggatgcaccctccacgtccgtcagcctgacgacagcagtccaggattacgtgtgccctctgcaaggaagccacgccctgtgcacctgctgcttccagcccatgcccgaccggagagcggagcgcgagcaggacccgcgtgtcgcccctcagcagtgtgcggtctgcctgcagcctttctgccacctgtactggggctgcacccggaccggctgctacggctgcctggccccgttttgtgagctcaacctgggtgacaagtgtctggacggcgtgctgaacaacaacagctacgagtcagacatcctgaagaattacctggcaaccagaggtttgacatggaaaaacatgttgaccgagagcctcgtggctctccagcggggagtgtttctgctgtctgattacagagtcacgggagacaccgttctgtgttactgctgtggcctgcgcagcttccgtgagctgacctatcagtatcggcagaacattcctgcttccgagttgccagtggccgtaacatcccgtcctgactgctactggggccgtaactgccgcactcaggtgaaagctcaccacgccatgaaattcaatcatatctgtgaacagacaaggtcccaggacgcgccgctccctcatgctgcccgggcccttcctccaagaccctacagagcctgaggggcaccttggcttccgcctgtgctagctttgccatgtcatctggaataatacttgaaattttgatttttggaaaaaaaagttttttatcttttgttgaaatcacctgttatccttgtttgtaaactgataacttttttgcttcttctcaggaatacagttttcaactgttgtcttgctcttgatagaaactgagaagcagcaatctgtatttgtggaggaaagtcctctcttttgcatattctaataaatgagccgcgtttgctcctccgctctcgtgttgggctcgtgtctg

SEQ ID NO: 29569 - DNA, 1683 bp, Homo sapiens
cgcggatcggctgagggagccgcaatgtctcttgacagcggcggcggcgcagccggttccgggttcggcgcggggcggggatgtgaatcccgatggagcggcccgaggaaggcaagcagtcgccgccgccgcagccctggggacggctcctgcgtctgggcgcggaggagggcgagccgcacgtcctcctgaggaagcgggagtggaccatcgggcggagacgaggttgcgacctttccttccccagcaataaactggtctctggagatcactgtagaattgtagtggatgaaaaatcaggtcaggtgacactggaagataccagcaccagtggaacagtgattaacaagctgaaggttgttaagaagcagacatgccctttacagactggggatgtcatctacttggtgtacaggaagaatgaaccggaacacaacgtggcatacctctatgaatctttaagtgaaaagcaaggcatgacacaagaatcctttgatacctcaggtgcaggtgcagggcgaggggccgatccccgggtccctccgtcgtcgcccgccactcaggtgtgctttgaggaaccacagccatcaacatcgacgtcagacctcttccccacagcctcggcctcttccacggagccttctcctgcagggcgagagcgttcctccagttgtgggtctgggggtggtggcatctcccctaaaggaagtggtccctctgtggcaagtgatgaagtctccagctttgcctcagctctcccagacagaaagactgcgtccttttcgtcgttggaaccccaggatcaggaggatttggagcccgtgaagaagaaaatgagaggagatggggaccttgacctgaacgggcagttgttggtcgcacaaccgcgtagaaatgcccaaaccgtccacgaggacgtcagagcagcggctgggaagccagacaagatggaggagacgctgacatgcatcatctgccaggacctgctgcacgactgcgtgagtttgcagccctgcatgcacacgttctgcgcggcttgctactcgggctggatggagcgctcgtccctgtgtcctacctgccgctgtcccgtggagcggatctgtaaaaaccacatcctcaacaacctcgtggaagcatacctcatccagcatccagacaagagtcgcagtgaagaagatgtgcaaagtatggatgccaggaataaaatcactcaagacatgctgcagcccaaagtcaggcggtctttttctgatgaagaagggagttcagaggacctgctggagctgtcagacgttgacagtgagtcctcagacattagccagccatacgtcgtgtgccggcagtgtcctgagtacagaaggcaggcggcgcagcctccccactgcccagcaccttggcttccgcctgtgctagctttgccatgtcatctggaataatacttgaaattttgatttttggaaaaaaaagttttttatcttttgttgaaatcacctgttatccttgtttgtaaactgataacttttttgcttcttctcaggaatacagttttcaactgttgtcttgctcttgatagaaactgagaagcagcaatctgtatttgtggaggaaagtcctctcttttgcatattctaataaatgagccgcgtttgctcctccgctctcgtgttgggctcgtgtctg

SEQ ID NO: 29570 - DNA, 1190 bp, Homo sapiens
accactgcccggacccagccctggcccaatggggctcgcacctccaaagcccacgtccacacgttccgagcccgccgtcccatcgcaaacatccgggggccgccactgcgcctaacgaccgcccatctctgacgcctcgggtcggcgtttgatttttaacccaagaaaagagtaaaagtcaagcggaaatcaacgcagaagcggtgctgcagcctctgagcttcctgacggccgtgtccagagccgggctcctcctcccgcggcagccgccgggctcacttcagtgcgctcagcttctcgcggggacaagcgtctgggcggggacggcccgaggcgggggtgtggcgaggctggagaacgctgaaagctggtgggcttgggaagacaaacgacgctctgaaatttggctcccaggttgcgacctttccttccccagcaataaactggtctctggagatcactgtagaattgtagtggatgaaaaatcaggtcaggtgacactggaagataccagacggagtctcgctctgtggctcaggctgaagtgctgttgcagtgagccgataccgcgtcactgcactccagcctgggcgacagaccaggtctcaaaaaaaaaagaaaagaaaacatgccagatttgaatagccacctgaatgctgaagttttaccagctctcttgggctgtgtacccttcatcgtatcttccaggttccttaaaacctacccttgggcacagctgggatgtgcactggctcttcacagctagatccagcatgcactgactctccccgtgcagggacagccccagaggaatagaggtggcgttccggccgctccagcgtggcccacagcgtttcaagtgcagcaagcacagacaggacgcagggttactagtattttggattgactgcagattttgaactgtctgcctagatgaactataccatgtccctagggccaagtcccatgtgcattttgtggctactagaccctcttcagaaatcaaacacaaaatagctctggcctgtaaagaaaacaaacttcaccagtaaaattgtttcctgttcctatccaccaatgtgcatagcacagtgtgtagtctgggtaatacggtttgcataattttttgataatgttctacttaaaaagggcagcgtatttatatattacttatgtaattaaaaaaaaaa

SEQ ID NO: 29571 - DNA, 1872 bp, Homo sapiens
cgcggatcggctgagggagccgcaatgtctcttgacagcggcggcggcgcagccggttccgggttcggcgcggggcggggatgtgaatcccgatggagcggcccgaggaaggcaagcagtcgccgccgccgcagccctggggacggctcctgcgtctgggcgcggaggagggcgagccgcacgtcctcctgaggaagcgggagtggaccatcgggcggagacgaggttgcgacctttccttccccagcaataaactggtctctggagatcactgtagaattgtagtggatgaaaaatcaggtcaggtgacactggaagataccagcaccagtggaacagtgattaacaagctgaaggttgttaagaagcagacatgccctttacagactggggatgtcatctacttggtgtacaggaagaatgaaccggaacacaacgtggcatacctctatgaatctttaagtgaaaagcaaggcatgacacaagaatcctttgatacctcaggtgcaggtgcagggcgaggggccgatccccgggtccctccgtcgtcgcccgccactcaggtgtgctttgaggaaccacagccatcaacatcgacgtcagacctcttccccacagcctcggcctcttccacggagccttctcctgcagggcgagagcgttcctccagttgtgggtctgggggtggtggcatctcccctaaaggaagtggtccctctgtggcaagtgatgaagtctccagctttgcctcagctctcccagacagaaagactgcgtccttttcgtcgttggaaccccaggatcaggaggatttggagcccgtgaagaagaaaatgagaggagatggggaccttgacctgaacgggcagttgttggtcgcacaaccgcgtagaaatgcccaaaccgtccacgaggacgtcagagcagcggctgggaagccagacaagatggaggagacgctgacatgcatcatctgccaggacctgctgcacgactgcgtgagtttgcagccctgcatgcacacgttctgcgcggcttgctactcgggctggatggagcgctcgtccctgtgtcctacctgccgctgtcccgtggagcggatctgtaaaaaccacatcctcaacaacctcgtggaagcatacctcatccagcatccagacaagagtcgcagtgaagaagatgtgcaaagtatggatgccaggaataaaatcactcaagacatgctgcagcccaaagtcaggcggtctttttctgatgaagaagggagttcagaggacctgctggagctgtcagacgttgacagtgagtcctcagacattaggtaaatcatgcccctggctcagagcagagtgtgtgagccagaggagcatcacaaccgtgaccgagagctcactactgggtggacagcatgggtcctgagatctagttctgccctgagcagccaagctcttaaatggcttgagcttgttttctgatattggatagtattagcacctcccctgagaggcgtggcagggactgggtgaacacttagcggggtagccagggggtagccagcagagcgtcagccgcaggcgactgctgtagacatttgcaccctcggctgacacccttccctttgcttcgactcgtcatgggtgtggcatctctggctgtgacagagggacatcattccatgttattttttcccacatgagcacatgtattctttgtagttgatctagcgactataaagtcctatagtataaattgcaatgtttatcatttgtcaggacgttattacagaagaggcaccatcaccaggccaagacaatcccagcctcagagaccttatttatctgctgacatgttgaggtttcctaatgcacaaga

SEQ ID NO: 29572 - DNA, 829 bp, Homo sapiens
accactgcccggacccagccctggcccaatggggctcgcacctccaaagcccacgtccacacgttccgagcccgccgtcccatcgcaaacatccgggggccgccactgcgcctaacgaccgcccatctctgacgcctcgggtcggcgtttgatttttaacccaagaaaagagtaaaagtcaagcggaaatcaacgcagaagcggtgctgcagcctctgagcttcctgacggccgtgtccagagccgggctcctcctcccgcggcagccgccgggctcacttcagtgcgctcagcttctcgcggggacaagcgtctgggcggggacggcccgaggcgggggtgtggcgaggctggagaacgctgaaagctggtgggcttgggaagacaaacgacgctctgaaatttggctcccaggttgcgacctttccttccccagcaataaactggtctctggagatcactgtagaattgtagtggatgaaaaatcaggtcaggtgacactggaagataccagacggagtctcgctctgtggctcaggctgaagtgctgttggtgcgatctcggctcactgcaacctccgccacccgggttcaagcgattctcctgcctcagcctcccgagtagctgggattacagcaccagtggaacagtgattaacaagctgaaggttgttaagaagcagacatgccctttacagactggggatgtcatctacttggtgtacaggaagaatgaaccggaacacaacgtggcatacctctatgaatctttaagtgaaaagcaaggcatgacacaagaatcctttgataccacggtgcgtatagaagt

SEQ ID NO: 29573 - DNA, 290 bp, Homo sapiens
ggctaagcctggtcacagacatctccgcatttgtttctctgcaaatgggctccttgcccccagctccaccccacgtagagataggcacaaatagagttaagatgtgagttgagtgagcacacactcctcgtaagccacttgtcattcctaaactacgacatctcaggctgccagctgcactgggctccagtcagtgacaccttacaggcatggttctctcctgagctggatggatcagcacctatcttgtttgattcctctcacagggtctgggggtggtggcatctccc

SEQ ID NO: 29574 - DNA, 476 bp, Homo sapiens
tagagatggggttttaccatgttggccaggctggtctcgaactcctgacctcaagtgatccgcccgcctcggcctcccaaagtgctagattacagacattagccactgtgcgtggccagatgtttgcacttctgtttcaaaatttttaaagggataaagaagtttacctttgggggttagtttctttgatattgtgagaagcacacacactctttctcaggtagctctttctgtgtatggtttccgaatgcgtttatttgaatgcctttctgatgctctgttgtgtaatttatttgattgcctctccaatgctctcttgtgtaatttggccattttctccctgcaggaaattcaatcatatctgtgaacagacaaggttcaaaaactaagcatccagaggccctgagcagctttcagcactggaggtgaagagagcgtgtttttaaaatacagagacaagcacgtcaaggtgtttt

SEQ ID NO: 29575 - DNA, 573 bp, Homo sapiens
caccagcacctgggcacgtgagggcagtccctccaccagcacccgggcacgtgagggcggtccgcccagacccctccttccgcagcactgcgcacgcgagctcccagcagtgtgagctgtgtctgcctgccatgtctcactgccggtgaatggcgctgtgtcctttcaattctagacaagagtcgcagtgaagaagatgtgcaaagtatggatgccaggaataaaatcactcaagacatgctgcagcccaaagtcaggcggtctttttctgatgaagaagggagttcagaggacctgctggagctgtcagacgttgacagtgagtcctcagacattaggtaaatcatgcccctggctcagagcagagtgtgtgagccagaggagcatcacaaccgtgaccgagagctcactactgggtggacagcatgggtcctgagatctagttctgccctgagcagccaagctcttaaatggcttgagcttgttttctgatattggatagtattagcacctcccctgagaggcgtggcagggactgggtgaacacttagcggggtagccagggggtagcca

SEQ ID NO: 29576 - DNA, 442 bp, Homo sapiens
agcggcccgaggaaggcaagcagtcgccgccgccgcagccctggggacggctcctgcgtctgggcgcggaggagggcgagccgcacgtcctcctgaggaagcgggagtggaccatcgggcggagacgaggtgcggggctgaggccggggccgggggccggggccgggcagagccaccgggttgcgggcaggccacacgggcggcggtgcagtgtgcgctccagatttttccgtggagtgaaatgtcatgtaagaactggtatttattcggtgttctgcccaccgattcttgcgcatgattcacgcacatcatttagccttcgttacaactgtataagttagttgtgttcatatactctccagaatgcaatattgtcacgttcgttgccgtacagagtatcttttctgactgtaatggaacgaaattaaaaataatagaagga

SEQ ID NO: 29577 - DNA, 421 bp, Homo sapiens
ccccgagcctggggctggacgcaggtcccaggacgtgctgctcccttgtgtgagtgaccacggccccaagcccagggctggaggcaggtcccaggacgcgccgctccctcatgctgcccgggcccttcctccaagaccctacagagcctgaggggcaccttggcttccgcctgtgctagctttgccatgtcatctggaataatacttgaaattttgatttttggaaaaaaaagttttttatcttttgttgaaatcacctgttatccttgtttgtaaactgataacttttttgcttcttctcaggaatacagttttcaactgttgtcttgctcttgatagaaactgagaagcagcaatctgtatttgtggaggaaagtcctctcttttgcatattctaataaatgagccgcgtttgctcctc

SEQ ID NO: 29578 - DNA, 2669 bp, Homo sapiens
cgcggatcggctgagggagccgcaatgtctcttgacagcggcggcggcgcagccggttccgggttcggcgcggggcggggatgtgaatcccgatggagcggcccgaggaaggcaagcagtcgccgccgccgcagccctggggacggctcctgcgtctgggcgcggaggagggcgagccgcacgtcctcctgaggaagcgggagtggaccatcgggcggagacgaggttgcgacctttccttccccagcaataaactggtctctggagatcactgtagaattgtagtggatgaaaaatcaggtcaggtgacactggaagataccagcaccagtggaacagtgattaacaagctgaaggttgttaagaagcagacatgccctttacagactggggatgtcatctacttggtgtacaggaagaatgaaccggaacacaacgtggcatacctctatgaatctttaagtgaaaagcaaggcatgacacaagaatcctttgggtctgggggtggtggcatctcccctaaaggaagtggtccctctgtggcaagtgatgaagtctccagctttgcctcagctctcccagacagaaagactgcgtccttttcgtcgttggaaccccaggatcaggaggatttggagcccgtgaagaagaaaatgagaggagatggggaccttgacctgaacgggcagttgttggtcgcacaaccgcgtagaaatgcccaaaccgtccacgaggacgtcagagcagcggctgggaagccagacaagatggaggagacgctgacatgcatcatctgccaggaccccacaggccctgggggatgcaccctccacgtccgtcagcctgacgacagcagtccaggattacgtgtgccctctgcaaggaagccacgccctgtgcacctgctgcttccagcccatgcccgaccggagagcggagcgcgagcaggacccgcgtgtcgcccctcagcagtgtgcggtctgcctgcagcctttctgccacctgtactggggctgcacccggaccggctgctacggctgcctggccccgttttgtgagctcaacctgggtgacaagtgtctggacggcgtgctgaacaacaacagctacgagtcagacatcctgaagaattacctggcaaccagaggtttgacatggaaaaacatgttgaccgagagcctcgtggctctccagcggggagtgtttctgctgtctgattacagagtcacgggagacaccgttctgtgttactgctgtggcctgcgcagcttccgtgagctgacctatcagtatcggcagaacattcctgcttccgagttgccagtggccgtaacatcccgtcctgactgctactggggccgtaactgccgcactcaggtgaaagctcaccacgccatgaaattcaatcatatctgtgaacagacaaggttcaaaaactaagcatccagaggccctgagcagctttcagcactggaggtgaagagagcgtgtttttaaaatacagagacaagcacgtcaaggtgttttcacagccccctgagggaagggacgcagggtctccgacaggtgctctggggtgactcttctgtggagctttttaccctctgagtgagaccctccccagagccccgggggccgcagcccgccctcctggtgagcgctgggcagggctcgtggtggcatcagcagcagagacgaagcctttctgtaacatgcggccgtcccgccgagaggggcagttttgctcttttgtacattttccgaaactacagttaaagcagaagtctgttttcaggaaaagtttcaagggagaagggcaagtttatcaaaaacattgtttcaggagaagggagcataagtttacagcctacaggacgtacacaatatcctgctgctgggaaaaccacagcattttatctattttttattttaataggtttggtgcttatcttctaataagatttaaatgtcacaaactgtagcacaaataatataatttataatttacaaattgactaaaattgggtatagtatggtatttgaaagaataagcatatgcttctgtttattaaaaaaagaaaccttccaatgtccaaaactgctaaccctcgacgtggccgccaagttagtcgctccttgctaaccggtgagtgaccgcggccccgagcctggggctggacgcaggtcccaggacatgctgctcccttgtgtgagtgaccacggccccgagcctggggctggacgcaggtcccaggacgtgctgctcccttgtgtgagtgaccacggccccaagcccagggctggaggcaggtcccaggacgcgccgctccctcatgctgcccgggcccttcctccaagaccctacagagcctgaggggcaccttggcttccgcctgtgctagctttgccatgtcatctggaataatacttgaaattttgatttttggaaaaaaaagttttttatcttttgttgaaatcacctgttatccttgtttgtaaactgataacttttttgcttcttctcaggaatacagttttcaactgttgtcttgctcttgatagaaactgagaagcagcaatctgtatttgtggaggaaagtcctctcttttgcatattctaataaatgagccgcgtttgctcctccgctctcgtgttgggctcgtgtctg

SEQ ID NO: 29579 - DNA, 3226 bp, Homo sapiens
cgcggatcggctgagggagccgcaatgtctcttgacagcggcggcggcgcagccggttccgggttcggcgcggggcggggatgtgaatcccgatggagcggcccgaggaaggcaagcagtcgccgccgccgcagccctggggacggctcctgcgtctgggcgcggaggagggcgagccgcacgtcctcctgaggaagcgggagtggaccatcgggcggagacgaggttgcgacctttccttccccagcaataaactggtctctggagatcactgtagaattgtagtggatgaaaaatcaggtcaggtgacactggaagataccagcaccagtggaacagtgattaacaagctgaaggttgttaagaagcagacatgccctttacagactggggatgtcatctacttggtgtacaggaagaatgaaccggaacacaacgtggcatacctctatgaatctttaagtgaaaagcaaggcatgacacaagaatcctttgatacctcaggtgcaggtgcagggcgaggggccgatccccgggtccctccgtcgtcgcccgccactcaggtgtgctttgaggaaccacagccatcaacatcgacgtcagacctcttccccacagcctcggcctcttccacggagccttctcctgcagggcgagagcgttcctccagttgtgggtctgggggtggtggcatctcccctaaaggaagtggtccctctgtggcaagtgatgaagtctccagctttgcctcagctctcccagacagaaagactgcgtccttttcgtcgttggaaccccaggatcaggaggatttggagcccgtgaagaagaaaatgagaggagatggggaccttgacctgaacgggcagttgttggtcgcacaaccgcgtagaaatgcccaaaccgtccacgaggacgtcagagcagcggctgggaagccagacaagatggaggagacgctgacatgcatcatctgccaggacctgctgcacgactgcgtgagtttgcagccctgcatgcacacgttctgcgcggcttgctactcgggctggatggagcgctcgtccctgtgtcctacctgccgctgtcccgtggagcggatctgtaaaaaccacatcctcaacaacctcgtggaagcatacctcatccagcatccagacaagagtcgcagtgaagaagatgtgcaaagtatggatgccaggaataaaatcactcaagacatgctgcagcccaaagtcaggcggtctttttctgatgaagaagggagttcagaggacctgctggagctgtcagacgttgacagtgagtcctcagacattagccagccatacgtcgtgtgccggcagtgtcctgagtacagaaggcaggcggcgcagcctccccactgcccagcacccgagggcgagccaggagccccacaggccctgggggatgcaccctccacgtccgtcagcctgacgacagcagtccaggattacgtgtgccctctgcaaggaagccacgccctgtgcacctgctgcttccagcccatgcccgaccggagagcggagcgcgagcaggacccgcgtgtcgcccctcagcagtgtgcggtctgcctgcagcctttctgccacctgtactggggctgcacccggaccggctgctacggctgcctggccccgttttgtgagctcaacctgggtgacaagtgtctggacggcgtgctgaacaacaacagctacgagtcagacatcctgaagaattacctggcaaccagaggtttgacatggaaaaacatgttgaccgagagcctcgtggctctccagcggggagtgtttctgctgtctgattacagagtcacgggagacaccgttctgtgttactgctgtggcctgcgcagcttccgtgagctgacctatcagtatcggcagaacattcctgcttccgagttgccagtggccgtaacatcccgtcctgactgctactggggccgtaactgccgcactcaggtgaaagctcaccacgccatgaaattcaatcatatctgtgaacagacaaggttcaaaaactaagcatccagaggccctgagcagctttcagcactggaggtgaagagagcgtgtttttagcagggtctccgacaggtgctctggggtgactcttctgtggagctttttaccctctgagtgagaccctccccagagccccgggggccgcagcccgccctcctggtgagcgctgggcagggctcgtggtggcatcagcagcagagacgaagcctttctgtaacatgcggccgtcccgccgagaggggcagttttgctcttttgtacattttccgaaactacagttaaagcagaagtctgttttcaggaaaagtttcaagggagaagggcaagtttatcaaaaacattgtttcaggagaagggagcataagtttacagcctacaggacgtacacaatatcctgctgctgggaaaaccacagcattttatctattttttattttaataggtttggtgcttatcttctaataagatttaaatgtcacaaactgtagcacaaataatataatttataatttacaaattgactaaaattgggtatagtatggtatttgaaagaataagcatatgcttctgtttattaaaaaaagaaaccttccaatgtccaaaactgctaaccctcgacgtggccgccaagttagtcgctccttgctaaccggtgagtgaccgcggccccgagcctggggctggacgcaggtcccaggacatgctgctcccttgtgtgagtgaccacggccccgagcctggggctggacgcaggtcccaggacgtgctgctcccttgtgtgagtgaccacggccccaagcccagggctggaggcaggtcccaggacgcgccgctccctcatgctgcccgggcccttcctccaagaccctacagagcctgaggggcaccttggcttccgcctgtgctagctttgccatgtcatctggaataatacttgaaattttgatttttggaaaaaaaagttttttatcttttgttgaaatcacctgttatccttgtttgtaaactgataacttttttgcttcttctcaggaatacagttttcaactgttgtcttgctcttgatagaaactgagaagcagcaatctgtatttgtggaggaaagtcctctcttttgcatattctaataaatgagccgcgtttgctcctccgctctcgtgttgggctcgtgtctg

SEQ ID NO: 29580 - DNA, 2861 bp, Homo sapiens
cgcggatcggctgagggagccgcaatgtctcttgacagcggcggcggcgcagccggttccgggttcggcgcggggcggggatgtgaatcccgatggagcggcccgaggaaggcaagcagtcgccgccgccgcagccctggggacggctcctgcgtctgggcgcggaggagggcgagccgcacgtcctcctgaggaagcgggagtggaccatcgggcggagacgaggttgcgacctttccttccccagcaataaactggtctctggagatcactgtagaattgtagtggatgaaaaatcaggtcaggtgacactggaagataccagcaccagtggaacagtgattaacaagctgaaggttgttaagaagcagacatgccctttacagactggggatgtcatctacttggtgtacaggaagaatgaaccggaacacaacgtggcatacctctatgaatctttaagtgaaaagcaaggcatgacacaagaatcctttgaagctaacaaggaaaatgtgttccatgggaccaaagatacctcaggtgcaggtgcagggcgaggggccgatccccgggtccctccgtcgtcgcccgccactcaggtgtgctttgaggaaccacagccatcaacatcgacgtcagacctcttccccacagcctcggcctcttccacggagccttctcctgcagggcgagagcgttcctccagttgtgggtctgggggtggtggcatctcccctaaaggaagtggtccctctgtggcaagtgatgaagtctccagctttgcctcagctctcccagacagaaagactgcgtccttttcgtcgttggaaccccaggatcaggaggatttggagcccgtgaagaagaaaatgagaggagatggggaccttgacctgaacgggcagttgttggtcgcacaaccgcgtagaaatgcccaaaccgtccacgaggacgtcagagcagcggctgggaagccagacaagatggaggagacgctgacatgcatcatctgccaggacctgctgcacgactgcgtgagtttgcagccctgcatgcacacgttctgcgcggcttgctactcgggctggatggagcgctcgtccctgtgtcctacctgccgctgtcccgtggagcggatctgtaaaaaccacatcctcaacaacctcgtggaagcatacctcatccagcatccagacaagagtcgcagtgaagaagatgtgcaaagtatggatgccaggaataaaatcactcaagacatgctgcagcccaaagtcaggcggtctttttctgatgaagaagggagttcagaggacctgctggagctgtcagacgttgacagtgagtcctcagacattagccagccatacgtcgtgtgccggcagtgtcctgagtacagaaggcaggcggcgcagcctccccactgcccagcacccgagggcgagccaggagccccacaggccctgggggatgcaccctccacgtccgtcagcctgacgacagcagtccaggattacgtgtgccctctgcaaggaagccacgccctgtgcacctgctgcttccagcccatgcccgaccggagagcggagcgcgagcaggacccgcgtgtcgcccctcagcagtgtgcggtctgcctgcagcctttctgccacctgtactggggctgcacccggaccggctgctacggctgcctggccccgttttgtgagctcaacctgggtgacaagtgtctggacggcgtgctgaacaacaacagctacgagtcagacatcctgaagaattacctggcaaccagaggtttgacatggaaaaacatgttgaccgagagcctcgtggctctccagcggggagtgtttctgctgtctgattacagagtcacgggagacaccgttctgtgttactgctgtggcctgcgcagcttccgtgagctgacctatcagtatcggcagaacattcctgcttccgagttgccagtggccgtaacatcccgtcctgactgctactggggccgtaactgccgcactcaggtgaaagctcaccacgccatgaaattcaatcatatctgtgaacagacaaggttcaaaaactaagcatccagaggccctgagcagctttcagcactggaggtgaagagagcgtgtttttaaaatacagagacaagcacgtcaaggtgttttcacagccccctgagggaagggacgcagggtctccgacaggtgctctggggtgactcttctgtggagctttttaccctctgagtgagaccctccccagagccccgggggccgcagcccgccctcctggtgagcgctgggcagggctcgtggtggcatcagcagcagagacgaagcctttctgtaacatgcggccgtcccgccgagaggggcagttttgctcttttgtacattttccgaaactacagttaaagcagaagtctgttttcaggaaaagtttcaagggagaagggcaagtttatcaaaaacattgtttcaggagaagggagcataagtttacagcctacaggacgtacacaatatcctgctgctgggaaaaccacagcattttatctattttttattttaataggtttggtgcttatcttctaataagatttaaatgtcacaaactgtagcacaaataatataatttataatttacaaattgactaaatggtatagatgattgacgaaaggattgctcgttaaaaaagacgtcatgtcaaatgtaactcgagtggcgcaatatgctgcacgggatcgggccacggtgacgcacaagggccgtgtaccccacggtgacaccagggcctgtcacgccgggacaatcttaacccggggcatctttacccgaggccccaaagcata

SEQ ID NO: 29581 - DNA, 1001 bp, Homo sapiens
cgcggatcggctgagggagccgcaatgtctcttgacagcggcggcggcgcagccggttccgggttcggcgcggggcggggatgtgaatcccgatggagcggcccgaggaaggcaagcagtcgccgccgccgcagccctggggacggctcctgcgtctgggcgcggaggagggcgagccgcacgtcctcctgaggaagcgggagtggaccatcgggcggagacgaggttgcgacctttccttccccagcaataaactggtctctggagatcactgtagaattgtagtggatgaaaaatcaggtcaggtgacactggaagataccagacggagtctcgctctgtggctcaggctgaagtgctgttgcagtgagccgataccgcgtcactgcactccagcctgggcgacagaccaggtctcaaaaaaaaaagaaaagaaaacatgccagatttgaatagccacctgaatgctgaagttttaccagctctcttgggctgtgtacccttcatcgtatcttccaggttccttaaaacctacccttgggcacagctgggatgtgcactggctcttcacagctagatccagcatgcactgactctccccgtgcagggacagccccagaggaatagaggtggcgttccggccgctccagcgtggcccacagcgtttcaagtgcagcaagcacagacaggacgcagggttactagtattttggattgactgcagattttgaactgtctgcctagatgaactataccatgtccctagggccaagtcccatgtgcattttgtggctactagaccctcttcagaaatcaaacacaaaatagctctggcctgtaaagaaaacaaacttcaccagtaaaattgtttcctgttcctatccaccaatgtgcatagcacagtgtgtagtctgggtaatacggtttgcataattttttgataatgttctacttaaaaagggcagcgtatttatatattacttatgtaattaaaaaaaaaa

SEQ ID NO: 29582 - DNA, 895 bp, Homo sapiens
cgcggatcggctgagggagccgcaatgtctcttgacagcggcggcggcgcagccggttccgggttcggcgcggggcggggatgtgaatcccgatggagcggcccgaggaaggcaagcagtcgccgccgccgcagccctggggacggctcctgcgtctgggcgcggaggagggcgagccgcacgtcctcctgaggaagcgggagtggaccatcgggcggagacgaggttgcgacctttccttccccagcaataaactggtctctggagatcactgtagaattgtagtggatgaaaaatcaggtcaggtgacactggaagataccagcaccagtggaacagtgattaacaagctgaaggttgttaagaagcagacatgccctttacagactggggatgtcatctacttggtgtacaggaagaatgaaccggaacacaacgtggcatacctctatgaatctttaagtgaaaagcaaggcatgacacaagaatcctttgatacctcaggtgcaggtgcagggcgaggggccgatccccgggtccctccgtcgtcgcccgccactcaggtgtgctttgaggaaccacagccatcaacatcgacgtcagacctcttccccacagcctcggcctcttccacggagccttctcctgcagggcgagagcgttcctccagttgtggtgaggtcacatctcatgaggtcttggtgctggttgcatggtttttgttcactactctttacctgtgttgttacagaggcagataagcgactgaggactggcatgaggttctcagtagtgagatttctgtaggagtcaatattgagtgtgttgttcccttcacttcccaagagaagtgaagatcagggactctagtaccattgtgtattttgcagtttca

SEQ ID NO: 29583 - DNA, 777 bp, Homo sapiens
accatcacctccattagccactttaatggacagctgccatcctgggcagttttgagtgctaagaactggaaatctacccaaagcagtcaatttgctgccatgggaggcagtggggcagggggaggggaggagggtgaaagggggaagatggatacagagctgcagggaatatagagctggtcagggtagccacctggagattattttgaaacatctgattcctgcaatgcatgatgacacatgcccataatcacttagcacctactcagcttttttctttcttcaggcatcttattttaccagatacatgatgccaagcattcatttggtgagacagggttattcaactgggaagccaaagcactgggatagtattaggcagatccccaaatgtctttctatgagcaagcatccctaatatgcagtttgggagagacatttattgttccagtggcctaaatagattggttatttattgaaaaaaaaaaaactttttaagacctgttgaggttatagtttacaccagatctggtgctcataatcaatcctgttactctataattccagaatgaaggagaaatgctgagccttgcccttgcatttcctaccactatcccaaggctgtaactgtaacattcacatagaattttaagcaatacctgcttatatctcaaacattttaaatcttccaagttgattcaagcagcaagaaatagaaataataaataattgattctcatgagatggtagaccagtatgccctagcacctaaacttc

SEQ ID NO: 29584 - DNA, 424 bp, Homo sapiens
ccttcccccgcccatcccccgttgatccaaccacggccctctctctctaggtgagggcgtgtggctgaagcctgttcctgcttgggggttggccacacagcatcccaactccaggtccagagccgagcctgacagccctcctccactgcctcctggagctgccggagagaggtccgggtccgttctccccaattcacagacatgaagactgaggccgtggttccagtggctgctcggtggtggggctggagcttggcagcatcctgcagccctctggactcccggctctcgagtgccgcgttctacctgctgtgttctaaatggacatgccatccccacagctgtgtcaataaagcagccatttacagagcgggcgccggatcccgtgacaggttgaaaacttacactggtcttcatggcctca

SEQ ID NO: 29585 - DNA, 782 bp, Homo sapiens
tttcaaactaccgtaggctctatgacaccccccacaaaaaaaaaatttcagtgagggcgtgtggctgaagcctgttcctgcttgggggttggccacacagcatcccaactccaggtccagagccgagcctgacagccctcctccactgcctcctggagctgccggagagaggtccgggtccgttctccccaattcacagacatgaagactgaggccgtggttccagtggctgctcggtggtggggctggagcttggcagcatcctgcagccctctggactcccggctctcgagtgccgcgttctacctgctgtgttctaaatggacatgccatccccacagctgtgtcaataaagcagccatttacagagcgggcgccggatcccgtgacaggttgaaaacagctgccgtgtgccattggcacctcctgtgtgccaagtgctggcttagtctcccctggcgttttctcatatcccattaacaacccacccagtgggtatcatcatccccatttcacaggagctgtcactgcctctctccttgatggcggggtatgaagagaagccttttgacgcagggagatgacccctccccggcctccacctacacagcagccacgtggccaccctgaacagctgccacagtgaccgacaccccctggatgtgtttgtcctcccacagcaaagcacaattaacatccccactggtaaatgatatggggccatatttcacctggacccaaatgtgggccacagaggcattaaaataaatgacggcacggtt

SEQ ID NO: 29586 - DNA, 778 bp, Homo sapiens
gttcgatagatatttattctgtacgtggatttatactcacacttgagtgagggcgtgtggctgaagcctgttcctgcttgggggttggccacacagcatcccaactccaggtccagagccgagcctgacagccctcctccactgcctcctggagctgccggagagaggtccgggtccgttctccccaattcacagacatgaagactgaggccgtggttccagtggctgctcggtggtggggctggagcttggcagcatcctgcagccctctggactcccggctctcgagtgccgcgttctacctgctgtgttctaaatggacatgccatccccacagctgtgtcaataaagcagccatttacagagcgggcgccggatcccgtgacaggttgaaaacagctgccgtgtgccattggcacctcctgtgtgccaagtgctggcttagtctcccctggcgttttctcatatcccattaacaacccacccagtgggtatcatcatccccatttcacaggagctgtcactgcctctctccttgatggcggggtatgaagagaagccttttgacgcagggagatgacccctccccggcctccacctacacagcagccacgtggccaccctgaacagctgccacagtgaccgacaccccctggatgtgtttgtcctcccacagcaaagcacaattaacatccccactggtaaatgatatggggccatatttcacctggacccaaatgtgggccacagaggcattaaaataaatgacggcacggtt

SEQ ID NO: 29587 - DNA, 483 bp, Homo sapiens
ttctcaaaagatttgggcagccagcccctctagagaaaaacatagaatcacctagaaagggtttttcataaagtacacttttcatcacccctattctgtcacctggaatattgataacactgaagggagtgtgccttatctctcaggtgtatttggatgaaatagtttgagaaccatgcaggcaagtttaagccagtgtgttaaagagaatatgacatcagatttgcattttacaatcttccttttgataacaaagggaaccttaaagggctggaggggaagggcagacggggctaggggaggagaacccttttaaaaagctactgcaggtggggtgcggtggctcacacctgtaatcccagcactttgggaggccaaggcaggcagatcacctgaggtcaggagttcaagaccagcctggccaacatagtaaaaccccatctctactaaaaatacaaaaattagctaggcatggtagcaggc

SEQ ID NO: 29588 - DNA, 630 bp, Homo sapiens
gatccacacttcaaaacagagccttcttcctcaaccctgcaggctctctgtcagtgaaggactgaacagaagcaaaataccatcagcgcctgtttctccaaatggtccttggaagactcatcccaggcaccatgaagaacacccccaccctgggtttgaatctgaatctctaactaaagtaccccagggccattctcacgtagaagttttgagagcccagacactaaggaaagctggtagtgcaggaggccaaacgtgagaatttaactggggccaatggggactttcaatgggctgaacttgcaaacagctttatagctcgtggggattgggatagattagccccattttgtgggacaatgctcaggctatccacttcaacattccagaagttgcataaggaagcccaaaaacacgttctctggattttgctaagaagacattaattcattcattcactttttttttttttttttttttggacataggttcttcttgttctgttctccaggctggattgcagtggcacaatcatagctcactgtaacttgaactcctgggctcaagcaatcctcccatctcagcctcatgaacagctgggactataggcacatgctactatacccagca

SEQ ID NO: 29589 - DNA, 597 bp, Homo sapiens
gtcctgatcgatgtgagcccccctgaggcagagaagaggggctcttacgggagcacagcccacgcctcggagccaggtggacagcaagcggccgcctgcagagctgggagtcctgccaagccccggatcgacttcgtcctcgtttgggaggaggacctgaagctagacaggcagcaggacagtgccgcccgggacagaacagacatgcacaggacctggcgggagacttttctggataatcttcgtgcggctgggctgtgtgtagaccaggtacgtggaggctgtcatgggcagggccctaggccctgcatccactcagtgacccatgaccttgccgcatgaggcctgagggcatggtgtccagagtcccagagcagatcaggccccaaagtcctgctggaccccccagccaccgtgagctcctccgtgtggctagggagctgctgtccagaggcggaggtaaacattgatccctcctgcacactcagctctctcatggaagtcggagccctcagggtcacctgaaaactctgacactacctttgccattcacctgtcccgtctccaacattaaagcttttgggtaggcgtgtcatt

SEQ ID NO: 29590 - DNA, 374 bp, Homo sapiens
cgttaatctcaaactgacctgtcttccctctgtctcaatttttcttatccctcttataccttttattctttaatgtaaacatatattatatatttatgcaatatattcactatatatttatgcaaatatatagtctcttttattaaacggcaaaccctttatgcatagagatggcaatttatcttttcatagtctataaaatctaacatagtgctttgcatgctgttggtatgtagtatatttttgttgaattaacaaattgataaaaaggtgagaatttatttatcagaaagttttgcatttaccaggaaaattttataagactttttaaagtgcttgctttacatcaggttgagatcaatgctcctagagaa

SEQ ID NO: 29591 - DNA, 477 bp, Homo sapiens
tatctctccccttttgctgactcctttttcgtattcagctcacttgcactcaggtgattaaaaagctttattgctcacacaaagcctgtttggtggtctcttcacacagatgcgggtaacaccaataggcagtaggtagacatgagcacgggggaattaaagggtcaaagatttgaccaaaatattggttgggggaaaatgaggagagtgaaaatcacctggtgaccactgaacaggtcccagagactaaaactcctaatctgaggaatttagaagggaagaaagaccacctggtgaccatcaaagaggccatacagaggcaaaactccttatctgggagaaaattagaagtaattagacttccctgcggggcatggtggctcacacttgtaatcccagcactgtgggaggctgaggcaggcagatcacctgaggtcagagtttgagaccagcctggccaacatggtgaaaccccgt

SEQ ID NO: 29592 - DNA, 286 bp, Homo sapiens
  misc_feature (254)..(254): n is a, c, g, or t
  misc_feature (267)..(267): n is a, c, g, or t
  misc_feature (283)..(283): n is a, c, g, or t
ggtatcactcattcaatactttcttacataaagacttattgattagtggggacacagtttgctggacacttataagtgtctgggttataaagataaataagagagatttcttttttttttttttttcgtagagatgggatctcactatgttgctcaggctggtcttgaactcctggcctcaagcaatcctcctgcctcagcctgtaggctcccaaagtgctatgattacaggtgttgagccactgcacagaagncagcaattttttntttttaacaaatcttnctt

SEQ ID NO: 29593 - DNA, 430 bp, Homo sapiens
taatgatttcagtaaggtttcttgtcaaagtggatttattgaattggaattccagcatatttatcattaagctgagaagggaaaaatgcagggctttaccagtagaatgtcttcttagtgaggtccatgggtaaaagatttttgtgtcagaagacccttttttttgttgttatggttgccttaatgtgattcagattgatatggagcaagtttcctactctccaggctactactttacgcaactttggggcaccatttattttggagtaagcgcaaataggacgcctcatgctatacacatggaacaactatctctaaactggagccaatagctctgtcaggattattaaaaggattaaagcagatcatacattatgtaaaatatctagcataaaaatgaaaattggttatttaatattatagagccttc

SEQ ID NO: 29594 - DNA, 819 bp, Homo sapiens
atagagtgcttaggagccaggatgggagcactggaggcagaatgcctaggttcaaatcctcgttctgccatttactaattgttttgtgagttttgttgagttattgaacttctgtaggtcgtatgttttctcttgtccaaagtggtgattataataatattatagaattgttttaaataaattgactaaaagtaaaattcttagaaacatgcttgcacataataagtcctcagtaagtgttaaactgctactgttggttatagatcatgagaactgagtaagtttaagaagtccagagacttctacctgataagtggtagagccagtgattaaatataggtgatctgaatctaagtcctacttgctaatttatctagttgcctttaccatattttattatatgtttatttacttattggacataaaattattagccttctaaactttgatttaaatgtggactggctgaatgcggtggctcacgcctgtaatctcaggactttggaggttgaggtgggagggaattgcttgaggccaggagttggaggctgcactaagctgtgatcgtgccactgcactccagcggtgacagagtgagaccctgtctgaaaaaataaatgtgggccagaccatagaccaagtagttatagcaaaagagagtttctaaattactcacaacagaacttccattcttaaactagtcttttgctttaatccactggtacccaatccttagcagttataaaccaaactcatgagctatgaggggaaaatgaccatgggaaacatagatttaatgcaaaataactgaaaaaaaaa

SEQ ID NO: 29595 - DNA, 600 bp, Homo sapiens
agtcagtctacaggctaggtgcacactggacagtcagggtggttgtgagctgatggagactgtaaatgaaccagaaacaggtgaagtgagcaaagatgcagtcattgtaaagcaggagaaaaataatgaatattgccttcaggatattgatgataaattgtcagaatcagcagaggatgatggtgaagatgataccaatgatgaagatgatgatgaagatagtaaccctaaaaagaatactcaggccccactagagttaatggcagaatttctgagagcagaaatggcccgagagtatcagctggcaaaaaaattatgtcagatgatcctaatctatgaaccagaaaatcctgaggccaaggagtttttcacacttattgaagaaatgttgctgatggagaaaactcagaatcatgagcaagacggtgaaaacagtgatgaagacagcagtggtgagagtaaaggagaaagcgatgaggagctgagtgacgagagctctgacgaaggtgaagatggatcatgagtgttgctgcaatacttgaagcttcatgtattttcattaatgtataccatgcaaatataaagacaagtgacatttta

SEQ ID NO: 29596 - DNA, 736 bp, Homo sapiens
agtcagtctacaggctaggtgcacactggacagtcagggtggttgtgagctgatggagactgtaaatgaaccagaaacaggtgaagtgagcaaagatgcagtcattgtaaagcaggagaaaaataatgaatattgccttcaggatattgatgataaattgtcagaatcagcagaggatgatggtgaagatgataccaatgatgaagatgatgatgaagatagtaaccctaaaaagaatactcaggccccactagagttaatggcagaagtaagttttacttgtgcatataattgaagaaactttaaaatattgaaataactaaagactgaagatttaaaatcactactgtgagaactaaaaaagtagatctcatggaggcagaacatagaatggtggttaccagaagctggacgggaagaagggagataaagagaagtccattaaggggcacaaaaatacagttagatggaaggaataaattctagtattcagtagtacagtagggaaattatagttaacagtagtttattgtatactttagccagaagagaaaaattgtaatattcccagcacaaagaaaagataagtgtttaagatgatggataatccaattgccttgatttgatcatcacacattgtatacaagtatcaaacatgtacccccaaaatgtatacaatattatatatcaataaaaaataaacatttttaaaaattaataaaaagatccttgtcca

SEQ ID NO: 29597 - DNA, 394 bp, Homo sapiens
tccccaggacatggtggagatttagacaacccagggcagaaaatcctctaggaaaggaagtctgaactacaccgctggctttctgaaaggacaggatttgaggagctgggatggtagtaggggagagggcagctgggtggggtttcttccaggaaacaatgtggatgcaagatgcagtcctcgtccctggcctgcccttaccgctttagtatttcagatgagtcagctctcactctgccacctgctttctgtaactctgcagcaggccagcagcctccagtccaccctctcctcctcccagggctctggggtgaagccctccccaggaactccctggctcccagtacccatgggagaagctcttttcaactgacatgatttattttaacaataa

SEQ ID NO: 29598 - DNA, 348 bp, Homo sapiens
ccgtccttggaatcctaagaaaattttccagccgtattacccttctatgaagcccacctgtcaaccaacaagcacccactcgatcagagcttccccaggctttttggtgtctcctccttgcatgggaattgacttccaaggaccaccagacactgaggaagtattttaacatataaagcaaaagcaacaatagggcagctggagaaaggaaattagaagtaacagagccaatgcagtgattagaaaaacactcaaaaaatggtaataaatgtgttcaatgggtcaagagaacatatttccatctatttaaataaaaacaggaatcaataaaagtgaacatacaaaaaa

SEQ ID NO: 29599 - DNA, 750 bp, Homo sapiens
tggtgcattgtaagtattcagtatataacttgttgaataaatggatcgggtttagcattttcccccattggacctggattgacctggaaattggtggactgaacctgcaagtagagattaaaggacctaacaactgtagagtggctggtgaaggtagatataagtgcagtaagggagggagtcgttgatgttgttttggttcgtagtgcagaataaagctacttatggaaatatacgactcctactcttagtttctgctttgatgtggttactgctgttgtttagcgtaagcatataaacaaatcactggcttagtgggttaatttttcttctcttttgttaaacagctgagtttttgctgttttcaaagttagccaaaaattccattttcatgtttaaatgatttagaaaaatcatttttctttaaaaaataacagtacataaaaagaaaacattctcggctgggcgcggtggctcacgcctgtaacccagcactttgggaggctgagacaggcagttcacctgaggtcaggagtttgagaccagcctgaccaacatggagaaactccgtctctactaaaaacacaaaaattttagccgggcgttgtgccacgttcctgtaatcccagctactcgggaggctgaggcaggagaatcgcttgaacccgggaggcagaggttgcagtgagccgagatcgtgtcattgcactccagcctgggcaacaagagcgaaactccatctcaaaaaat

SEQ ID NO: 29600 - DNA, 426 bp, Homo sapiens
gtctaatcaaagttgagtaaagcatagaaaaataaaagagagtgacttaaaatgtgctgtttgaacatgtctagtacgatgccagattttgtttaaaaacttttagtttctttaaaactccccttccccttcccaatagcatcattttctctttagggattcatgtttccagagaagttgacttcactctcccttcagagatgatgtaactaatgtaggctgtccaatcagtgtatttcatccctttgcacttaatgattagtcagggtaggcactgatcctgaagtagctcagctgaataattttcaggacttttgcagagaatgctgatcttctctttcttgctagacaagaggaagatgccgacagccattttagaaccataagagaagccagtcttagaatggtgcagagaccaaggtagcc

SEQ ID NO: 29601 - DNA, 235 bp, Homo sapiens
tgatggtcattttaggttaataaaagctctgtttttagattgataattctaagggtttatcatcaaggtgtatgagaaggtgagggagcccctgtgtgtagcgcagcaactctggccttctggacagtaggtaggcatgtgatcactgttgtcactaaacctgggaaatgattcctgggtcagggttcattaattgccaaatgattaaagtaataaagctgacactggaaactta

SEQ ID NO: 29602 - DNA, 1563 bp, Homo sapiens
  misc_feature (73)..(74): n is a, c, g, or t
atgcatgggggccaggggccgctgctcctcctgctgctgctggctgtctgcctgggtgggacacaaaggaatnnccggaaccaggaggagcgcctgctcgcagacctgatgcaaaactacgaccccaacctgcggcccgcggaacgagactcggatgtggtcaatgtcagcctgaagctaaccctcaccaacctcatctccctgaacgagcgagaggaagccctcaccaccaatgtctggatagagatgcagtggtgcgactatcgcctgcgctgggatccgcgagactacgaaggcctgtgggtgctgagggtgccgtccaccatggtgtggcggccggatatcgtgctggagaacaacgtggacggtgtcttcgaggtggccctctactgcaatgtgctcgtgtcccctgacggctgtatctactggctgccgcctgccatcttccgttccgcctgctctatctcagtcacctacttccccttcgactggcagaactgctcccttatcttccagtcccagacttacagcaccaatgagattgatctgcagctgagtcaggaagatggccagaccatcgagtggattttcattgaccctgaggccttcacagagaatggggagtgggccatccagcaccgaccagccaagatgctcctggacccagcggcgccagcccaggaagcaggccaccagaaggtggtgttctacctgctcatccagcgcaagcccctcttctacgtcatcaacatcatcgccccctgtgtgctcatctcctctgtcgccatcctcatccacttccttcctgccaaggctgggggccagaagtgtaccgtcgccatcaacgtgctcctggcccagactgtcttcctcttccttgtggccaagaaggtgcctgaaacctcccaggcggtgccactcatcagcaagtacctgaccttcctcctggtggtgaccatcctcattgtcgtgaatgctgtggttgtgctcaatgtctccttgcggtctccacacacacactccatggcccgaggggtccgcaaggtgttcctgaggctcttgccccagctgctgaggatgcacgttcgcccgctggccccggcagctgtgcaggacacccagtcccggctacagaatggctcctcgggatggtcgatcacaactggggaggaggtggccctctgcctgcctcgcagtgaactcctcttccagcagtggcagcggcaagggctggtggcggcagcgctggagaagctagagaaaggcccggagttagggctgagccagttctgtggcagcctgaagcaggctgccccagccatccaggcctgtgtggaagcctgcaacctcattgcctgtgcccggcaccagcagagtcactttgacaatgggaatgaggagtggttcctggtgggccgagtgctggaccgcgtctgcttcctggccatgctctcgctcttcatctgtggcacagctggcatcttcctcatggcccactacaaccgggtgccggccctgccattccctggagatccacgcccctacctgccctcaccagactga

SEQ ID NO: 29603 - DNA, 405 bp, Homo sapiens
acagagatttactaatatttcagaagtattatactgttttcagttttcaagaggactgttataaggattgtttttacataatcatattgaaaaagctacctgtgggctgggcatggtggctcacacttgtaatctcagtgttttggaaagccgaggcaggagaatcgcttgaggacagaaatttgagacaagcctaggcaacaaagccagaccccatctctacaaaaaataatttaaaaaagaaattagctggtatggtggcatgtagctgtagtcccagctacttgggaggctgaggcaagaggatcatttgagcctctgagtccgaagttgcagtgagccatgattgtgccattgcactctggcttgggctacagagtgaagccctgtctcaaaaaacaaaac

SEQ ID NO: 29604 - DNA, 1849 bp, Homo sapiens
  misc_feature (1296)..(1296): n is a, c, g, or t
aaaaaatgatgaatatataaccagaaggagcccaggtactataaaagctaagtaacgaggaaacaaaaaaatgatgagtatataaccagaaggaacactcagtttgattcccatatcaggaagttcttgggttcagtgcaagacttgaaacctgacatggtttcattagattgtagaaaacgcttttttttttttttctggacaacagatggaaccatgttgtcggttgttcaaagatggacaggagacagaaatctatcaacctgaagtcagctccaactgcagctgtctgttctcctgaggactgtgctagtggtccacagaggtcaccttgcttatcacatgatattttcttgatgttagttgaagcacatcaccttaggtgacacatgagggccaaaggcctctttctcagggatgtatgtgaaagtgtggtgggttggggaccagctaaggaaaaaaagacatgaaggagaatgcaagcatcttacagtcatcattcagtaagaaatctttatgactggacaaaggaaaacataaacgccctttaacctagaatgcaaatttctagtgatttttacttttttagtgtatcagaagtcactgagcaaggtaagtaccagcacttacagagacggagtcataaaggctgctctctaaaagtagaggatgtgcaaaacctgtagtaccatttaacagatttttgaccttgttaattatgtcattttgaaactggaataaatatgtaatccgaaggttgatttttctgaacaaaagtaagtcaagtcaaagttttctcagagtctactgtttgattcttgagggtattcagaattcaagattgatgtgcatttcaacatttcagtttctgcctaagtgaagcgtcacttaaagccttcgaaattacagatgtaaaatgaggttgcacgtgatgtcagtagctataattcctactctggaggtagctcgatgtgtctgaaggctgagtgagctgcggcaggatgaatgaatctttgacttcaggagatgctgttctagtctgtaaccttgtcgtgtggaatcagcccatctgatgctgaacactaacttgaaatggctggccgaatgcagagtaacacatcagagcactagaccggtggaaagaacctagattgcaagtccagtgaattatctgcatcttcattttgttaggtgtagatttacttttgttattggttgcaattgcaatattttaaaatcatgattatgcgttaactccatctatttctaaaacattggtatttgtgtcatttttantgtagcttgatttttgttttcttctttctggtacaaaaacgagtttctccctccaacccctgccatgtatatctgtatcatgtatatctgtatctacattcctgtctactatcaatgcctactatttacaaggtagttcagttcgtttcagatcaactagaatttattgagtaccctgtatgctaatccctgtaccaggggcttgggatataacagtgaataagttcctggggcttacatcagtcaatatagggttactgtctattgaacaagattatttttgggtttctatctatttggggatatgataatgcatgtatttattcctaaccatcacacaataatattatgaaacaatgttagtaggaggaaggtgagagccttcattttaactgggaggacttggttctgtctaagatgttgcttttgttatgggttagtgcctattagataacattctgtttctgtgactgattatttctttttgaccttctgagttttagtttgtccactgagttttaggtaaaaaagaaaaaaaaaaggaaaaattatc

SEQ ID NO: 29605 - DNA, 501 bp, Homo sapiens
gccacatttataatgagaatgaaaacaattaaacaataaacaaaaataccaggcccggcaaggtggctcatgcctgtaatcccagcactttgagaggctgaggtgggcggatcacctgaggtcaggagttcgagaccagcccggtcaacatagagaaaccccatctctactaaaaatacaaaaattagccaggcatggtggcaggtgcctgtagtcccagctactcaggaagctgaggcaggagaacccagtttgaggttgcttgaacctgggaggtggaggttgcagtgagccaagatcgcgccattgcactccagcctgagcaacagagggagactcttatttcaaaaagaaaaaaaaaaatactcaaaccacatggtgactcaaattttaaaaatgaacatttcaaacaaaaagaaccattcagaaattaacagaaaactatatcattaccaccagatttaaacaggttcacattttgccttatttgctcatgcctca

SEQ ID NO: 29606 - DNA, 413 bp, Homo sapiens
ccagttaaagaggggcagtgagtctctttcccatctgaatggagctgggaaagaaaaacttacacagaataagagtaatcttacgttcctgattgccttgggaacgatagcatggagggggtctccttgagatttctagagatggccaaccctcagacacagctgcatgtccttaggatcctgcaggctgagcaagtaggtgaggggtcctaagaagctagggaaaattgcacaagagggttggcttcacaggtgtacagtagtataaggcccagaagggtctttgcagctggtttaccattctgcttcactatcttgaaattctttaaacaagggggccccacattttcattaaacattgcaccctgcaggtttatgttaactggttctgatggcacaagcctggaataggc

SEQ ID NO: 29607 - DNA, 879 bp, Homo sapiens
ggccagccggaggcggggcggacgcaggagggggtgtgtctggggaggggcctggcaggtcccagaaggtggcgagtttcgcggccagaggcttacaggtccaggtggagaggccgggctggccaggcttcggcctccggcgtcgggaaatggcggcggggggcaggatggaggacttgagaaaatggaaaattaactgtaagacctggttccttggatatcacccagagtattgaagacgacccacttctggatgcccagcttctcccacaccactcattacaagctcactttagaccccgattccatcctcttcctacagtcatcatagtgaatcttctgtggtttattcatctcgtgtttgttgttttagcatttttaacaggtgtgctttgttcttatcctaatccaaatgaggacaagtgcccaggaaattacacaaacccattgaaagttcagacggttataatccttgggaaagttattttgtggattctccatttactccttgaatgctacatccagtatcaccacagcaaaatcagaaaccgaggctataacttgatctaccgatcaacaaggcatctcaagagacttgcgttgatgatacagtcctctggcaacacagtgcttctcctcatactgtgcatgcagcactccttcccagagcctggcagattgtatcttgacctcattctggccatcttggcactggaactcatctgttccctgatatgtctcctcatttacacagtgaaaatccggagatttaataaagctaaaccagagcctgatatacttgaagaagaaaaaatctatgcttaccccagcaatattacctcggagactggattcaggtaagatttaggtgagaataaa

SEQ ID NO: 29608 - DNA, 2847 bp, Homo sapiens
ggccagccggaggcggggcggacgcaggagggggtgtgtctggggaggggcctggcaggtcccagaaggtggcgagtttcgcggccagaggcttacaggtccaggtggagaggccgggctggccaggcttcggcctccggcgtcgggaaatggcggcggggggcaggatggaggacggttccttggatatcacccagagtattgaagacgacccacttctggatgcccagcttctcccacaccactcattacaagctcactttagaccccgattccatcctcttcctacagtcatcatagtgaatcttctgtggtttattcatctcgtgtttgttgttttagcatttttaacaggtgtgctttgttcttatcctaatccaaatgaggacaagtgcccaggaaattacacaaacccattgaaagttcagacggttataatccttgggaaagttattttgtggattctccatttactccttgaatgctacatccagtatcaccacagcaaaatcagaaaccgaggctataacttgatctaccgatcaacaaggcatctcaagagacttgcgttgatgatacagtcctctggcaacacagtgcttctcctcatactgtgcatgcagcactccttcccagagcctggcagattgtatcttgacctcattctggccatcttggcactggaactcatctgttccctgatatgtctcctcatttacacagtgaaaatccggagatttaataaagctaaaccagagcctgatatacttgaagaagaaaaaatctatgcttaccccagcaatattacctcggagactggattcagaactatttcaagcctagaagaaattgttgaaaagcaaggagacaccattgaatacctgaagcgacacaatgcgctgctgagtaagcgattgttggctctcacttcctcagacctgggctgtcagccaagtagaacgtgagaggctcacggtcatgacagcaattgcagaggaacccagagtaattgagactgactgaccacctgacaagctgccacggggaactgcagcttttgctgaatagcattttacagtgtttgttggaaacctgaatttggttctgacttctgtggctgtttaaaatatagggcttgtgggtcacttgaaaagtacctgtagaagcccggataacttgaggggaatgtctgtttgtacttttggaaattatttaactgcttggtttatcctaggatcagaggctaaacaactccatagtcaacacttttccacctgacattagaaccctgtaatgatttcattatggataggggaagtctaacaagacaatcgattttaaacagggttttaatcaaataagttcttcccacttttaagctgatgaaagaagtcattatttcttgtgaatattttttcctggagagccttatcatgtattttatatgcttatgtggtgttggatgacatcatggaccatatagcttttatagagaatttttctcaccataggactgaggtctcaccaggtgatctactatgcaaattcctacagttttctattcttaagaaataagggccgggcacggcggatcatgaggtcaggaaattgagaccatcctggctaacacggtgaaaccctgtctctactaaaaatacaaaaaaaattagccgagcatggtggcgggcacctgtagtcccagccacctgggaggctgaggcaggagaatggtgtggacccaggaggcagagcttgcagtgagccgagatcacgccactgcactccagcctgggcgacagagcgagactccgtctcaaaaaaacaaaaaagaaaaagaaaagaaataagatatgatgattgattacttggaccagtgttagaccgacctgtgttagacgaacctgtgttgcctattatattggcagcaccttccattagcaatagctgaaaaattcagagaagaatttagaactttcactttatttttgccattcttcaagaagttgctgtatatttcagtctggttataccttcaattgatcaataacttcaattataggaaaggcatcttctataattttaaattactgtaaaaaaaagataccttttaaagccttggattatacttaaaaattgtaatggaagaaatgcatattaagttatatgcagatattaaacatatctgattctgaagataaaactgaagtatttttcagagcaaatggcattatttctccatttttcctagtatgcccctttaatttgtcagtttgctgttagcactgttatatgctgccttagaaagacttttggttgaaggctgaatatgaggggaggggatatttatgactgtgttaatcttttttgatcattagctgaatattcaatatttgatatgtaaccatatagggatgtgttcgatataactatataggcaagggatatattgatttggccacatctatttgatttatggagggcaaatacctgtttcttttagatacagccattgccggggcattctaaaagttttctactaagataaagatgattgtgtatggctgggagcagttgctcatgcctgtaatcttagtactttgggaggctgaggcaggaggatcactcaaggccaggagtttgagaccagcctgggcaacaatgagacactgtctctcaaaaaaaaaaaaaaaagatcgtgtgtcacctgcacacaacattcacaaactaaagccaaattgtatttttaaaatttcctttctcccttccgtttttttttgttttttggggggtttttttgttgttgttgtttttgagacagagcgagactccgtctcaaaaaaacaaaaa

SEQ ID NO: 29609 - DNA, 2897 bp, Homo sapiens
actatgagaatcgaacccatccctgagaatccaaaattctccgtgccacctatcacaccccatccagaaaaaaaaaaaaaaaaaaaaaaaaaaaaaaccttgtcggccgggtgaaaatccggagatttaataaagctaaaccagagcctgatatacttgaagaagaaaaaatctatgcttaccccagcaatattacctcggagactggattcagaactatttcaagcctagaagaaattgttgaaaagcaaggagacaccattgaatacctgaagcgacacaatgcgctgctgagtaagcgattgttggctctcacttcctcagacctgggctgtcagccaagtagaacgtgagaggctcacggtcatgacagcaattgcagaggaacccagagtaattgagactgactgaccacctgacaagctgccacggggaactgcagcttttgctgaatagcattttacagtgtttgttggaaacctgaatttggttctgacttctgtggctgtttaaaatatagggcttgtgggtcacttgattatttaactgcttggtttatcctaggatcagaggctaaacaactccatagtcaacacttttccacctgacattagaaccctgtaatgatttcattatggataggggaagtctaacaagacaatcgattttaaacagggttttaatcaaataagttcttcccacttttaagctgatgaaagaagtcattatttcttgtgaatattttttcctggagagccttatcatgtattttatatgcttatgtggtgttggatgacatcatggaccatatagcttttatagagaatttttctcaccataggactgaggtctcaccaggtgatctactatgcaaattcctacagttttctattcttaagaaataagggccgggcacggcggatcatgaggtcaggaaattgagaccatcctggctaacacggtgaaaccctgtctctactaaaaatacaaaaaaaattagccgagcatggtggcgggcacctgtagtcccagccacctgggaggctgaggcaggagaatggtgtggacccaggaggcagagcttgcagtgagccgagatcacgccactgcactccagcctgggcgacagagcgagactccgtctcaaaaaaacaaaaaagaaaaagaaaagaaataagatatgatgattgattacttggaccagtgttagaccgacctgtgttagacgaacctgtgttgcctattatattggcagcaccttccattagcaatagctgaaaaattcagagaagaatttagaactttcactttatttttgccattcttcaagaagttgctgtatatttcagtctggttataccttcaattgatcaataacttcaattataggaaaggcatcttctataattttaaattactgtaaaaaaaagataccttttaaagccttggattatacttaaaaattgtaatggaagaaatgcatattaagttatatgcagatattaaacatatctgattctgaagataaaactgaagtatttttcagagcaaatggcattatttctccatttttcctagtatgcccctttaatttgtcagtttgctgttagcactgttatatgctgccttagaaagacttttggttgaaggctgaatatgaggggaggggatatttatgactgtgttaatcttttttgatcattagctgaatattcaatatttgatatgtaaccatatagggatgtgttcgatataactatataggcaagggatatattgatttggccacatctatttgatttatggagggcaaatacctgtttcttttagatacagccattgccggggcattctaaaagttttctactaagataaagatgattgtgtatggctgggagcagttgctcatgcctgtaatcttagtactttgggaggctgaggcaggaggatcactcaaggccaggagtttgagaccagcctgggcaacaatgagacactgtctctcaaaaaaaaaaaaaaaagatcgtgtgtcacctgcacacaacattcacaaactaaagccaaattgtatttttaaaatttcctttctcccttccgtttttttttgttttttggggggtttttttgttgttgttgtttttgagacagagtctcaccctgtcgcccaggctggagtgcaatggcgcctttctttctttctttttttttcagacggagtctcgctctgttgcccaggctggagcgcagtagcatgatctcggctcactgcaacctccgcctcccgggattaagaaattctcctgcctcagcctgctgagtagctgggattacgggcacatgccaccatgcctggctaatttttgtatttttagtacaggcggggtttcaccgtgctggccaggctggtctcaaactcctgaccttttgatccgccctccttggcctcccaaagtgttgggattacaggcatgagccactgtgcccggccttcctttctttttaataagtgtatgtatctcaaagccattgccttctctagaaatctgtttctctgttctggaagagcctataaactttgccttcagttgtttttcttttcaaaagggaacaccagtggtagatgattaactcttatttatttttaaaatttaatttggatctatagtcagtatctgagatttataggatgaactttggtttacaaggaacagtgtagttaaaaagttagggtgcctatgttcttatgtaatcatcaacatgtttgttgtataatcatcaacatttttctgaatgcaatgatgaacatttcaaacaataaatgaaaatgaaactaagtatcagaagtagcaaaacagctgatgcagtggcttacgcctgtaatcccagcacttcgggag

SEQ ID NO: 29610 - DNA, 3567 bp, Homo sapiens
ggccagccggaggcggggcggacgcaggagggggtgtgtctggggaggggcctggcaggtcccagaaggtggcgagtttcgcggccagaggcttacaggtccaggtggagaggccgggctggccaggcttcggcctccggcgtcgggaaatggcggcggggggcaggatggaggacggttccttggatatcacccagagtattgaagacgacccacttctggatgcccagcttctcccacaccactcattacaagctcactttagaccccgattccatcctcttcctacagtcatcatagtgaatcttctgtggtttattcatctcgtgtttgttgttttagcatttttaacaggtgtgctttgttcttatcctaatccaaatgaggacaagtgcccaggaaattacacaaacccattgaaagttcagacggttataatccttgggaaagttattttgtggattctccatttactccttgaatgctacatccagtatcaccacagcaaaatcagaaaccgaggctataacttgatctaccgatcaacaaggcatctcaagagacttgcgttgatgatacagtcctctggcaacacagtgcttctcctcatactgtgcatgcagcactccttcccagagcctggcagattgtatcttgacctcattctggccatcttggcactggaactcatctgttccctgatatgtctcctcatttacacagtgaaaatccggagatttaataaagctaaaccagagcctgatatacttgaagaagaaaaaatctatgcttaccccagcaatattacctcggagactggattcagaactatttcaagcctagaagaaattgttgaaaagcaaggagacaccattgaatacctgaagcgacacaatgcgctgctgagtaagcgattgttggctctcacttcctcagacctgggctgtcagccaagtagaacgtgagaggctcacggtcatgacagcaattgcagaggaacccagagtaattgagactgactgaccacctgacaagctgccacggggaactgcagcttttgctgaatagcattttacagtgtttgttggaaacctgaatttggttctgacttctgtggctgtttaaaatatagggcttgtgggtcacttgaaaagtacctgtagaagcccggataacttgaggggaatgtctgtttgtacttttggaaattatttaactgcttggtttatcctaggatcagaggctaaacaactccatagtcaacacttttccacctgacattagaaccctgtaatgatttcattatggataggggaagtctaacaagacaatcgattttaaacagggttttaatcaaataagttcttcccacttttaagctgatgaaagaagtcattatttcttgtgaatattttttcctggagagccttatcatgtattttatatgcttatgtggtgttggatgacatcatggaccatatagcttttatagagaatttttctcaccataggactgaggtctcaccaggtgatctactatgcaaattcctacagttttctattcttaagaaataagggccgggcacggcggatcatgaggtcaggaaattgagaccatcctggctaacacggtgaaaccctgtctctactaaaaatacaaaaaaaattagccgagcatggtggcgggcacctgtagtcccagccacctgggaggctgaggcaggagaatggtgtggacccaggaggcagagcttgcagtgagccgagatcacgccactgcactccagcctgggcgacagagcgagactccgtctcaaaaaaacaaaaaagaaaaagaaaagaaataagatatgatgattgattacttggaccagtgttagaccgacctgtgttagacgaacctgtgttgcctattatattggcagcaccttccattagcaatagctgaaaaattcagagaagaatttagaactttcactttatttttgccattcttcaagaagttgctgtatatttcagtctggttataccttcaattgatcaataacttcaattataggaaaggcatcttctataattttaaattactgtaaaaaaaagataccttttaaagccttggattatacttaaaaattgtaatggaagaaatgcatattaagttatatgcagatattaaacatatctgattctgaagataaaactgaagtatttttcagagcaaatggcattatttctccatttttcctagtatgcccctttaatttgtcagtttgctgttagcactgttatatgctgccttagaaagacttttggttgaaggctgaatatgaggggaggggatatttatgactgtgttaatcttttttgatcattagctgaatattcaatatttgatatgtaaccatatagggatgtgttcgatataactatataggcaagggatatattgatttggccacatctatttgatttatggagggcaaatacctgtttcttttagatacagccattgccggggcattctaaaagttttctactaagataaagatgattgtgtatggctgggagcagttgctcatgcctgtaatcttagtactttgggaggctgaggcaggaggatcactcaaggccaggagtttgagaccagcctgggcaacaatgagacactgtctctcaaaaaaaaaaaaaaaagatcgtgtgtcacctgcacacaacattcacaaactaaagccaaattgtatttttaaaatttcctttctcccttccgtttttttttgttttttggggggtttttttgttgttgttgtttttgagacagagtctcaccctgtcgcccaggctggagtgcaatggcgcctttctttctttctttttttttcagacggagtctcgctctgttgcccaggctggagcgcagtagcatgatctcggctcactgcaacctccgcctcccgggattaagaaattctcctgcctcagcctgctgagtagctgggattacgggcacatgccaccatgcctggctaatttttgtatttttagtacaggcggggtttcaccgtgctggccaggctggtctcaaactcctgaccttttgatccgccctccttggcctcccaaagtgttgggattacaggcatgagccactgtgcccggccttcctttctttttaataagtgtatgtatctcaaagccattgccttctctagaaatctgtttctctgttctggaagagcctataaactttgccttcagttgtttttcttttcaaaagggaacaccagtggtagatgattaactcttatttatttttaaaatttaatttggatctatagtcagtatctgagatttataggatgaactttggtttacaaggaacagtgtagttaaaaagttagggtgcctatgttcttatgtaatcatcaacatgtttgttgtataatcatcaacatttttctgaatgcaatgatgaacatttcaaacaataaatgaaaatgaaactaagtatcagaagtagcaaaacagctgatgcagtggcttacgcctgtaatcccagcacttcgggag

SEQ ID NO: 29611 - DNA, 3112 bp, Homo sapiens
ggccagccggaggcggggcggacgcaggagggggtgtgtctggggaggggcctggcaggtcccagaaggtggcgagtttcgcggccagaggcttacaggtccaggtggagaggccgggctggccaggcttcggcctccggcgtcgggaaatggcggcggggggcaggatggaggacggttccttggatatcacccagagtattgaagacgacccacttctggatgcccagcttctcccacaccactcattacaagctcactttagaccccgattccatcctcttcctacagtcatcatagtgaatcttctgtggtttattcatctcgtgtttgttgttttagcatttttaacaggtgtgctttgttcttatcctaatccaaatgaggacaagtgcccaggaaattacacaaacccattgaaagttcagacggttataatccttgggaaagttattttgtggattctccatttactccttgaatgctacatccagtatcaccacagcaaaatcagaaaccgaggctataacttgatctaccgatcaacaaggcatctcaagagacttgcgttgatgatacagtcctctggcaacacagtgcttctcctcatactgtgcatgcagcactccttcccagagcctggcagattgtatcttgacctcattctggccatcttggcactggaactcatctgttccctgatatgtctcctcatttacacagtgaaaatccggagatttaataaagctaaaccagagcctgatatacttgaagaagaaaaaatctatgcttaccccagcaatattacctcggagactggattcagaactatttcaagcctagaagaaattgttgaaaagcaaggagacaccattgaatacctgaagcgacacaatgcgctgctgagtaagcgattgttggctctcacttcctcagacctgggctgtcagccaagtagaacgtgagaggctcacggtcatgacagcaattgcagaggaacccagagtaattgagactgactgaccacctgacaagctgccacggggaactgcagcttttgctgaatagcattttacagtgtttgttggaaacctgaatttggttctgacttctgtggctgtttaaaatatagggcttgtgggtcacttgaaaagtacctgtagaagcccggataacttgaggggaatgtctgtttgtacttttggaaattatttaactgcttggtttatcctaggatcagaggctaaacaactccatagtcaacacttttccacctgacattagaaccctgtaatgatttcattatggataggggaagtctaacaagacaatcgattttaaacagggttttaatcaaataagttcttcccacttttaagctgatgaaagaagtcattatttcttgtgaatattttttcctggagagccttatcatgtattttatatgcttatgtggtgttggatgacatcatggaccatatagcttttatagagaatttttctcaccataggactgaggtctcaccaggtgatctactatgcaaattcctacagttttctattcttaagaaataagggccgggcacggcggatcatgaggtcaggaaattgagaccatcctggctaacacggtgaaaccctgtctctactaaaaatacaaaaaaaattagccgagcatggtggcgggcacctgtagtcccagccacctgggaggctgaggcaggagaatggtgtggacccaggaggcagagcttgcagtgagccgagatcacgccactgcactccagcctgggcgacagagcgagactccgtctcaaaaaaacaaaaaagaaaaagaaaagaaataagatatgatgattgattacttggaccagtgttagaccgacctgtgttagacgaacctgtgttgcctattatattggcagcaccttccattagcaatagctgaaaaattcagagaagaatttagaactttcactttatttttgccattcttcaagaagttgctgtatatttcagtctggttataccttcaattgatcaataacttcaattataggaaaggcatcttctataattttaaattactgtaaaaaaaagataccttttaaagccttggattatacttaaaaattgtaatggaagaaatgcatattaagttatatgcagatattaaacatatctgattctgaagataaaactgaagtatttttcagagcaaatggcattatttctccatttttcctagtatgcccctttaatttgtcagtttgctgttagcactgttatatgctgccttagaaagacttttggttgaaggctgaatatgaggggaggggatatttatgactgtgttaatcttttttgatcattagctgaatattcaatatttgatatgtaaccatatagggatgtgttcgatataactatataggcaagggatatattgatttggccacatctatttgatttatggagggcaaatacctgtttcttttagatacagccattgccggggcattctaaaagttttctactaagataaagatgattgtgtatggctgggagcagttgctcatgcctgtaatcttagtactttgggaggctgaggcaggaggatcactcaaactcctgaccttttgatccgccctccttggcctcccaaagtgttgggattacaggcatgagccactgtgcccggccttcctttctttttaataagtgtatgtatctcaaagccattgccttctctagaaatctgtttctctgttctggaagagcctataaactttgccttcagttgtttttcttttcaaaagggaacaccagtggtagatgattaactcttatttatttttaaaatttaatttggatctatagtcagtatctgagatttataggatgaactttggtttacaaggaacagtgtagttaaaaagttagggtgcctatgttcttatgtaatcatcaacatgtttgttgtataatcatcaacatttttctgaatgcaatgatgaacatttcaaacaataaatgaaaatgaaactaagtatcagaagtagcaaaacagctgatgcagtggcttacgcctgtaatcccagcacttcgggag

SEQ ID NO: 29612 - DNA, 855 bp, Homo sapiens
  misc_feature (3)..(3): n is a, c, g, or t
  misc_feature (7)..(7): n is a, c, g, or t
ccncgcntagcgggagatggtctgaggtgggagaagagctgaagagacctggagccgacagacgggtgaaggccatgccgcctcctgggaaagttccccgaaaggagaatctgtggctacagtgtgagtgggggtcctgctcctttgtgtgctcaaccatggaaaagttctttgagcatgtcactcagcacctgcagcagcacctgcatggctctggggaggaggaggaagaggaagaggaggatgacccacttgaggaagaattctcctgcttgtggcaggaatgtggcttttgttctctggacagttctgctgacctcatccgccatgtctacttccactgctaccacaccaagctgaaacagtgggggctgcaggccttgcaaagccaggctgaccttggcccctgcatcctggacttccagagccggaacgtcatccctgatatccctgaccacttcctgtgtctgtgggagcactgtgaggtcagcaggcagtgccagtaattggggtggaaggaagctgggggtcttaactctgatgccttgtccctttcagggatgccttatatttccaagattcctgctagtatctctcttccatttcttttgctcttttaaaatttgtttattttgtacacacaggctcttgatctgaagcccaggctagagtgcagtggtacaatcatagctcactgtaaccttgaactcctgggctcaagcaatcctcccacctcagcctcccaagtagctaggactacaggcatgtaccaccatgccctgctaacttctaaattttttgtagagacaaggtctgggtgtgttgcccaggccggtctcgaactcttggcctcaa

SEQ ID NO: 29613 - DNA, 2302 bp, Homo sapiens
  misc_feature (3)..(3): n is a, c, g, or t
  misc_feature (7)..(7): n is a, c, g, or t
ccncgcntagcgggagatggtctgaggtgggagaagagctgaagagacctggagccgacagacgggtctgggtctgccgcccaggatggagtacaatggtgtgatcttggctctttgcaacctctgcctcctgggctcaagccttcctcccacctgaacctcccaagtagcgggactgcagggtgaaggccatgccgcctcctgggaaagttccccgaaaggagaatctgtggctacagtgtgagtgggggtcctgctcctttgtgtgctcaaccatggaaaagttctttgagcatgtcactcagcacctgcagcagcacctgcatggctctggggaggaggaggaagaggaagaggaggatgacccacttgaggaagaattctcctgcttgtggcaggaatgtggcttttgttctctggacagttctgctgacctcatccgccatgtctacttccactgctaccacaccaagctgaaacagtgggggctgcaggccttgcaaagccaggctgaccttggcccctgcatcctggacttccagagccggaacgtcatccctgatatccctgaccacttcctgtgtctgtgggagcactgtgagaattccttcgacaatcctgagtggttttatcggcatgtggaagcacacagtctgtgctgtgaatacgaagcagtcggcaaggacaacccggtggtgctgtgtggctggaaaggctgtacctgcaccttcaaggaccgcagtaaacttcgagagcacctccgcagccatacccaggagaaagtggtagcctgccccacctgtgggggcatgtttgccaacaataccaagttcttagatcacatccgtcgccagacctcattggatcagcagcacttccagtgttctcactgttccaagagatttgccacagagcggctattgcgggaccacatgcgcaaccatgtgaatcactataagtgccctctgtgtgacatgacctgcccgctgccttcctccctccgcaaccacatgcgctttcgtcacagtgaggaccggccctttaaatgtgactgttgtgactacagctgcaagaatcttattgacctccagaagcacctggatacccacagcgaggagccagcctacaggtgtgattttgagaactgcaccttcagtgcccgatccctctgctctatcaagtcccattaccgcaaagtacatgaaggagactctgagccaaggtacaaatgtcatgtgtgtgacaaatgcttcacacggggcaacaacctcaccgtgcaccttcgcaagaagcaccagttcaagtggccctcagggcatccccgttttcggtacaaggaacatgaagatggctatatgcggctgcagctggttcgctacgagagtgtagagctgacacagcaactgctgcggcaaccacaagagggatcgggcctgggaacgtcgctgaacgagagcagcctgcagggcattattctagaaacagtgccaggggagccaggacgtaaggaagaggaagaggagggcaagggtagcgaagggacagccctctcagcctctcaggacaaccccagttctgtcatccacgtggtgaatcagaccaatgcccaaggccagcaagagattgtctactatgtgctgtctgaagccccaggggagcctcccccagtccctgagccaccttcagggggcatcatggaaaagcttcaaggaatagctgaggagccagagatccagatggtttgaaggccgcagagccagaccatttcttccccaggtcctgaagtttgagccaggcaagtggcagtgcccctagtgggcagccgttgccaatggatgcctttaggagtggtgccgagagcagtgtggtccactctggcctgggtttgcatcattctgcagactctaaagacttcccttttctgccagactacattttgtggggagcctgaggactctggattctttgaggggatcctggatgtgtgtgttcttgttaaagaggctgttatcaggcttaaccataaccctcaagatctgcttgacagtgattaaatccttagctcacatccattcccatctttcgggctccttaggcccaaggatggcatgtgactggtccctgcaagggtcctttctttgtcaccagccaaggcattgataaccaagtagccattttcctcttaaggtttcctctacaaccccaaggactttcatgattatcctcagggacaggattggaggcattgagcgtgtttattaacaaattgtttttggtaataaaataaatgcttggactctta

SEQ ID NO: 29614 - DNA, 2371 bp, Homo sapiens
  misc_feature (3)..(3): n is a, c, g, or t
  misc_feature (7)..(7): n is a, c, g, or t
ccncgcntagcgggagatggtctgaggtgggagaagagctgaagagacctggagccgacagacgggtctgggtctgccgcccaggatggagtacaatggtgtgatcttggctctttgcaacctctgcctcctgggctcaagccttcctcccacctgaacctcccaagtagcgggactgcagggtgaaggccatgccgcctcctgggaaagttccccgaaaggagaatctgtggctacagtgtgagtgggggtcctgctcctttgtgtgctcaaccatggaaaagttctttgagcatgtcactcagcacctgcagcagcacctgcatggctctggggaggaggaggaagaggaagaggaggatgacccacttgtgctgcaggtggaaggtgacctgagccttggaaagtgtcagactcttccttttaaacccctttctacagaggaagaattctcctgcttgtggcaggaatgtggcttttgttctctggacagttctgctgacctcatccgccatgtctacttccactgctaccacaccaagctgaaacagtgggggctgcaggccttgcaaagccaggctgaccttggcccctgcatcctggacttccagagccggaacgtcatccctgatatccctgaccacttcctgtgtctgtgggagcactgtgagaattccttcgacaatcctgagtggttttatcggcatgtggaagcacacagtctgtgctgtgaatacgaagcagtcggcaaggacaacccggtggtgctgtgtggctggaaaggctgtacctgcaccttcaaggaccgcagtaaacttcgagagcacctccgcagccatacccaggagaaagtggtagcctgccccacctgtgggggcatgtttgccaacaataccaagttcttagatcacatccgtcgccagacctcattggatcagcagcacttccagtgttctcactgttccaagagatttgccacagagcggctattgcgggaccacatgcgcaaccatgtgaatcactataagtgccctctgtgtgacatgacctgcccgctgccttcctccctccgcaaccacatgcgctttcgtcacagtgaggaccggccctttaaatgtgactgttgtgactacagctgcaagaatcttattgacctccagaagcacctggatacccacagcgaggagccagcctacaggtgtgattttgagaactgcaccttcagtgcccgatccctctgctctatcaagtcccattaccgcaaagtacatgaaggagactctgagccaaggtacaaatgtcatgtgtgtgacaaatgcttcacacggggcaacaacctcaccgtgcaccttcgcaagaagcaccagttcaagtggccctcagggcatccccgttttcggtacaaggaacatgaagatggctatatgcggctgcagctggttcgctacgagagtgtagagctgacacagcaactgctgcggcaaccacaagagggatcgggcctgggaacgtcgctgaacgagagcagcctgcagggcattattctagaaacagtgccaggggagccaggacgtaaggaagaggaagaggagggcaagggtagcgaagggacagccctctcagcctctcaggacaaccccagttctgtcatccacgtggtgaatcagaccaatgcccaaggccagcaagagattgtctactatgtgctgtctgaagccccaggggagcctcccccagtccctgagccaccttcagggggcatcatggaaaagcttcaaggaatagctgaggagccagagatccagatggtttgaaggccgcagagccagaccatttcttccccaggtcctgaagtttgagccaggcaagtggcagtgcccctagtgggcagccgttgccaatggatgcctttaggagtggtgccgagagcagtgtggtccactctggcctgggtttgcatcattctgcagactctaaagacttcccttttctgccagactacattttgtggggagcctgaggactctggattctttgaggggatcctggatgtgtgtgttcttgttaaagaggctgttatcaggcttaaccataaccctcaagatctgcttgacagtgattaaatccttagctcacatccattcccatctttcgggctccttaggcccaaggatggcatgtgactggtccctgcaagggtcctttctttgtcaccagccaaggcattgataaccaagtagccattttcctcttaaggtttcctctacaaccccaaggactttcatgattatcctcagggacaggattggaggcattgagcgtgtttattaacaaattgtttttggtaataaaataaatgcttggactctta

SEQ ID NO: 29615 - DNA, 1165 bp, Homo sapiens
cgataatccacgggcactatccgctacgacccgacagcgatccagcctcatggagacccaacggactacaagacatgctcagctgctgatagctgagcagagactcgcatatcaacgacaggggcaacaacctcaccgtgcaccttcgcaagaagcaccagttcaagtggccctcagggcatccccgttttcggtacaaggaacatgaagatggctatatgcggctgcagctggttcgctacgagagtgtagagctgacacagcaactgctgcggcaaccacaagagggatcgggcctgggaacgtcgctgaacgagagcagcctgcagggcattattctagaaacagtgccaggggagccaggacgtaaggaagaggaagaggagggcaagggtagcgaagggacagccctctcagcctctcaggacaaccccagttctgtcatccacgtggtgaatcagaccaatgcccaaggccagcaagagattgtctactatgtgctgtctgaagccccaggggagcctcccccagtccctgagccaccttcagggggcatcatggaaaagcttcaaggaatagctgaggagccagagatccagatggtttgaaggccgcagagccagaccatttcttccccaggtcctgaagtttgagccaggcaagtggcagtgcccctagtgggcagccgttgccaatggatgcctttaggagtggtgccgagagcagtgtggtccactctggcctgggtttgcatcattctgcagactctaaagacttcccttttctgccagactacattttgtggggagcctgaggactctggattctttgaggggatcctggatgtgtgtgttcttgttaaagaggctgttatcaggcttaaccataaccctcaagatctgcttgacagtgattaaatccttagctcacatccattcccatctttcgggctccttaggcccaaggatggcatgtgactggtccctgcaagggtcctttctttgtcaccagccaaggcattgataaccaagtagccattttcctcttaaggtttcctctacaaccccaaggactttcatgattatcctcagggacaggattggaggcattgagcgtgtttattaacaaattgtttttggtaataaaataaatgcttggactctta

SEQ ID NO: 29616 - DNA, 2185 bp, Homo sapiens
  misc_feature (3)..(3): n is a, c, g, or t
  misc_feature (7)..(7): n is a, c, g, or t
ccncgcntagcgggagatggtctgaggtgggagaagagctgaagagacctggagccgacagacgggtgaaggccatgccgcctcctgggaaagttccccgaaaggagaatctgtggctacagtgtgagtgggggtcctgctcctttgtgtgctcaaccatggaaaagttctttgagcatgtcactcagcacctgcagcagcacctgcatggctctggggaggaggaggaagaggaagaggaggatgacccacttgaggaagaattctcctgcttgtggcaggaatgtggcttttgttctctggacagttctgctgacctcatccgccatgtctacttccactgctaccacaccaagctgaaacagtgggggctgcaggccttgcaaagccaggctgaccttggcccctgcatcctggacttccagagccggaacgtcatccctgatatccctgaccacttcctgtgtctgtgggagcactgtgagaattccttcgacaatcctgagtggttttatcggcatgtggaagcacacagtctgtgctgtgaatacgaagcagtcggcaaggacaacccggtggtgctgtgtggctggaaaggctgtacctgcaccttcaaggaccgcagtaaacttcgagagcacctccgcagccatacccaggagaaagtggtagcctgccccacctgtgggggcatgtttgccaacaataccaagttcttagatcacatccgtcgccagacctcattggatcagcagcacttccagtgttctcactgttccaagagatttgccacagagcggctattgcgggaccacatgcgcaaccatgtgaatcactataagtgccctctgtgtgacatgacctgcccgctgccttcctccctccgcaaccacatgcgctttcgtcacagtgaggaccggccctttaaatgtgactgttgtgactacagctgcaagaatcttattgacctccagaagcacctggatacccacagcgaggagccagcctacaggtgtgattttgagaactgcaccttcagtgcccgatccctctgctctatcaagtcccattaccgcaaagtacatgaaggagactctgagccaaggtacaaatgtcatgtgtgtgacaaatgcttcacacggggcaacaacctcaccgtgcaccttcgcaagaagcaccagttcaagtggccctcagggcatccccgttttcggtacaaggaacatgaagatggctatatgcggctgcagctggttcgctacgagagtgtagagctgacacagcaactgctgcggcaaccacaagagggatcgggcctgggaacgtcgctgaacgagagcagcctgcagggcattattctagaaacagtgccaggggagccaggacgtaaggaagaggaagaggagggcaagggtagcgaagggacagccctctcagcctctcaggacaaccccagttctgtcatccacgtggtgaatcagaccaatgcccaaggccagcaagagattgtctactatgtgctgtctgaagccccaggggagcctcccccagtccctgagccaccttcagggggcatcatggaaaagcttcaaggaatagctgaggagccagagatccagatggtttgaaggccgcagagccagaccatttcttccccaggtcctgaagtttgagccaggcaagtggcagtgcccctagtgggcagccgttgccaatggatgcctttaggagtggtgccgagagcagtgtggtccactctggcctgggtttgcatcattctgcagactctaaagacttcccttttctgccagactacattttgtggggagcctgaggactctggattctttgaggggatcctggatgtgtgtgttcttgttaaagaggctgttatcaggcttaaccataaccctcaagatctgcttgacagtgattaaatccttagctcacatccattcccatctttcgggctccttaggcccaaggatggcatgtgactggtccctgcaagggtcctttctttgtcaccagccaaggcattgataaccaagtagccattttcctcttaaggtttcctctacaaccccaaggactttcatgattatcctcagggacaggattggaggcattgagcgtgtttattaacaaattgtttttggtaataaaataaatgcttggactctta

SEQ ID NO: 29617 - DNA, 3052 bp, Homo sapiens
  misc_feature (3)..(3): n is a, c, g, or t
  misc_feature (7)..(7): n is a, c, g, or t
ccncgcntagcgggagatggtctgaggtgggagaagagctgaagagacctggagccgacagacgggtgaaggccatgccgcctcctgggaaagttccccgaaaggagaatctgtggctacagtgtgagtgggggtcctgctcctttgtgtgctcaaccatggaaaagttctttgagcatgtcactcagcacctgcagcagcacctgcatggctctggggaggaggaggaagaggaagaggaggatgacccacttgaggaagaattctcctgcttgtggcaggaatgtggcttttgttctctggacagttctgctgacctcatccgccatgtctacttccactgctaccacaccaagctgaaacagtgggggctgcaggccttgcaaagccaggctgaccttggcccctgcatcctggacttccagagccggaacgtcatccctgatatccctgaccacttcctgtgtctgtgggagcactgtgagaattccttcgacaatcctgagtggttttatcggcatgtggaagcacacagtctgtgctgtgaatacgaagcagtcggcaaggacaacccggtggtgctgtgtggctggaaaggctgtacctgcaccttcaaggaccgcagtaaacttcgagagcacctccgcagccatacccaggagaaagtggtagcctgccccacctgtgggggcatgtttgccaacaataccaagttcttagatcacatccgtcgccagacctcattggatcagcagcacttccagtgttctcactgttccaagagatttgccacagagcggctattgcgggaccacatgcgcaaccatgtgaatcactataagtgccctctgtgtgacatgacctgcccgctgccttcctccctccgcaaccacatgcgctttcgtcacagtgaggaccggccctttaaatgtgactgttgtgactacagctgcaagaatcttattgacctccagaagcacctggatacccacagcgaggagccagcctacaggtgtgattttgagaactgcaccttcagtgcccgatccctctgctctatcaagtcccattaccgcaaagtacatgaaggagactctgagccaaggtacaaatgtcatgtgtgtgacaaatgcttcacacggggcaacaacctcaccgtgcaccttcgcaagaagcaccagttcaagtggccctcagggcatccccgttttcggtatgtctctcaaccctccttcccagattaacacacttgtttttataccttttcaaccagttttaaaaaccttaatttgtgtcgggcgcggtggcttacgcctgtaatcccagcactttgggaggccaaggtgggcggatcatgaggtcaggagttcgagaccagcctggccaacatggtgaaaccccgtctctactaaaaatacaaaaagtagctgagcatggtggcacatgcctgtagtcccagctacttgggaggctgaggtgggagaatcacttgaacccagaaggcggaggttgtagtgagctgagatcatgccactgcactccaacctgggtgacagagcgagactccatctcaaaaataaataaataaataaataaaaaaaccttaatttgatggtggttttatgtctgccatttccatttagattcaaagaatcctaagaataatggtggagcaaagcttatttttctgttttttgaatcttgtaaggcatggtgccaaacccaataaatggtgccaaaaagtcctgcagctggaactagagctagagtctaagggttctgatccttagctccaaggccttctcataaatcctttgacactttcaccctccaacacagtcagtcagtctctgtttttctggttgggtttctatataaaactttccattttgagtaatgatctttccctcttgccttttcttctacatattccaataaagaccttttttgtcttcaactcctgtcacttggattccaggacttcttccatccctcatgtttgttccttactttgccagcctcggccatttctgtatccccctgcctgggtttgctgccctttatgctcctacctcaccaggtacaaggaacatgaagatggctatatgcggctgcagctggttcgctacgagagtgtagagctgacacagcaactgctgcggcaaccacaagagggatcgggcctgggaacgtcgctgaacgagagcagcctgcagggcattattctagaaacagtgccaggggagccaggacgtaaggaagaggaagaggagggcaagggtagcgaagggacagccctctcagcctctcaggacaaccccagttctgtcatccacgtggtgaatcagaccaatgcccaaggccagcaagagattgtctactatgtgctgtctgaagccccaggggagcctcccccagtccctgagccaccttcagggggcatcatggaaaagcttcaaggaatagctgaggagccagagatccagatggtttgaaggccgcagagccagaccatttcttccccaggtcctgaagtttgagccaggcaagtggcagtgcccctagtgggcagccgttgccaatggatgcctttaggagtggtgccgagagcagtgtggtccactctggcctgggtttgcatcattctgcagactctaaagacttcccttttctgccagactacattttgtggggagcctgaggactctggattctttgaggggatcctggatgtgtgtgttcttgttaaagaggctgttatcaggcttaaccataaccctcaagatctgcttgacagtgattaaatccttagctcacatccattcccatctttcgggctccttaggcccaaggatggcatgtgactggtccctgcaagggtcctttctttgtcaccagccaaggcattgataaccaagtagccattttcctcttaaggtttcctctacaaccccaaggactttcatgattatcctcagggacaggattggaggcattgagcgtgtttattaacaaattgtttttggtaataaaataaatgcttggactctta

SEQ ID NO: 29618 - DNA, 2240 bp, Homo sapiens
  misc_feature (3)..(3): n is a, c, g, or t
  misc_feature (7)..(7): n is a, c, g, or t
ccncgcntagcgggagatggtctgaggtgggagaagagctgaagagacctggagccgacagacgggtgaaggccatgccgcctcctgggaaagttccccgaaaggagaatctgtggctacagtgtgagtgggggtcctgctcctttgtgtgctcaaccatggaaaagttctttgagcatgtcactcagcacctgcagcagcacctgcatggctctggggaggaggaggaagaggaagaggaggatgacccacttgaggaagaattctcctgcttgtggcaggaatgtggcttttgttctctggacagttctgctgacctcatccgccatgtctacttccactgctaccacaccaagctgaaacagtgggggctgcaggccttgcaaagccaggctgaccttggcccctgcatcctggacttccagagccggaacgtcatccctgatatccctgaccacttcctgtgtctgtgggagcactgtgagaattccttcgacaatcctgagtggttttatcggcatgtggaagcacacagtctgtgctgtgaatacgaagcagtcggcaaggacaacccggtggtgctgtgtggctggaaaggctgtacctgcaccttcaaggaccgcagtaaacttcgagagcacctccgcagccatacccaggagaaagtggtagcctgccccacctgtgggggcatgtttgccaacaataccaagttcttagatcacatccgtcgccagacctcattggatcatgaggaaactgaggctcagagaggttaaatcacttacctgagatcacacagctaagcagcacttccagtgttctcactgttccaagagatttgccacagagcggctattgcgggaccacatgcgcaaccatgtgaatcactataagtgccctctgtgtgacatgacctgcccgctgccttcctccctccgcaaccacatgcgctttcgtcacagtgaggaccggccctttaaatgtgactgttgtgactacagctgcaagaatcttattgacctccagaagcacctggatacccacagcgaggagccagcctacaggtgtgattttgagaactgcaccttcagtgcccgatccctctgctctatcaagtcccattaccgcaaagtacatgaaggagactctgagccaaggtacaaatgtcatgtgtgtgacaaatgcttcacacggggcaacaacctcaccgtgcaccttcgcaagaagcaccagttcaagtggccctcagggcatccccgttttcggtacaaggaacatgaagatggctatatgcggctgcagctggttcgctacgagagtgtagagctgacacagcaactgctgcggcaaccacaagagggatcgggcctgggaacgtcgctgaacgagagcagcctgcagggcattattctagaaacagtgccaggggagccaggacgtaaggaagaggaagaggagggcaagggtagcgaagggacagccctctcagcctctcaggacaaccccagttctgtcatccacgtggtgaatcagaccaatgcccaaggccagcaagagattgtctactatgtgctgtctgaagccccaggggagcctcccccagtccctgagccaccttcagggggcatcatggaaaagcttcaaggaatagctgaggagccagagatccagatggtttgaaggccgcagagccagaccatttcttccccaggtcctgaagtttgagccaggcaagtggcagtgcccctagtgggcagccgttgccaatggatgcctttaggagtggtgccgagagcagtgtggtccactctggcctgggtttgcatcattctgcagactctaaagacttcccttttctgccagactacattttgtggggagcctgaggactctggattctttgaggggatcctggatgtgtgtgttcttgttaaagaggctgttatcaggcttaaccataaccctcaagatctgcttgacagtgattaaatccttagctcacatccattcccatctttcgggctccttaggcccaaggatggcatgtgactggtccctgcaagggtcctttctttgtcaccagccaaggcattgataaccaagtagccattttcctcttaaggtttcctctacaaccccaaggactttcatgattatcctcagggacaggattggaggcattgagcgtgtttattaacaaattgtttttggtaataaaataaatgcttggactctta

SEQ ID NO: 29619 - DNA, 1454 bp, Homo sapiens
  misc_feature (3)..(3): n is a, c, g, or t
  misc_feature (7)..(7): n is a, c, g, or t
ccncgcntagcgggagatggtctgaggtgggagaagagctgaagagacctggagccgacagacgggtgaaggccatgccgcctcctgggaaagttccccgaaaggagaatctgtggctacagtgtgagtgggggtcctgctcctttgtgtgctcaaccatggaaaagttctttgagcatgtcactcagcacctgcagcagcacctgcatggctctggggaggaggaggaagaggaagaggaggatgacccacttgaggaagaattctcctgcttgtggcaggaatgtggcttttgttctctggacagttctgctgacctcatccgccatgtctacttccactgctaccacaccaagctgaaacagtgggggctgcaggccttgcaaagccaggctgaccttggcccctgcatcctggacttccagagccggaacgtcatccctgatatccctgaccacttcctgtgtctgtgggagcactgtgagaattccttcgacaatcctgagtggttttatcggcatgtggaagcacacagtctgtgctgtgaatacgaagcagtcggcaaggacaacccggtggtgctgtgtggctggaaaggtagggctgcttcttaacttgtggcttctggaggaaacgctggggttcctgaagagctgggacagaaagggataggggtcctacaggggcaaggttgactgccggctggagagactcaggggtaccagttctgtcatccacgtggtgaatcagaccaatgcccaaggccagcaagagattgtctactatgtgctgtctgaagccccaggggagcctcccccagtccctgagccaccttcagggggcatcatggaaaagcttcaaggaatagctgaggagccagagatccagatggtttgaaggccgcagagccagaccatttcttccccaggtcctgaagtttgagccaggcaagtggcagtgcccctagtgggcagccgttgccaatggatgcctttaggagtggtgccgagagcagtgtggtccactctggcctgggtttgcatcattctgcagactctaaagacttcccttttctgccagactacattttgtggggagcctgaggactctggattctttgaggggatcctggatgtgtgtgttcttgttaaagaggctgttatcaggcttaaccataaccctcaagatctgcttgacagtgattaaatccttagctcacatccattcccatctttcgggctccttaggcccaaggatggcatgtgactggtccctgcaagggtcctttctttgtcaccagccaaggcattgataaccaagtagccattttcctcttaaggtttcctctacaaccccaaggactttcatgattatcctcagggacaggattggaggcattgagcgtgtttattaacaaattgtttttggtaataaaataaatgcttggactctta

SEQ ID NO: 29620 - DNA, 381 bp, Homo sapiens
agtaattagtaaatttggccatgtacatttaggaaaagcacacgtcgcaatatttgtctttttctctcagtatcttcttgaatttatttatacacagttctaatttggtcatttagtgactgattgactttgtctttataagtatcggcaaaatcttttggcctctctgttcaaatttttattatctgtagtctgagcaatgtgctttcaacctctctatcttccattccaatatgtgtacttcgccctgggttatcttcttaaacatgaagctaattgtgtcactgcatgcttgtaaaatattcagagctccttgttgcctacacataatattcaaactctggctttttcattagcttgtcccatatcacctgtggagcc

SEQ ID NO: 29621 - DNA, 221 bp, Homo sapiens
  misc_feature (20)..(20): n is a, c, g, or t
cggcacgagggttaccattntgatgttggagcggccgcaatcgttgcacttgtaaggtttttctccagtatgaacactatggtgccatgcaaggtattgcttctgatgaaagactttgccacatacatcacatttatactgtttctctcctgaatgggttacgtgatgtctccttaaacgtgagctatgattaaaggctttgccacactcattacattgga

SEQ ID NO: 29622 - DNA, 357 bp, Homo sapiens
tgtcacaaaccttacgtttgtatggtttttctccagtatgaattctcctgtgtgtttcaagttgtgatcctcaactctaaactttgttgcattcttcacatttgtaatgtttctgtacagtatgaagtctatgatgacactgaagggatgacttctgattgaaggtcttggaacactcattacacttgtaaggtttttctccagtatgaacactatggtgccatgcaaggtattgcttctgatgaaagactttgccacatacatcacatttatactgtttctctcctgaatgggttacgtgatgtctccttaaacgtgagctatgattaaaggctttgccacactcattacattgga

SEQ ID NO: 29623 - DNA, 1076 bp, Homo sapiens
agttattcttgcttaatcattttaaaattatttctggatttacctactcaccatatgagctggggtttctgacctccctcctgcacatcacgccctccttgtctgttgctttttctagctctgtttccctgcatcttgggttgaggttagcagactggctacccctttcccagagctctgttcccctttctttgcctctgaaaggaggtttgctgtccttaccgtagcggacaccgtttgttattaaataatacctctggacacatctccttgttgtaaatcaataagcaaatgcaatacagggaaagacatacggattggagagttgtacggagctttgcacaagcagagcccagaagctgttcgttcatttcacgcgaccagaaaaaattcctgatggtgctatgaccccggtgcccggttggcacttcctggttttctgtttctgctattctgttacctgcttggttagctttgcaggctcctcagagaacacagaaacagctgaaaccagggtccgagctcaggaaacctggactacagcgcagcagggtaaacctgacaaataaacgcgacggggaactccgtcccaagctgctgatctatggaatgaagcaacacctcatcaagagaagcaacctgggcaaaccaggcctggtttaactgcactttctcacgtttgatcattttctcaagagatacgtgcgtggtcctctgcaattcagaatgaaatctgaacttctggaaaaactctcctagagggggtttgaggacaagagacaagggaaatttggacacagacatacaaagaggagagaatgctatatgaagacacagagacagacagacccagagaacagatggccatgtgaccacagaggctgtgattggcattgcatagctacaagccaggaaactctgaggatttccagaaacctccagaagttagtagagaggtatggaatagattctccccatgcctgagctgccaagaaggaactaagcctgctgataccttgattttggacatctggcctcctgaactgtgagagaataaatttctgttgtgttaagcc

SEQ ID NO: 29624 - DNA, 935 bp, Homo sapiens
agttattcttgcttaatcattttaaaattatttctggatttacctactcaccatatgagctggggtttctgacctccctcctgcacatcacgccctccttgtctgttgctttttctagctctgtttccctgcatcttgggttgaggttagcagactggctacccctttcccagagctctgttcccctttctttgcctctgaaaggaggtttgctgtccttaccgtagcggacaccgtttgttattaaataatacctctggacacatctccttgttgtaaatcaataagcaaatgcaatacagggaaagacatacggattggagagttgtacggagctttgcacaagcagagcccagaagctgttcgttcatttcacgcgaccagaaaaaattcctgatggtgctatgaccccggtgcccggttggcacttcctggttttctgtttctgctattctgttacctgcttggttagctttgcaggctcctcagagaacacagaaacagctgaaaccagggtccgagctcaggaaacctggactacagcgcagcagggtaaacctgacaaataaacgcgacggggaactccgtcccaagctgctgatctgtgagtagaaagaaaatgcagcttagaaaacttgatcgctaatgaaagaatcggccaccctagctttctcagacctgggaatctgggcctggggggtggttccagcaaagaggtatcacattcccacatttcccccaactttaactggtcaaatccactgcgcgaagggcaagcccaagggacctaccactcaattttcagcgctccagctggggatgcagccttcccaacccgaaaccaatcctcgccccagaaggggaaaaataatctccccagagcaagtccgatgagagaagcatcttttattctcgacccgtcaggtgcatttccc

SEQ ID NO: 29625 - DNA, 811 bp, Homo sapiens
agccgggctcctggctacgcggcgacggctgggtgactgcgccccacagtgcgggccagggcggggcgtcccggcagggaggcgaccgtcccctgaggccctcagcccctgccgcggcagcgcctaatgaagcgcggaaaggagagcccagatggcagcgacgggggccgagagagcaggaatttgttaaaagacgatgcgaggggagagcctgctttccgagtgagggccagcgctggggagcagagacggtggcttctgtccctgccctcctcgttatgaaccaaaaataaaattctaagccctgcagccaacggatggaccctcccctccgcctgtggccttctaagttatcttgaaaaactagttcaggccttgatgggaagcggaagtcaaacatggcctcacaaacatccgcacggagaccctaagactaatagaggactctgataagaaacatttgcggtgtattcccggcttcatctgcatgataacaccttggtctccacaactccttcatgcaacccggacattcccttctactgagtccaggtctttagatgataactctcaaccagttgccaatcagaaaacctttaaatgtacctatgacccggacgcctccacttcacattttacctcctaaagagccaacctacatcttacgtattgattgatgtctcatgtctccctcaaatgtataaaaccaagatgtttcctggccaccctgggcacatgtcatcagaacctcctgaggttgtgtcaatgcacgtccttaaccttggcaaataaacttcctaaattgagacca

SEQ ID NO: 29626 - DNA, 430 bp, Homo sapiens
aaacaaatgtccagtggtaagacaagctgtacagctgctaggacagaagacacaaccctggtgacaggctggaatctatctactttgccactttctttatttgcgaactgggttagaagtctgggcgctcagcctggcctcctgacttgtttctcttcatggggcatcatacaggattttgagtttgtctttattaaaatcttagaggaagcctacctgttatctgaatcagaggtgtagtgaagaacagccctagattttcctgtgtagacttacctatgtgactttatgcagagagtgacactttgcccttctgaccctcagtgacctcgactgtaaatgagtgtcatccaccctgcctgccttgcagaatgttctcagagtctgataaattgatggaggtgaaaacatcttgcaaactgcatagaac

SEQ ID NO: 29627 - DNA, 757 bp, Homo sapiens
  misc_feature (310)..(310): n is a, c, g, or t
atcgggatggcatatttgatttttagtattagatttgatatttaatattttaaaaattaggtggcaaaggagaaactaaaaaagtaggaaaggggttcctgtgccttcagtgtgttaaaaagccagctaaaggggagtaaggggaagcaatggtgagatgccaagttgttcaccctgatatgacttgggcagggtctgaggtatcaaccccagacaacccagggcctgggacttattgcttctgttgggaaattgacagttcacactggcctttctcaggaatgttgggcactgccacttgactaattcntgtggaccgggggcaccttttattagccttcatcagcctgtttccccagctgtaaaatgctgaaagtgaaacctagcttaaatggctttcttgaggaatagaaaagaaaccacgtataaactatctggtacatagtaggtgctcagcaaatgtccattccctttctctgttgtacattcctcttttgaagttcagtgctttaccaaggcatttcctctctgctgtgacttgctttaatccaccatcctgttcaccggatgttcggttgagggagaagaatgcaaggcactgaggaaaattctggcataaaaacctttgtttacaaataacttaggaacctgctagaggaaaacttgtatgacttgagatcacattatttaactgttcatatggtatttgcattttttccagttctatttagtagagaaaagtaacttagtccataaa

SEQ ID NO: 29628 - DNA, 350 bp, Homo sapiens
aggctcagcctggagatgtgtgaggcctccgacctggagcagcacccgcccctaaagaccaggcacaaatcccagcacatggagggatccagacaaatacacaagagatgaccacagcaggagctttactgagcacagagcgaggccgcacaccactcagctcctgcccctccacctgcccttctctccccacctgcccctgccccagcacagcagatcctcagaatccaaaaagagaacctaacttccatgttttattaatggcttataatattttatcacatcttcagaaaacactatgcagaagataactgtagagcaagacatctatttagggtgagtgagtcaca

SEQ ID NO: 29629 - DNA, 561 bp, Homo sapiens
gactgagtagcttccccgccactcctctaaaatccctcctcaaaaaccccaagttaaaaaaaaaaaagatctattcttgtagattttttttgtgtgggtctatgtttcattcatctgctttcaggctggatttataacaagcagaacttttaaaacgcttcaggaaaaagaggaccttagaactgaaggagcaagattccaacatcacactgtttttgttagctgtgtgtgtgtgtttcctgtgtatccaaaagacagaggagatgaaaaagcaaaagaaaagaaacgaggaatcagactggaaagaaggtttctccaggacgtcacctgtatgaggtacacagtgtgatgacacactctgtgcttttcctacttgtgtccacgtgagtgtctggagctgcccttcaaggagagcaatagatgaatgattctgccttcccgctgagagggatgtgggtcctgcggatggtcggggtgaagcttcctctcctttctgctgacagcacttcctcattaaatgcagagatctgcaaaaagggaaaataaaaacacaagaagaaa

SEQ ID NO: 29630 - DNA, 849 bp, Homo sapiens
tgtcttttggctgtgcttaaaaatttccaacagatttgctacacatcttaggataaatatgtttcctgtgaattgtgatgatttcttacagtacatttgcaagcatgtgtatgcatctgcaggaaacatagcctggctctgtgaaggaatactgctgtgaccgcaaaactgtttctgtagaattttctccggtgtggtcatcctgccttcagaggtttctccaggacgtcacctgtatgaggtacacagtgtgatgacacactctgtgcttttcctacttgtgtccacggctcaagcctggaagaagccttaggacgtgggggaaatgtctaacgtggagtccacctgctgagcaggaccgggtgtgaaggaagaagctttgttctgattcctcatggcccagccacccctcgcctgagctgagcctggccacagggcccgcctgcaggaagggctggcccatggcttcacactgggctcaggctgcgctaagagccccgggtgaggacctccaagcccaggaagcctcagttggccaaagtgctagatgcgtgtggtctgctttcatccccgcttccctcagagcttgcattttccaaattcaagagaggctccaccttcaagaagaccggcctgtccctgttatttatgtgtccccctaccatatctccctttgttctgcagagcgggcatactggccagcagctgtctccggcatgcttgggttcacaaaagtcagcattgggtagcttcggggggaaagatctttcggagcaataatgtaggtgaggtagattttttggtctcacaaggaatatcctttgggtttaaaaaaaaaaataaaacaca

SEQ ID NO: 29631 - DNA, 430 bp, Homo sapiens
cccggttcctcgagaggtcgtcgccttgcagccctggctgatttcgaaggctaaaggcgattcttcaacacaaatggcgtcttgctctgtcacccaggctggagtgcagtggtgcgatctcggctcactgcaacctctgcccttctggttcaagcaattctccctgcctcagcctgaggtttctccaggacgtcacctgtatgaggtacacagtgtgatgacacactctgtgcttttcctacttgtgtccacgtgagtgtctggagctgcccttcaaggagagcaatagatgaatgattctgccttcccgctgagagggatgtgggtcctgcggatggtcggggtgaagcttcctctcctttctgctgacagcacttcctcattaaatgcagagatctgcaaaaagggaaaataaaaacacaagaagaaa

SEQ ID NO: 29632 - DNA, 427 bp, Homo sapiens
aagtgagggtaaaaagtctctcccttgtaaggttgttagagggctcggcaaggagatggatgtggaggggcctggggtgtggaacatagcatacacttggtggggcaagctatcagggttatttattacttaaatcattttaattgtgggtcataaaatttctgtttttccagaggtttctccaggacgtcacctgtatgaggtacacagtgtgatgacacactctgtgcttttcctacttgtgtccacgtgagtgtctggagctgcccttcaaggagagcaatagatgaatgattctgccttcccgctgagagggatgtgggtcctgcggatggtcggggtgaagcttcctctcctttctgctgacagcacttcctcattaaatgcagagatctgcaaaaagggaaaataaaaacacaagaagaaa

SEQ ID NO: 29633 - DNA, 526 bp, Homo sapiens
aagtgagggtaaaaagtctctcccttgtaaggttgttagagggctcggcaaggagatggatgtggaggggcctggggtgtggaacatagcatacacttggtggggcaagctatcagggttatttattacttaaatcattttaattgtgggtcataaaatttctgtttttccagaggtttctccaggacgtcacctgtatgaggtacacagtgtgatgacacactctgtgcttttcctacttgtgtccacgtgagtgtctggagctgcccttcaaggagagcaatagatgaatgattctgccttcccgctgagagggatgtgggtcctgcggatggtcggggtgaagcttcctctcctttctgctgacagcacttcctcattaaatgcagagattttttttttgctctttaaattgtcatccattatattcatcaacacagagagatggaacatttggcaaaattattttaagtagcactccaacctgtgatcgtaatttcaaatcaaggaatttgctgagcagctg

SEQ ID NO: 29634 - DNA, 433 bp, Homo sapiens
gactgagtagcttccccgccactcctctaaaatccctcctcaaaaaccccaagttaaaaaaaaaaaagatctattcttgtagattttttttgtgtgggtctatgtttcattcatctgctttcaggctggatttataacaagcagaacttttaaaacggtatgattttaaaataaaattaaaaaaaaaacacgctgagatctttccatagctttggcttctgggagttgaaagcgcagcttcaggaaaaagaggaccttagaactgaaggagcaagattccaacatcacactgtttttgttagctgtgtgtgtgtgtttcctgtgtatccaaaagacagaggagatgaaaaagcaaaagaaaagaaacgaggaatcagactggaaagagtatgagtttgtacttatgaaataaaacttttatctctctacacag

SEQ ID NO: 29635 - DNA, 400 bp, Homo sapiens
tcatccaggctagagtgcccaagagagaggaacaacatgtgtgatagctcagaggagagacagaaaggggagtggctaagagcatggaagagtacgaggttctagatccttctctgggtgtcagtttccactccttagccgtgagccactctcttgagcaagtctggcagatgggaagctggaaggtcaaggctggggcatccatcctacccctgcctggatatggggaggcaggagtgccagagcagccccctctgcgtctggggggcccagcaggaccccgtccaggtggagattgggaagggtgaaggcatccagaggtgcttccctggactcctgcctcgacaggaaaggaaatggcagggtgggggtggcagaagtctgtttcccgcccctgccc

SEQ ID NO: 29636 - DNA, 406 bp, Homo sapiens
cttgaccttttaatgataactaattatgacataaactattaaagggtgaggaaaattgtttcactttttgacagagacataggtataatcacacttacgtgctggaaatttttttttataaaagcatctccaaatataggtagtctcaaagtttaatactgtaagtggaatagaattttaatttatgtgaaagacatatcttcaactattttctaattttgaatgttcccaccgtgcttgaacaccattttatacagtcataattctgtgtttatgtcagaattatgtctttactatcaaaaacaacctctcaggttgactgttttcctgaattacaatgcatcaagttctgtaaccatttcaaataaatgtattaattattaatgtgataaatgcattagatttt

SEQ ID NO: 29637 - DNA, 352 bp, Homo sapiens
tgtgccattttgggattgctgaaacaagcacaaaccctgtattttggtagctgattgaaacccaaaccaggccccacactttgacaaataacctgccaagtctccacatttgctgagaatcacattagcctaggaaatcacggattgcttatattttacatttcaaatgtgtagagatcttggcattgatctgagggtatgccatcaccctggggattcgtctcagcagcagggctggtattcactgcaaggaaccacgctcggtactcattggatgcctatatactgtgtagtatgtcctttagtttgtttgagaccagttggggtcctttatttgcccgtcagcttagta

SEQ ID NO: 29638 - DNA, 465 bp, Homo sapiens
taaattatgctaagccagacatgtaaacttatcccctgacaatgattgattttggaatggggtgtgtgacccaatcggggccagtgagatgggagggagggtttgctgggaagcttctggaaaagttatcttgctaagaaagagatacataaaataggccaggcatggtggctcacgcctataattccagcactttgggaagccgaggtgggtggatcacttgaggtcaggagttcaagaacagcctggccaatatggtgaaaccccatctctactaaaaatacaaaaattagccaggcatggtggtgtgcacttgtagtcccagtttctcaggaggctaaggcaggaggattgcttgagcccgagaggaggaggttgtagtgagccgagagcatgccactgcattccagcctgggcaatgggagtgaaccctgtctcaaaaaaaaaaaaaaaaaaaaaaaaaaa

SEQ ID NO: 29639 - DNA, 955 bp, Homo sapiens
gaaactccgtctcaaaaaaaaaaaaaaaatggcctggccatcctgctatatttgtctcctaaagactatttcaaacttcttaactcttctcaaatctctaaaatgattccctttccctgtcttctgtctcaagtaacctccctttgaccattgaaatcattgcataatctgtctgtacccattgcctacatttcctagcatctcacgctctccttaactcacatctgactagtgtatgtggcatcaaacacagctattgccaagatcacttatggcttctgtcaccgctgccctgaggcccaggccagagggcgcttgccctagattccacactgtggatagcccattctagcccctctctagctaggctgtcttcatagggcaggtgccaagacagtaggctcagtagagcccatggctctgcttctaatcatcatgcctggaatgtcttgcttaaatagaaccaaggctattggttatattggaaaagaccagcagggctcttcccaacatccattcaactggggagtgaccaagggaggtaggaggcactatttgcataagatatgaatggtgcacaatggggaagccaagagtttccacatatatccattcaaagtacctagtgaggtgggaatgggtctgggtaggaataggtcaagcttcagtctagtcgccagagatttgtgttcagaattctaaatttaaacaggactcttcaggtcatttttttccctttggcttctttcaaaattgtctttgatttactgaagttgaatattatattgtaaccgaaaatcaagttagttgcttaccacatgtagagtccaattaacaagagtggggtctggtacaagaaaagtggatttattccaaagctagcttggggaagggacacaaaatttcttgcttttaactgtgccgtttcacctttggagctgaagtggcaaaaaaa

SEQ ID NO: 29640 - DNA, 196 bp, Homo sapiens
ttttgagccttgatttaatgaactttgtatttattgcacaatcaacagagcaacaatcggcctgtttgtgtctcttgagtttgttagggcattttgtatagacgtttccaattgtgatgtacgggaatgtgtcagcatttcccttggtgatttcttccagagccgcaacatttagaaaaaattttacttttctaaa

SEQ ID NO: 29641 - DNA, 481 bp, Homo sapiens
ttcaggcaggaagggtcagttggaaagaaacctttgacgtgagcctcttgatgtctccatggcctctgtgcctccatggctggcccaggccttctgtgcttatgccccaggaagcatgtggccagtgaatgaatgcaccccaggatgcctccttcttttccatgggagcccagaagatgccacttggagctcagcgtcctggtgtctagaaaagtttctggtgccagcagtgctgctccatttggtacagcaggtgccaagcctctcaatggaggccctttggacttctatgaaaaattattaatgagcttccagactttcatatctggcatttattctccaatggatacctgaggaaaaacctttttcttcatcaaatagaacttgaggagaaatcaaaaagacaacttcaggaggcaacagatgggaagtgcctgcctttaaacaaaacaaaacataaacaggctttatgcctttaaaa

SEQ ID NO: 29642 - DNA, 163 bp, Homo sapiens
acttatttggaataatgaatagacagacaatgtcaataactgagatatgaaatgccagaaagaaaggttgggaaagaagacgattagctcaactatggacatacagaatttaaggcctactatgcatcatgcactgagctagggagctaggcttttactgatg

SEQ ID NO: 29643 - DNA, 901 bp, Homo sapiens
gttcctgctgggtgccgaggtagcgaggtcaggggtcaagagtggaacaccctcactggcccgggccggcgcgggagggctgtgtgatggcctcggagcgcccggagccggaggtggaagaagctgggcaggtgttcctgttaatgaaaaaggattatcgaatctcccgaaatgttcgcctggcttggttcctcagtcatctgcaccaaactgtgcaggccacaccccaggagatgctggtgaggcttagacacacgaaaggtgtgaggggccagcccagaaggatctgttttttaggagagtgctagaaacagacagggtgggagactaactcttaagtctggttagggcaagggactgcctacaagatgatggaaataaaaaataatttttccagagagtgagaggaagagtatacggttagattgagggaggtagagccaatgatgtgtcatttgggatatagaaggcaggtcctgggaagaaagggatacttcgctgatcctttccttttctttccatcctaattttcagcttcagtctgaacaggaattggaagtcctcagtgtcctgccccctgggtggcagccagatgaaccagtggtcccaaggccattcctcctggtaccttccacccgggtcaccttcctggcttggcagtatcggtttgtcattgagttggaccttagcccatctactggcattgtggatgattccacaggggagatcttgtttgatgaagttttccatgccctgtcccgctgcttaggcgggctgcttcggcccttccgagtgcctggatcttgcatcgacttccagcctgagatctatgtaactatccaggcctactcctccatcattggactgcagtcccaccaggtattgcatcatctctccaagt

SEQ ID NO: 29644 - DNA, 600 bp, Homo sapiens
gttcctgctgggtgccgaggtagcgaggtcaggggtcaagagtggaacaccctcactggcccgggccggcgcgggagggctgtgtgatggcctcggagcgcccggagccggaggtggaagaagctgggcaggtgttcctgttaatgaaaaaggattatcgaatctcccgaaatgttcgcctggcttggttcctcagtcatctgcaccaaactgtgcaggccacaccccaggagatgctgtctgaacaggaattggaagtcctcagtgtcctgccccctgggtggcagccagatgaaccagtggtcccaaggccattcctcctggtaccttccacccgggtcaccttcctggcttggcagtatcggtttgtcattgagttggaccttagcccatctactggcattgtggatgattccacaggggagatcttgtttgatgaagttttccatgccctgtcccgctgcttaggcgggctgcttcggcccttccgagtgcctggatcttgcatcgacttccagcctgagatctatgtaactatccaggcctactcctccatcattggactgcagtcccaccaggtattgcatcatctctccaagt

SEQ ID NO: 29645 - DNA, 1534 bp, Homo sapiens
tttctttagaagttaaagacttttggaggaaaaacatttcagattatgtgttatagcttatagaacaaattaagtccttagctgagaatacttgtcaaaggaggtaaataaatattacataattattcctaatacaaattactcagcgaacatttgtttctatagtaaatatgctataaatagaattgttcactttatgattttttttctttcttcattttagcatttatgacattaacagagaacaggactatgtcaagaattctgagggtatacttggtgaaaatgaattaagaccaccctcccagctacattctctcttagagaagatcgagacagggtccctatcagaaaagagtgggtattaaactaagtgctataagtcataactaatgaatccagaatagaatgattaaaatgtttttagttttaatttagatcatgtaaaacaaaaagactttaaaggaagtctgatgtatacatttttctaggtcactaattttgtgccctatgaaaactttatgtaccccatagtcaagtacattttttcctatgattttttaaattttataattttagccaaatagttatagtttttatgtttaggtctgtgattcattttgagttaaattttatggtttaaggtagaggtttgaggttcatgtttttttcctccattttagttgttctgtagcagcatttattgcaaagatattctttctcaatggaattatactggcaatattgaaaatctgttatctggactctattctgttccattgatctatatgcattttctttgtatcattaccaccttgtcttgactactttagctttgtagtaattctcaaaatcaggtagtgagtccttcagctttgttctttttcaaaattgttttggcttatatctttcttatataaattttagaatcagatcatcagtttctgcaaactgagattgtgttgaatctgtagatcaattttgtgtcttaacatcccccagcaaagttagaaagccaggcagtaatatcagagggcacaagcccagattgaagctggaagacatagtgctccagaaaggtccttccaaaaaaaagaaaagaagctgctcaaaacagacaaaatctttgatctatctttatccagaggatattgttagttctctagaatttcaagctgaaataatgattggtaactgaaaattaagctattttaaattcagaaaagcaaaacacggtataaggaaagaacttgactacacagtatggtcatgcctgtaattccagcactttgggaggccgaggtatgcagatcacttgaggccaggagttcgagaccaacctggctaacatggtgaaatcccatctctactaaaaatacaaaaattagccgggcatgttgctgggcacttgtaatcccagctacacgggaggccgaggcaagagagttgcttgaacccgggaggtggaggttgcagtgaaccagaatcaagccacttacgctccagcctgggccacggagcaagactccgtctc

SEQ ID NO: 29646 - DNA, 506 bp, Homo sapiens
tccaaaaaaaagaaaagaagctgctcaaaacagacaaaatctttgatctatctttatccagaggatattgttagttctctagaatttcaagctgaaataatgattggtaactgaaaattaagctattttaaattcagaaaagcaaaacacggtataaggaaagaacttgactacacagtatggctcagcaatgattaatacatacagttaagtagtgaaacctaggcctagcacggtggctcatgcctgtaattccagcactttgggaggccgaggtatgcagatcacttgaggccaggagttcgagaccaacctggctaacatggtgaaatcccatctctactaaaaatacaaaaattagccgggcatgttgctgggcacttgtaatcccagctacacgggaggccgaggcaagagagttgcttgaacccgggaggtggaggttgcagtgaaccagaatcaagccacttacgctccagcctgggccacggagcaagactccgtct

SEQ ID NO: 29647 - DNA, 1095 bp, Homo sapiens
  misc_feature (1004)..(1004): n is a, c, g, or t
atggagcccctgttcccagcctccacgcccagctggaacgcctcctccccgggggctgcctctggaggcggtgacaacaggacgctggtggggccggcgccctcggcaggggcccgggcggtgctggtgcccgtgctgtacctgctggtgtgtgcggccgggctgggcgggaacacgctggtcatctacgtggtgctgcgcttcgccaagatgaagaccgtcaccaacatctacattctcaacctggcagtggccgacgtcctgtacatgctggggctgcctttcctggccacgcagaacgccgcgtccttctggcccttcggccccgtcctgtgccgcctggtcatgacgctggacggcgtcaaccagttcaccagtgtcttctgcctgacagtcatgagcgtggaccgctacctggcagtggtgcacccgctgagctcggcccgctggcgccgcccgcgtgtggccaagctggcgagcgccgcggcctgggtcctgtctctgtgcatgtcgctgccgctcctggtgttcgcggacgtgcaggagggcggtacctgcaacgccagctggccggagcccgtggggctgtggggcgccgtcttcatcatctacacggccgtgctgggcttcttcgcgccgctgctggtcatctgcctgtgctacctgctcatcgtggtgaaggtgagggcggcgggcgtgcgcgtgggctgcgtgcggcggcgctcggagcggaaggtgacgcgcatggtgttggtggtggtgctggtgtttgcgggatgttggctgcccttcttcaccgtcaacatcgtcaacctggccgtggcgctgccccaggagcccgcctccgccggcctctacttcttcgtggtcatcctctcctacgccaacagctgtgccaaccccgtcctctacggcttcctctctgacaacttccgccagagcttccagaaggttctgtgcctccgcaagggctctggtgccaaggacgctgacgccacggagcngcgtccagacaggatccggcagcagcaggaggccacgccgcccgcgcaccgcgccgcagccaacgggcttatgcagaccagcaagctgtga

SEQ ID NO: 29648 - DNA, 426 bp, Homo sapiens
tttttttttcagcagcattcatgcaacctctgcctcctgggttcaaatgattcttgtacctcagcctcaagaatagctgggattacagttgcatgccaccatatctggctaatttttttgtatttttagcagagatggggtattgtcatgttggtcaggctggtcttggactcctggcctcaagtgatccgcctgtctcagcctcccaaagtgctaggattacaagcatgagccgctgcacccagcctagatctctgtattcatcagaactaaggcaattaaaggaattgtcttattgtgggggctggcaaatctgaatctgcagaactggccagcaagctaaagacccagggaagagttgatgttgcagttcaagtctgaacaagtctgaaggcagtctagatgcagaattattgcttccttggt

SEQ ID NO: 29649 - DNA, 400 bp, Homo sapiens
ttaaaggattgtgccattttggttttaaccacttcctcaatttggtgtgccttctttatatctgtgctcctgggttatgtaccccttttttttccccttattgaaggtgcttattgaagattaatcaagatcaacagtcccctttctttttagagtcccaactatagaattctgcttgcctcctgaagtctaggataggtgtctgggtgaataacaaagtagtgctgtaaggttggctaggcaggtagtatcctaacagtttggcaaatgaggaaactaagacttggatttggctgggtgcagtggctcgcacctataatcccatgctttgggaggatgaggtgggaggattgcttgaggacacaagttcaagaccagcatgggtaatgtagcaagagtc

SEQ ID NO: 29650 - DNA, 355 bp, Homo sapiens
gcggccgcctactactactaaattcgcggccgcgtcgcccttttttttccccttattgaaggtgcttattgaagattaatcaagatcaacagtcccctttctttttagagtcccaactatagaattctgcttgcctcctgaagtctaggataggtgtctgggtgaataacaaagtagtgctgtaaggttggctaggcaggtagtatcctaacagtttggcaaatgaggaaactaagacttggatttggctgggtgcagtggctcgcacctataatcccatgctttgggaggatgaggtgggaggattgcttgaggacacaagttcaagaccagcatgggtaatgtagcaagagtc

SEQ ID NO: 29651 - DNA, 206 bp, Homo sapiens
ggttgagaaaccctagtctaacctctggccccattaaaatgtgggctccatgagggcaggaactacatctgtctcccattccactgttcctcagtttgggacatcgtagggtgctcaaaatatttgttgtcaccaaataccagccaaaggaagcaaacaggcaaatccaaaagtgggacactctataggacacactcccttctttt

SEQ ID NO: 29652 - DNA, 268 bp, Homo sapiens
  misc_feature (243)..(243): n is a, c, g, or t
  misc_feature (248)..(249): n is a, c, g, or t
  misc_feature (252)..(252): n is a, c, g, or t
tgaacctgaggcccaggcctttcatagagtgatctataacagaaatcttcatggcataggaccctaataaaaggcctacattgatagaaggcaaattatttttaatatcccgtatgcattttctgaagggcagaagtgtattacaggtggtttatattctaaaaggaacacaaaaaaggaaactgtggtgggaagtgtgttcatttaaaccataaacatactttctatatttcaagtcgaccngccgnnaanttagtagtagtagcta

SEQ ID NO: 29653 - DNA, 313 bp, Homo sapiens
gtgtgtaaccttgccctggagcagagctagagaactcactgcaggcttcagtgaggaaatcaaacctgtggctgtcatcagggcaacttgtttgccaacaagcaagggtttggtgggtaaaacgatcccttcctcctggagttccttccttccccaaatatactttagatgtgatgggtgtgagtgaaacccaaactcaagtttcagctccttcagggagccactaattgcctttctcatggtttcatccaataaagttgatctgagaaaagtgcctttcacattgaagccagccctctgtgtgctgatggac

SEQ ID NO: 29654 - DNA, 375 bp, Homo sapiens
gtgaaccacagtgccatgcctctcctcagtactttctcatggtggattatgaggtttactggcctggctggtgggatcgggcattctcccggccccagtgtgaatgctgtctgcggtgccctagaatccttttcggtggttcgttccctgacctcagtcatttccttgcctgcaggggctgattaggccctctgcctcctactcgaaggggatcctcagcagatcttggtggctttcatctctccagtcctctgttccgcacactctgactgcctcggcctcccttggctctcagctccatgtcttcaattcgggaggctgccaggcaccacccgcgtcccccctccatgtgctcagcctggccactccccaggt

SEQ ID NO: 29655 - DNA, 424 bp, Homo sapiens
tggatcatttgaggctaggagtttgagaccatcctggccaacatggtgaaacccccgtctctactaaaaattcagaaaattagctgggcatgttggcatgcgactgtaagcccagttactggggaggttgaggcataagcattgcttgaatctgggaggcagagatttcagtgagccaagatcgcaccactgcactccagtctaggcaacagagcgagactctgtctcaaaaaaaaaaagaaaaaaatataaaatttttgatatactattgtgcttagaaaggaagacatatttataatttatttcatggtgggtgctgtagctcacacctataatcccagcactttgggaggctgacatgggcacatcgcttgagcccaggagttcgagatcaggctaagcaacatggcacgactctgtctct

SEQ ID NO: 29656 - DNA, 226 bp, Homo sapiens
  misc_feature (14)..(14): n is a, c, g, or t
attcgcgggcgcgncgaccacaggaaccgctggtagggaagggctcttggtgctgtgagcatctgtgatttttgagacctgaggacgtggctcctgtgtccctcaataccacagtcctacccagggaacattcactaaggacacattaggagcgagtgctcagttagacactgggagtgtaacgacgaataaaacacttccttctctcaagaaactcataggtaag

SEQ ID NO: 29657 - DNA, 370 bp, Homo sapiens
tctccttgatggacagaaaagaagaaccacatcccacaataaaacccactgggctctgagaaaaggtgattctgatagaaaataacaggtatgctctaaattcaaatggggctatagttgagcagattcactccagtcccggaattaacatcacgaccaaatgaaaggagccacgtcctcaggtctcaaaaatcacagatgctcacagcaccaagagcccttccctaccagcggctcctgtgtccctcaataccacagtcctacccagggaacattcactaaggacacattaggagcgagtgctcagttagacactgggagtgtaacgacgaataaaacacttccttctctcaagaaactcataggtaag

SEQ ID NO: 29658 - DNA, 446 bp, Homo sapiens
ttttggcggccttgtccccattctgtgttgtgcattcccaaggccacaagatactgccaagccagaatgattcaatttttaccgttatctacctctcactcctagtttattactttattgagacgcacagcactagagaattcttgctatgtgaatgatttcttttggccaagtgcggtgtctcatgcttataatcccagcgccatagaggatgaagtggtaggataacttgaggccaggagttcgagatcggcctgggtaacatagcaagacccgtttctaccagaaattaaaaaaataaataaataaatagccagcggggtggtgcgtgcctgtagccccagccactcaggagaagtgggaggattgcttgagcccatgagtacgaggctgcattgagctacaatcttgctactacactccaacctgggcaacagacctctcag

SEQ ID NO: 29659 - DNA, 447 bp, Homo sapiens
atatacagtccacccacatttagtgtgggtcatggctacagattctgacaaatccatttctgtgtgccaagttccctaaaaatgggaatgattctttacacagtgttcacaggttgaattgttttctcattaacaatatctcaggcacatctttctacatcagtacgtatagatctacctcattctttaatgactgcaaagtgttacagtatcatcatttctttaaccagtatgcaactcttggccatttaggttgttctaatttttcactcttagaatggatgctttggtaaacatcctttcacatataactttatgtgagtatttctgtaggagagatttttagaagtgggatcgttatgtgaaagtatagcctcatttttaattttgatagagtctgcccaattaacttcctaaagtatttttctattttattctcccaccaaa

SEQ ID NO: 29660 - DNA, 322 bp, Homo sapiens
gtttcttcatgctcctttatactccgtccctctcatcctttcctgcctgcctgcctctatccccaggtaaccactacagattagtctgcatttctagaatttcatagaaatggagtcttacagtatatactcctgtttgtctggtttcttccactctgcataaatccatgttgtgagtaccaacggttcattcgtttttgttgctgagtaatactccattgtatggatgtaccacatttgtttatccattcacctgctgacggacatttggattgtttccagctttgggcaatcacaaataaagctgacttgaacattcacg

SEQ ID NO: 29661 - DNA, 360 bp, Homo sapiens
tggagacagagtctcgctctgtcgcccaggctggagggcagtggtgcaatctcagctcactgcaagctccgcctcccaggttcacaccattctcctgcctcagcctcctaagtagctgggactacaggcacccgccaccatgcccggctaattttgtattttttgtagagatgggtttcaccgtgttagacaggacggtcttgatctcctgaccttgtgatcagcccaccttggcctcccaaactgctgggattacaggcgtgagccaacacatccggccctaaaattactcatcttctaactaggacaacatccattatctcatttcaggctccaaccaactgcgtgcagcacagttcc

SEQ ID NO: 29662 - DNA, 562 bp, Homo sapiens
aatccttgcctgtcgacttttttttttaatgggaatatatctaacaatacatccttagaatatgaggaactggtttttaaatgaagttgacaaagttaacagagacttcccaaatgtctcaagacttacttgtatacacatgcacacacacatggtttaacttaggagttttaaatgttttataaagaaatatgagatgtgtagagagactgtggatccactgaaaatggatgagcaaactgaaatggggtgtactagtttcctctggctgctataaaaaattaccacaaattgaatggcttaaaacagaaattttacatttttagaagccagaagcacaaaattaaagtgtttatagagccacacctctttgggaggctctaagatagttcttcgcctcttctagattctggtggctgtcagtgtttgttaacttgtagctgtatcactccagtctctgcctccctggccacactgccacctcctcttcgatgttatctaccttgccttttctaacaaggacacttataatggcatttaaggcctgaccagaaaaatctta

SEQ ID NO: 29663 - DNA, 371 bp, Homo sapiens
ggtcctgggcattgagacagtgttttcaaggttgggtccacatttgactgtgtgtggttgggttaatgggcctttgatgctcgctgcagtggtatttgggtcactcgtgttgctgcctgcctctctagactggagagcccccgccccctttagcagctggctgctgcttcctgctggctctcctgggccccaagctctcaaggctgtcacgaatcctaaaagagtccttcaaaccagtgtcactgtgacttaacatctatttcaaaagatgatctatggcacatttggaggacaatgcagaggggggtgtcacaaactcaagcacatttggataaggttattgacctggctttttcttagtttgctatgtg

SEQ ID NO: 29664 - DNA, 1928 bp, Homo sapiens
aggaagaaaatataaagtacacttttaaaacatgaagtcttcatagcagcttatagtcgttcagagaaacatgttccactgagaatgacttgagagagaggattacatcattatgccagaaggaagaagccactgtgcatgctctatcaccagcctcaccctcctggtcagccttacaagagtgacactggatatactccagaagttggacccaccacagcctgcacactggacttcttggcttttatgagctattcaagagatatttagtcatcacgttgtgtcacaatgggagtgactcacagagcaaggagagaacctgaggattcctcacacatgtagtactcagagctctacggaaacccaggcacctcgacctcaagaggatcagcctggccagggtggcacaactcttccttccccgtgcacagcaggaaagctgccatcagctgagcaagtccaccaacagtttctgtgtcccacttcatctttaataaggacaccatcttcttgtattatacaagaaaggagtgtacctatcacacacagggggaaaaatgctcttttgggtgctaggcctcctaatcctctgtggttttctgtggactcgtaaaggaaaactaaagattgaagacatcactgataagtacatttttatcactggatgtgactcgggctttggaaacttggcagccagaacttttgataaaaagggatttcatgtaatcgctgcctgtctgactgaatcaggatcaacagctttaaaggcagaaacctcagagagacttcgtactgtgcttctggatgtgaccgacccagagaatgtcaagaggactgcccagtgggtgaagaaccaagttggggagaaaggtctctggggtctgatcaataatgctggtgttcccggcgtgctggctcccactgactggctgacactagaggactacagagaacctattgaagtgaacctgtttggactcatcagtgtgacactaaatatgcttcctttggtcaagaaagctcaagggagagttattaatgtctccagtgttggaggtcgccttgcaatcgttggagggggctatactccatccaaatatgcagtggaaggtttcaatgacagcttaagacgggacatgaaagcttttggtgtgcacgtctcatgcattgaaccaggattgttcaaaacaaacttggcagatccagtaaaggtaattgaaaaaaaactcgccatttgggagcagctgtctccagacatcaaacaacaatatggagaaggttacattgaaaaaagtctagacaaactgaaaggcaataaatcctatgtgaacatggacctctctccggtggtagagtgcatggaccacgctctaacaagtctcttccctaagactcattatgccgctggaaaagatgccaaaattttctggatacctctgtctcacatgccagcagctttgcaagactttttattgttgaaacagaaagcagagctggctaatcccaaggcagtgtgactcagctaaccacaaatgtctcctccaggctatgaaattggccgatttcaagaacacatctccttttcaaccccattccttatctgctccaacctggactcatttagatcgtgcttatttggattgcaaaagggagtcccaccatcgctggtggtatcccagggtccctgctcaagttttctttgaaaaggagggctggaatggtacatcacataggcaagtcctgccctgtatttaggctttgcctgcttggtgtgatgtaagggaaattgaaagacttgcccattcaaaatgatctttaccgtggcctgccccatgcttatggtccccagcatttacagtaacttgtgaatgttaagtatcatctcttatctaaatattaaaagataagtcaaacattaaaaaaaaaaa

SEQ ID NO: 29665 - DNA, 2042 bp, Homo sapiens
aggaagaaaatataaagtacacttttaaaacatgaagtcttcatagcagcttatagtcgttcagagaaacatgttccactgagaatgacttgagagagaggattacatcattatgccagaaggaagaagccactgtgcatgctctatcaccagcctcaccctcctggtcagccttacaagagtgacactggatatactccagaagttggacccaccacagcctgcacactggacttcttggcttttatgagctattcaagagatatttagtcatcacgttgtgtcacaatgggagtgactcacagagcaaggagagaacctgaggattcctcacacatgtagtactcagagctctacggaaacccaggcacctcgacctcaagaggatcagcctggccagggtggcacaactcttccttccccgtgcacagcaggaaagctgccatcagctgagcaagtccaccaacagtttctgtgtcccacttcatctttaataagtttgaagataattgggagtctgacagaacaattaaaattgaattattgtttctaatagattttaagcccattctgcagtggaatttcatgaactagcaagaggacaccatcttcttgtattatacaagaaaggagtgtacctatcacacacagggggaaaaatgctcttttgggtgctaggcctcctaatcctctgtggttttctgtggactcgtaaaggaaaactaaagattgaagacatcactgataagtacatttttatcactggatgtgactcgggctttggaaacttggcagccagaacttttgataaaaagggatttcatgtaatcgctgcctgtctgactgaatcaggatcaacagctttaaaggcagaaacctcagagagacttcgtactgtgcttctggatgtgaccgacccagagaatgtcaagaggactgcccagtgggtgaagaaccaagttggggagaaaggtctctggggtctgatcaataatgctggtgttcccggcgtgctggctcccactgactggctgacactagaggactacagagaacctattgaagtgaacctgtttggactcatcagtgtgacactaaatatgcttcctcgacctcaagaggatcagcctggccagggtggcacaactcttccttccccgtgcacagcaggaaagcttgcaatcgttggagggggctatactccatccaaatatgcagtggaaggtttcaatgacagcttaagacgggacatgaaagcttttggtgtgcacgtctcatgcattgaaccaggattgttcaaaacaaacttggcagatccagtaaaggtaattgaaaaaaaactcgccatttgggagcagctgtctccagacatcaaacaacaatatggagaaggttacattgaaaaaagtctagacaaactgaaaggcaataaatcctatgtgaacatggacctctctccggtggtagagtgcatggaccacgctctaacaagtctcttccctaagactcattatgccgctggaaaagatgccaaaattttctggatacctctgtctcacatgccagcagctttgcaagactttttattgttgaaacagaaagcagagctggctaatcccaaggcagtgtgactcagctaaccacaaatgtctcctccaggctatgaaattggccgatttcaagaacacatctccttttcaaccccattccttatctgctccaacctggactcatttagatcgtgcttatttggattgcaaaagggagtcccaccatcgctggtggtatcccagggtccctgctcaagttttctttgaaaaggagggctggaatggtacatcacataggcaagtcctgccctgtatttaggctttgcctgcttggtgtgatgtaagggaaattgaaagacttgcccattcaaaatgatctttaccgtggcctgccccatgcttatggtccccagcatttacagtaacttgtgaatgttaagtatcatctcttatctaaatattaaaagataagtcaaacattaaaaaaaaaaa

SEQ ID NO: 29666 - DNA, 2053 bp, Homo sapiens
aggaagaaaatataaagtacacttttaaaacatgaagtcttcatagcagcttatagtcgttcagagaaacatgttccactgagaatgacttgagagagaggattacatcattatgccagaaggaagaagccactgtgcatgctctatcaccagcctcaccctcctggtcagccttacaagagtgacactggatatactccagaagttggacccaccacagcctgcacactggacttcttggcttttatgagctattcaagagatatttagtcatcacgttgtgtcacaatgggagtgactcacagagcaaggagagaacctgaggattcctcacacatgtagtactcagagctctacggaaacccaggcacctcgacctcaagaggatcagcctggccagggtggcacaactcttccttccccgtgcacagcaggaaagctgccatcagctgagcaagtccaccaacagtttctgtgtcccacttcatctttaataaggaaaacaaactcaggaagaaaaagaaaagcagaagtgatcaaggagagcgctcgagttgcaatattttcctttggctgctgacaggcagttactataaagcattgtgcatggtgacaccatcttcttgtattatacaagaaaggagtgtacctatcacacacagggggaaaaatgctcttttgggtgctaggcctcctaatcctctgtggttttctgtggactcgtaaaggaaaactaaagattgaagacatcactgataagtacatttttatcactggatgtgactcgggctttggaaacttggcagccagaacttttgataaaaagggatttcatgtaatcgctgcctgtctgactgaatcaggatcaacagctttaaaggcagaaacctcagagagacttcgtactgtgcttctggatgtgaccgacccagagaatgtcaagaggactgcccagtgggtgaagaaccaagttggggagaaaggtctctggggtctgatcaataatgctggtgttcccggcgtgctggctcccactgactggctgacactagaggactacagagaacctattgaagtgaacctgtttggactcatcagtgtgacactaaatatgcttcctcgacctcaagaggatcagcctggccagggtggcacaactcttccttccccgtgcacagcaggaaagcttgcaatcgttggagggggctatactccatccaaatatgcagtggaaggtttcaatgacagcttaagacgggacatgaaagcttttggtgtgcacgtctcatgcattgaaccaggattgttcaaaacaaacttggcagatccagtaaaggtaattgaaaaaaaactcgccatttgggagcagctgtctccagacatcaaacaacaatatggagaaggttacattgaaaaaagtctagacaaactgaaaggcaataaatcctatgtgaacatggacctctctccggtggtagagtgcatggaccacgctctaacaagtctcttccctaagactcattatgccgctggaaaagatgccaaaattttctggatacctctgtctcacatgccagcagctttgcaagactttttattgttgaaacagaaagcagagctggctaatcccaaggcagtgtgactcagctaaccacaaatgtctcctccaggctatgaaattggccgatttcaagaacacatctccttttcaaccccattccttatctgctccaacctggactcatttagatcgtgcttatttggattgcaaaagggagtcccaccatcgctggtggtatcccagggtccctgctcaagttttctttgaaaaggagggctggaatggtacatcacataggcaagtcctgccctgtatttaggctttgcctgcttggtgtgatgtaagggaaattgaaagacttgcccattcaaaatgatctttaccgtggcctgccccatgcttatggtccccagcatttacagtaacttgtgaatgttaagtatcatctcttatctaaatattaaaagataagtcaaacattaaaaaaaaaaa

SEQ ID NO: 29667 - DNA, 1808 bp, Homo sapiens
aggaagaaaatataaagtacacttttaaaacatgaagtcttcatagcagcttatagtcgttcagagaaacatgttccactgagaatgacttgagagagaggattacatcattatgccagaaggaagaagccactgtgcatgctctatcaccagcctcaccctcctggtcagccttacaagagtgacactggatatactccagaagttggacccaccacagcctgcacactggacttcttggcttttatgagctattcaagagatatttagtcatcacgttgtgtcacaatgggagtgactcacagagcaaggagagaacctgaggattcctcacacatgtagtactcagagctctacggaaacccaggcacctcgacctcaagaggatcagcctggccagggtggcacaactcttccttccccgtgcacagcaggaaagctgccatcagctgagcaagtccaccaacagtttctgtgtcccacttcatctttaataaggacaccatcttcttgtattatacaagaaaggagtgtacctatcacacacagggggaaaaatgctcttttgggtgctaggcctcctaatcctctgtggttttctgtggactcgtaaaggaaaactaaagattgaagacatcactgataagtacatttttatcactggatgtgactcgggctttggaaacttggcagccagaacttttgataaaaagggatttcatgtaatcgctgcctgtctgactgaatcaggatcaacagctttaaaggcagaaacctcagagagacttcgtactgtgcttctggatgtgaccgacccagagaatgtcaagaggactgcccagtgggtgaagaaccaagttggggagaaaggtctctggggtctgatcaataatgctggtgttcccggcgtgctggctcccactgactggctgacactagaggactacagagaacctattgaagtgaacctgtttggactcatcagtgtgacactaaatatgcttcctttggtcaagaaagctcaagggagagttattaatgtctccagtgttggaggtcgccttgcaatcgttggagggggctatactccatccaaatatgcagtggaaggtttcaatgacagcttaagacgggacatgaaagcttttggtgtgcacgtctcatgcattgaacgtctagacaaactgaaaggcaataaatcctatgtgaacatggacctctctccggtggtagagtgcatggaccacgctctaacaagtctcttccctaagactcattatgccgctggaaaagatgccaaaattttctggatacctctgtctcacatgccagcagctttgcaagactttttattgttgaaacagaaagcagagctggctaatcccaaggcagtgtgactcagctaaccacaaatgtctcctccaggctatgaaattggccgatttcaagaacacatctccttttcaaccccattccttatctgctccaacctggactcatttagatcgtgcttatttggattgcaaaagggagtcccaccatcgctggtggtatcccagggtccctgctcaagttttctttgaaaaggagggctggaatggtacatcacataggcaagtcctgccctgtatttaggctttgcctgcttggtgtgatgtaagggaaattgaaagacttgcccattcaaaatgatctttaccgtggcctgccccatgcttatggtccccagcatttacagtaacttgtgaatgttaagtatcatctcttatctaaatattaaaagataagtcaaacattaaaaaaaaaaa

SEQ ID NO: 29668 - DNA, 1764 bp, Homo sapiens
aggaagaaaatataaagtacacttttaaaacatgaagtcttcatagcagcttatagtcgttcagagaaacatgttccactgagaatgacttgagagagaggattacatcattatgccagaaggaagaagccactgtgcatgctctatcaccagcctcaccctcctggtcagccttacaagagtgacactggatatactccagaagttggacccaccacagcctgcacactggacttcttggcttttatgagctattcaagagatatttagtcatcacgttgtgtcacaatgggagtgactcacagagcaaggagagaacctgaggattcctcacacatgtagtactcagagctctacggaaacccaggcacctcgacctcaagaggatcagcctggccagggtggcacaactcttccttccccgtgcacagcaggaaagctgccatcagctgagcaagtccaccaacagtttctgtgtcccacttcatctttaataaggacaccatcttcttgtattatacaagaaaggagtgtacctatcacacacagggggaaaaatgctcttttgggtgctaggcctcctaatcctctgtggttttctgtggactcgtaaaggaaaactaaagattgaagacatcactgataagtacatttttatcactggatgtgactcgggctttggaaacttggcagccagaacttttgataaaaagggatttcatgtaatcgctgcctgtctgactgaatcaggatcaacagctttaaaggcagaaacctcagagagacttcgtactgtgcttctggatgtgaccgacccagagaatgtcaagaggactgcccagtgggtgaagaaccaagttggggagaaaggtctctggggtctgatcaataatgctggtgttcccggcgtgctggctcccactgactggctgacactagaggactacagagaacctattgaagtgaacctgtttggactcatcagtgtgacactaaatatgcttcctttggtcaagaaagctcaagggagagttattaatgtctccagtgttggaggtcgccttgcaatcgttggagggggctatactccatccaaatatgcagtggaaggtttcaatgacagcttaaggtctagacaaactgaaaggcaataaatcctatgtgaacatggacctctctccggtggtagagtgcatggaccacgctctaacaagtctcttccctaagactcattatgccgctggaaaagatgccaaaattttctggatacctctgtctcacatgccagcagctttgcaagactttttattgttgaaacagaaagcagagctggctaatcccaaggcagtgtgactcagctaaccacaaatgtctcctccaggctatgaaattggccgatttcaagaacacatctccttttcaaccccattccttatctgctccaacctggactcatttagatcgtgcttatttggattgcaaaagggagtcccaccatcgctggtggtatcccagggtccctgctcaagttttctttgaaaaggagggctggaatggtacatcacataggcaagtcctgccctgtatttaggctttgcctgcttggtgtgatgtaagggaaattgaaagacttgcccattcaaaatgatctttaccgtggcctgccccatgcttatggtccccagcatttacagtaacttgtgaatgttaagtatcatctcttatctaaatattaaaagataagtcaaacattaaaaaaaaaaa

SEQ ID NO: 29669 - DNA, 198 bp, Homo sapiens
ggaagaaaaagaaaagcagaagtgatcaaggagagcgctcgagttgcaatattttcctttggctgctgacaggcagttactataaagcattgtgcatggtgtatgaaagacaaaactagttctcctttcttggtttcttttgaatctttgtgatatggtagagaaagtttgataaagtgttcttgtgcctgctgtcga

SEQ ID NO: 29670 - DNA, 1940 bp, Homo sapiens
aggaagaaaatataaagtacacttttaaaacatgaagtcttcatagcagcttatagtcgttcagagaaacatgttccactgagaatgacttgagagagaggattacatcattatgccagaaggaagaagccactgtgcatgctctatcaccagcctcaccctcctggtcagccttacaagagtgacactggatatactccagaagttggacccaccacagcctgcacactggacttcttggcttttatgagctattcaagagatatttagtcatcacgttgtgtcacaatgggagtgactcacagagcaaggagagaacctgaggattcctcacacatgtagtactcagagctctacggaaacccaggcacctcgacctcaagaggatcagcctggccagggtggcacaactcttccttccccgtgcacagcaggaaagctgccatcagctgagcaagtccaccaacagtttctgtgtcccacttcatctttaataaggacaccatcttcttgtattatacaagaaaggagtgtacctatcacacacagggggaaaaatgctcttttgggtgctaggcctcctaatcctctgtggttttctgtggactcgtaaaggaaaactaaagattgaagacatcactgataagtacatttttatcactggatgtgactcgggctttggaaacttggcagccagaacttttgataaaaagggatttcatgtaatcgctgcctgtctgactgaatcaggatcaacagctttaaaggcagaaacctcagagagacttcgtactgtgcttctggatgtgaccgacccagagaatgtcaagaggactgcccagtgggtgaagaaccaagttggggagaaaggtctctggggtctgatcaataatgctggtgttcccggcgtgctggctcccactgactggctgacactagaggactacagagaacctattgaagtgaacctgtttggactcatcagtgtgacactaaatatgcttcctcgacctcaagaggatcagcctggccagggtggcacaactcttccttccccgtgcacagcaggaaagcttgcaatcgttggagggggctatactccatccaaatatgcagtggaaggtttcaatgacagcttaagacgggacatgaaagcttttggtgtgcacgtctcatgcattgaaccaggattgttcaaaacaaacttggcagatccagtaaaggtaattgaaaaaaaactcgccatttgggagcagctgtctccagacatcaaacaacaatatggagaaggttacattgaaaaaagtctagacaaactgaaaggcaataaatcctatgtgaacatggacctctctccggtggtagagtgcatggaccacgctctaacaagtctcttccctaagactcattatgccgctggaaaagatgccaaaattttctggatacctctgtctcacatgccagcagctttgcaagactttttattgttgaaacagaaagcagagctggctaatcccaaggcagtgtgactcagctaaccacaaatgtctcctccaggctatgaaattggccgatttcaagaacacatctccttttcaaccccattccttatctgctccaacctggactcatttagatcgtgcttatttggattgcaaaagggagtcccaccatcgctggtggtatcccagggtccctgctcaagttttctttgaaaaggagggctggaatggtacatcacataggcaagtcctgccctgtatttaggctttgcctgcttggtgtgatgtaagggaaattgaaagacttgcccattcaaaatgatctttaccgtggcctgccccatgcttatggtccccagcatttacagtaacttgtgaatgttaagtatcatctcttatctaaatattaaaagataagtcaaacattaaaaaaaaaaa

SEQ ID NO: 29671 - DNA, 1900 bp, Homo sapiens
aggaagaaaatataaagtacacttttaaaacatgaagtcttcatagcagcttatagtcgttcagagaaacatgttccactgagaatgacttgagagagaggattacatcattatgccagaaggaagaagccactgtgcatgctctatcaccagcctcaccctcctggtcagccttacaagagtgacactggatatactccagaagttggacccaccacagcctgcacactggacttcttggcttttatgagctattcaagagatatttagtcatcacgttgtgtcacaatgggagtgactcacagagcaaggagagaacctgaggattcctcacacatgtagtactcagagctctacggaaacccaggcacctcgacctcaagaggatcagcctggccagggtggcacaactcttccttccccgtgcacagcaggaaagctgccatcagctgagcaagtccaccaacagtttctgtgtcccacttcatctttaataaggaaaacaaactcaggaagaaaaagaaaagcagaagtgatcaaggagagcgctcgagttgcaatattttcctttggctgctgacaggcagttactataaagcattgtgcatggtgacaccatcttcttgtattatacaagaaaggagtgtacctatcacacacagggggaaaaatgctcttttgggtgctaggcctcctaatcctctgtggttttctgtggactcgtaaaggaaaactaaagattgaagacatcactgataagtacatttttatcactggatgtgacgacccagagaatgtcaagaggactgcccagtgggtgaagaaccaagttggggagaaaggtctctggggtctgatcaataatgctggtgttcccggcgtgctggctcccactgactggctgacactagaggactacagagaacctattgaagtgaacctgtttggactcatcagtgtgacactaaatatgcttcctttggtcaagaaagctcaagggagagttattaatgtctccagtgttggaggtcgccttgcaatcgttggagggggctatactccatccaaatatgcagtggaaggtttcaatgacagcttaagacgggacatgaaagcttttggtgtgcacgtctcatgcattgaaccaggattgttcaaaacaaacttggcagatccagtaaaggtaattgaaaaaaaactcgccatttgggagcagctgtctccagacatcaaacaacaatatggagaaggttacattgaaaaaagtctagacaaactgaaaggcaataaatcctatgtgaacatggacctctctccggtggtagagtgcatggaccacgctctaacaagtctcttccctaagactcattatgccgctggaaaagatgccaaaattttctggatacctctgtctcacatgccagcagctttgcaagactttttattgttgaaacagaaagcagagctggctaatcccaaggcagtgtgactcagctaaccacaaatgtctcctccaggctatgaaattggccgatttcaagaacacatctccttttcaaccccattccttatctgctccaacctggactcatttagatcgtgcttatttggattgcaaaagggagtcccaccatcgctggtggtatcccagggtccctgctcaagttttctttgaaaaggagggctggaatggtacatcacataggcaagtcctgccctgtatttaggctttgcctgcttggtgtgatgtaagggaaattgaaagacttgcccattcaaaatgatctttaccgtggcctgccccatgcttatggtccccagcatttacagtaacttgtgaatgttaagtatcatctcttatctaaatattaaaagataagtcaaacattaaaaaaaaaaa

SEQ ID NO: 29672 - DNA, 1846 bp, Homo sapiens
aggaagaaaatataaagtacacttttaaaacatgaagtcttcatagcagcttatagtcgttcagagaaacatgttccactgagaatgacttgagagagaggattacatcattatgccagaaggaagaagccactgtgcatgctctatcaccagcctcaccctcctggtcagccttacaagagtgacactggatatactccagaagttggacccaccacagcctgcacactggacttcttggcttttatgagctattcaagagatatttagtcatcacgttgtgtcacaatgggagtgactcacagagcaaggagagaacctgaggattcctcacacatgtagtactcagagctctacggaaacccaggcacctcgacctcaagaggatcagcctggccagggtggcacaactcttccttccccgtgcacagcaggaaagctgccatcagctgagcaagtccaccaacagtttctgtgtcccacttcatctttaataaggacaccatcttcttgtattatacaagaaaggagtgtacctatcacacacagggggaaaaatgctcttttgggtgctaggcctcctaatcctctgtggttttctgtggactcgtaaaggaaaactaaagattgaagacatcactgataagtacatttttatcactggatgtgactcgggctttggaaacttggcagccagaacttttgataaaaagggatttcatgtaatcgctgcctgtctgactgaatcaggatcaacagctttaaaggcagaaacctcagagagacttcgtactgtgcttctggatgtgaccgacccagagaatgtcaagaggactgcccagtgggtgaagaaccaagttggggagaaaggtctctggggtctgatcaataatgctggtgttcccggcgtgctggctcccactgactggctgacactagaggactacagagaacctattgaagtgaacctgtttggactcatcagtgtgacactaaatatgcttcctttggtcaagaaagctcaagggagagttattaatgtctccagtgttggaggtcgccttgcaatcgttggagggggctatactccatccaaatatgcagtggaaggtttcaatgacagcttaagacgggacatgaaagcttttggtgtgcacgtctcatgcattgaaccaggattgttcaaaacaaacttggcagatccagtaaaggtctagacaaactgaaaggcaataaatcctatgtgaacatggacctctctccggtggtagagtgcatggaccacgctctaacaagtctcttccctaagactcattatgccgctggaaaagatgccaaaattttctggatacctctgtctcacatgccagcagctttgcaagactttttattgttgaaacagaaagcagagctggctaatcccaaggcagtgtgactcagctaaccacaaatgtctcctccaggctatgaaattggccgatttcaagaacacatctccttttcaaccccattccttatctgctccaacctggactcatttagatcgtgcttatttggattgcaaaagggagtcccaccatcgctggtggtatcccagggtccctgctcaagttttctttgaaaaggagggctggaatggtacatcacataggcaagtcctgccctgtatttaggctttgcctgcttggtgtgatgtaagggaaattgaaagacttgcccattcaaaatgatctttaccgtggcctgccccatgcttatggtccccagcatttacagtaacttgtgaatgttaagtatcatctcttatctaaatattaaaagataagtcaaacattaaaaaaaaaaa

SEQ ID NO: 29673 - DNA, 1119 bp, Homo sapiens
catcaaaggtggcaaataagtactgtcttaccacacctcttttccttcctctctgttctaggtctctggggtctgatcaataatgctggtgttcccggcgtgctggctcccactgactggctgacactagaggactacagagaacctattgaagtgaacctgtttggactcatcagtgtgacactaaatatgcttcctttggtcaagaaagctcaagggagagttattaatgtctccagtgttggaggtcgccttgcaatcgttggagggggctatactccatccaaatatgcagtggaaggtttcaatgacagcttaagacgggacatgaaagcttttggtgtgcacgtctcatgcattgaaccaggattgttcaaaacaaacttggcagatccagtaaaggtaattgaaaaaaaactcgccatttgggagcagctgtctccagacatcaaacaacaatatggagaaggttacattgaaaaaagtctagacaaactgaaaggcaataaatcctatgtgaacatggacctctctccggtggtagagtgcatggaccacgctctaacaagtctcttccctaagactcattatgccgctggaaaagatgccaaaattttctggatacctctgtctcacatgccagcagctttgcaagactttttattgttgaaacagaaagcagagctggctaatcccaaggcagtgtgactcagctaaccacaaatgtctcctccaggctatgaaattggccgatttcaagaacacatctccttttcaaccccattccttatctgctccaacctggactcatttagatcgtgcttatttggattgcaaaagggagtcccaccatcgctggtggtatcccagggtccctgctcaagttttctttgaaaaggagggctggaatggtacatcacataggcaagtcctgccctgtatttaggctttgcctgcttggtgtgatgtaagggaaattgaaagacttgcccattcaaaatgatctttaccgtggcctgccccatgcttatggtccccagcatttacagtaacttgtgaatgttaagtatcatctcttatctaaatattaaaagataagtcaaacattaaaaaaaaaaa

SEQ ID NO: 29674 - DNA, 300 bp, Homo sapiens
tttttttttttaacattaagagccaagtattagacctcattctgttctgttccttaatatcttcatcccagtcctccagccccatcttggagtagagtttgggcaacttttttaagctctccttactctcaatttgaggtgaatgccagcttcaagtctaaacagtcttttcagtagcaggattgatgcaggactaatttattaaatcctagctctccagagtggtacattgtgattgtctgctgagggatcatctctgcatttaaacttattgggtcagtgcctatttgcatgtgaact

SEQ ID NO: 29675 - DNA, 410 bp, Homo sapiens
gcttgcaaactgctgaaatgcacttgaatttaaaattgtaatgcatctgttttctcaaacatagtatgataagaggattttcagatagcaaatgcccaataccagttcttcccctctgacatgctgtaacaaggaattaggagtgttgtatgctgcttcttccttcaacaagtgttctccaaaggcctatttaataatttgattgtaactaggaactacatattattcacattactttctacttataatgtttcttcctatattttttctttttatgttttatatttgagtccaatacctagttgtttttagggcagtttcacataaattatcttatttgaatgatctcagctgaatcatttaaaaacaatcctgggtagcagagtaagtgggtctatccccacttgaca

SEQ ID NO: 29676 - DNA, 532 bp, Homo sapiens
gtggtgtccctgagcccgggaacccagtgtggggggcctgccatgatggccacaaggtaacctcaggaggaacctgggaaacgttttatattaaagttttcatttaatggtccattctgtttgtcaagtggtgcatatagaaaaattgtggcagttgcatggaatttcatttggaaacaaatttaaataaaaagtgagtcaatttaaaggaactcattaagtaagtatcgtgaaactgaggcttggaggaccatagtttggataaaaaatgccttaagttgaagtgaaatcagaacctcaaagcgagatgtgcaatctcatgttcatttcagcattattcacagggccaatatctgaaagcaacccagatgtccatcaccagatgaatgataaagaaagtgcagtgggctgggtgcagtggctcatgcctgtaatctcagaactttaggaggtcaagacaggaagatcgcttcagcccaggagcttgagaccagcctgggcaacatagcaagtccccatctctacaaaaaat

SEQ ID NO: 29677 - DNA, 433 bp, Homo sapiens
caattaaaacaacttcacacacaaattaagtagaaataaaatctattaaatatattttaaagcaatcccgtggttttataaaggtcttgggccataatttctctgttgctgtaaagaggcaaccttattttagcaaagtatatttttaattcaacatctggattctgtatagaaaaattaacaaggaaatatgtgagattcctacaatggaagacttttcacatattgcaagcaatgcatctccatcctactttgtagtaatactgatgtgggcataaaggaaagacaggaagaggatgactagacaccaggtgatttatacattatcttattaaatcatgaaacagctcggccaggcacggtggctcatgcctgtaatcccaaggtgctgggattgcagacatgagctactgcacccagccatttattttct

SEQ ID NO: 29678 - DNA, 2512 bp, Homo sapiens
gaccttaaatatatcgaggtggctaattgatgtataataatttacaaaattattcttctattgctacagagctacaattcaatttacagtaggccaccatgagggccttcttaaggaaccagaaatatgaggatatgcacaatattattcacattttacagatcagaaaattgaggcacagattaagtaacttcccaaggctaccaggcattctagctccagaaactgtgctcttaccattctgctacaaggtatttcgaaaaaaagaaaaagtaaaaagaagtcaaaaggcaacagagttcattgattattccatagaacagtcacaccatgcaattctcacacccttgcagacacacttgaccatgaaaggttcctcaatgaaatgttcctcattatcttcagaagccatattattcacattgactttgcagttaactcagaccctaggtctggaatgctgtcttctctacttatccaaaactatacatccacagatcatataaactctcagccctgctgcaaagcctttccagaaaaataaaaatggttgaaaaggcaattctgctaccaatgactgtttaagcccagccaagtaactgaaccattccaacttcaatttacttatgaaaagaatttgatgatgtaggaggttatttcaattctaaaatacaaacccatgttgatctttctcaatcttgaactcatagattattatctattatctcaatttagtttgttatttatcctagtgggccattaaaaactaccacatgtgtttctgtctctccattagtcaataactaaactaacgagcaattagtaagccatgtgccagatgctccgctaggcaccagagggataaaaacaatacttatagtataccactaattttcgcttagtaactagtgaaatgttcaagtcatgcctgagtcaagagttgaggagacattacaatgtgtaatggaaaccaaggaaagtgaaactttggataagtggggactagtgtatttatatatttaattgatttctgactctatcattggcctccaaacacagattgtgtttttctttggttttgttttcttcactatgggatcttctgtgcccagcacagtgcctgacacatagaaaacaatcaatatttgctgaataaatgattaaaaaatcagagaactttcccattctgtttggatctatagaacatccagagtaagtgatgagggcctctgcatttatatgcgcttaaattaagattatgtgagaaaagtttaaagacacttagtagagtgattttgaaatatagtaaacacttggaaatggtggtgctttaaaaagatattaatagataatatgaaaatctccatctcaaaaataatgcataaactatttaaaggaaaatcacatctccaggctttcaatgtttgttcattactttttcatatatttttaccatctgctgaaggcagtcatatcaaagggtaaagaaagatgggaggaaaactcagtaagaattatattagtctgtttgcaaagtagaaaaagattctcatcactcaaccttatgagcaggaagagggaaggctgtttgagaaccatttacttagcagaaccacatattttagacacttccctgcattaactgcacaaacaatatgtttgcaaacttgttagatcaacctccaacaacgacacattcaggagttaaatatttttcatcaaacattggatttttccttaacgctagagattgctacaaatcttctgaagggtctcaatggcttcaggctaagaagagatttctccctgttataagcagcaagacaaattagccatttcactctcaaacttcactaatgatcacattctttccaaaaggaactctagaagaccaaatgccccgagttaagaacatcaaaactaaccatctgaagaaacttcccaagtgtaagactctgccattaaaacattaccgagaggggactcaaacagtctttcttcctttgtcgtgtttcttgctcccagaccaaggcactgacgacagtactgatacataatttaaaagcacactcccttccactttggtaataccagaactctaattggaccaccctgaagcttaggactaccagccatacaaatagtaaactctgtccacgattcactcatctgtgtattttctatagatgtttactaggcgtttgttatataaaaataccccggccaggcacggtggctcacgcctgtaatcccagcactttgggaggtgggtggatcacctgaggtcgggagttcgagaccagcctgaccagcatggtggaacccccatctctactaaaaacacaaaaaattagccgggcgtggtggcacatgcctgtaatcccagctactcaggaggctgaggcggagaattgcttgaacccggaaggtggaggttgttgcggtgagctgagattgcactattgcactccagcctgggcaacaggagtaaaactcccccccacccaaaaaa

SEQ ID NO: 29679 - DNA, 2088 bp, Homo sapiens
gaccttaaatatatcgaggtggctaattgatgtataataatttacaaaattattcttctattgctacagagctacaattcaatttacagtaggccaccatgagggccttcttaaggaaccagaaatatgaggatatgcacaatattattcacattttacagatcagaaaattgaggcacagattaagtaacttcccaaggctaccaggcattctagctccagaaactgtgctcttaccattctgctacaaggtatttcgaaaaaaagaaaaagtaaaaagaagtcaaaaggcaacagagttcattgattattccatagaacagtcacaccatgcaattctcacacccttgcagacacacttgaccatgaaaggttcctcaatgaaatgttcctcattatcttcagaagccatattattcacattgactttgcagttaactcagaccctaggtctggaatgctgtcttctctacttatccaaaactatacatccacagatcatataaactctcagccctgctgcaaagcctttccagaaaaataaaaatggttgaaaaggcaattctgctaccaatgactgtttaagcccagccaagtaactgaaccattccaacttcaatttacttatgaaaagaatttgatgatgtaggaggttatttcaattctaaaatacaaacccatgttgatctttctcaatcttgaactcatagattattatctattatctcaatttagtttgttatttatcctagtgggccattaaaaactaccacatgtgtttctgtctctccattagtcaataactaaactaacgagcaattagtaagccatgtgccagatgctccgctaggcaccagagggataaaaacaatacttatagtataccactaattttcgcttagtaactagtgaaatgttcaagtcatgcctgagtcaagagttgaggagacattacaatgtgtaatggaaaccaaggaaagtgaaactttggataagtggggactagtgtatttatatatttaattgatttctgactctatcattggcctccaaacacagattgtgtttttctttggttttgttttcttcactatgggatcttctgtgcccagcacagtgcctgacacatagaaaacaatcaatatttgctgaataaatgattaaaaaatcagagaactttcccattctgtttggatctatagaacatccagagtaagtgatgagggcctctgcatttatatgcgcttaaattaagattatgtgagaaaagtttaaagacacttagtagagtgattttgaaatatagtaaacacttggaaatggtggtgctttaaaaagatattaatagataatatgaaaatctccatctcaaaaataatgcataaactatttaaaggaaaatcacatctccaggctttcaatgtttgttcattactttttcatatatttttaccatctgctgaaggcagtcatatcaaagggtaaagaaagatgggaggaaaactcagtaagaattatattagtctgtttgcaaagtagaaaaagattctcatcactcaaccttatgagcaggaagagggaaggctgtttgagaaccatttacttagcagaaccacatattttagacacttccctgcattaactgcacaaacaatatgtttgcaaacttgttagatcaacctccaacaacgacacattcaggagttaaatatttttcatcaaacattggatttttccttaacgctagagattgctacaaatcttctgaagggtctcaatggcttcaggctaagaagagatttctccctgttataagcagcaagacaaattagccatttcactctcaaacttcactaatgatcacattctttccaaaaggaactctagaagaccaaatgccccgagttaagaacatcaaaactaaccatctgaagaaacttcccaagtgtaagactctgcctgcacgacaacacataaaaaaagagagaagaatcaaatagacacaataaaaaatgataaaggggatatcaccaccgatcccacagaaataaaaactaccatcagagaatactacaaacacctctacgc

SEQ ID NO: 29680 - DNA, 768 bp, Homo sapiens
agttaccaaaagcagaaatcatacaagacagattataatgcaataaaatgagaaattaataacaaaagtttaaacaaaaagttcaaccgcttagaaatttaaaaaatattttattgggacttccagtatgaacatggctgcataagtcagcatttttccccttttctcttggaaatcattcaaacccacaaaatccattttcagaaaagttggaaacaaacagaagccacagacttcaaaatatatgtaagggctgctcaaagacaactgaaattggttagaggccactcagcagtaagtgaagagaagatacatgcagaatgttgaaagatcagagtagtagcagatctcagaaagcctagcaaaaatatactttctaatggaagaatgttggataattatttaggaccagataatggttaccatgggggtttattatcctattctcctttacttttgtgtgtgtttgaaaattttcataatagtttcaaaatacagttcctgaaagtgaggtttcaccatgaaatataaatgttacatcctttgtttacaaccgtggatacggaaactttggagacaggttgaagctgatgacagaagcctcttagacctgatttgattcagagaagcagaggtggagctacacaagaattacacaaatgagccatatttgcaggaagcagtctgcctctgtggtgggaacaaaattcagctcatttagtgagaaataattttttaaaacggtgtagcctgaattcaaaaatcctg

SEQ ID NO: 29681 - DNA, 437 bp, Homo sapiens
tttataaatacacagactaaggaaaggtctgaaaaaaaaggtaacagtggttatcttcagggagaaaaattgagggactgatgtcacatagaaaactaaatataataatccagatttagtaggtaaaggtgattagtattattgtaagggggtgcaagggactattgctctaggcaggatacaccaacagtaagatctgcaagcttctcaaggtttaggcaaaaatgacttttcttttataggaatgagtaaatcaagccaaaaatgagcaggggtgggcagtgggatgaacgagagtggcatcgtggaacagcagatcagagaaggttttacccccaggccagcttgttctctggagtggctggtttagactgcggctgggccagaatgtcagagtcttggggaaagagcattttgtcccgattgatcagcaggga

SEQ ID NO: 29682 - DNA, 1554 bp, Homo sapiens
actgacgtccgaaaggattagagagaaaaatgtggtcagcgcttaatatggagggcacagtgggtgtgctgctttctcttttccatccctctgtcaacttcattctcttttgggggcaaacaagactcagatctaaacagagtttatggtttgttttgcattttgtatttattaatatttatgccgactttgaaggtgctgaccagaaggcatcagtaacacacacacgcacacgcacacacaccacacaccatgtctgtttggtttgattctgagcctgagatcctggaaatatttcagctgttgttaagaggctggagttaggacccaggaaggacacagcagtggggatataaatagaaaaggagaacagaacaaagtttgaggagagagacttacatcactcactccccctccacccagagagcaggacggaggtgtgaacttgagccagaccagaaggagctcgagagcggccgcaggacaagcccgaggagcaggcgggcgctccaggggaaaaccacgcacaaaaccttcttcagagaaaagggaagctccaaacctgactgagacaaacggaggctcttgaaataaaaagaaaataccgcaggacaaacagcctcccgtccccgggcgcaggtcgcggtcacagtggtgacctgggattgctttcccaggactgcgagtcgggtttgggtttctcctccctgcattccacagctgctctggtcatcgcaacgtgtttattgatcactgaagaatctcaagttttgagacgaggaagaaacacccattaggtctccaagacagctgtgtttcacaaactttaaggagacagaaattttctcccctggaacctgtgaaaatgtcccttttccaaggaagtgaaggttaagaggtcccgttctcacagaccctcaggaatttcacttggctccgagctttgacctccgagagagccatggaaaagctgctgcggctgtgctgctggtactcctggctgctgctattttattacaactttcaggtgcgtggcgtctactccagatcgcaggaccatccaggatttcaggtgttggcgtctgcttcccattactggccactggagaatgtggatgggatccatgaacttcaggatacaactggagatattgtggaagggaaggtcaacaaaggcatttacctgaaagaggaaaagggagtcacgcttctctattacggcaggtacaacagctcctgcatcagcaagccagagcagtgtggccctgaagatttccagtttttcttgataaatctctcctgacttctctggctggctggagctaagtcgcggtggccctggacttccgtctccagttcccctcagtccccaccagacttctcgactcttcaataatcttcaggtcgaacagagcctgtccgcagcatgagctctggggccagaaggcgtgggttccacttccggttccgacctgtttgtggggatcttgggcaaccactgcttccctttgaaaagcctcatctgtaaagtgagtgaataaaaggaccttccca

SEQ ID NO: 29683 - DNA, 1650 bp, Homo sapiens
actgacgtccgaaaggattagagagaaaaatgtggtcagcgcttaatatggagggcacagtgggtgtgctgctttctcttttccatccctctgtcaacttcattctcttttgggggcaaacaagactcagatctaaacagagtttatggtttgttttgcattttgtatttattaatatttatgccgactttgaaggtgctgaccagaaggcatcagtaacacacacacgcacacgcacacacaccacacaccatgtctgtttggtttgattctgagcctgagatcctggaaatatttcagctgttgttaagaggctggagttaggacccaggaaggacacagcagtggggatataaatagaaaaggagaacagaacaaagtttgaggagagagacttacatcactcactccccctccacccagagagcaggacggaggtgtgaacttgagccagaccagaaggagctcgagagcggccgcaggacaagcccgaggagcaggcgggcgctccaggggaaaaccacgcacaaaaccttcttcagagaaaagggaagctccaaacctgactgagacaaacggaggctcttgaaataaaaagaaaataccgcaggacaaacagcctcccgtccccgggcgcaggtcgcggtcacagtggtgacctgggattgctttcccaggactgcgagtcgggtttgggtttctcctccctgcattccacagctgctctggtcatcgcaacgtgtttattgatcactgaagaatctcaagttttgagacgaggaagaaacacccattaggtctccaagacagctgtgtttcacaaactttaaggagacagaaattttctcccctggaacctgtgaaaatgtcccttttccaaggaagtgaaggttaagaggtcccgttctcacagaccctcaggaatttcacttggctccgagctttgacctccgagagagccatggaaaagctgctgcggctgtgctgctggtactcctggctgctgctattttattacaactttcaggtgcgtggcgtctactccagatcgcaggaccatccaggatttcaggtgttggcgtctgcttcccattactggccactggagaatgtggatgggatccatgaacttcaggatacaactggagcgtcccgaacccacaagctcactgtgcttccttcccgtaatgctacttttgtgtattccaatgattctgcctactcaaatctctctgcaactgtagatattgtggaagggaaggtcaacaaaggcatttacctgaaagaggaaaagggagtcacgcttctctattacggcaggtacaacagctcctgcatcagcaagccagagcagtgtggccctgaagatttccagtttttcttgataaatctctcctgacttctctggctggctggagctaagtcgcggtggccctggacttccgtctccagttcccctcagtccccaccagacttctcgactcttcaataatcttcaggtcgaacagagcctgtccgcagcatgagctctggggccagaaggcgtgggttccacttccggttccgacctgtttgtggggatcttgggcaaccactgcttccctttgaaaagcctcatctgtaaagtgagtgaataaaaggaccttccca

SEQ ID NO: 29684 - DNA, 569 bp, Homo sapiens
cttttctcttagaacttttccttttgaagataaaattagaagacataccaatagaatatcattttatgtgtgcattgtctaatttttttcagataaaattggaatgttggcttctttgctttaattaccatagagaactaagtgtaattttgggaaatatttgtgttaaaaattatataatttattattttaataactttctaatatagcataaaatgaaaatttatagcatggtgaaaattatgctaagtagccatcaaattctttgtgaaattagtggatgtaaacaaagtcttaaaataaaaagctgaggtgggcagatttcatgagctcaggagttcgagatcagcctggccaacatggagaaaccccgtctctactaaaaatacaaaaaattagccgggcgtggtggtgtgctcctgtagtaccagctactcaagagcctgaggcacaagaatcacttgaacctgggagatggaggttgcagtgagccaagatcacaccactgcactccagcctgggcaacagagcaagactctgtctccaaaaaaataaataaataaataata

SEQ ID NO: 29685 - DNA, 1207 bp, Homo sapiens
ggcctccagtagaatatgggatgatggagatgacttttgtatcttcagtgaatcaaggcgcccttccagacctagcaacagtaacataagcaaaggagagtcacgcccaaaatggaaacccaaagccaaagtaccccttcagactctacatatgacttctgagaatcaagagaaagtgaaagctcttctccgagacctgcaagaacaagatgctgatgctggatctgaaagaggcctttctggggaggaggaagatgatgagcctgattgctgtaacgatgagcggtactggccagctggacaggaaccttccctcgttcccgacttggatcctttggaatatgctggcttagcctcagtggagccttatgttccagaatttacagtctccccatttgcagtgcaaaaactttccaggtatggtttcaatactgaacgctgtcaagcggtcctgaggatgtgtgatggagatgtgggagcatcactagagcatctccttacccagtgtttttcagagacatttggagagaggatgaagatctctgaggcagtcaaccagataagcttggatgagtgtatggaacagcgacaggaagaggcatttgctctcaagtccatctgtggagaaaaatttatagaaagaattcagaacagagtctggaccattgggttagaactggagtatctgacaagtagattccgcaaatccaagccaaaagaaagtaccaaaaatgtacaagagaattcacttgaaatctgtaaattttacctcaaaggaaattgtaaatttggatcaaaatgcagattcaaacatgaagtgcccccaaatcaaattgttggaagaatagaaagaagtgtagatgattctcatcttaatgctattgaagatgcatcttttttatatgaacttgaaattcgattttctaaagaccacaaatatccctaccaagctccgctcgtggcattttattccaccaatgagaacctacctctggcttgtcgtttacatatttctgagtttctttatgacaaggccttgacatttgcggaaacttcggaacctgtcgtatattctttgataacccttttagaggaagagtcggaaatagtcaagttactaacgaatacccaccacaagtatagtgaccctcctgtgaactttctgccagtaccctctaggaccagaataaataatcctgcctgtcat

SEQ ID NO: 29686 - DNA, 348 bp, Homo sapiens
atattcaacctgtaatagtaaggcttcacatccaagaacaggacatattgttctatgaacgttaatggtttttttttttcacagagatcttacacatttcttgctcaaaatatagtaaaagttactaattttcatgtgttgaatttgtttgatcctcaggtgtttcttttattttctctagtgacttcttgctgctagttttgaaggacattgtatcgcagaggccaggtcttcaagttattttaatgagtgcaactctaaacgctgagcttttttcagactattttaattcctgccccgttattactataccaggtgaataaaatgcatcattaaatatgtatcatt

SEQ ID NO: 29687 - DNA, 4532 bp, Homo sapiens
gtggtttagagccaggcgggcgtggtaacacatgcctgtagtctcagctacttggaaggctgaggcaggaggatcacttgagacaatgccagcctggaaaacataatgagtccctgtctctaaaaacaaaacaaaacaaatactgcgatttaccttagaaaaaattaatatataaaaggagaaggataaggaaggacttttaccctgtttcaaagactcaaaggataaataatgtgcccaagatcgcatagctagtaagtggtttagccaattctgtttctaaagtccattttgtttttaccccattcacatgaagattattttaaaagaattcataagtgaatcctgagggcaaagttagagataggacagaggcaagttgcttaaccaatatgggaattggattaaatgctctctaggccctccagttttaaagttctgtgagtctgatttttgacaccatgtaacaccatcacatatgtagtacaatacccaaagaacatcacaatgtatataaattgcactgtaggtaagatgatagaaacaaaaaattagatattcaatttgatcagtgtgataagtttatgataaaattatatgtaggaaatagcaagttcctgtaaatttattacagtattcaaaagtatagccagagttttaacaaacaaggcaatttttatagcattggccattaaatatgaaattgatttatatagttgtagtgactgcccaaaaataaccctttagtgagtgcttttctattattgatttaggtaaaaatctgatattgcttagagctacgctgtctgatatggtagcccctacccatgtttggctgtttatattaattaattaaaattaaaaattcagttcctcagtaacactattcttcacatttcaggtgctcaatagccacatgtagccaggtgttgctgtattggacagcacaggtatagaacatttccatcaacacggaaagttctattggacagtactggtatagagactcttgttgggaagaactggatatgtgctaagcaagagggctttatttcacccagaaaatctttcggtttattcagatgttggaaaactaatgtacagattccacaactcattctggctgattctctgagcagcattctgaataaagtcttctacatccaatcccaacaaatccaacaaaggatcactcaaggccaggagtgcaagaccatccagggcaacataacaagactctgtctctataattaaaaaaaaaaaaaagctgtaatcccagcactttgggagaccaaggcaggtggattcttgagcacaggagtttgaggccagcctgggcaacatggtgaagtcctgtctctacaaaaaaatacaaaaagccgggcttccagacagttccagtccattctgcaagagaggcaatcactccctgcttgggaagaaagagaaaccattcttaacttattgcgtaagcaccaggtggttgtcataagtggtatgactggatgtgggaaaaccacacaaattccgcagtttattctggatgattctctgaatggaccacctgagaaggtagccaacatcatctgtacccaaccccgacgaatctctgcaatctctgttgctgaacgcgttgctaaagaaagagcagagagggtgggtctgaccgtgggataccagattcggttagaaagtgtcaagtcctcagccaccagactgttatactgcaccacgggagtgctgctgagaaggctagaaggagatacagctctacaaggagtttcccatatcattgttgatgaagttcatgagaggacagaagaaagtgacttcttgctgctagttttgaaggacattgtatcgcagaggccaggtcttcaagttattttaatgagtgcaactctaaacgctgagcttttttcagactattttaattcctgccccgttattactataccaggtcgtacatttcctgttgatcaattttttttggaagatgcaattgctgtgacaaggtatgtattacaggatgggagcccatatatgcggtccatgaaacagatttcaaaggaaaagcttaaagcaaggcggaacagaactgcatttgaagaagtggaagaagacctaaggctctcccttcacctccaggatcaggattctgtcaaagatgcagtgccagatcaacagttagattttaagcagctcctggcccgctataaaggggttagcaagtcagtcatcaaaacaatgtccatcatggattttgaaaaggtgaatcttgaattaatagaggccttattagagtggattgtggatggaaagcactcctaccctccaggtgctatacttgtatttttaccaggactagcagaaatcaaaatgctttatgaacagctacagtctaattctcttttcaacaacagacgtagtaatcgatgtgttattcacccacttcattcatctttatccagtgaagagcagcaggctgtgtttgtaaaacctcctgcaggagtaactaagattataatttccaccaacattgctgagacatccataaccatcgatgatgttgtctatgttatcgattctgggaaaatgaaagaaaagagatatgatgccagcaaagggatggaaagtctagaggacacctttgtatctcaagctaatgctctacaaaggaaaggccgagcaggccgtgttgcatctggggtctgcttccatttattcactagccatcactacaatcaccagcttttaaaacaacagctaccagaaatacaaagagtgccattggaacagctgtgtctaagaattaaaattttagagatgtttagtgctcataatctccagtctgtgttctctcggctcattgaacctccacacaccgattctcttcgtgcctcaaaaatacgattacgagacttaggagcattaactccagatgaaagattgacccctcttgggtatcatttggcctctctgcccgtggatgtgagaattggcaaactaatgttgtttgggtctatcttccgctgtttggatcctgctctcaccattgctgccagtttggcttttaagtctccgtttgtatctccctgggataaaaaagaagaagctaaccagaaaaagctggaatttgcattcgcaaacagtgattatctggcccttctacaagcgtataagggatggcagctaagtacaaaagaaggcgtgcgtgcaagttataattactgcagacaaaacttcttgtctggaagagttctgcaggaaatggccagcctcaaacgacaattcacggaactgttatcggatatagggtttgcaagggaagggctcagagcaagggaaattgagaaaagggcccaaggaggagatggtgtcttagatgccacaggagaagaggcaaactcaaatgctgagaaccccaagctgatatcagcaatgctgtgtgctgctttgtatccaaatgtagtgcaggtgaaaagcccagaaggaaaatttcagaagaccagtactggagctgtcagaatgcaaccaaaatcagctgagttgaagtttgtcaccaagaacgatggatatgtacacattcacccttcatcagtgaactatcaggtgagacactttgacagcccctacctgttgtaccacgagaagataaaaactagtcgagtattcatccgagactgcagcatggtgtctgtgtacccgctggtcttgtttggaggaggccaagtgaatgtgcagcttcaaagaggagagttcgttgtctccctggatgatggttggatccgttttgtagctgcttcccatcaggtggctgaactggtaaaggagcttcgttgtgaacttgatcagcttctccaggataaaattaaaaacccaagcattgatctgtgtacgtgtcctcgaggatcccggatcatcagcacaattgtgaaacttgtcaccacacaataaaaagcagtcttagagagtgcttgctactcacctgcttctagctcacctgggaaataacagcagaacctctacctcgaactaaagacctattggggctggccctggtggaggagcccagggcatgaagcccaaggcagctgaggcagtgtatatacccttagggccatttctaacaaagccttggccactcccagcacaatttggagtgtcaagggtgagagcctaaaacccagcttgcctgtctttgtctctgtgattgttctggagtgaattaagttcacctgataactcaaaagtgaatgtataatacaattctgttttaatctgtgtattctttttctcctactttttactggggtgagaggggcatgaagagaaatacgccttttttttttttcttttcctgtcgccaaggctcgactgagagaagtcagaacagagaaggggaaaaaaaacccaaaattatgtgaacaagcaaaattaaaatttcattttaggctattggctactgagtaaacttgacttgtgaggggtttttatttttactcattaaaagtcaacttaaaaaaattgaa

SEQ ID NO: 29688 - DNA, 3186 bp, Homo sapiens
aaatggtaaaatctgcaagcagttccgaatgaaacaggcttccagacagttccagtccattctgcaagagaggcaatcactccctgcttgggaagaaagagaaaccattcttaacttattgcgtaagcaccaggtggttgtcataagtggtatgactggatgtgggaaaaccacacaaattccgcagtttattctggatgattctctgaatggaccacctgagaaggtagccaacatcatctgtacccaaccccgacgaatctctgcaatctctgttgctgaacgcgttgctaaagaaagagcagagagggtgggtctgaccgtgggataccagattcggttagaaagtgtcaagtcctcagccaccagactgttatactgcaccacgggagtgctgctgagaaggctagaaggagatacagctctacaaggagtttcccatatcattgttgatgaagttcatgagaggacagaagaaagtgacttcttgctgctagttttgaaggacattgtatcgcagaggccaggtcttcaagttattttaatgagtgcaactctaaacgctgagcttttttcagactattttaattcctgccccgttattactataccaggtcgtacatttcctgttgatcaattttttttggaagatgcaattgctgtgacaaggtatgtattacaggatgggagcccatatatgcggtccatgaaacagatttcaaaggaaaagcttaaagcaaggcggaacagaactgcatttgaagaagtggaagaagacctaaggctctcccttcacctccaggatcaggattctgtcaaagatgcagtgccagatcaacagttagattttaagcagctcctggcccgctataaaggggttagcaagtcagtcatcaaaacaatgtccatcatggattttgaaaaggtgaatcttgaattaatagaggccttattagagtggattgtggatggaaagcactcctaccctccaggtgctatacttgtatttttaccaggactagcagaaatcaaaatgctttatgaacagctacagtctaattctcttttcaacaacagacgtagtaatcgatgtgttattcacccacttcattcatctttatccagtgaagagcagcaggctgtgtttgtaaaacctcctgcaggagtaactaagattataatttccaccaacattgctgagacatccataaccatcgatgatgttgtctatgttatcgattctgggaaaatgaaagaaaagagatatgatgccagcaaagggatggaaagtctagaggacacctttgtatctcaagctaatgctctacaaaggaaaggccgagcaggccgtgttgcatctggggtctgcttccatttattcactagccatcactacaatcaccagcttttaaaacaacagctaccagaaatacaaagagtgccattggaacagctgtgtctaagaattaaaattttagagatgtttagtgctcataatctccagtctgtgttctctcggctcattgaacctccacacaccgattctcttcgtgcctcaaaaatacgattacgagacttaggagcattaactccagatgaaagattgacccctcttgggtatcatttggcctctctgcccgtggatgtgagaattggcaaactaatgttgtttgggtctatcttccgctgtttggatcctgctctcaccattgctgccagtttggcttttaagtctccgtttgtatctccctgggataaaaaagaagaagctaaccagaaaaagctggaatttgcattcgcaaacagtgattatctggcccttctacaagcgtataagggatggcagctaagtacaaaagaaggcgtgcgtgcaagttataattactgcagacaaaacttcttgtctggaagagttctgcaggaaatggccagcctcaaacgacaattcacggaactgttatcggatatagggtttgcaagggaagggctcagagcaagggaaattgagaaaagggcccaaggaggagatggtgtcttagatgccacaggagaagaggcaaactcaaatgctgagaaccccaagctgatatcagcaatgctgtgtgctgctttgtatccaaatgtagtgcaggtgaaaagcccagaaggaaaatttcagaagaccagtactggagctgtcagaatgcaaccaaaatcagctgagttgaagtttgtcaccaagaacgatggatatgtacacattcacccttcatcagtgaactatcaggtgagacactttgacagcccctacctgttgtaccacgagaagataaaaactagtcgagtattcatccgagactgcagcatggtgtctgtgtacccgctggtcttgtttggaggaggccaagtgaatgtgcagcttcaaagaggagagttcgttgtctccctggatgatggttggatccgttttgtagctgcttcccatcaggtggctgaactggtaaaggagcttcgttgtgaacttgatcagcttctccaggataaaattaaaaacccaagcattgatctgtgtacgtgtcctcgaggatcccggatcatcagcacaattgtgaaacttgtcaccacacaataaaaagcagtcttagagagtgcttgctactcacctgcttctagctcacctgggaaataacagcagaacctctacctcgaactaaagacctattggggctggccctggtggaggagcccagggcatgaagcccaaggcagctgaggcagtgtatatacccttagggccatttctaacaaagccttggccactcccagcacaatttggagtgtcaagggtgagagcctaaaacccagcttgcctgtctttgtctctgtgattgttctggagtgaattaagttcacctgataactcaaaagtgaatgtataatacaattctgttttaatctgtgtattctttttctcctactttttactggggtgagaggggcatgaagagaaatacgccttttttttttttcttttcctgtcgccaaggctcgactgagagaagtcagaacagagaaggggaaaaaaaacccaaaattatgtgaacaagcaaaattaaaatttcattttaggctattggctactgagtaaacttgacttgtgaggggtttttatttttactcattaaaagtcaacttaaaaaaattgaa

SEQ ID NO: 29689 - DNA, 4024 bp, Homo sapiens
gtggtttagagccaggcgggcgtggtaacacatgcctgtagtctcagctacttggaaggctgaggcaggaggatcacttgagacaatgccagcctggaaaacataatgagtccctgtctctaaaaacaaaacaaaacaaatactgcgatttaccttagaaaaaattaatatataaaaggagaaggataaggaaggacttttaccctgtttcaaagactcaaaggataaataatgtgcccaagatcgcatagctagtaagtggtttagccaattctgtttctaaagtccattttgtttttaccccattcacatgaagattattttaaaagaattcataagtgaatcctgagggcaaagttagagataggacagaggcaagttgcttaaccaatatgggaattggattaaatgctctctaggccctccagttttaaagttctgtgagtctgatttttgacaccatgtaacaccatcacatatgtagtacaatacccaaagaacatcacaatgtatataaattgcactgtaggtaagatgatagaaacaaaaaattagatattcaatttgatcagtgtgataagtttatgataaaattatatgtaggaaatagcaagttcctgtaaatttattacagtattcaaaagtatagccagagttttaacaaacaaggcaatttttatagcattggccattaaatatgaaattgatttatatagttgtagtgactgcccaaaaataaccctttagtgagtgcttttctattattgatttaggtaaaaatctgatattgcttagagctacgctgtctgatatggtagcccctacccatgtttggctgtttatattaattaattaaaattaaaaattcagttcctcagtaacactattcttcacatttcaggtgctcaatagccacatgtagccaggtgttgctgtattggacagcacaggtatagaacatttccatcaacacggaaagttctattggacagtactggtatagagactcttgttgggaagaactggatatgtgctaagcaagagggctttatttcacccagaaaatctttcggtttattcagatgttggaaaactaatgtacagattccacaactcattctggctgattctctgagcagcattctgaataaagtcttctacatccaatcccaacaaatccaacaaaggatcactcaaggccaggagtgcaagaccatccagggcaacataacaagactctgtctctataattaaaaaaaaaaaaaagctgtaatcccagcactttgggagaccaaggcaggtggattcttgagcacaggagtttgaggccagcctgggcaacatggtgaagtcctgtctctacaaaaaaatacaaaaagccgggcttccagacagttccagtccattctgcaagagaggcaatcactccctgcttgggaagaaagagaaaccattcttaacttattgcgtaagcaccaggtggttgtcataagtggtatgactggatgtgggaaaaccacacaaattccgcagtttattctggatgattctctgaatggaccacctgagaaggtagccaacatcatctgtacccaaccccgacgaatctctgcaatctctgttgctgaacgcgttgctaaagaaagagcagagagggtgggtctgaccgtgggataccagattcggttagaaagtgtcaagtcctcagccaccagactgttatactgcaccacgggagtgctgctgagaaggctagaaggagatacagctctacaaggagtttcccatatcattgttgatgaagttcatgagaggacagaagaaagtgacttcttgctgctagttttgaaggacattgtatcgcagaggccaggtcttcaagttattttaatgagtgcaactctaaacgctgagcttttttcagactattttaattcctgccccgttattactataccaggtcgtacatttcctgttgatcaattttttttggaagatgcaattgctgtgacaaggtatgtattacaggatgggagcccatatatgcggtccatgaaacagatttcaaaggaaaagcttaaagcaaggcggaacagaactgcatttgaagaagtggaagaagacctaaggctctcccttcacctccaggatcaggattctgtcaaagatgcagtgccagatcaacagttagattttaagcagctcctggcccgctataaaggggttagcaagtcagtcatcaaaacaatgtccatcatggattttgaaaaggtgaatcttgaattaatagaggccttattagagtggattgtggatggaaagcactcctaccctccaggtgctatacttgtatttttaccaggactagcagaaatcaaaatgctttatgaacagctacagtctaattctcttttcaacaacagacgtagtaatcgatgtgttattcacccacttcattcatctttatccagtgaagagcagcaggctgtgtttgtaaaacctcctgcaggagtaactaagattataatttccaccaacattgctgagacatccataaccatcgatgatgttgtctatgttatcgattctgggaaaatgaaagaaaagagatatgatgccagcaaagggatggaaagtctagaggacacctttgtatctcaagctaatgctctacaaaggaaaggccgagcaggccgtgttgcatctggggtctgcttccatttattcactagccatcactacaatcaccagcttttaaaacaacagctaccagaaatacaaagagtgccattggaacagctgtgtctaagaattaaaattttagagatgtttagtgctcataatctccagtctgtgttctctcggctcattgaacctccacacaccgattctcttcgtgcctcaaaaatacgattacgagacttaggagcattaactccagatgaaagattgacccctcttgggtatcatttggcctctctgcccgtggatgtgagaattggcaaactaatgttgtttgggtctatcttccgctgtttggatcctgctctcaccattgctgccagtttggcttttaagtctccgtttgtatctccctgggataaaaaagaagaagctaaccagaaaaagctggaatttgcattcgcaaacagtgattatctggcccttctacaagcgtataagggatggcagctaagtacaaaagaaggcgtgcgtgcaagttataattactgcagacaaaacttcttgtctggaagagttctgcaggaaatggccagcctcaaacgacaattcacggaactgttatcggatatagggtttgcaagggaagggctcagagcaagggaaattgagaaaagggcccaaggaggagatggtgtcttagatgccacaggagaagaggcaaactcaaatgctgagaaccccaagctgatatcagcaatgctgtgtgctgctttgtatccaaatgtagtgcaggtgaaaagcccagaaggaaaatttcagaagaccagtactggagctgtcagaatgcaaccaaaatcagctgagttgaagtttgtcaccaagaacgatggatatgtacacattcacccttcatcagtgaactatcaggtggctgaactggtaaaggagcttcgttgtgaacttgatcagcttctccaggataaaattaaaaacccagcttgcctgtctttgtctctgtgattgttctggagtgaattaagttcacctgataactcaaaagtgaatgtataatacaattctgttttaatctgtgtattctttttctcctactttttactggggtgagaggggcatgaagagaaatacgccttttttttttttcttttcctgtcgccaaggctcgactgagagaagtcagaacagagaaggggaaaaaaaacccaaaattatgtgaacaagcaaaattaaaatttcattttaggctattggctactgagtaaacttgacttgtgaggggtttttatttttactcattaaaagtcaacttaaaaaaattgaa

SEQ ID NO: 29690 - DNA, 3584 bp, Homo sapiens
gtggtttagagccaggcgggcgtggtaacacatgcctgtagtctcagctacttggaaggctgaggcaggaggatcacttgagacaatgccagcctggaaaacataatgagtccctgtctctaaaaacaaaacaaaacaaatactgcgatttaccttagaaaaaattaatatataaaaggagaaggataaggaaggacttttaccctgtttcaaagactcaaaggataaataatgtgcccaagatcgcatagctagtaagtggtttagccaattctgtttctaaagtccattttgtttttaccccattcacatgaagattattttaaaagaattcataagtgaatcctgagggcaaagttagagataggacagaggcaagttgcttaaccaatatgggaattggattaaatgctctctaggccctccagttttaaagttctgtgagtctgatttttgacaccatgtaacaccatcacatatgtagtacaatacccaaagaacatcacaatgtatataaattgcactgtaggtaagatgatagaaacaaaaaattagatattcaatttgatcagtgtgataagtttatgataaaattatatgtaggaaatagcaagttcctgtaaatttattacagtattcaaaagtatagccagagttttaacaaacaaggcaatttttatagcattggccattaaatatgaaattgatttatatagttgtagtgactgcccaaaaataaccctttagtgagtgcttttctattattgatttaggtaaaaatctgatattgcttagagctacgctgtctgatatggtagcccctacccatgtttggctgtttatattaattaattaaaattaaaaattcagttcctcagtaacactattcttcacatttcaggtgctcaatagccacatgtagccaggtgttgctgtattggacagcacaggtatagaacatttccatcaacacggaaagttctattggacagtactggtatagagactcttgttgggaagaactggatatgtgctaagcaagagggctttatttcacccagaaaatctttcggtttattcagatgttggaaaactaatgtacagattccacaactcattctggctgattctctgagcagcattctgaataaagtcttctacatccaatcccaacaaatccaacaaaggatcactcaaggccaggagtgcaagaccatccagggcaacataacaagactctgtctctataattaaaaaaaaaaaaaagctgtaatcccagcactttgggagaccaaggcaggtggattcttgagcacaggagtttgaggccagcctgggcaacatggtgaagtcctgtctctacaaaaaaatacaaaaagccgggcttccagacagttccagtccattctgcaagagaggcaatcactccctgcttgggaagaaagagaaaccattcttaacttattgcgtaagcaccaggtggttgtcataagtggtatgactggatgtgggaaaaccacacaaattccgcagtttattctggatgattctctgaatggaccacctgagaaggtagccaacatcatctgtacccaaccccgacgaatctctgcaatctctgttgctgaacgcgttgctaaagaaagagcagagagggtgggtctgaccgtgggataccagattcggttagaaagtgtcaagtcctcagccaccagactgttatactgcaccacgggagtgctgctgagaaggctagaaggagatacagctctacaaggagtttcccatatcattgttgatgaagttcatgagaggacagaagaaagtgacttcttgctgctagttttgaaggacattgtatcgcagaggccaggtcttcaagttattttaatgagtgcaactctaaacgctgagcttttttcagactattttaattcctgccccgttattactataccaggtcgtacatttcctgttgatcaattttttttggaagatgcaattgctgtgacaaggtatgtattacaggatgggagcccatatatgcggtccatgaaacagatttcaaaggaaaagcttaaagcaaggcggaacagaactgcatttgaagaagtggaagaagacctaaggctctcccttcacctccaggatcaggattctgtcaaagatgcagtgccagatcaacagttagattttaagcagctcctggcccgctataaaggggttagcaagtcagtcatcaaaacaatgtccatcatggattttgaaaaggtgaatcttgaattaatagaggccttattagagtggattgtggatggaaagcactcctaccctccaggtgctatacttgtatttttaccaggactagcagaaatcaaaatgctttatgaacagctacagtctaattctcttttcaacaacagacgtagtaatcgatgtgttattcacccacttcattcatctttatccagtgaagagcagcaggctgtgtttgtaaaacctcctgcaggagtaactaagattataatttccaccaacattgctgagacatccataaccatcgatgatgttgtctatgttatcgattctgggaaaatgaaagaaaagagatatgatgccagcaaagggatggaaagtctagaggacacctttgtatctcaagctaatgctctacaaaggaaaggccgagcaggccgtgttgcatctggggtctgcttccatttattcactagccatcactacaatcaccagcttttaaaacaacagctaccagaaatacaaagagtgccattggaacagctgtgtctaagaattaaaattttagagatgtttagtgctcataatctccagtctgtgttctctcggctcattgaacctccacacaccgattctcttcgtgcctcaaaaatacgattacgagacttaggagcattaactccagatgaaagattgacccctcttgggtatcatttggcctctctgcccgtggatgtgagaattggcaaactaatgttgtttgggtctatcttccgctgtttggatcctgctctcaccattgctgccagtttggcttttaagtctccgtttgtatctccctgggataaaaaagaagaagctaaccagaaaaagctggaatttgcattcgcaaacagtgattatctggcccttctacaagcgtataagggatggcagctaagtacaaaagaaggcgtgcgtgcaagttataattactgcagacaaaacttcttgtctggaagagttctgcaggaaaagagatgagccagcaagaccataatgaaggagaaagaggaaacattctgctgagttccactgagagcacgaaccactctaggcctgagtaaggaactgagaggacaggagcaaaaatgcaagtaggaaaagctaggtagtagacagtgccgcagcacttggagttggaattccagtcaaaacaaacagcattttttgctgtcctaagaatttcgtggaaaatcaggcctacccaaaatccaatgagagtgtttaaaattgtaatctagagttaaataaatgatccttggatttattgaatttttgcatttctg

SEQ ID NO: 29691 - DNA, 1029 bp, Homo sapiens
aaatttggggagtcattaataggcagtatttaaatccgtgggactggggggttgttccctttttgttgccagtgacatcactgtcatcatctgaggttttttgttacaggtgagacactttgacagcccctacctgttgtaccacgagaagataaaaactagtcgagtattcatccgagactgcagcatggtgtctgtgtacccgctggtcttgtttggaggaggccaagtgaatgtgcagcttcaaagaggagagttcgttgtctccctggatgatggttggatccgttttgtagctgcttcccatcaggtggctgaactggtaaaggagcttcgttgtgaacttgatcagcttctccaggataaaattaaaaacccaagcattgatctgtgtacgtgtcctcgaggatcccggatcatcagcacaattgtgaaacttgtcaccacacaataaaaagcagtcttagagagtgcttgctactcacctgcttctagctcacctgggaaataacagcagaacctctacctcgaactaaagacctattggggctggccctggtggaggagcccagggcatgaagcccaaggcagctgaggcagtgtatatacccttagggccatttctaacaaagccttggccactcccagcacaatttggagtgtcaagggtgagagcctaaaacccagcttgcctgtctttgtctctgtgattgttctggagtgaattaagttcacctgataactcaaaagtgaatgtataatacaattctgttttaatctgtgtattctttttctcctactttttactggggtgagaggggcatgaagagaaatacgccttttttttttttcttttcctgtcgccaaggctcgactgagagaagtcagaacagagaaggggaaaaaaaacccaaaattatgtgaacaagcaaaattaaaatttcattttaggctattggctactgagtaaacttgacttgtgaggggtttttatttttactcattaaaagtcaacttaaaaaaattgaa

SEQ ID NO: 29692 - DNA, 1069 bp, Homo sapiens
tgccaagagatactttctatgagaatatatatattatatgtctatttttacaaatacttgttgtttaggtgaaaagcccagaaggaaaatttcagaagaccagtactggagctgtcagaatgcaaccaaaatcagctgagttgaagtttgtcaccaagaacgatggatatgtacacattcacccttcatcagtgaactatcaggtgagacactttgacagcccctacctgttgtaccacgagaagatagtcttgtttggaggaggccaagtgaatgtgcagcttcaaagaggagagttcgttgtctccctggatgatggttggatccgttttgtagctgcttcccatcaggtggctgaactggtaaaggagcttcgttgtgaacttgatcagcttctccaggataaaattaaaaacccaagcattgatctgtgtacgtgtcctcgaggatcccggatcatcagcacaattgtgaaacttgtcaccacacaataaaaagcagtcttagagagtgcttgctactcacctgcttctagctcacctgggaaataacagcagaacctctacctcgaactaaagacctattggggctggccctggtggaggagcccagggcatgaagcccaaggcagctgaggcagtgtatatacccttagggccatttctaacaaagccttggccactcccagcacaatttggagtgtcaagggtgagagcctaaaacccagcttgcctgtctttgtctctgtgattgttctggagtgaattaagttcacctgataactcaaaagtgaatgtataatacaattctgttttaatctgtgtattctttttctcctactttttactggggtgagaggggcatgaagagaaatacgccttttttttttttcttttcctgtcgccaaggctcgactgagagaagtcagaacagagaaggggaaaaaaaacccaaaattatgtgaacaagcaaaattaaaatttcattttaggctattggctactgagtaaacttgacttgtgaggggtttttatttttactcattaaaagtcaacttaaaaaaattgaa

SEQ ID NO: 29693 - DNA, 2585 bp, Homo sapiens
gtggtttagagccaggcgggcgtggtaacacatgcctgtagtctcagctacttggaaggctgaggcaggaggatcacttgagacaatgccagcctggaaaacataatgagtccctgtctctaaaaacaaaacaaaacaaatactgcgatttaccttagaaaaaattaatatataaaaggagaaggataaggaaggacttttaccctgtttcaaagactcaaaggataaataatgtgcccaagatcgcatagctagtaagtggtttagccaattctgtttctaaagtccattttgtttttaccccattcacatgaagattattttaaaagaattcataagtgaatcctgagggcaaagttagagataggacagaggcaagttgcttaaccaatatgggaattggattaaatgctctctaggccctccagttttaaagttctgtgagtctgatttttgacaccatgtaacaccatcacatatgtagtacaatacccaaagaacatcacaatgtatataaattgcactgtaggtaagatgatagaaacaaaaaattagatattcaatttgatcagtgtgataagtttatgataaaattatatgtaggaaatagcaagttcctgtaaatttattacagtattcaaaagtatagccagagttttaacaaacaaggcaatttttatagcattggccattaaatatgaaattgatttatatagttgtagtgactgcccaaaaataaccctttagtgagtgcttttctattattgatttaggtaaaaatctgatattgcttagagctacgctgtctgatatggtagcccctacccatgtttggctgtttatattaattaattaaaattaaaaattcagttcctcagtaacactattcttcacatttcaggtgctcaatagccacatgtagccaggtgttgctgtattggacagcacaggtatagaacatttccatcaacacggaaagttctattggacagtactggtatagagactcttgttgggaagaactggatatgtgctaagcaagagggctttatttcacccagaaaatctttcggtttattcagatgttggaaaactaatgtacagattccacaactcattctggctgattctctgagcagcattctgaataaagtcttctacatccaatcccaacaaatccaacaaaggatcactcaaggccaggagtgcaagaccatccagggcaacataacaagactctgtctctataattaaaaaaaaaaaaaagctgtaatcccagcactttgggagaccaaggcaggtggattcttgagcacaggagtttgaggccagcctgggcaacatggtgaagtcctgtctctacaaaaaaatacaaaaagccgggcttccagacagttccagtccattctgcaagagaggcaatcactccctgcttgggaagaaagagaaaccattcttaacttattgcgtaagcaccaggtggttgtcataagtggtatgactggatgtgggaaaaccacacaaattccgcagtttattctggatgattctctgaatggaccacctgagaaggtagccaacatcatctgtacccaaccccgacgaatctctgcaatctctgttgctgaacgcgttgctaaagaaagagcagagagggtgggtctgaccgtgggataccagattcggttagaaagtgtcaagtcctcagccaccagactgttatactgcaccacgggagtgctgctgagaaggctagaaggagatacagctctacaaggagtttcccatatcattgttgatgaagttcatgagaggacagaagaaaggtaaaacaaagactttcccagggaacacacactcacctgaattgaaggcatggcagaaaaaattgttttctagttccaattcagtttcatgcagctagtaatggtaatttgccacaaggaaggcctatgttagagaagagcaactgctttcttgatctccagggtctgtaacactaaaaaggacagcacatgctcatcacttattagatggagtcatcctgttaggttagaaggtatacttcacaccatcctgggcattatgctaagttgaataccgtacttagtagaaataacagatgtcatgcatgctgtggctgaatgtatcttcttccttgtttatttggccattcagtcctgacattgattcatgtatttattgagcctgcattaaatgcccaagtgatatattagttgctggggatacagtgatgaacaagcatgtatggctccccctcatctcttacagtccagtagaaaaaacaaataatgaacaagtaaacaagcaaatgattgtaaattggaataagcactatgaaggaataaacggcatgctgtgtttggagggagagacccatagatgctcaaagatcatatctctgtaagatgacaatttaaattcaaaactgaagtatggccgggcgcaatggctcacacccataatccctgcactttgggaggccaaggtgggaggatcgcttgagctcaggagttggagccccacctgggcaacatagtgagaccatgtttccacgaaaagta

SEQ ID NO: 29694 - DNA, 1441 bp, Homo sapiens
agaatgtacttacacaaccccagatggtacaacctacaacacacctaggctgtatgatgtagccaattgctcctagactacaaatctatacagcatgttgctgtactgaatactctaagcaattataacacaatgacctagcaacagtaacataagcaaaggagagtcacgcccaaaatggaaacccaaagccaaagtaccccttcagactctacatatgacttctgagaatcaagagaaagtgaaagctcttctccgagacctgcaagaacaagatgctgatgctggatctgaaagaggcctttctggggaggaggaagatgatgagcctgattgctgtaacgatgagcggtactggccagctggacaggaaccttccctcgttcccgacttggatcctttggaatatgctggcttagcctcagtggagccttatgttccagaatttacagtctccccatttgcagtgcaaaaactttccaggtatggtttcaatactgaacgctgtcaagcggtcctgaggatgtgtgatggagatgtgggagcatcactagagcatctccttacccagtgtttttcagagacatttggagagaggatgaagatctctgaggcagtcaaccagataagcttggatgagtgtatggaacagcgacaggaagaggcatttgctctcaagtccatctgtggagaaaaatttatagaaagaattcagaacagagtctggaccattgggttagaactggagtatctgacaagtagattccgcaaatccaagccaaaagaaagtaccaaaaatgtacaagagaattcacttgaaatctgtaaattttacctcaaaggaaattgtaaatttggatcaaaatgcagattcaaacatgaagtgcccccaaatcaaattgttggaagaatagaaagaagtgtagatgattctcatcttaatgctattgaagatgcatcttttttatatgaacttgaaattcgattttctaaagaccacaaatatccctaccaagctccgctcgtggcattttattccaccaatgagaacctacctctggcttgtcgtttacatatttctgagtttctttatgacaaggccttgacatttgcggaaacttcggaacctgtcgtatattctttgataacccttttagaggaagagtcggaaatagtcaagttactaacgaatacccaccacaagtatagtgaccctcctgtgaactttctgccagtaccctctaggaccagaataaataatcctgcctgtcataaaacagtgattccaaataattcttttgtttctaatcaaattccagaagttgaaaaagcatcagaatctgaggagtcagatgaggatgacggtcctgcacctgttatagtagagaatgaaagctatgtgaaccttaagaaaaagatttccaaaagatatgactggcag

SEQ ID NO: 29695 - DNA, 845 bp, Homo sapiens
agaatgtacttacacaaccccagatggtacaacctacaacacacctaggctgtatgatgtagccaattgctcctagactacaaatctatacagcatgttgctgtactgaatactctaagcaattataacacaatgacctagcaacagtaacataagcaaaggagagtcacgcccaaaatggaaacccaaagccaaagtaccccttcagactctacatatgacttctgagaatcaagagaaagtgaaagctcttctccgagacctgcaagaacaagatgctgatgctggatctgaaagaggcctttctggggaggaggaagatgatgagcctgattgctgtaacgatgagcggtactggccagctggacaggaaccttccctcgttcccgacttggatcctttggaatatgctggcttagcctcagtggagccttatgttccagaatttacagtctccccatttgcagtgcaaaaactttccaggtatggtttcaatactgaacgctgtcaagcggtcctgaggatgtgtgatggagatgtgggagcatcactagagcatctccttacccagtgtttttcagagacatttggagagaggatgaagatctctgaggcagtcaaccagataagcttggatgagtgtatggaacagcgacaggaagaggcatttgctctcaagtccatctgtggctgagagaagtcagaacagagaaggggaaaaaaaacccaaaattatgtgaacaagcaaaattaaaatttcattttaggctattggctactgagtaaacttgacttgtgaggggtttttatttttactcattaaaagtcaacttaaaaaaattgaa

SEQ ID NO: 29696 - DNA, 475 bp, Homo sapiens
ggcctccagtagaatatgggatgatggagatgacttttgtatcttcagtgaatcaaggcgcccttccagacctagcaacagtaacataagcaaaggagagtcacgcccaaaatggaaacccaaagccaaagtaccccttcagactctacatatgacttctgagaatcaagagaaagtgaaagctcttctccgagacctgcaagaacaagatgctgatgctggatctgaaagaggcctttctggggaggaggaagatgatgagcctgattgctgtaacgatgagcggtactggccagctggacaggaaccttccctcgttcctgagagaagtcagaacagagaaggggaaaaaaaacccaaaattatgtgaacaagcaaaattaaaatttcattttaggctattggctactgagtaaacttgacttgtgaggggtttttatttttactcattaaaagtcaacttaaaaaaattgaa

SEQ ID NO: 29697 - DNA, 683 bp, Homo sapiens
ggcctccagtagaatatgggatgatggagatgacttttgtatcttcagtgaatcaaggcgcccttccagacctagcaacagtaacataagcaaaggagagtcacgcccaaaatggaaacccaaagccaaagtaccccttcagactctacatatgacttctgagaatcaagagaaagtgaaagctcttctccgagacctgcaagaacaagatgctgatgctggatctgagtaaattgttttatttgagtcaattattatattaaggaaaacatactggcagtgtgaaggtcctgtgcatctttggaatgctgtgtcagtactgattctattgtggccatttaattagttgaaagtgagccaagagtaatacaagaataattattcagccacaattttagagtgagtttgttttgcaacatccatgggattgcctttttatctttatttttttccagggcagtgctcatatggattcagtaactgatttatctgtaaccttccagataaacccttgtaatgaacaagtagaagtagtgttgaaggagcaaatattgactcggtcaggtgcagtcttaggatttgcttgtcatgactgtctgcctaagagaaagcttttactcttaaatcttattcgtttcccactctactgcatttcggctcttttgctttggatttcagttgga

SEQ ID NO: 29698 - DNA, 259 bp, Homo sapiens
caagcaaatgattgtaaattggaataagcactatgaaggaataaacggcatgctgtgtttggagggagagacccatagatgctcaaagatcatatctctgtaagatgacaatttaaattcaaaactgaagtatggccgggcgcaatggctcacacccataatccctgcactttgggaggccaaggtgggaggatcgcttgagctcaggagttggagccccacctgggcaacatagtgagaccatgtttccacgaaaagt

SEQ ID NO: 29699 - DNA, 371 bp, Homo sapiens
cagaagtcatctagtaaagactgttttgctcttgaacttgggacataatccatttaaccaaataaggagcagacagattgagaactgttttcattattcactgttttttaatgctttttatgaaaatcttaacattgtgatatgaagtagaaaggcttttattactgtccctggcaagaaactatgtttagtatggtttcctattaaatggaactgctggtgtttccaatattttttatcactatccattcaaaatggctttccagtaatgtttcctttttttgaaaattttattaatgatttatattgccctttcatgtgtaagtcctcagccaccagactgttatactgcaccacgggagtgctgctga

SEQ ID NO: 29700 - DNA, 370 bp, Homo sapiens
caatttctgttaccagaacttttcttcttgatacttttaagaccacagaacaaataggacgttagcatgacaagctttaagagaattttatatatataaactatttcaagatggttgaatgggtgttctcaggctttctattttgtctccttgtttttctaggtcgtacatttcctgttgatcaattttttttggaagatgcaattgctgtgacaaggtaaggaagatattaattaagattcagtgaaaggacctggcatggtggttcatccctgtaattctagcactttggaaggcaaaggtgggaggatcttttggggccagttcaagaccagcttgggcaacatattgggacccccatctattgaga

SEQ ID NO: 29701 - DNA, 383 bp, Homo sapiens
gccttggcctcccaaagtgctgggattacaggcgtgagccactgcgcctggcccgaatcttttctttagatgagatgtgatagaggcacttttttacaatggacctcatttagtctattacaaaatgaaaatgtatttagggtttttgctcctaatggagttaaaattagtaccagaaatctaaataatggtaatcataacttgggtatttccctccaataacctatcctgcctgttcctccaagcactgcttatattgtagctttcattttaggtggctgaactggtaaaggagcttcgttgtgaacttgatcagcttctccaggataaaattaaaaacccaagcattgatctgtgtacgtgtcctcgaggatcccggatca

SEQ ID NO: 29702 - DNA, 4574 bp, Homo sapiens
tgggtgcctttttccgccgcgcgccaccagaatgtccctgtcttgaggtctaatggcggacgccagtatgttggagttggtggtggcttaagttttgaagggaggtagcatccgttggatatccacaccatccttctcgctgcaggctttcttggactccgtactgttggtgtaaccaaggcctggaggtctgggtggctcaggtttcctgcagccatgtttctgtacaacttaaccttgcagagagccactggcatcagctttgccattcatggaaacttttctggaaccaaacaacaagaaattgttgtttcccgtgggaagatcttggagctgcttcgcccagaccccaacactggcaaagtacataccctactcactgtggaagtattcggtgttatccggtcactcatggcctttaggctgacaggtggcaccaaagactacattgtagttggcagtgactctggtcgaattgttattttggaataccagccatctaagaatatgtttgagaagattcaccaagaaacctttggcaagagtggatgccgtcgcatcgttcctggccagttcttagctgtggatcccaaagggcgagccgttatgattagtgccattgagaaacagaaattggtgtatattttgaacagagatgctgcagcccgacttaccatttcatctcccctggaagcccacaaagcaaacactttagtgtatcatgtagttggagtagatgtcggatttgaaaatccaatgtttgcttgtctggaaatggattatgaggaagcagacaatgatccaacaggggaagcagcagctaatacccagcagacacttactttctatgagctagaccttggtttaaatcatgtggtccgaaaatacagtgaacctttggaggaacacggcaacttccttattacagttccaggagggtcagatggtccaagtggagtactgatctgctctgaaaactatattacttacaagaactttggtgaccagccagatatccgctgtccaattcccaggaggcggaatgacctggatgaccctgaaagaggaatgatttttgtctgctctgcaacccataaaaccaaatcgatgttcttctttttggctcaaactgagcagggagatatctttaagatcactttggagacagatgaagatatggttactgagatccggctcaaatattttgatactgtacccgttgctgctgccatgtgtgtgcttaaaacagggttcctttttgtagcatcagaatttggaaaccattacttatatcaaattgcacatcttggagatgatgatgaagaacctgagttttcatcagccatgcctctggaagaaggagacacattcttttttcagccaagaccacttaaaaaccttgtgctggttgatgagttggacagcctctctcccattctgttttgccagatagctgatctggccaatgaagatactccacagttgtatgtggcctgtggtaggggaccccgatcatctctgagagtcctaagacatggacttgaggtgtcagaaatggctgtttctgagctacctggtaaccccaacgctgtctggacagtgcgtcgacacattgaagatgagtttgatgcctacatcattgtgtctttcgtgaatgccaccctagtgttgtccattggagaaactgtagaagaagtgactgactctgggttcctggggaccaccccgaccttgtcctgctccttattaggagatgatgccttggtgcaggtctatccagatggcattcggcacatacgagcagacaagagagtcaatgagtggaagacccctggaaagaaaacaattgtgaagtgtgcagtgaaccagcgacaagtggtgattgccctgacaggaggagagctggtctatttcgagatggatccttcaggacagctgaatgagtacacagaacggaaggagatgtcagcagatgtggtgtgcatgagtctggccaatgtaccccctggagagcagcggtctcgcttcctggctgtggggcttgtggacaacactgtcagaatcatctccctggatccctcagactgtttgcaacctctaagcatgcaggctctcccagcccagcctgagtccttgtgtatcgtggaaatgggtgggactgagaagcaggatgagctgggtgagaggggctcgattggcttcctatacctgaatattgggctacagaacggtgtgctgctgaggactgtcttggaccctgtcactggggatttgtctgatactcgcactcggtacctggggtcccgtcctgtgaagctcttccgagtccgaatgcaaggccaggaggcagtattggccatgtcaagccgctcatggttgagctattcttaccaatctcgcttccatctcaccccactgtcttacgagacactggaatttgcatcgggttttgcctcggaacagtgtcccgagggcattgtggccatctccaccaacaccctacggattttggcattagagaagctcggtgctgtcttcaatcaagtagccttcccactgcagtacacacccaggaaatttgtcatccaccctgagagtaacaaccttattatcattgaaacggaccacaatgcctacactgaggccacgaaagctcagagaaagcagcagatggcagaggaaatggtggaagcagcaggggaggatgagcgggagctggccgcagagatggcagcagcattcctcaatgaaaacctccctgaatccatctttggagctcccaaggctggcaatgggcagtgggcctctgtgatccgagtgatgaatcccattcaagggaacacactggaccttgtccagctggaacagaatgaggcagcttttagtgtggctgtgtgcaggttttccaacactggtgaagactggtatgtgctggtgggtgtggccaaggacctgatactaaacccccgatctgtggcagggggcttcgtctatacttacaagcttgtgaacaatggggaaaaactggagtttttgcacaagactcctgtggaagaggtccctgctgctattgccccattccaggggagggtgttgattggtgtggggaagctgttgcgtgtctatgacctgggaaagaagaagttactccgaaaatgtgagaataagcatattgccaattatatctctgggatccagactattggacatagggtaattgtatctgatgtccaagaaagtttcatctgggttcgctacaagcgtaatgaaaaccagcttatcatctttgctgatgatacctacccccgatgggtcactacagccagcctcctggactatgacactgtggctggggcagacaagtttggcaacatatgtgtggtgaggctcccacctaacaccaatgatgaagtagatgaggatcctacaggaaacaaagccctgtgggaccgtggcttgctcaatggggcctcccagaaggcagaggtgatcatgaactaccatgtcggggagacggtgctgtccttgcagaagaccacgctgatccctggaggctcagaatcacttgtctataccaccttgtctggaggaattggcatccttgtgccattcacgtcccatgaggaccatgacttcttccagcatgtggaaatgcacctgcggtctgaacatccccctctctgtgggcgggaccacctcagctttcgctcctactacttccctgtgaagaatgtgattgatggagacctctgtgagcagttcaattccatggaacccaacaaacaaaagaacgtctctgaagaactggaccgaaccccacccgaagtgtccaagaaactcgaggatatccggacccgctacgccttctgagccctcctttcccggtggggcttgccagagactgtgtgttttgtttcccccaccaccatcactgccacctggcttctgccatgtggcaggagggtgactggataattaagactgcattatgaaagtcaacagctctttcccctcagctcttctcctggaatgactggcttcccctcaaattggcactgagatttgctacacttctccccacctggtacatgatacatgaccccaggttccagtgtagaacctgagtcccccattccccaaagccatccctgcattgatatgtcttgactctcctgtctacttttgcacacacccttaatttttaattggttttcttgtaaatacagttttgtacaatgttatctctgtgggaggaaggaggcaggctgtggtgggactgggtagggtatagtatcactcctgagttccactgctctagaatctaaccagaaatagaaacctagtttttaaggtgactggcatccatgtgtcttgttctggagatgaggatgtaggtgggaggtttgaacccaagttagagcaggaagaactgagtagactccttccttccagataccgacttggacttgcggcactctgtggctccccacccccaggtctgtggtggtttctttgttttttcctggttctttttgctgtgctgatgaaacatgacctcaataaccatgtgtata

SEQ ID NO: 29703 - DNA, 4549 bp, Homo sapiens
ctcactatagggctcgagcggccgcccgggcaggtcgccagtatgttggagttggtggtggcttaagttttgaagggaggtagcatccgttggatatccacaccatccttctcgctgcaggctttcttggactccgtactgttggtgtaaccaaggcctggaggtctgggtggctcaggtttcctgcagccatgtttctgtacaacttaaccttgcagagagccactggcatcagctttgccattcatggaaacttttctggaaccaaacaacaagaaattgttgtttcccgtgggaagatcttggagctgcttcgcccagaccccaacactggcaaagtacataccctactcactgtggaagtattcggtgttatccggtcactcatggcctttaggctgacaggtggcaccaaagactacattgtagttggcagtgactctggtcgaattgttattttggaataccagccatctaagaatatgtttgagaagattcaccaagaaacctttggcaagagtggatgccgtcgcatcgttcctggccagttcttagctgtggatcccaaagggcgagccgttatgattagtgccattgagaaacagaaattggtgtatattttgaacagagatgctgcagcccgacttaccatttcatctcccctggaagcccacaaagcaaacactttagtgtatcatgtagttggagtagatgtcggatttgaaaatccaatgtttgcttgtctggaaatggattatgaggaagcagacaatgatccaacaggggaagcagcagctaatacccagcagacacttactttctatgagctagaccttggtttaaatcatgtggtccgaaaatacagtgaacctttggaggaacacggcaacttccttattacagttccaggagggtcagatggtccaagtggagtactgatctgctctgaaaactatattacttacaagaactttggtgaccagccagatatccgctgtccaattcccaggaggcggaatgacctggatgaccctgaaagaggaatgatttttgtctgctctgcaacccataaaaccaaatcgatgttcttctttttggctcaaactgagcagggagatatctttaagatcactttggagacagatgaagatatggttactgagatccggctcaaatattttgatactgtacccgttgctgctgccatgtgtgtgcttaaaacagggttcctttttgtagcatcagaatttggaaaccattacttatatcaaattgcacatcttggagatgatgatgaagaacctgagttttcatcagccatgcctctggaagaaggagacacattcttttttcagccaagaccacttaaaaaccttgtgctggttgatgagttggacagcctctctcccattctgttttgccagatagctgatctggccaatgaagatactccacagttgtatgtggcctgtggtaggggaccccgatcatctctgagagtcctaagacatggacttgaggtgtcagaaatggctgtttctgagctacctggtaaccccaacgctgtctggacagtgcgtcgacacattgaagatgagtttgatgcctacatcattgtgtctttcgtgaatgccaccctagtgttgtccattggagaaactgtagaagaagtgactgactctgggttcctggggaccaccccgaccttgtcctgctccttattaggagatgatgccttggtgcaggtctatccagatggcattcggcacatacgagcagacaagagagtcaatgagtggaagacccctggaaagaaaacaattgtgaagtgtgcagtgaaccagcgacaagtggtgattgccctgacaggaggagagctggtctatttcgagatggatccttcaggacagctgaatgagtacacagaacggaaggagatgtcagcagatgtggtgtgcatgagtctggccaatgtaccccctggagagcagcggtctcgcttcctggctgtggggcttgtggacaacactgtcagaatcatctccctggatccctcagactgtttgcaacctctaagcatgcaggctctcccagcccagcctgagtccttgtgtatcgtggaaatgggtgggactgagaagcaggatgagctgggtgagaggggctcgattggcttcctatacctgaatattgggctacagaacggtgtgctgctgaggactgtcttggaccctgtcactggggatttgtctgatactcgcactcggtacctggggtcccgtcctgtgaagctcttccgagtccgaatgcaaggccaggaggcagtattggccatgtcaagccgctcatggttgagctattcttaccaatctcgcttccatctcaccccactgtcttacgagacactggaatttgcatcgggttttgcctcggaacagtgtcccgagggcattgtggccatctccaccaacaccctacggattttggcattagagaagctcggtgctgtcttcaatcaagtagccttcccactgcagtacacacccaggaaatttgtcatccaccctgagagtaacaaccttattatcattgaaacggaccacaatgcctacactgaggccacgaaagctcagagaaagcagcagatggcagaggaaatggtggaagcagcaggggaggatgagcgggagctggccgcagagatggcagcagcattcctcaatgaaaacctccctgaatccatctttggagctcccaaggctggcaatgggcagtgggcctctgtgatccgagtgatgaatcccattcaagggaacacactggaccttgtccagctggaacagaatgaggcagcttttagtgtggctgtgtgcaggttttccaacactggtgaagactggtatgtgctggtgggtgtggccaaggacctgatactaaacccccgatctgtggcagggggcttcgtctatacttacaagcttgtgaacaatggggaaaaactggagtttttgcacaagactcctgtggaagaggtccctgctgctattgccccattccaggggagggtgttgattggtgtggggaagctgttgcgtgtctatgacctgggaaagaagaagttactccgaaaatgtgagaataagcatattgccaattatatctctgggatccagactattggacatagggtaattgtatctgatgtccaagaaagtttcatctgggttcgctacaagcgtaatgaaaaccagcttatcatctttgctgatgatacctacccccgatgggtcactacagccagcctcctggactatgacactgtggctggggcagacaagtttggcaacatatgtgtggtgaggctcccacctaacaccaatgatgaagtagatgaggatcctacaggaaacaaagccctgtgggaccgtggcttgctcaatggggcctcccagaaggcagaggtgatcatgaactaccatgtcggggagacggtgctgtccttgcagaagaccacgctgatccctggaggctcagaatcacttgtctataccaccttgtctggaggaattggcatccttgtgccattcacgtcccatgaggaccatgacttcttccagcatgtggaaatgcacctgcggtctgaacatccccctctctgtgggcgggaccacctcagctttcgctcctactacttccctgtgaagaatgtgattgatggagacctctgtgagcagttcaattccatggaacccaacaaacaaaagaacgtctctgaagaactggaccgaaccccacccgaagtgtccaagaaactcgaggatatccggacccgctacgccttctgagccctcctttcccggtggggcttgccagagactgtgtgttttgtttcccccaccaccatcactgccacctggcttctgccatgtggcaggagggtgactggataattaagactgcattatgaaagtcaacagctctttcccctcagctcttctcctggaatgactggcttcccctcaaattggcactgagatttgctacacttctccccacctggtacatgatacatgaccccaggttccagtgtagaacctgagtcccccattccccaaagccatccctgcattgatatgtcttgactctcctgtctacttttgcacacacccttaatttttaattggttttcttgtaaatacagttttgtacaatgttatctctgtgggaggaaggaggcaggctgtggtgggactgggtagggtatagtatcactcctgagttccactgctctagaatctaaccagaaatagaaacctagtttttaaggtgactggcatccatgtgtcttgttctggagatgaggatgtaggtgggaggtttgaacccaagttagagcaggaagaactgagtagactccttccttccagataccgacttggacttgcggcactctgtggctccccacccccaggtctgtggtggtttctttgttttttcctggttctttttgctgtgctgatgaaacatgacctcaataaccatgtgtata

SEQ ID NO: 29704 - DNA, 1180 bp, Homo sapiens
tgggtgcctttttccgccgcgcgccaccagaatgtccctgtcttgaggtctaatggcggacgccagtatgttggagttggtggtggcttaagttttgaagggaggtagcatccgttggatatccacaccatccttctcgctgcaggctttcttggactccgtactgttggtgtaaccaaggcctggaggtctgggtggctcaggtttcctgcagccatgtttctgtacaacttaaccttgcagagagccactggcatcagctttgccattcatggaaacttttctggaaccaaacaacaagaaattgttgtttcccgtgggaagatcttggagctgcttcgcccagaccccaacactggcaaagtacataccctactcactgtggaagtattcggtgttatccggtcactcatggcctttaggctgacaggtggcaccaaagactacattgtagttggcagtgactctggtcgaattgttattttggaataccagccatctaagaatatgtttgagaagattcaccaagaaacctttggcaagagtggatgccgtcgcatcgttcctggccagttcttagctgtggatcccaaagggcgagccgttatgattagtgccattgagaaacagaaattggtgtatattttgaacagagatgctgcagcccgacttaccatttcatctcccctggaagcccacaaagcaaacactttagtgtatcatgtagttggagtagatgtcggatttgaaaatccaatgtttgcttgtctggaaatggattatgaggaagcagacaatgatccaacaggggaagcagcagctaatacccagcagacacttactttctatgagctagaccttggtttaaatcatgtggtccgaaaatacagtgaacctttggaggaacacggcaacttccttattacagttccaggagggtcagatggtccaagtggagtactgacaaagccatccctgcattgatatgtcttgactctcctgtctacttttgcacacacccttaatttttaattggttttcttgtaaatacagttttgtacaatgttatctctgtgggaggaaggaggcaggctgtggtgggactgggtagggtatagtatcactcctgagttccactgctctagaatctaaccagaaatagaaacctagtttttaaggt

SEQ ID NO: 29705 - DNA, 825 bp, Homo sapiens
tgggtgcctttttccgccgcgcgccaccagaatgtccctgtcttgaggtctaatggcggacgccagtatgttggagttggtggtggcttaagttttgaagggaggtagcatccgttggatatccacaccatccttctcgctgcagggtaaaaaaacagcctggagacttccccgggcccggggaggcggagaccggccatatggaagggggacccgagactttggcgggggtcacgggcagtctaggcccgagaggctggggaccaggaggaggtaccgagggatggttgaggcgccaaaacggcttcctgcagttatctctcgcttccatccacagtgtgggaacatattctgtctcaaaatagggctcgtggagattgcttttaacttctggggactctgagacgggggaggtgtgacaagcagcgggaggcatggatgtctccctctgggtagagtaaatggtacaccgaggggaagatagaaagatggagcgtgttaaaagcgtaaataacggaaacagtctttagagccaagactccggtttgaatttgtattttggtagttgggcaacttgtctcctcctctgaacctctattttctcgtttgcgtaatggaggacagagtttaaatgcgatgatgtttccttggaggatggagaagatgcagtgagcaatcatacaagctttttgtaataatggtaaacagacgtgggggaagttttttttgttttgttttgttttgtttttgtgacggagtcacagtctgtcgcccagactggagagcagtggcgcgatctcggctcactgccatctctgcctcccg

SEQ ID NO: 29706 - DNA, 1268 bp, Homo sapiens
tgggtgcctttttccgccgcgcgccaccagaatgtccctgtcttgaggtctaatggcggacgccagtatgttggagttggtggtggcttaagttttgaagggaggtagcatccgttggatatccacaccatccttctcgctgcaggctttcttggactccgtactgttggtgtaaccaaggcctggaggtctgggtggctcaggtttcctgcagccatgtttctgtacaacttaaccttgcagagagccactggcatcagctttgccattcatggaaacttttctggaaccaaacaacaagaaattgttgtttcccgtgggaagatcttggagctgcttcgcccagaccccaacactggcaaagtacataccctactcactgtggaagtattcggtgttatccggtcactcatggcctttaggctgacaggtggcaccaaagactacattgtagttggcagtgactctggtcgaattgttattttggaataccagccatctaagaatatgtttgagaagattcaccaagaaacctttggcaagagtggatgccgtcgcatcgttcctggccagttcttagctgtggatcccaaagggcgagccgttatgattagtgccattgagaaacagaaattggtgtatattttgaacagagatgctgcagcccgacttaccatttcatctcccctggaagcccacaaagcaaacactttagtgtatcatgtagttggagtagatgtcggatttgaaaatccaatgtttgcttgtctggaaatggattatgaggaagcagacaatgatccaacaggggaagcagcagctaatacccagcaaagccatccctgcattgatatgtcttgactctcctgtctacttttgcacacacccttaatttttaattggttttcttgtaaatacagttttgtacaatgttatctctgtgggaggaaggaggcaggctgtggtgggactgggtagggtatagtatcactcctgagttccactgctctagaatctaaccagaaatagaaacctagtttttaaggtgactggcatccatgtgtcttgttctggagatgaggatgtaggtgggaggtttgaacccaagttagagcaggaagaactgagtagactccttccttccagataccgacttggacttgcggcactctgtggctccccacccccaggtctgtggtggtttctttgttttttcctggttctttttgctgtgctgatgaaacatgacctcaataaccatgtgtata

SEQ ID NO: 29707 - DNA, 394 bp, Homo sapiens
ctcctgggttcaagcgattctcctgccttagcctcccgagtagctgggattacaggcatgtgccaccacgcctggctaatttttgtatttttagtagagacggggtttcaccatggtggccaggctgggttctggttgtttatgatctttattttttggtgatctaggaaccaaacaacaagaaattgttgtttcccgtgggaagatcttggagctgcttcgcccagaccccaacactggcaaagtacataccctactcactgtggaagtattcggtgttatccggtcactcatggcctttaggctgacaggtggcaccaaagactacattgtagttggcagtgactctggtcgaattgttattttggaataccagccatctaagaatatgttt

SEQ ID NO: 29708 - DNA, 6791 bp, Homo sapiens
gctgccgcgggcggtgggcggggatcccccgggggtgcaaccttgctccacctgtgctgccctcggcgggcctggctggccccgcgcagagcggcggcggcgctcgctgtcactgccggaggtgagagcgcagcagtagcttcagcctgtcttgggcttggtccagattcgctcctctggggctacgtcccggggaagaggaagcgaggattttgctggggtggggctgtacctcttaacagcaggtgcgcgcgcgagggtgtgaacgtgtgtgtgtgtgtgtgtctgtgtgtgtgtgtgtaagacctgcgatgacgacgaggaggaacaagtgggacggcgagtgatgctcagggccagcagcaacgcatggggcgagcttcagtgtcgccagcagtgaccacagttcttgaggccaaatctggctcctaaaaaacatcaaaggaagcttgcaccaaactctcttcagggccgcctcagaagcctgccatcacccactgtgtggtgcacaatggcgccccccacaggtgtgctctcttcattgctgctgctggtgacaattgcaggttgtgcccgtaagcagtgcagcgaggggaggacatattccaatgcagtcatttcacctaacttggaaaccaccagaatcatgcgggtgtctcacaccttccctgtcgtagactgcacggccgcttgctgtgacctgtccagctgtgacctggcctggtggttcgagggccgctgctacctggtgagctgcccccacaaagagaactgtgagcccaagaagatgggccccatcaggtcttatctcacttttgtgctccggcctgttcagaggcctgcacagctgctggactatggggacatgatgctgaacaggggctccccctcggggatctggggggactcacctgaggatatcagaaaggacttgccctttctaggcaaagattggggcctagaggagatgtctgagtacgcagatgactaccgggagctggagaaggacctcttgcaacccagtggcaagcaggagcccagagggagtgccgagtacacggactggggcctactgccgggcagcgagggggccttcaactcctctgttggagacagtcctgcggtgccagcggagacgcagcaggaccctgagctccattacctgaatgagtcggcttcaacccctgccccaaaactccctgagagaagtgtgttgcttcccttgccgactactccatcttcaggagaggtgttggagaaagaaaaggcttctcagctccaggaacaatccagcaacagctctggaaaagaggttctaatgccttcccatagtcttcctccggcaagcctggagctcagctcagtcaccgtggagaaaagcccagtgctcacagtcaccccggggagtacagagcacagcatcccaacacctcccactagcgcagccccctctgagtccaccccatctgagctacccatatctcctaccactgctcccaggacagtgaaagaacttacggtatcggctggagataacctaattataactttacccgacaatgaagttgaactgaaggcctttgttgcgccagcgccacctgtagaaacaacctacaactatgaatggaatttaataagccaccccacagactaccaaggtgaaataaaacaaggacacaagcaaactcttaacctctctcaattgtccgtcggactttatgtcttcaaagtcactgtttctagtgaaaacgcctttggagaaggatttgtcaatgtcactgttaagcctgccagaagagtcaacctgccacctgtagcagttgtttctccccaactgcaagagctcactttgcctttgacgtcagccctcattgatggcagccaaagtacagatgatactgaaatagtgagttatcattgggaagaaataaacgggcccttcatagaagagaagacttcagttgactctcccgtcttacgcttgtctaaccttgatcctggtaactatagtttcaggttgactgttacagactcggacggagccactaactctacaactgcagccctaatagtgaacaatgctgtggactacccaccagttgctaatgcaggaccaaatcacaccataactttgccccaaaactccatcactttgaatggaaaccagagcagtgacgatcaccagattgtcctctatgagtggtccctgggtcctgggagtgagggcaaacatgtggtcatgcagggagtacagacgccataccttcatttatctgcaatgcaggaaggagattatacatttcagctgaaggtgacagattcttcaaggcaacagtctactgctgtggtgactgtgattgtccagcctgaaaacaatagacctccagtggctgtggccggccctgataaagagctgatcttcccagtggaaagtgctaccctggatgggagcagcagcagcgatgaccacggcattgtcttctaccactgggagcacgtcagaggccccagtgcagtggagatggaaaatattgacaaagcaatagccactgtgactggtctccaggtggggacctaccacttccgtttgacagtgaaagaccagcagggactgagcagcacgtccaccctcactgtggctgtgaagaaggaaaataatagtcctcccagagcccgggctggtggcagacatgttcttgtgcttcccaataattccattactttggatggttcaaggtctactgatgaccaaagaattgtgtcctatctgtggatccgggatggccagagtccagcagctggagatgtcatcgatggctctgaccacagtgtggctctgcagcttacgaatctggtggagggggtgtacactttccacttgcgagtcaccgacagtcagggggcctcggacacagacactgccactgtggaagtgcagccagaccctaggaagagtggcctggtggagctgaccctgcaggttggtgttgggcagctgacagagcagcggaaggacacccttgtgaggcagctggctgtgctgctgaacgtgctggactcggacattaaggtccagaagattcgggcccactcggatctcagcaccgtgattgtgttttatgtacagagcaggccgcctttcaaggttctcaaagctgctgaagtggcccgaaatctgcacatgcggctctcaaaggagaaggctgacttcttgcttttcaaggtcttgagggttgatacagcaggttgccttctgaagtgttctggccatggtcactgcgaccccctcacaaagcgctgcatttgctctcacttatggatggagaaccttatacagcgttatatctgggatggagagagcaactgtgagtggagtatattctatgtgacagtgttggcttttactcttattgtgctaacaggaggtttcacttggctttgcatctgctgctgcaaaagacaaaaaaggactaaaatcaggaaaaaaacaaagtacaccatcctggataacatggatgaacaggaaagaatggaactgaggcccaaatatggtatcaagcaccgaagcacagagcacaactccagcctgatggtatccgagtctgagtttgacagtgaccaggacacaatcttcagccgagaaaagatggagagagggaatccaaaggtttccatgaatggttccatcagaaatggagcttccttcagttattgctcaaaggacagataatggcgcagttcattgtaaagtggaaggaccccttgaatccaagaccagtcagtgggagttacagcacaaaacccactcttttagaatagttcattgaccttcttccccagtgggttagatgtgtatccccacgtactaaaagaccggtttttgaaggcacaaaacaaaaactttgctcttttaactgagatgcttgttaatagaaataaaggctgggtaaaactctaaggtatatacttaaaagagttttgagtttttgtagctggcacaatctcatattaaagatgaacaacgatttctatctgtagaaccttagagaaggtgaatgaaacaaggttttaaaaagggatgatttctgtcttagccgctgtgattgcctctaaggaacagcattctaaacacggtttctcttgtaggacctgcagtcagatggctgtgtatgttaaaatagcttgtctaagaggcacgggccatctgtggaggtacggagtcttgcatgtagcaagctttctgtgctgacggcaacactcgcacagtgccaagccctcctggtttttaattctgtgctatgtcaatggcagttttcatctctctcaagaaagcagctgttggccattcaagagctaaggaagaatcgtattctaaggactgaggcaatagaaaggggaggaggagcttaatgccgtgcaggttgaaggtagcattgtaacattatcttttctttctctaagaaaaactacactgactcctctcggtgttgtttagcagtatagttctctaatgtaaacggatccccagtttacattaaatgcaatagaagtgattaattcattaagcatttattatgttctgtaggctgtgcgtttggactgccatagatagggataacgactcagcaattgtgtatatattccaaaactctgaaatacagtcagtcttaacttggatggcgtggttatgatactctggtccccgacaggtactttccaaaataacttgacatagatgtattcacttcatatgtttaaaaatacatttaagtttttctaccgaataaatcttatttcaaacatgaaagacaattaaaacattcccacccacaaagcagtactcccgagcaattaactggagttaattgtagcctgctacgttgactggttcagggtagttccccatccacccttggtcctgaggctggtggccttggtggtgcccttggcattttttgtgggaagattagaatgagagatagaaccagtgttgtggtaccaagtgtgagcacacctaaacaatatcctgttgcacaatgcttttttaacacatgggaaaactaggaatgcattgctgatgaagaagcaaggtatttaaacaccagggcaggagtgccagagaaaatgtttccccatgggttcttaaaaaaaattcagcttttaggtgcttttgtcatctcccggagtattcatcctcatgggaccatcttatttttacttattgtaatttactggggaaaggcagaactaaaaagtgtgtcattttatttttaaaataattgctttgcttatgcctacactttctgtataactagccaattcaatactgtctatagtgttagaaggaaaatgtgatttttttttttaaccagtattgagcttcataagcctagaatctgccttatcaggtgaccagggttatggttgtttgcatgcaaatgtgaatttctggcataggggacagcagcccaaatgtaaagtcatcgggcgtaatgaggaagaagggagtgaacatttaccgctttatgtacataacatatgcagtttacatactcatttgatccttataatcaaccttgaagaggagatactatcattcttatgttgcagatagccctctgaaggcccagagaggttaagtaacttcccagaggtcatggccaagaagtagtggctccaagaactgaatgcaaattttttaaactgtagagttctgctttccactaaacaaagaactcctgccttgatggatggagggcaaattctggtggaacttttgggccacctgaaagttctattcccaggactaagaggaatttcttttaatggatccagagagccaaggtcagagggagagatggcctgcatagtctcctgtggatcacacccgggccacccctccctctaggtttacagtggacttcttctgcccctcctccttttctgtccttggccatctcagcctggcctctctgatccttccatcacagaaggatcttgaatctctgggaaatcaaacatcacagtagtgatcagaaagtgagtcctgtcttgtcaccccatttctcatcagaacaaagcacgagatggaatgaccaaccagcattcttcatggtggactgcttatcattgaggatctttgggagataaagcacgctaagagctctggacagagaaaaacaggccctagaatatgggagtgggtgtttgtagggctcataggctaacaagcactttagttgctggtttacattcaatgaaggaggattcatacccatggcattacaaggctaagcatgtgtatgactaaggaactatctgaaaaacatgcagcaaggtaagaaaatgtaccactcaacaagccagtgatgccaccttttgtgcgcggggaggagagtgactaccattgttttttgtgtgacaaagctatcatggactattttaatcttggttttattgcttaaaatatattatttttccctatgtgttgacaaggtatttctaatatcacactattaaatatatgcactaatctaaataaaggtgtctgtattttctgtaatgcttatttttagggggaaatttgttttctttatgcttcagggtagagggatttcccttgagtataggtcagcaaactgtggcctgcagcctgtgtgtgcacgccccatgagccgaaaagtgggtcttatgttttcaaatggttaaaaataaataaaaaaatttgaaacatgtgaactatatgacattcagatttgtgttcataaataaagttttattggaacatatcc

SEQ ID NO: 29709 - DNA, 3957 bp, Homo sapiens
gctgccgcgggcggtgggcggggatcccccgggggtgcaaccttgctccacctgtgctgccctcggcgggcctggctggccccgcgcagagcggcggcggcgctcgctgtcactgccggaggtgagagcgcagcagtagcttcagcctgtcttgggcttggtccagattcgctcctctggggctacgtcccggggaagaggaagcgaggattttgctggggtggggctgtacctcttaacagcaggtgcgcgcgcgagggtgtgaacgtgtgtgtgtgtgtgtgtctgtgtgtgtgtgtgtaagacctgcgatgacgacgaggaggaacaagtgggacggcgagtgatgctcagggccagcagcaacgcatggggcgagcttcagtgtcgccagcagtgaccacagttcttgaggccaaatctggctcctaaaaaacatcaaaggaagcttgcaccaaactctcttcagggccgcctcagaagcctgccatcacccactgtgtggtgcacaatggcgccccccacaggtgtgctctcttcattgctgctgctggtgacaattgcaggttgtgcccgtaagcagtgcagcgaggggaggacatattccaatgcagtcatttcacctaacttggaaaccaccagaatcatgcgggtgtctcacaccttccctgtcgtagactgcacggccgcttgctgtgacctgtccagctgtgacctggcctggtggttcgagggccgctgctacctggtgagctgcccccacaaagagaactgtgagcccaagaagatgggccccatcaggtcttatctcacttttgtgctccggcctgttcagaggcctgcacagctgctggactatggggacatgatgctgaacaggggctccccctcggggatctggggggactcacctgaggatatcagaaaggacttgccctttctaggcaaagattggggcctagaggagatgtctgagtacgcagatgactaccgggagctggagaaggacctcttgcaacccagtggcaagcaggagcccagagggagtgccgagtacacggactggggcctactgccgggcagcgagggggccttcaactcctctgttggagacagtcctgcggtgccagcggagacgcagcaggaccctgagctccattacctgaatgagtcggcttcaacccctgccccaaaactccctgagagaagtgtgttgcttcccttgccgactactccatcttcaggagaggtgttggagaaagaaaaggcttctcagctccaggaacaatccagcaacagctctggaaaagaggttctaatgccttcccatagtcttcctccggcaagcctggagctcagctcagtcaccgtggagaaaagcccagtgctcacagtcaccccggggagtacagagcacagcatcccaacacctcccactagcgcagccccctctgagtccaccccatctgagctacccatatctcctaccactgctcccaggacagtgaaagaacttacggtatcggctggagataacctaattataactttacccgacaatgaagttgaactgaaggcctttgttgcgccagcgccacctgtagaaacaacctacaactatgaatggaatttaataagccaccccacagactaccaaggtgaaataaaacaaggacacaagcaaactcttaacctctctcaattgtccgtcggactttatgtcttcaaagtcactgtttctagtgaaaacgcctttggagaaggatttgtcaatgtcactgttaagcctgccagaagagtcaacctgccacctgtagcagttgtttctccccaactgcaagagctcactttgcctttgacgtcagccctcattgatggcagccaaagtacagatgatactgaaatagtgagttatcattgggaagaaataaacgggcccttcatagaagagaagacttcagttgactctcccgtcttacgcttgtctaaccttgatcctggtaactatagtttcaggttgactgttacagactcggacggagccactaactctacaactgcagccctaatagtgaacaatgctgtggactacccaccagttgctaatgcaggaccaaatcacaccataactttgccccaaaactccatcactttgaatggaaaccagagcagtgacgatcaccagattgtcctctatgagtggtccctgggtcctgggagtgagggcaaacatgtggtcatgcagggagtacagacgccataccttcatttatctgcaatgcaggaaggagattatacatttcagctgaaggtgacagattcttcaaggcaacagtctactgctgtggtgactgtgattgtccagcctgaaaacaatagacctccagtggctgtggccggccctgataaagagctgatcttcccagtggaaagtgctaccctggatgggagcagcagcagcgatgaccacggcattgtcttctaccactgggagcacgtcagaggccccagtgcagtggagatggaaaatattgacaaagcaatagccactgtgactggtctccaggtggggacctaccacttccgtttgacagtgaaagaccagcagggactgagcagcacgtccaccctcactgtggctgtgaagaaggaaaataatagtcctcccagagcccgggctggtggcagacatgttcttgtgcttcccaataattccattactttggatggttcaaggtctactgatgaccaaagaattgtgtcctatctgtggatccgggatggccagagtccagcagctggagatgtcatcgatggctctgaccacagtgtggctctgcagcttacgaatctggtggagggggtgtacactttccacttgcgagtcaccgacagtcagggggcctcggacacagacactgccactgtggaagtgcagccagaccctaggaagagtggcctggtggagctgaccctgcaggttggtgttgggcagctgacagagcagcggaaggacacccttgtgaggcagctggctgtgctgctgaacgtgctggactcggacattaaggtccagaagattcgggcccactcggatctcagcaccgtgattgtgttttatgtacagagcaggccgcctttcaaggttctcaaagctgctgaagtggcccgaaatctgcacatgcggctctcaaaggagaaggctgacttcttgcttttcaaggtcttgagggttgatacagcaggttgccttctgaagtgttctggccatggtcactgcgaccccctcacaaagcgctgcatttgctctcacttatggatggagaaccttatacagcgttatatctgggatggagagagcaactgtgagtggagtatattctatgtgacagtgttggcttttactcttattgtgctaacaggaggtttcacttggctttgcatctgctgctgcaaaagacaaaaaaggactaaaatcaggaaaaaaacaaagtacaccatcctggataacatggatgaacaggaaagaatggaactgaggcccaaatatggtatcaagcaccgaagcacagagcacaactccagcctgatggtatccgagtctgagtttgacagtgaccaggacacaatcttcagccgagaaaagatggagagagggaatccaaaggtttccatgaatggttccatcagaaatggagcttccttcagttattgctcaaaggacagataatggcgcagttcattgtaaagtggaaggaccccttgaatccaagaccagtcagtgggagttacagcacaaaacccactcttttagaatagttcattgaccttcttccccagtgggttagatgtgtatccccacgtactaaaagaccggtttttgaaggcacaaaacaaaaactttgctcttttaactgagatgcttgttaatagaaataaaggctgggtaaaactcta

SEQ ID NO: 29710 - DNA, 426 bp, Homo sapiens
  misc_feature (42)..(42): n is a, c, g, or t
  misc_feature (51)..(51): n is a, c, g, or t
  misc_feature (54)..(54): n is a, c, g, or t
tttactccatcaaaacatccaaataaaaatatgtagactccnccaccctantcnccatctgctatagggttctaattcccccacagacatcccatcacagtgctttcccccatgacgggggactcctgagctggactccatccctcccctaccagaaaagcacaggtgctgtggcatgagttcaaccacctgaaattccctgatcttcagagtaataattctaaaatagggcaataatacccctgtcagtgttcttggaagaacttctcattacttgaggccccagaaatgcaaacactcctccggttttccagcatgctgtcaaccctggcatcagagctcttcctgccgtgggcactggtaattgacttactggagaaagtcaagcttttaagtcccaggaataaaggattcctatttccttaa

SEQ ID NO: 29711 - DNA, 1241 bp, Homo sapiens
ttgatctggccactccacaatgtatacttatatcaaaacatcatgctgtacaccataaatatatacaaattttgtcagttaaaaaaattaaaaagacattgaaaagaagcattaaaaagttataattttatatgctggcaatgaataatctgcaaatgaaataaaggaaaacctttcatttacattattatcaaaaataataaaacatttataaatacatttaaccaaggatcactgaaacccacaaaacattaccgaaaggaattaaagaagacctacataatgaaaaggcatccactattcatcttaaaatacttaatattgttaagatggcagtattactcaaagcactttatagagtcaatggaatctctgtaaaaatctcagcagctttttttaatggaaaatctgatattgaaattattattgaattgcaggacaactgaagagccgtaactatctcaaaaaaagaaaaacagtgttggaggactcatatgtcccaattttaaaacttactacagagctataagaaccaaaacagtatagtactgatgtaaggatagacacgtaagtcaatggaaaaggatcgagcgtccagaaataaactcacacatctatgtcctattaatatttgaaagggtgctaaaaccattcaatgagaaaagaagagtctcttaagcacatggtgcaaggatatctggatatccgtatccaaaagagtgaaactagacctctacctcagaccatatataaaaattaactataacatggttcaaagacctaaatgtaggagttaaaactatgaaacatgtagaagaaaacatgggagaaatcttcatgaccttgaattcagtaatggattcttagatatgacaccaaaagcatgagcaacagaagaaaaaaaaggtaaattgtactttatcacaattaaaaatttcaaaggatactctcaagaaattgaagaggcaatcgacagaataagaaaaaatatttgcaaatcacatatctggtaagtgtcttgaatatataaataactcatatcttagcaacaaaaagacagcctaatttttttaaatgtgcaaaagacttgaatagatatttctccagagaagatatacttggctgccaagcacatgaaaagctgctcaacattattagttatgcaaatgactgggaaatgcaaatcggaaaccccagtgaggtacagcttcacacctactaggatggttgtaataaaaaaa

SEQ ID NO: 29712 - DNA, 382 bp, Homo sapiens
  misc_feature (27)..(27): n is a, c, g, or t
tttcgagctggagagcaacggcacatnctcggctcactgcaaactccgcctcctgggttcaagtgattctcctgcttcagcctccggaatagctgggattacagaaatgcgtaaatggcgacagtagagccagccttcatgaatccagaaatgtgagccacattttgaggatagcagagtcactgcagaagcctggatccttgcataaccttgtcgagtgggaaaatctacccatacttgaccaaccacctaactgggggctctacatctgaaagaaatgattttttatcttatttaagccactgtagttaggagtcagtttattacaggacattgcctggtgttccaacaaataaactaccttatttgtttcaataaataa

SEQ ID NO: 29713 - DNA, 349 bp, Homo sapiens
tagcttaatgtcacacaactacttggttgctcactgtaaattttctctctcctcacttcccacctccatagaaatgcgtaaatggcgacagtagagccagccttcatgaatccagaaatgtgagccacattttgaggatagcagagtcactgcagaagcctggatccttgcataaccttgtcgagtgggaaaatctacccatacttgaccaaccacctaactgggggctctacatctgaaagaaatgattttttatcttatttaagccactgtagttaggagtcagtttattacaggacattgcctggtgttccaacaaataaactaccttatttgtttcaataaataa

SEQ ID NO: 29714 - DNA, 1009 bp, Homo sapiens
gtaggagatgagactatttcaccccaaaatatggctgtaggtggccagaatgtgtaccccaaatatgcctctttaaaataaggatcactttgagctgattatttggggagacagtagacacaggagaagctctgaaaacagagtagaagttaagcttttgtaagagaaatttgcatctataaaggaaatctccatcgtaagggtgtctcatctctgtagaagaaaaagaatgagtctaagttactaaaaactcttatcaatagagaaggcaacttaaacacaagtaaggttttttttttgtatagttacccttgtttaaggtgcttttcctccctctaactgggtaggaactttctttgtttcagagaatagtatttaagcttgaagtcaaagctatgatacttctgagatttattcaaaagctttgagatatttcctgtattatttcatttatgttgctataaaggaatacctgaggctgggtaattcataaagaaaagaggtttgtttggctcacagttctgcaggctgcacaagaagcatggcaccagcacttgcttctggtgagggtctcaggctgcttcaactcatggtggaaggggaagggaagctggcacgtgcagaaatcacatggtgagggaggaagcaatgggggtgggggaggtaccaggctctttttaacaaccagttctcgagggaactaatgagcaagaactcacttattatgacaaagatggcaccaagccattcatgagggatctaccccatgactcaaacacctcccattaatccctacctccaacattgggatcaaatttcaacatgaggtttggaggcaatacacattcaaactatagcattccccctgaaggatcccagggaatttcacaccacagtatggcattctgatatgctgattgtaaaaaattaaagtaaaatgctgggagatacttcacactgatattgacttatttaccttaagaccagccctgccaaatagaatacaatc

SEQ ID NO: 29715 - DNA, 440 bp, Homo sapiens
atcattcctaccccttccatatgtgtatcaattacacttaggccccaatgcagtgcttgtatgcattgaaagaaagaagagagcaagaaagagaggcaaccgtgtgtgaaatggccatgacttttgtagcgtagtcaatgtacaggaatttatgatatagcttcctcagacgtcaataagtaaaactcaatacaaagggggtaatttatttatatgcgcaggtaacccaaatgtattgctggtgaaggatctaatcaaggcaatcatgcttaaaatgcaattaaagtcagctatacccaatgtttctcaaatcttagtatcatatggacccctttaaaaaataaagactttctgatgagacccagggtttatgtatattgctttttaataatgttttttgaatgtgtataaagctgttaacaaatgccttatacgcataa

SEQ ID NO: 29716 - DNA, 954 bp, Homo sapiens
  misc_feature (631)..(631): n is a, c, g, or t
atgggaacagataaccagacttgggtgagtgaatttattctcctcggcctgtccagtgactgggacactcgggtctccctgtttgtcctgttcttggtcatgtatgtggtgaccgtgctggggaactgtctcattgtccttctgatcagactggacagccgactccacactcccatgtatttctttctcaccaacctctcccttgtcgatgtctcctatgccacaagtgtagtccctcagctgctggcacattttcttgcagaacataaagccatcccattccagagctgtgcagcccagttatttttctccctggccttgggtgggattgagtttgttctcctggcggtgatggcctatgaccgctatgtggctgtgtgtgatgccctgcgatactcggccatcatgcatggagggctgtgtgctaggttggccatcacatcctgggtcagtggcttcatcagctctcctgtgcagactgctatcacctttcagctgcccatgtgcagaaacaagtttattgatcacatatcctgtgaactcctagctgtggtcaggctggcttgtgtggacacctcctccaatgaggtcaccatcatggtgtctagcattgttcttctgatgacacccntctgcctggttcttttgtcctacatccagatcatctccaccatcctaaagatccagtccagagaaggaagaaagaaagctttccacacgtgtgcctctcacctcacagtggttgccctgtgctatggtgtggccattttcacttacatccagccccactccagtccctctgtccttcaggagaagttgttctctgtcttttatgccattttaacaccaatgctgaaccccatgatttacagcctaaggaataaagaggtgaagggggcctggcagaaactattatggaaattctctgggttaacatcaaagctggcaacttga

SEQ ID NO: 29717 - DNA, 369 bp, Homo sapiens
caaccccaaatccatccaaccctcaccccaccaccaacccaacccccagcccaactcccaccccaacccccaactcaacccccaccccaatatccacccaaccccactccaacccctataatctggtggacagagccggggctgtgtgggcctggtgggctgtgtgagctcgcgcaccgccgggctggtctttgacatggccccacttgcgtggagccaaggctcctgtctcccagaagggtcagctgggaatgggggaccaccctccagggccccgaggagggatggggagacacatttcgtcctccggagccaggagagtgaggggccggacgagctcggcccatggcgcttcctggcaaccctcga

SEQ ID NO: 29718 - DNA, 300 bp, Homo sapiens
tgaaatacatagagtaggtctgaattgaaatgtcaggcagctactagtatctgcattagttttactcatggccctattgatgtacttgtggagacagcaaaaagggatgacaagttgcatcaacactagaaacaaggggtctaagtacgatttttgccaagactagtgtaagaaagcagcagtagagggaaaagagatgtagacagggataaaggagagatttctacctctccaccacagaaatatggaaactttgcagtcagcaaggtagtgatcatcgcttaatacacagtttcaaac

SEQ ID NO: 29719 - DNA, 356 bp, Homo sapiens
ctaatctgaaaaattattggtaataagggccatggtaatttcaatttcagtttcaacagaatatttattatattaaaacacaaggggcacaatttacaaggctagtatgatatattaggtgtagtttaaaaatgataaagtgctttaactaaaagttattttatatcaacttaattctctatcaaagtaagtaactttatctctatcagagaaaagttaaactgaagttcagaaaggttatctaaattaatgtaagttgtgattgcaaagtaaggatttaagcttatgtcctccaaacttgaagtcctgtttttcaattctatagctgtggtgtgctggtaaaccagctcgtaaaa

SEQ ID NO: 29720 - DNA, 339 bp, Homo sapiens
tcctaaaatcaggtttcagtgtaaagtttgtatgaatacacaaggccagtcttgactgagatgattttgttaggtgtagatttaaaactaactttcccaaaagttgtttgtagcaaatgctattattgaacacttaaattataaatactctatttaaattatacccttatctgtatttcacatattaaacaaaacacttagcaaagttttagagagccaattaattttttaataaacttttattttaagattctttttatttttaattttgggcttcaaaagtactcttaattattaccttggaattatggcctttctgatctcattcattgtctctct

SEQ ID NO: 29721 - DNA, 358 bp, Homo sapiens
taactcctgacctcaggtgatccacccgcctcagcctcccaaagtgctgggattataggtgtgagccactgagccctgctgctcccagtaaattctgctggaaagaccagagtgctcttttggccagtcgctcagcagtgtcctggccatctacccgaggatctccctgcttctggacctctgcttccctcccaccactgtcagggtggagccccctcgtcaccaagttgctgtactgcagtagctgcctcctggcaccaggtgtgcccacctcccaccacggctaccagagctgtcttcctcaaacccagctcagatggtgttgccctccacgttacatggctccacgctgccacta

SEQ ID NO: 29722 - DNA, 2274 bp, Homo sapiens
atgacatctggttctgtcttcttctacatcttaatttttggaaaatatttttctcatgggggtggacaggatgtcaagtgctcccttggctatttcccctgtgggaacatcacaaagtgcttgcctcagctcctgcactgtaacggtgtggacgactgcgggaatcaggccgatgaggacaactgtggagacaacaatggatggtccatgcaatttgacaaatattttgccagttactacaaaatgacttcccaatatccttttgaggcagaaacacctgaatgtttggtcggttctgtgccagtgcaatgtctttgccaaggtctggagcttgactgtgatgaaaccaatttacgagctgttccatcggtttcttcaaatgtgactgcaatgtcacttcagtggaacttaataagaaagcttcctcctgattgcttcaagaattatcatgatcttcagaagctgtacctgcaaaacaataagattacatccatctccatctatgctttcagaggactgaatagccttactaaactgtatctcagtcataacagaataaccttcctgaagccgggtgtttttgaagatcttcacagactagaatggctgataattgaagataatcacctcagtcgaatttccccaccaacattttatggactaaattctcttattctcttagtcctgatgaataacgtcctcacccgtttacctgataaacctctctgtcaacacatgccaagactacattggctggaccttgaaggcaaccatatccataatttaagaaatttgacttttatttcctgcagtaatttaactgttttagtgatgaggaaaaacaaaattaatcacttaaatgaaaatacttttgcacctctccagaaactggatgaattggatttaggaagtaataagattgaaaatcttccaccgcttatattcaaggacctgaaggagctgtcacaattgaatctttcctataatccaatccagaaaattcaagcaaaccaatttgattatcttgtcaaactcaagtctctcagcctagaagggattgaaatttcaaatatccaacaaaggatgtttagacctcttatgaatctctctcacatatattttaagaaattccagtactgtgggtatgcaccacatgttcgcagctgtaaaccaaacactgatggaatttcatctctagagaatctcttggcaagcattattcagagagtatttgtctgggttgtatctgcagttacctgctttggaaacatttttgtcatttgcatgcgaccttatatcaggtctgagaacaagctgtatgccatgtcaatcatttctctctgctgtgccgactgcttaatgggaatatatttattcgtgatcggaggctttgacctaaagtttcgtggagaatacaataagcatgcgcagctgtggatggagagtactcattgtcagcttgtaggatctttggccattctgtccacagaagtatcagttttactgttaacatttctgacattggaaaaatacatctgcattgtctatccttttagatgtgtgagacctggaaaatgcagaacaattacagttctgattctcatttggattactggttttatagtggctttcattccattgagcaataaggaatttttcaaaaactactatggcaccaatggagtatgcttccctcttcattcagaagatacagaaagtattggagcccagatttattcagtggcaatttttcttggtattaatttggccgcatttatcatcatagttttttcctatggaagcatgttttatagtgttcatcaaagtgccataacagcaactgaaatacggaatcaagttaaaaaagagatgatccttgccaaacgttttttctttatagtatttactgatgcattatgctggatacccatttttgtagtgaaatttctttcactgcttcaggtagaaataccaggtaccataacctcttgggtagtgatttttattctgcccattaacagtgctttgaacccaattctctatactctgaccacaagaccatttaaagaaatgattcatcggttttggtataactacagacaaagaaaatctatggacagcaaaggtcagaaaacatatgctccatcattcatctgggtggaaatgtggccactgcaggagatgccacctgagttaatgaagccggaccttttcacatacccctgtgaaatgtcactgatttctcaatcaacgagactcaattcctattcatga

SEQ ID NO: 29723 - DNA, 2453 bp, Homo sapiens
ctggagtggggtaagaggcgaattatagacacaaggggctcctctgcaggaaggaggccaagggaaagaggcttgaaaggcttgatatttcacccaccaccactcactgccggagtaagcaggtctccccttcccagggctgaggggaggcagggatgtgtgctgtcccagggctgagaagtggcaggtgagctggtgattccttactgcccaggttctgtctaggaaggtgcgtcctcaccatgctggatggtgtcctagtccaggagcaccccctgagctcctggcctagactccaaagggttgggtagatgagcaaagactttacaaagaccttaggcgatatatgtccaggagcacccaggaattactgggctaccactgcagactgcaggacaagctccaagaacaggaaggaagtcttgcagctgaagggaggcactccttggcctccgcagccgatcacatgaaggtggtgccaagtctcctgctctccgtcctcctggcacaggtgtggctggtacccggcttggcccccagtcctcagtcgccagagaccccagcccctcagaaccagaccagcagggtagtgcaggctcccaaggaggaagaggaagatgagcaggaggccagcgaggagaaggccagtgaggaagagaaagcctggctgatggccagcaggcagcagcttgccaaggagacttcaaacttcggattcagcctgctgcgaaagatctccatgaggcacgatggcaacatggtcttctctccatttggcatgtccttggccatgacaggcttgatgctgggggccacagggccgactgaaacccagatcaagagagggctccacttgcaggccctgaagcccaccaagcccgggctcctgccttccctctttaagggactcagagagaccctctcccgcaacctggaactgggcctcacacaggggagttttgccttcatccacaaggattttgatgtcaaagagactttcttcaatttatccaagaggtattttgatacagagtgcgtgcctatgaattttcgcaatgcctcacaggccaaaaggctcatgaatcattacattaacaaagagactcgggggaaaattcccaaactgtttgatgagattaatcctgaaaccaaattaattcttgtggattacatcttgttcaaagggaaatggttgaccccatttgaccctgtcttcaccgaagtcgacactttccacctggacaagtacaagaccattaaggtgcccatgatgtacggtgcaggcaagtttgcctccacctttgacaagaattttcgttgtcatgtcctcaaactgccctaccaaggaaatgccaccatgctggtggtcctcatggagaaaatgggtgaccacctcgcccttgaagactacctgaccacagacttggtggagacatggctcagaaacatgaaaaccagaaacatggaagttttctttccgaagttcaagctagatcagaagtatgagatgcatgagctgcttaggcagatgggaatcagaagaatcttctcaccctttgctgaccttagtgaactctcagctactggaagaaatctccaagtatccagggttttacaaagaacagtgattgaagttgatgaaaggggcactgaggcagtggcaggaatcttgtcagaaattactgcttattccatgcctcctgtcatcaaagtggaccggccatttcatttcatgatctatgaagaaacctctggaatgcttctgtttctgggcagggtggtgaatccgactctcctataattcaggacacgcataagcacttcgcgctgtagtagatgctgaatctgaggtatcaaacacacacaggataccagcaatggatggcaggggagagtgttccttttgttcttaactagtttagggtgttctcaaataaatacagtagtccccacttatctgagggggatacattcaaagacccccagcagatgcctgaaacggtggacagtgctgaaccttatatatattttttcctacacatacatacctatgataaagtttaatttataaattaggcacagtaagagattaacaataataacaacattaagtaaaatgagttacttgaatgcaagcactgcaataccataacagtcaaactgattatagagaaggctactaagtgactcatgggcgaggagcatagacagtgtggagacattgggcaaggggagaattcacatcctgggtgggacagagcaggacaatgcaagattccatcccactactcagaatggcatgctgcttaagacttttagattgtttatttctggaatttttcatttaatgtttttggaccatggttgaccatggttaactgagactgcagaaagcaaaaccatggataagggaggactactacaaaagcattaaattgatacatattttttaa

SEQ ID NO: 29724 - DNA, 1561 bp, Homo sapiens
tgctgaaggttctgggctgcaaagctgaagctttggtttctgctctaaatgaaggacttttccaggacccaaggccacacactggaagtcttgcagctgaagggaggcactccttggcctccgcagccgatcacatgaaggtggtgccaagtctcctgctctccgtcctcctggcacagggaaatggttgaccccatttgaccctgtcttcaccgaagtcgacactttccacctggacaagtacaagaccattaaggtgcccatgatgtacggtgcaggcaagtttgcctccacctttgacaagaattttcgttgtcatgtcctcaaactgccctaccaaggaaatgccaccatgctggtggtcctcatggagaaaatgggtgaccacctcgcccttgaagactacctgaccacagacttggtggagacatggctcagaaacatgaaaaccaggagatgcatgagctgcttaggcagatgggaatcagaagaatcttctcaccctttgctgaccttagtgaactctcagctactggaagaaatctccaagtatccagggttttacaaagaacagtgattgaagttgatgaaaggggcactgaggcagtggcaggaatcttgtcagaaattactgcttattccatgcctcctgtcatcaaagtggaccggccatttcatttcatgatctatgaagaaacctctggaatgcttctgtttctgggcagggtggtgaatccgactctcctataattcaggacacgcataagcacttcgcgctgtagtagatgctgaatctgaggtatcaaacacacacaggataccagcaatggatggcaggggagagtgttccttttgttcttaactagtttagggtgttctcaaataaatacagtagtccccacttatctgagggggatacattcaaagacccccagcagatgcctgaaacggtggacagtgctgaaccttatatatattttttcctacacatacatacctatgataaagtttaatttataaattaggcacagtaagagattaacaataataacaacattaagtaaaatgagttacttgaatgcaagcactgcaataccataacagtcaaactgattatagagaaggctactaagtgactcatgggcgaggagcatagacagtgtggagacattgggcaaggggagaattcacatcctgggtgggacagagcaggacaatgcaagattccatcccactactcagaatggcatgctgcttaagacttttagattgtttatttctggaatttttcatttaatgtttttggaccatggttgaccatggttaactgagactgcagaaagcaaaaccatggataagggaggactactacaaaagcattaaattgatacatattttttaaaaaaaaaaccaaacaaacaaaaaaaaacttttttgggccgcctgggccctgaaaaagttttttaacacctttctgttgggcgccgggccccattggttagtggacactgggccatagcgtgttccccaaggaaaccggggcaagaaacaagggcgtgga

SEQ ID NO: 29725 - DNA, 1507 bp, Homo sapiens
tgctgaaggttctgggctgcaaagctgaagctttggtttctgctctaaatgaaggacttttccaggacccaaggccacacactggaagtcttgcagctgaagggaggcactccttggcctccgcagccgatcacatgaaggtggtgccaagtctcctgctctccgtcctcctggcacagggaaatggttgaccccatttgaccctgtcttcaccgaagtcgacactttccacctggacaagtacaagaccattaaggtgcccatgatgtacggtgcaggcaagtttgcctccacctttgacaagaattttcgttgtcatgtcctcaaactgccctaccaaggaaatgccaccatgctggtggtcctcatggagaaaatgggtgaccacctcgcccttgaagactacctgaccacagacttggtggagacatggctcagaaacatgaaaaccaggagatgcatgagctgcttaggcagatgggaatcagaagaatcttctcaccctttgctgaccttagtgaactctcagctactggaagaaatctccaagtatccagggttttacaaagaacagtgattgaagttgatgaaaggggcactgaggcagtggcaggaatcttgtcagaaattactgcttattccatgcctcctgtcatcaaagtggaccggccatttcatttcatgatctatgaagaaacctctggaatgcttctgtttctgggcagggtggtgaatccgactctcctataattcaggacacgcataagcacttcgcgctgtagtagatgctgaatctgaggtatcaaacacacacaggataccagcaatggatggcaggggagagtgttccttttgttcttaactagtttagggtgttctcaaataaatacagtagtccccacttatctgagggggatacattcaaagacccccagcagatgcctgaaacggtggacagtgctgaaccttatatatattttttcctacacatacatacctatgataaagtttaatttataaattaggcacagtaagagattaacaataataacaacattaagttagagaaggctactaagtgactcatgggcgaggagcatagacagtgtggagacattgggcaaggggagaattcacatcctgggtgggacagagcaggacaatgcaagattccatcccactactcagaatggcatgctgcttaagacttttagattgtttatttctggaatttttcatttaatgtttttggaccatggttgaccatggttaactgagactgcagaaagcaaaaccatggataagggaggactactacaaaagcattaaattgatacatattttttaaaaaaaaaaccaaacaaacaaaaaaaaacttttttgggccgcctgggccctgaaaaagttttttaacacctttctgttgggcgccgggccccattggttagtggacactgggccatagcgtgttccccaaggaaaccggggcaagaaacaagggcgtgga

SEQ ID NO: 29726 - DNA, 2280 bp, Homo sapiens
tgctgaaggttctgggctgcaaagctgaagctttggtttctgctctaaatgaaggacttttccaggacccaaggccacacactggaagtcttgcagctgaagggaggcactccttggcctccgcagccgatcacatgaaggtggtgccaagtctcctgctctccgtcctcctggcacaggtgtggctggtacccggcttggcccccagtcctcagtcgccagagaccccagcccctcagaaccagaccagcagggtagtgcaggctcccaaggaggaagaggaagatgagcaggaggccagcgaggagaaggccagtgaggaagagaaagcctggctgatggccagcaggcagcagcttgccaaggagacttcaaacttcggattcagcctgctgcgaaagatctccatgaggcacgatggcaacatggtcttctctccatttggcatgtccttggccatgacaggcttgatgctgggggccacagggccgactgaaacccagatcaagagagggctccacttgcaggccctgaagcccaccaagcccgggctcctgccttccctctttaagggactcagagagaccctctcccgcaacctggaactgggcctcacacaggggagttttgccttcatccacaaggattttgatgtcaaagagactttcttcaatttatccaagaggtattttgatacagagtgcgtgcctatgaattttcgcaatgcctcacaggccaaaaggctcatgaatcattacattaacaaagagactcgggggaaaattcccaaactgtttgatgagattaatcctgaaaccaaattaattcttgtggattacatcttgttcaaagggaaatggttgaccccatttgaccctgtcttcaccgaagtcgacactttccacctggacaagtacaagaccattaaggtgcccatgatgtacggtgcaggcaagtttgcctccacctttgacaagaattttcgttgtcatgtcctcaaactgccctaccaaggaaatgccaccatgctggtggtcctcatggagaaaatgggtgaccacctcgcccttgaagactacctgaccacagacttggtggagacatggctcagaaacatgaaaaccagaaacatggaagttttctttccgaagttcaagctagatcagaagtatgagatgcatgagctgcttaggcagatgggaatcagaagaatcttctcaccctttgctgaccttagtgaactctcagctactggaagaaatctccaagtatccagggttttacaaagaacagtgattgaagttgatgaaaggggcactgaggcagtggcaggaatcttgtcagaaattactgcttattccatgcctcctgtcatcaaagtggaccggccatttcatttcatgatctatgaagaaacctctggaatgcttctgtttctgggcagggtggtgaatccgactctcctataattcaggacacgcataagcacttcgcgctgtagtagatgctgaatctgaggtatcaaacacacacaggataccagcaatggatggcaggggagagtgttccttttgttcttaactagtttagggtgttctcaaataaatacagtagtccccacttatctgagggggatacattcaaagacccccagcagatgcctgaaacggtggacagtgctgaaccttatatatattttttcctacacatacatacctatgataaagtttaatttataaattaggcacagtaagagattaacaataataacaacattaagtaaaatgagttacttgaatgcaagcactgcaataccataacagtcaaactgattatagagaaggctactaagtgactcatgggcgaggagcatagacagtgtggagacattgggcaaggggagaattcacatcctgggtgggacagagcaggacaatgcaagattccatcccactactcagaatggcatgctgcttaagacttttagattgtttatttctggaatttttcatttaatgtttttggaccatggttgaccatggttaactgagactgcagaaagcaaaaccatggataagggaggactactacaaaagcattaaattgatacatattttttaaaaaaaaaaccaaacaaacaaaaaaaaacttttttgggccgcctgggccctgaaaaagttttttaacacctttctgttgggcgccgggccccattggttagtggacactgggccatagcgtgttccccaaggaaaccggggcaagaaacaagggcgtgga

SEQ ID NO: 29727 - DNA, 412 bp, Homo sapiens
tctcccgcaacctggaactgggcctcacacaggggagttttgccttcatccacaaggattttgatgtcaaagagactttcttcaatttatccaagaggtattttgatacagagtgcgtgcctatgaattttcgcaatgcctcacaggccaaaaggctcatgaatcattacattaacaaagagactcgggggaaaattcccaaactgtttgatgagattaatcctgaaaccaaattaattcttgtggattacatcttgttcaaaggtactttgataatgttctgctctcccaaggccacagggccctacgattgtctctccctttcctttcgttaggccagcatatgattaacgctacgtgattttctatgaatgtgttttcacgtttcaaaaacagattgatacacatattg

SEQ ID NO: 29728 - DNA, 536 bp, Homo sapiens
gggcatggtggctcatgcctgtaacccagcactttgggaggctcaggcatgagccactgcgcccactggcctcgttgttttaaagacaactatgagttaattccttagaacagtaggattctgaaattttaagcctagttagaaatctaccacgtgactgtatcaatgccatcttaaggagtcagggatgtgtatgcagaatggaaatctaacttactgattagccagagtcaccatgacaaagcagttatgatcatgggatttggctgtacatacttagtatagataatggggatcttaggactgaattggcaccatcccttgtagtgatctgcaacttttattttcaaacagttcctactggctaaatgacaacttcagagaatgaacacatctcatccacagagtcaagaacagagcaagagctcagtaggtgtcacctagaaggattataatacattgctgtacactactgggaaatcaatgtagtttaacactgttctgcaccctgccaaaggcaccaagtaagtacatca

SEQ ID NO: 29729 - DNA, 448 bp, Homo sapiens
cagggcattcttgataaagcacacccagacccagcccagaggcctcacacgaagacaaagaaaaccccagaacttcattcagcccagtgtttctgtagctccaccttaactgagacatttgattatgcatgtattctggcatgaattaagacacaaaacttttgtatatgtgaatgcacagttggtttcaacattggtgttaccataacaagccctggccactaatggtacatcattcctggctcctctctgcacacccctccccagcacatctatcccacttccgtgaggatgtagctcccagctctgcaaacaattctgccctgatgacctaatgacctctcaccacacaccacccatttccagactgaacagcaacaacaaaaacccaacagatatagtgggggttttccaattcagattcctcttcttccctgtcttcagacag

SEQ ID NO: 29730 - DNA, 3267 bp, Homo sapiens
gccggcccactgaagccgtggggacgcgcccagcggagctaatcagattacctggctggtgtttgcttgttctggagtgatcttctgactggaaaagaactatgtcatggatcaaggaaggagagctgtcactttgggagcggttctgtgccaacatcataaaggcaggcccaatgccgaaacacattgcattcataatggacgggaaccgtcgctatgccaagaagtgccaggtggagcggcaggaaggccactcacagggcttcaacaagctagctgagactctgcggtggtgtttgaacctgggcatcctagaggtgacagtctacgcattcagcattgagaacttcaaacgctccaagagtgaggtagacgggcttatggatctggcccggcagaagttcagccgcttgatggaagaaaaggagaaactgcagaagcatggggtgtgtatccgggtcctgggcgatctgcacttgttgcccttggatctccaggagctgattgcacaagctgtacaggccacgaagaactacaacaagtgtttcctgaatgtctgttttgcatacacatcccgtcatgagatcagcaatgctgtgagagagatggcctggggggtggagcaaggcctgttggatcccagtgatatctctgagtctctgcttgataagtgcctctataccaaccgctctcctcatcctgacatcttgatacggacttctggagaagtgcggctgagtgacttcttgctatggcagacctctcactcctgcctggtgttccaacccgttctgtggccagagtatacattttggaacctcttcgaggccatcctgcagttccagatgaaccatagcatgcttcagaaggcccgagacatgtatgcagaggagcggaagaggcagcagctggagagggaccaggctacagtgacagagcagctgctgcgagaggggctccaagccagtggggacgcccagctccgaaggacacgcttgcacaaactctcggccagacgggaagagcgagtccaaggcttcctgcaggccttggaactcaagcgagctgactggctggcccgtctgggcactgcatcagcctgaatgaggctggccacctgccactttgccctgccctctgcctccagggctccactccccttccttttcttggtgaaaggcacctcctttcctgataatgaatggtgttccctttgcttggctggggagccccccaggccaggtttgctggccatagatacctttgggctgcctgggacaggctcctgaggaggattgagggtgaaagtctcccacgagtacactaaacctaggtctggtcaccaatagggtttggagagcaaagggccacaactcatcagctgcctgtctcttagatgcactttctttttccaccagcacatccttcaacacacagaatttcagggaagagttctccccaaaaccctagctctttacccttccattttagccttccacccagcttccacaaaagatttggctctaccttggatctgctagtaaataactaataggcaggcagttatttgggtaaggaaaaaaggggtgggagagacagaaaatttgcccatctgctgctcctcccccttggctctccacctgggatttgctattgaatctctaccctctcccaccacacagtactgattgctcactgaaagactcagcacccccaatggtgcgcggaagccaggcgggcgattacaatccaattacctattgtcgactcagcccacacaagcttttctcctcctcttgcagggcatggggccaggctccactcccaaatgagactggccccctccatggttcagggtaacagaagggcctgtaggccctggtgaactgaatccagcacaggcctcccctgtaacacaacaggactgagcagaaccaaacacttcttccaactgactctgctccctgccctcaccatctcaaactctgattcccactccactcttcgaggtttctctcagctttttgacctggctccctaagtaggccctagatgatttattcttggcatggcaaagcttgttctaggtcctctgcttgtgagggtcaaagctgtgtcctttcccttacctccctctgccaggacttgctgcagagctgctgagaggattagtgcctttgaagagctgtctgcctgagcaactctatttcaggtgccccacaccggcaagtaccagccagcaacaccaaccaaatgctactctctttaaagtccattttccttcttctttttttttttttttttttggagacagcatctcaccctgtcctggctggtctcgaactcctgacctcaggtgatccgccggcctcaccctcccaaagtgctgggattacaggcatgagccaccatgccagacttcccattttactttctgcaagctgtttccctagcagctccctctaggggagaggtgaaatcttgcaagttgtagcaagagcacacaggaaacccctaactttcctataccccacccgcctcttcccctttctgtcccgggatacctggcggcaagagacttcttggctattgtccatgctcccagaatcaagcataaatgccagacacggcgattgagaagccaatcagtgaaccctttggcaaagcccccatccacacctggcactcccctctaccaatccctggcacagggttcctggagagcaggtgctgtacattttacagctttacaatggggctgttgacagccataattagggaggcatgaattatgcggctataatgcagagccctacaattaaggcgggaatgaggggctggaggcagcaaacggaatctgccctatgagcgtggctgttgagtcctgtctcctgggtctgactttccgtaatatgattggggtacagtagaggtgattaatggggctggcatctctctttggcctgaggttctgtattctgggaaaggtacacagggtggagtagggagaagctgccccaggaggcgatgtagtggtggaaagaagaggcagagaggtcgtcgtcgtcgcccagcagcaagggctgcaaaatagtagaactcgtggttgctttggacaggtgtgatttgtgcaagccaggttcaacccttgcctcaagaaatcagatgggaccaatttagtgtccttccacctgtgagccaagcccccatttgaggacatctatcgtattcttgtgtgctgggtctcaaatagaattttaaagattc

SEQ ID NO: 29731 - DNA, 969 bp, Homo sapiens
gccggcccactgaagccgtggggacgcgcccagcggagctaatcagattacctggctggtgtttgcttgttctggagtgatcttctgactggaaaagaactatgtcatggatcaaggaaggagagctgtcactttgggagcggttctgtgccaacatcataaaggcaggcccaatgccgaaacacattgcattcataatggacgggaaccgtcgctatgccaagaagtgccaggtggagcggcaggaaggccactcacagggcttcaacaagctagctgagactctgcggtggtgtttgaacctgggcatcctagaggtgacagtctacgcattcagcattgagaacttcaaacgctccaagagtgaggtagacgggcttatggatctggcccggcagaagttcagccgcttgatggaagaaaaggagaaactgcagaagcatggggtgtgtatccgggtcctgggcgatctgcacttgttgcccttggatctccaggagctgattgcacaagctgtacaggccacgaagaactacaacaagtgtttcctgaatgtctgttttgcatacacatcccgtcatgagatcagcaatgctgtgagagagatggcctggggggtggagcaaggcctgttggatcccaggtatcccgagttgttttgcatggtaattgttaaggaaaacaggcctgggccagcatggcagctcacgcctgtaatcctagcacattgggaggccgaggtgggcagtccacttgaggcaggccaggagttcaagaccagcctggccaacatggcaaaactccctcttttcaacaacaacaacaaaaaagcaggcctgtaccaaaccataaagcccctctgtgccatgtacttggccagaggtctaattaggggagcatgtggaaagatttaaggggatctcccaaatttagagattaggattggcttattacaacctgcttcagaac

SEQ ID NO: 29732 - DNA, 253 bp, Homo sapiens
gcacaggccctcccctgtaaccaaacaaggactagcagagaggtcgtcgtcgtcgcccagcagcaagggctgcaaaatagtagaactcgtggttgctttggacaggtgtgatttgtgcaagccaggttcaacccttgcctcaagaaatcagatgggaccaatttagtgtccttccacctgtgagccaagcccccatttgaggacatctatcgtattcttgtgtgctgggtctcaaatagaattttaaagattc

SEQ ID NO: 29733 - DNA, 317 bp, Homo sapiens
tagcagccgcctactactactactactactactagaattctcggctgtgtttacctatgttatggatcatagaaggaaaactgggtcttggggagcgggtttggggatacgaggaaaatgcaggcccaatgccgaaacacattgcattcataatggacgggaaccgtcgctatgccaagaagtgccaggtggagcggcaggaaggccactcacagggcttcaacaagctagctgaggtgggtgtgtatggcagagcccaaagtgaacagtctgtggagaggtagattatagctagaaaaccaggctctgagtttgct

SEQ ID NO: 29734 - DNA, 3781 bp, Homo sapiens
gccggcccactgaagccgtggggacgcgcccagcggagctaatcaggtgccactgaactgaaggggtgaactagaggagaagagggtgactgggcggggagcagctgcgggagaagcaaagggacgactgagggaataatcaggagaccactgaggcgtgaagtactaggcgtgcgataactgaaggagttagtaactgggagcacagagttggaaacagcttaggggaagatggagaaggaagaaacggggaatgatcaagatgtgggcaccatgatgtggcaggaaaccgacttagatgttcagaagaagtcagtgcagatacggaggaaatgggaatgggaagaagtctgcaaagccaggagaaccgaggaaaggcttttgcctccagaggtcacattgcgttataaaactctgggtggtaaaagattataggcttagaccagtgtctttggattctaatgctggctgctctccatagtccatctgattccccagaagtcagttatagctcttcgcaaaccttggtgacttcttattttctttcttgtttatccaagattacctggctggtgtttgcttgttctggagtgatcttctgactggaaaagaactatgtcatggatcaaggaaggagagctgtcactttgggagcggttctgtgccaacatcataaaggcaggcccaatgccgaaacacattgcattcataatggacgggaaccgtcgctatgccaagaagtgccaggtggagcggcaggaaggccactcacagggcttcaacaagctagctgagactctgcggtggtgtttgaacctgggcatcctagaggtgacagtctacgcattcagcattgagaacttcaaacgctccaagagtgaggtagacgggcttatggatctggcccggcagaagttcagccgcttgatggaagaaaaggagaaactgcagaagcatggggtgtgtatccgggtcctgggcgatctgcacttgttgcccttggatctccaggagctgattgcacaagctgtacaggccacgaagaactacaacaagtgtttcctgaatgtctgttttgcatacacatcccgtcatgagatcagcaatgctgtgagagagatggcctggggggtggagcaaggcctgttggatcccagtgatatctctgagtctctgcttgataagtgcctctataccaaccgctctcctcatcctgacatcttgatacggacttctggagaagtgcggctgagtgacttcttgctatggcagacctctcactcctgcctggtgttccaacccgttctgtggccagagtatacattttggaacctcttcgaggccatcctgcagttccagatgaaccatagcatgcttcagaaggcccgagacatgtatgcagaggagcggaagaggcagcagctggagagggaccaggctacagtgacagagcagctgctgcgagaggggctccaagccagtggggacgcccagctccgaaggacacgcttgcacaaactctcggccagacgggaagagcgagtccaaggcttcctgcaggccttggaactcaagcgagctgactggctggcccgtctgggcactgcatcagcctgaatgaggctggccacctgccactttgccctgccctctgcctccagggctccactccccttccttttcttggtgaaaggcacctcctttcctgataatgaatggtgttccctttgcttggctggggagccccccaggccaggtttgctggccatagatacctttgggctgcctgggacaggctcctgaggaggattgagggtgaaagtctcccacgagtacactaaacctaggtctggtcaccaatagggtttggagagcaaagggccacaactcatcagctgcctgtctcttagatgcactttctttttccaccagcacatccttcaacacacagaatttcagggaagagttctccccaaaaccctagctctttacccttccattttagccttccacccagcttccacaaaagatttggctctaccttggatctgctagtaaataactaataggcaggcagttatttgggtaaggaaaaaaggggtgggagagacagaaaatttgcccatctgctgctcctcccccttggctctccacctgggatttgctattgaatctctaccctctcccaccacacagtactgattgctcactgaaagactcagcacccccaatggtgcgcggaagccaggcgggcgattacaatccaattacctattgtcgactcagcccacacaagcttttctcctcctcttgcagggcatggggccaggctccactcccaaatgagactggccccctccatggttcagggtaacagaagggcctgtaggccctggtgaactgaatccagcacaggcctcccctgtaacacaacaggactgagcagaaccaaacacttcttccaactgactctgctccctgccctcaccatctcaaactctgattcccactccactcttcgaggtttctctcagctttttgacctggctccctaagtaggccctagatgatttattcttggcatggcaaagcttgttctaggtcctctgcttgtgagggtcaaagctgtgtcctttcccttacctccctctgccaggacttgctgcagagctgctgagaggattagtgcctttgaagagctgtctgcctgagcaactctatttcaggtgccccacaccggcaagtaccagccagcaacaccaaccaaatgctactctctttaaagtccattttccttcttctttttttttttttttttttggagacagcatctcaccctgtcctggctggtctcgaactcctgacctcaggtgatccgccggcctcaccctcccaaagtgctgggattacaggcatgagccaccatgccagacttcccattttactttctgcaagctgtttccctagcagctccctctaggggagaggtgaaatcttgcaagttgtagcaagagcacacaggaaacccctaactttcctataccccacccgcctcttcccctttctgtcccgggatacctggcggcaagagacttcttggctattgtccatgctcccagaatcaagcataaatgccagacacggcgattgagaagccaatcagtgaaccctttggcaaagcccccatccacacctggcactcccctctaccaatccctggcacagggttcctggagagcaggtgctgtacattttacagctttacaatggggctgttgacagccataattagggaggcatgaattatgcggctataatgcagagccctacaattaaggcgggaatgaggggctggaggcagcaaacggaatctgccctatgagcgtggctgttgagtcctgtctcctgggtctgactttccgtaatatgattggggtacagtagaggtgattaatggggctggcatctctctttggcctgaggttctgtattctgggaaaggtacacagggtggagtagggagaagctgccccaggaggcgatgtagtggtggaaagaagaggcagagaggtcgtcgtcgtcgcccagcagcaagggctgcaaaatagtagaactcgtggttgctttggacaggtgtgatttgtgcaagccaggttcaacccttgcctcaagaaatcagatgggaccaatttagtgtccttccacctgtgagccaagcccccatttgaggacatctatcgtattcttgtgtgctgggtctcaaatagaattttaaagattc

SEQ ID NO: 29735 - DNA, 3431 bp, Homo sapiens
gccggcccactgaagccgtggggacgcgcccagcggagctaatcagattacctggctggtgtttgcttgttctggagtgatcttctgactggaaaagaactatgtcatggatcaaggaaggagagctgtcactttgggagcggttctgtgccaacatcataaaggcaggcccaatgccgaaacacattgcattcataatggacgggaaccgtcgctatgccaagaagtgccaggtggagcggcaggaaggccactcacagggcttcaacaagctagctgagactctgcggtggtgtttgaacctgggcatcctagaggtgacagtctacgcattcagcattgagaacttcaaacgctccaagagtgaggtagacgggcttatggatctggcccggcagaagttcagccgcttgatggaagaaaaggagaaactgcagaagcatggggtgtgtatccgggtcctgggcgatctgcacttgttgcccttggatctccaggagctgattgcacaagctgtacaggccacgaagaactacaacaagtgtttcctgaatgtctgttttgcatacacatcccgtcatgagatcagcaatgctgtgagagagatggcctggggggtggagcaaggcctgttggatcccagtgatatctctgagtctctgcttgataagtgcctctataccaaccgctctcctcatcctgacatcttgatacggacttctggagaagtgcggctgagtgacttcttgctatggcagacctctcactcctgcctggtgttccaacccgttctgtggccagagtatacattttggaacctcttcgaggccatcctgcagttccagatgaaccatagcatgcttcagaaggcccgagacatgtatgcagaggagcggaagaggcagcagctggagagggaccaggctacagtgacagagcagctgctgcgagaggggctccaagccagtggggacgcccagctccgaaggacacgcttgcacaaactctcggccagacgggaagagcgagtccaaggcttcctgcaggccttggaactcaagcgagctgactggctggcccgtctgggcactgcatcagcctgaatgaggctggccacctgccactttgccctgccctctgcctccagggctccactccccttccttttcttggtgaaaggcacctcctttcctgataatgaatggtgttccctttgcttggctggggagccccccaggccaggtttgctggccatagatacctttgggctgcctgggacaggctcctgaggaggattgagggtgaaagtctcccacgagtacactaaacctaggtctggtcaccaatagggtttggagagcaaagggccacaactcatcagctgcctgtctcttagatgcactttctttttccaccagcacatccttcaacacacagaatttcagggaagagttctccccaaaaccctagctctttacccttccattttagccttccacccagcttccacaaaagatttggctctaccttggatctgctagtaaataactaataggcaggcagttatttgggtaaggaaaaaaggggtgggagagacagaaaatttgcccatctgctgctcctcccccttggctctccacctgggatttgctattgaatctctaccctctcccaccacacagtactgattgctcactgaaagactcagcacccccaatggtgcgcggaagccaggcgggcgattacaatccaattacctattgtcgactcagcccacacaagcttttctcctcctcttgcagggcatggggccaggctccactcccaaatgagactggccccctccatggttcagggtaacagaagggcctgtaggccctggtgaactgaatccagcacaggcctcccctgtaacacaacaggactgagcagaaccaaacacttcttccaactgactctgctccctgccctcaccatctcaaactctgattcccactccactcttcgaggtttctctcagctttttgacctggctccctaagtaggccctagatgatttattcttggcatggcaaagcttgttctaggtcctctgcttgtgagggtcaaagctgtgtcctttcccttacctccctctgccaggacttgctgcagagctgctgagaggattagtgcctttgaagagctgtctgcctgagcaactctatttcaggtgccccacaccggcaagtaccagccagcaacaccaaccaaatgctactctctttaaagtccattttccttcttctttttttttttttttttttggagacagcatctcaccctgtcctggctggtctcgaactcctgacctcaggtgatccgccggcctcaccctcccaaagtgctgggattacaggcatgagccaccatgccagacttcccattttactttctgcaagctgtttccctagcagctccctctaggggagaggtgaaatcttgcaagttgtagcaagagcacacaggaaacccctaactttcctataccccacccgcctcttcccctttctgtcccgggatacctggcggcaagagacttcttggctattgtccatgctcccagaatcaagcataaatgccagacacggcgattgagaagccaatcagtgaaccctttggcaaagcccccatccacacctggcactcccctctaccaatccctggcacagggttcctggagagcaggtgctgtacattttacagctttacaatggggctgttgacagccataattagggaggcatgaattatgcggctataatgcagagccctacaattaaggcgggaatgaggggctggaggcagcaaacggaatctgccctatgagcgtggctgttgagtcctgtctcctgggtctgactttccgtaatatgattggggtacagtagaggtgattaatggggctggcatctctctttggcctgaggttctgtattctgggaaaggtacacagggtggagtagggagaagctgccccaggaggcgatgtagtggtggaaagaagaggcagagaggtcgtcgtcgtcgcccagcagcaagggctgcaaaatagtagaactcgtggttgctttggacaggtgtgatttgtgcaagccaggttcaacccttgcctcaagaaatcagatgggaccaatttagtgtccttccacctgtgagccaagcccccatttgaggacatctatcgtattcttgtgtgctgggtctcaaatagaattttaaagattcaaaaaaaaaaaaaaaaaaaaaaatgggggggggcgggccacagaaaggttacaaccaccgtggcgggggcccggaagaacagggcacacggccaaggaccggccgagagggggtccaccaaaaagcggggcgggtggaacagggcgggggcgaaagccaacgcg

SEQ ID NO: 29736 - DNA, 3150 bp, Homo sapiens
gccggcccactgaagccgtggggacgcgcccagcggagctaatcagattacctggctggtgtttgcttgttctggagtgatcttctgactggaaaagaactatgtcatggatcaaggaaggagagctgtcactttgggagcggttctgtgccaacatcataaaggcaggcccaatgccgaaacacattgcattcataatggacgggaaccgtcgctatgccaagaagtgccaggtggagcggcaggaaggccactcacagggcttcaacaagctagctgagactctgcggtggtgtttgaacctgggcatcctagaggtgacagtctacgcattcagcattgagaacttcaaacgctccaagagtgaggtagacgggcttatggatctggcccggcagaagttcagccgcttgatggaagaaaagtgtttcctgaatgtctgttttgcatacacatcccgtcatgagatcagcaatgctgtgagagagatggcctggggggtggagcaaggcctgttggatcccagtgatatctctgagtctctgcttgataagtgcctctataccaaccgctctcctcatcctgacatcttgatacggacttctggagaagtgcggctgagtgacttcttgctatggcagacctctcactcctgcctggtgttccaacccgttctgtggccagagtatacattttggaacctcttcgaggccatcctgcagttccagatgaaccatagcatgcttcagaaggcccgagacatgtatgcagaggagcggaagaggcagcagctggagagggaccaggctacagtgacagagcagctgctgcgagaggggctccaagccagtggggacgcccagctccgaaggacacgcttgcacaaactctcggccagacgggaagagcgagtccaaggcttcctgcaggccttggaactcaagcgagctgactggctggcccgtctgggcactgcatcagcctgaatgaggctggccacctgccactttgccctgccctctgcctccagggctccactccccttccttttcttggtgaaaggcacctcctttcctgataatgaatggtgttccctttgcttggctggggagccccccaggccaggtttgctggccatagatacctttgggctgcctgggacaggctcctgaggaggattgagggtgaaagtctcccacgagtacactaaacctaggtctggtcaccaatagggtttggagagcaaagggccacaactcatcagctgcctgtctcttagatgcactttctttttccaccagcacatccttcaacacacagaatttcagggaagagttctccccaaaaccctagctctttacccttccattttagccttccacccagcttccacaaaagatttggctctaccttggatctgctagtaaataactaataggcaggcagttatttgggtaaggaaaaaaggggtgggagagacagaaaatttgcccatctgctgctcctcccccttggctctccacctgggatttgctattgaatctctaccctctcccaccacacagtactgattgctcactgaaagactcagcacccccaatggtgcgcggaagccaggcgggcgattacaatccaattacctattgtcgactcagcccacacaagcttttctcctcctcttgcagggcatggggccaggctccactcccaaatgagactggccccctccatggttcagggtaacagaagggcctgtaggccctggtgaactgaatccagcacaggcctcccctgtaacacaacaggactgagcagaaccaaacacttcttccaactgactctgctccctgccctcaccatctcaaactctgattcccactccactcttcgaggtttctctcagctttttgacctggctccctaagtaggccctagatgatttattcttggcatggcaaagcttgttctaggtcctctgcttgtgagggtcaaagctgtgtcctttcccttacctccctctgccaggacttgctgcagagctgctgagaggattagtgcctttgaagagctgtctgcctgagcaactctatttcaggtgccccacaccggcaagtaccagccagcaacaccaaccaaatgctactctctttaaagtccattttccttcttctttttttttttttttttttggagacagcatctcaccctgtcctggctggtctcgaactcctgacctcaggtgatccgccggcctcaccctcccaaagtgctgggattacaggcatgagccaccatgccagacttcccattttactttctgcaagctgtttccctagcagctccctctaggggagaggtgaaatcttgcaagttgtagcaagagcacacaggaaacccctaactttcctataccccacccgcctcttcccctttctgtcccgggatacctggcggcaagagacttcttggctattgtccatgctcccagaatcaagcataaatgccagacacggcgattgagaagccaatcagtgaaccctttggcaaagcccccatccacacctggcactcccctctaccaatccctggcacagggttcctggagagcaggtgctgtacattttacagctttacaatggggctgttgacagccataattagggaggcatgaattatgcggctataatgcagagccctacaattaaggcgggaatgaggggctggaggcagcaaacggaatctgccctatgagcgtggctgttgagtcctgtctcctgggtctgactttccgtaatatgattggggtacagtagaggtgattaatggggctggcatctctctttggcctgaggttctgtattctgggaaaggtacacagggtggagtagggagaagctgccccaggaggcgatgtagtggtggaaagaagaggcagagaggtcgtcgtcgtcgcccagcagcaagggctgcaaaatagtagaactcgtggttgctttggacaggtgtgatttgtgcaagccaggttcaacccttgcctcaagaaatcagatgggaccaatttagtgtccttccacctgtgagccaagcccccatttgaggacatctatcgtattcttgtgtgctgggtctcaaatagaattttaaagattc

SEQ ID NO: 29737 - DNA, 2428 bp, Homo sapiens
gccggcccactgaagccgtggggacgcgcccagcggagctaatcagattacctggctggtgtttgcttgttctggagtgatcttctgactggaaaagaactatgtcatggatcaaggaaggagagctgtcactttgggagcggttctgtgccaacatcataaaggcaggcccaatgccgaaacacattgcattcataatggacgggaaccgtcgctatgccaagaagtgccaggtggagcggcaggaaggccactcacagggcttcaacaagctagctgagactctgcggtggtgtttgaacctgggcatcctagaggtgacagtctacgcattcagcattgagaacttcaaacgctccaagagtgaggtagacgggcttatggatctggcccggcagaagttcagccgcttgatggaagaaaaggagaaactgcagaagcatggggtgtgtatccgggtcctgggcgatctgcacttgttgcccttggatctccaggagctgattgcacaagctgtacaggccacgaagaactacaacaagtgtttcctgaatgtctgttttgcatacacatcccgtcatgagatcagcaatgctgtgagagagatggcctggggggtggagcaaggcctgttggatcccagtgatatctctgagtctctgcttgataagtgcctctataccaaccgctctcctcatcctgacatcttgatacggacttctggagaagtgcggctgagtgacttcttgctatggcagacctctcactcctgcctggtgttccaacccgttctgtggccagagtatacattttggaacctcttcgaggccatcctgcagttccagatgaaccatagcatgcttcagaaggcccgagacatgtatgcagaggagcggaagaggcagcagctggagagggaccaggctacagtgacagagcagctgctgcgagaggggctccaagccagtggggacgcccagctccgaaggacacgcttgcacaaactctcggccagacgggaagagcgagtccaaggcttcctgcaggccttggaactcaagcgagctgactggctggcccgtctgggcactgcatcagcctgaatgaggctggccacctgccactttgccctgccctctgcctccagggctccactccccttccttttcttggtgaaaggcacctcctttcctgataatgaatggtgttccctttgcttggctggggagccccccaggccaggtttgctggccatagatacctttgggctgcctgggacaggctcctgaggaggattgagggtgaaagtctcccacgagtacactaaacctaggtctggtcaccaatagggtttggagagcaaagggccacaactcatcagctgcctgtctcttagatgcactttctttttccaccagcacatccttcaacacacagaatttcagggaagagttctccccaaaaccctagctctttacccttccattttagccttccacccagcttccacaaaagatttggctctaccttggatctgctagtaaataactaataggcaggcatgagccaccatgccagacttcccattttactttctgcaagctgtttccctagcagctccctctaggggagaggtgaaatcttgcaagttgtagcaagagcacacaggaaacccctaactttcctataccccacccgcctcttcccctttctgtcccgggatacctggcggcaagagacttcttggctattgtccatgctcccagaatcaagcataaatgccagacacggcgattgagaagccaatcagtgaaccctttggcaaagcccccatccacacctggcactcccctctaccaatccctggcacagggttcctggagagcaggtgctgtacattttacagctttacaatggggctgttgacagccataattagggaggcatgaattatgcggctataatgcagagccctacaattaaggcgggaatgaggggctggaggcagcaaacggaatctgccctatgagcgtggctgttgagtcctgtctcctgggtctgactttccgtaatatgattggggtacagtagaggtgattaatggggctggcatctctctttggcctgaggttctgtattctgggaaaggtacacagggtggagtagggagaagctgccccaggaggcgatgtagtggtggaaagaagaggcagagaggtcgtcgtcgtcgcccagcagcaagggctgcaaaatagtagaactcgtggttgctttggacaggtgtgatttgtgcaagccaggttcaacccttgcctcaagaaatcagatgggaccaatttagtgtccttccacctgtgagccaagcccccatttgaggacatctatcgtattcttgtgtgctgggtctcaaatagaattttaaagattc

SEQ ID NO: 29738 - DNA, 3409 bp, Homo sapiens
gccggcccactgaagccgtggggacgcgcccagcggagctaatcaggtgccactgaactgaaggggtgaactagaggagaagagggtgactgggcggggagcagctgcgggagaagcaaagggacgactgagggaataatcaggagaccactgaggcgtgaagtactaggcgtgcgataactgaaggaattacctggctggtgtttgcttgttctggagtgatcttctgactggaaaagaactatgtcatggatcaaggaaggagagctgtcactttgggagcggttctgtgccaacatcataaaggcaggcccaatgccgaaacacattgcattcataatggacgggaaccgtcgctatgccaagaagtgccaggtggagcggcaggaaggccactcacagggcttcaacaagctagctgagactctgcggtggtgtttgaacctgggcatcctagaggtgacagtctacgcattcagcattgagaacttcaaacgctccaagagtgaggtagacgggcttatggatctggcccggcagaagttcagccgcttgatggaagaaaaggagaaactgcagaagcatggggtgtgtatccgggtcctgggcgatctgcacttgttgcccttggatctccaggagctgattgcacaagctgtacaggccacgaagaactacaacaagtgtttcctgaatgtctgttttgcatacacatcccgtcatgagatcagcaatgctgtgagagagatggcctggggggtggagcaaggcctgttggatcccagtgatatctctgagtctctgcttgataagtgcctctataccaaccgctctcctcatcctgacatcttgatacggacttctggagaagtgcggctgagtgacttcttgctatggcagacctctcactcctgcctggtgttccaacccgttctgtggccagagtatacattttggaacctcttcgaggccatcctgcagttccagatgaaccatagcatgcttcagaaggcccgagacatgtatgcagaggagcggaagaggcagcagctggagagggaccaggctacagtgacagagcagctgctgcgagaggggctccaagccagtggggacgcccagctccgaaggacacgcttgcacaaactctcggccagacgggaagagcgagtccaaggcttcctgcaggccttggaactcaagcgagctgactggctggcccgtctgggcactgcatcagcctgaatgaggctggccacctgccactttgccctgccctctgcctccagggctccactccccttccttttcttggtgaaaggcacctcctttcctgataatgaatggtgttccctttgcttggctggggagccccccaggccaggtttgctggccatagatacctttgggctgcctgggacaggctcctgaggaggattgagggtgaaagtctcccacgagtacactaaacctaggtctggtcaccaatagggtttggagagcaaagggccacaactcatcagctgcctgtctcttagatgcactttctttttccaccagcacatccttcaacacacagaatttcagggaagagttctccccaaaaccctagctctttacccttccattttagccttccacccagcttccacaaaagatttggctctaccttggatctgctagtaaataactaataggcaggcagttatttgggtaaggaaaaaaggggtgggagagacagaaaatttgcccatctgctgctcctcccccttggctctccacctgggatttgctattgaatctctaccctctcccaccacacagtactgattgctcactgaaagactcagcacccccaatggtgcgcggaagccaggcgggcgattacaatccaattacctattgtcgactcagcccacacaagcttttctcctcctcttgcagggcatggggccaggctccactcccaaatgagactggccccctccatggttcagggtaacagaagggcctgtaggccctggtgaactgaatccagcacaggcctcccctgtaacacaacaggactgagcagaaccaaacacttcttccaactgactctgctccctgccctcaccatctcaaactctgattcccactccactcttcgaggtttctctcagctttttgacctggctccctaagtaggccctagatgatttattcttggcatggcaaagcttgttctaggtcctctgcttgtgagggtcaaagctgtgtcctttcccttacctccctctgccaggacttgctgcagagctgctgagaggattagtgcctttgaagagctgtctgcctgagcaactctatttcaggtgccccacaccggcaagtaccagccagcaacaccaaccaaatgctactctctttaaagtccattttccttcttctttttttttttttttttttggagacagcatctcaccctgtcctggctggtctcgaactcctgacctcaggtgatccgccggcctcaccctcccaaagtgctgggattacaggcatgagccaccatgccagacttcccattttactttctgcaagctgtttccctagcagctccctctaggggagaggtgaaatcttgcaagttgtagcaagagcacacaggaaacccctaactttcctataccccacccgcctcttcccctttctgtcccgggatacctggcggcaagagacttcttggctattgtccatgctcccagaatcaagcataaatgccagacacggcgattgagaagccaatcagtgaaccctttggcaaagcccccatccacacctggcactcccctctaccaatccctggcacagggttcctggagagcaggtgctgtacattttacagctttacaatggggctgttgacagccataattagggaggcatgaattatgcggctataatgcagagccctacaattaaggcgggaatgaggggctggaggcagcaaacggaatctgccctatgagcgtggctgttgagtcctgtctcctgggtctgactttccgtaatatgattggggtacagtagaggtgattaatggggctggcatctctctttggcctgaggttctgtattctgggaaaggtacacagggtggagtagggagaagctgccccaggaggcgatgtagtggtggaaagaagaggcagagaggtcgtcgtcgtcgcccagcagcaagggctgcaaaatagtagaactcgtggttgctttggacaggtgtgatttgtgcaagccaggttcaacccttgcctcaagaaatcagatgggaccaatttagtgtccttccacctgtgagccaagcccccatttgaggacatctatcgtattcttgtgtgctgggtctcaaatagaattttaaagattc

SEQ ID NO: 29739 - DNA, 2355 bp, Homo sapiens
gccggcccactgaagccgtggggacgcgcccagcggagctaatcagattacctggctggtgtttgcttgttctggagtgatcttctgactggaaaagaactatgtcatggatcaaggaaggagagctgtcactttgggagcggttctgtgccaacatcataaaggcaggcccaatgccgaaacacattgcattcataatggacgggaaccgtcgctatgccaagaagtgccaggtggagcggcaggaaggccactcacagggcttcaacaagctagctgagactctgcggtggtgtttgaacctgggcatcctagaggtgacagtctacgcattcagcattgagaacttcaaacgctccaagagtgaggtagacgggcttatggatctggcccggcagaagttcagccgcttgatggaagaaaaggagaaactgcagaagcatggggtgtgtatccgggtcctgggcgatctgcacttgttgcccttggatctccaggagctgattgcacaagctgtacaggccacgaagaactacaacaagtgtttcctgaatgtctgttttgcatacacatcccgtcatgagatcagcaatgctgtgagagagatggcctggggggtggagcaaggcctgttggatcccagtgatatctctgagtctctgcttgataagtgcctctataccaaccgctctcctcatcctgacatcttgatacggacttctggagaagtgcggctgagtgacttcttgctatggcagacctctcactcctgcctggtgttccaacccgttctgtggccagagtatacattttggaacctcttcgaggccatcctgcagttccagatgaaccatagcatgcttcagaaggcccgagacatgtatgcagaggagcggaagaggcagcagctggagagggaccaggctacagtgacagagcagctgctgcgagaggggctccaagccagtggggacgcccagctccgaaggacacgcttgcacaaactctcggccagacgggaagagcgagtccaaggcttcctgcaggccttggaactcaagcgagctgactggctggcccgtctgggcactgcatcagcctgaatgaggctggccacctgccactttgccctgccctctgcctccagggctccactccccttccttttcttggtgaaaggcacctcctttcctgataatgaatggtgttccctttgcttggctggggagccccccaggccaggtttgctggccatagatacctttgggctgcctgggacaggctcctgaggaggattgagggtgaaagtctcccacgagtacactaaacctaggtctggtcaccaatagggtttggagagcaaagggccacaactcatcagctgcctgtctcttagatgcactttctttttccaccagcacatccttcaacacacagaatttcagggaagagttctccccaaaaccctagctctttacccttccattttagccttccacccagcttccacaaaagatttggctctaccttggatctgctagtaaataactaataggcaggcagttatttgggtaaggaaaaaaggggtgggagagacagaaaatttgcccatctgctgctcctcccccttggctctccacctgggatttgctattgaatctctaccctctcccaccacacagtactgattgctcactgaaagactcagcacccccaatggtgcgcggaagccaggcgggcgattacaatccaattacctattgtcgactcagcccacacaagcttttctcctcctcttgcagggcatggggccaggctccactcccaaatgagactggccccctccatggttcagggtaacagaagggcctgtaggccctggtgaactgaatccagcacaggcctcccctgtaacacaacaggactgagcagaaccaaacacttcttccaactgactctgctccctgccctcaccatctcaaactctgattcccactccactcttcgaggtttctctcagctttttgacctggctccctaagtaggccctagatgatttattcttggcatggcaaagcttgttctaggtcctctgcttgtgagggtcaaagctgtgtcctttcccttacctccctctgccaggacttgctgcagagctgctgagaggattagtgcctttgaagagctgtctgcctgagcaactctatttcaggtgccccacaccggcaagtaccagccagcaacaccaaccaaatgctactctctttaaagtccattttccttcttctttttttttttttttttttttttttttttttttttttttttttttagggggggtgccaacccttttaa

SEQ ID NO: 29740 - DNA, 3165 bp, Homo sapiens
gccggcccactgaagccgtggggacgcgcccagcggagctaatcagattacctggctggtgtttgcttgttctggagtgatcttctgactggaaaagaactatgtcatggatcaaggaaggagagctgtcactttgggagcggttctgtgccaacatcataaaggcaggcccaatgccgaaacacattgcattcataatggacgggaaccgtcgctatgccaagaagtgccaggtggagcggcaggaaggccactcacagggcttcaacaagctagctgagactctgcggtggtgtttgaacctgggcatcctagaggtgacagtctacgcattcagcattgagaacttcaaacgctccaagagtgaggtagacgggcttatggatctggcccggcagaagttcagccgcttgatggaagaaaaggagaaactgcagaagcatggggtgtgtatccgggtcctgggcgatctgcacttgttgcccttggatctccaggagctgattgcacaagctgtacaggccacgaagaactacaacaatgatatctctgagtctctgcttgataagtgcctctataccaaccgctctcctcatcctgacatcttgatacggacttctggagaagtgcggctgagtgacttcttgctatggcagacctctcactcctgcctggtgttccaacccgttctgtggccagagtatacattttggaacctcttcgaggccatcctgcagttccagatgaaccatagcatgcttcagaaggcccgagacatgtatgcagaggagcggaagaggcagcagctggagagggaccaggctacagtgacagagcagctgctgcgagaggggctccaagccagtggggacgcccagctccgaaggacacgcttgcacaaactctcggccagacgggaagagcgagtccaaggcttcctgcaggccttggaactcaagcgagctgactggctggcccgtctgggcactgcatcagcctgaatgaggctggccacctgccactttgccctgccctctgcctccagggctccactccccttccttttcttggtgaaaggcacctcctttcctgataatgaatggtgttccctttgcttggctggggagccccccaggccaggtttgctggccatagatacctttgggctgcctgggacaggctcctgaggaggattgagggtgaaagtctcccacgagtacactaaacctaggtctggtcaccaatagggtttggagagcaaagggccacaactcatcagctgcctgtctcttagatgcactttctttttccaccagcacatccttcaacacacagaatttcagggaagagttctccccaaaaccctagctctttacccttccattttagccttccacccagcttccacaaaagatttggctctaccttggatctgctagtaaataactaataggcaggcagttatttgggtaaggaaaaaaggggtgggagagacagaaaatttgcccatctgctgctcctcccccttggctctccacctgggatttgctattgaatctctaccctctcccaccacacagtactgattgctcactgaaagactcagcacccccaatggtgcgcggaagccaggcgggcgattacaatccaattacctattgtcgactcagcccacacaagcttttctcctcctcttgcagggcatggggccaggctccactcccaaatgagactggccccctccatggttcagggtaacagaagggcctgtaggccctggtgaactgaatccagcacaggcctcccctgtaacacaacaggactgagcagaaccaaacacttcttccaactgactctgctccctgccctcaccatctcaaactctgattcccactccactcttcgaggtttctctcagctttttgacctggctccctaagtaggccctagatgatttattcttggcatggcaaagcttgttctaggtcctctgcttgtgagggtcaaagctgtgtcctttcccttacctccctctgccaggacttgctgcagagctgctgagaggattagtgcctttgaagagctgtctgcctgagcaactctatttcaggtgccccacaccggcaagtaccagccagcaacaccaaccaaatgctactctctttaaagtccattttccttcttctttttttttttttttttttggagacagcatctcaccctgtcctggctggtctcgaactcctgacctcaggtgatccgccggcctcaccctcccaaagtgctgggattacaggcatgagccaccatgccagacttcccattttactttctgcaagctgtttccctagcagctccctctaggggagaggtgaaatcttgcaagttgtagcaagagcacacaggaaacccctaactttcctataccccacccgcctcttcccctttctgtcccgggatacctggcggcaagagacttcttggctattgtccatgctcccagaatcaagcataaatgccagacacggcgattgagaagccaatcagtgaaccctttggcaaagcccccatccacacctggcactcccctctaccaatccctggcacagggttcctggagagcaggtgctgtacattttacagctttacaatggggctgttgacagccataattagggaggcatgaattatgcggctataatgcagagccctacaattaaggcgggaatgaggggctggaggcagcaaacggaatctgccctatgagcgtggctgttgagtcctgtctcctgggtctgactttccgtaatatgattggggtacagtagaggtgattaatggggctggcatctctctttggcctgaggttctgtattctgggaaaggtacacagggtggagtagggagaagctgccccaggaggcgatgtagtggtggaaagaagaggcagagaggtcgtcgtcgtcgcccagcagcaagggctgcaaaatagtagaactcgtggttgctttggacaggtgtgatttgtgcaagccaggttcaacccttgcctcaagaaatcagatgggaccaatttagtgtccttccacctgtgagccaagcccccatttgaggacatctatcgtattcttgtgtgctgggtctcaaatagaattttaaagattc

SEQ ID NO: 29741 - DNA, 3602 bp, Homo sapiens
tcatagaagttcgatactggagacgtgagagttgggaacaggtcatcgtaatatagacgtcgtgagtgaggggaatgatcaagatgtgggcaccatgatgtggcaggaaaccgacttagatgttcagaagaagtcagtgcagatacggaggaaatgggaatgggaagaagtctgcaaagccaggagaaccgaggaaaggcttttgcctccagaggtcacattgcgttataaaactctgggtggtaaaagattataggcttagaccagtgtctttggattctaatgctggctgctctccatagtccatctgattccccagaagtcagttatagctcttcgcaaaccttggtgacttcttattttctttcttgtttatccaagattacctggctggtgtttgcttgttctggagtgatcttctgactggaaaagaactatgtcatggatcaaggaaggagagctgtcactttgggagcggttctgtgccaacatcataaaggcaggcccaatgccgaaacacattgcattcataatggacgggaaccgtcgctatgccaagaagtgccaggtggagcggcaggaaggccactcacagggcttcaacaagctagctgagactctgcggtggtgtttgaacctgggcatcctagaggtgacagtctacgcattcagcattgagaacttcaaacgctccaagagtgaggtagacgggcttatggatctggcccggcagaagttcagccgcttgatggaagaaaaggagaaactgcagaagcatggggtgtgtatccgggtcctgggcgatctgcacttgttgcccttggatctccaggagctgattgcacaagctgtacaggccacgaagaactacaacaagtgtttcctgaatgtctgttttgcatacacatcccgtcatgagatcagcaatgctgtgagagagatggcctggggggtggagcaaggcctgttggatcccagtgatatctctgagtctctgcttgataagtgcctctataccaaccgctctcctcatcctgacatcttgatacggacttctggagaagtgcggctgagtgacttcttgctatggcagacctctcactcctgcctggtgttccaacccgttctgtggccagagtatacattttggaacctcttcgaggccatcctgcagttccagatgaaccatagcatgcttcagaaggcccgagacatgtatgcagaggagcggaagaggcagcagctggagagggaccaggctacagtgacagagcagctgctgcgagaggggctccaagccagtggggacgcccagctccgaaggacacgcttgcacaaactctcggccagacgggaagagcgagtccaaggcttcctgcaggccttggaactcaagcgagctgactggctggcccgtctgggcactgcatcagcctgaatgaggctggccacctgccactttgccctgccctctgcctccagggctccactccccttccttttcttggtgaaaggcacctcctttcctgataatgaatggtgttccctttgcttggctggggagccccccaggccaggtttgctggccatagatacctttgggctgcctgggacaggctcctgaggaggattgagggtgaaagtctcccacgagtacactaaacctaggtctggtcaccaatagggtttggagagcaaagggccacaactcatcagctgcctgtctcttagatgcactttctttttccaccagcacatccttcaacacacagaatttcagggaagagttctccccaaaaccctagctctttacccttccattttagccttccacccagcttccacaaaagatttggctctaccttggatctgctagtaaataactaataggcaggcagttatttgggtaaggaaaaaaggggtgggagagacagaaaatttgcccatctgctgctcctcccccttggctctccacctgggatttgctattgaatctctaccctctcccaccacacagtactgattgctcactgaaagactcagcacccccaatggtgcgcggaagccaggcgggcgattacaatccaattacctattgtcgactcagcccacacaagcttttctcctcctcttgcagggcatggggccaggctccactcccaaatgagactggccccctccatggttcagggtaacagaagggcctgtaggccctggtgaactgaatccagcacaggcctcccctgtaacacaacaggactgagcagaaccaaacacttcttccaactgactctgctccctgccctcaccatctcaaactctgattcccactccactcttcgaggtttctctcagctttttgacctggctccctaagtaggccctagatgatttattcttggcatggcaaagcttgttctaggtcctctgcttgtgagggtcaaagctgtgtcctttcccttacctccctctgccaggacttgctgcagagctgctgagaggattagtgcctttgaagagctgtctgcctgagcaactctatttcaggtgccccacaccggcaagtaccagccagcaacaccaaccaaatgctactctctttaaagtccattttccttcttctttttttttttttttttttggagacagcatctcaccctgtcctggctggtctcgaactcctgacctcaggtgatccgccggcctcaccctcccaaagtgctgggattacaggcatgagccaccatgccagacttcccattttactttctgcaagctgtttccctagcagctccctctaggggagaggtgaaatcttgcaagttgtagcaagagcacacaggaaacccctaactttcctataccccacccgcctcttcccctttctgtcccgggatacctggcggcaagagacttcttggctattgtccatgctcccagaatcaagcataaatgccagacacggcgattgagaagccaatcagtgaaccctttggcaaagcccccatccacacctggcactcccctctaccaatccctggcacagggttcctggagagcaggtgctgtacattttacagctttacaatggggctgttgacagccataattagggaggcatgaattatgcggctataatgcagagccctacaattaaggcgggaatgaggggctggaggcagcaaacggaatctgccctatgagcgtggctgttgagtcctgtctcctgggtctgactttccgtaatatgattggggtacagtagaggtgattaatggggctggcatctctctttggcctgaggttctgtattctgggaaaggtacacagggtggagtagggagaagctgccccaggaggcgatgtagtggtggaaagaagaggcagagaggtcgtcgtcgtcgcccagcagcaagggctgcaaaatagtagaactcgtggttgctttggacaggtgtgatttgtgcaagccaggttcaacccttgcctcaagaaatcagatgggaccaatttagtgtccttccacctgtgagccaagcccccatttgaggacatctatcgtattcttgtgtgctgggtctcaaatagaattttaaagattc

SEQ ID NO: 29742 - DNA, 2871 bp, Homo sapiens
ctagaggatccccatcggcacatcagcgggagaaactgcagaagcatggggtgtgtatccgggtcctgggcgatctgcacttgttgcccttggatctccaggagctgattgcacaagctgtacaggccacgaagaactacaacaagtgtttcctgaatgtctgttttgcatacacatcccgtcatgagatcagcaatgctgtgagagagatggcctggggggtggagcaaggcctgttggatcccagtgatatctctgagtctctgcttgataagtgcctctataccaaccgctctcctcatcctgacatcttgatacggacttctggagaagtgcggctgagtgacttcttgctatggcagacctctcactcctgcctggtgttccaacccgttctgtggccagagtatacattttggaacctcttcgaggccatcctgcagttccagatgaaccatagcatgcttcagaaggcccgagacatgtatgcagaggagcggaagaggcagcagctggagagggaccaggctacagtgacagagcagctgctgcgagaggggctccaagccagtggggacgcccagctccgaaggacacgcttgcacaaactctcggccagacgggaagagcgagtccaaggcttcctgcaggccttggaactcaagcgagctgactggctggcccgtctgggcactgcatcagcctgaatgaggctggccacctgccactttgccctgccctctgcctccagggctccactccccttccttttcttggtgaaaggcacctcctttcctgataatgaatggtgttccctttgcttggctggggagccccccaggccaggtttgctggccatagatacctttgggctgcctgggacaggctcctgaggaggattgagggtgaaagtctcccacgagtacactaaacctaggtctggtcaccaatagggtttggagagcaaagggccacaactcatcagctgcctgtctcttagatgcactttctttttccaccagcacatccttcaacacacagaatttcagggaagagttctccccaaaaccctagctctttacccttccattttagccttccacccagcttccacaaaagatttggctctaccttggatctgctagtaaataactaataggcaggcagttatttgggtaaggaaaaaaggggtgggagagacagaaaatttgcccatctgctgctcctcccccttggctctccacctgggatttgctattgaatctctaccctctcccaccacacagtactgattgctcactgaaagactcagcacccccaatggtgcgcggaagccaggcgggcgattacaatccaattacctattgtcgactcagcccacacaagcttttctcctcctcttgcagggcatggggccaggctccactcccaaatgagactggccccctccatggttcagggtaacagaagggcctgtaggccctggtgaactgaatccagcacaggcctcccctgtaacacaacaggactgagcagaaccaaacacttcttccaactgactctgctccctgccctcaccatctcaaactctgattcccactccactcttcgaggtttctctcagctttttgacctggctccctaagtaggccctagatgatttattcttggcatggcaaagcttgttctaggtcctctgcttgtgagggtcaaagctgtgtcctttcccttacctccctctgccaggacttgctgcagagctgctgagaggattagtgcctttgaagagctgtctgcctgagcaactctatttcaggtgccccacaccggcaagtaccagccagcaacaccaaccaaatgctactctctttaaagtccattttccttcttctttttttttttttttttttggagacagcatctcaccctgtcctggctggtctcgaactcctgacctcaggtgatccgccggcctcaccctcccaaagtgctgggattacaggcatgagccaccatgccagacttcccattttactttctgcaagctgtttccctagcagctccctctaggggagaggtgaaatcttgcaagttgtagcaagagcacacaggaaacccctaactttcctataccccacccgcctcttcccctttctgtcccgggatacctggcggcaagagacttcttggctattgtccatgctcccagaatcaagcataaatgccagacacggcgattgagaagccaatcagtgaaccctttggcaaagcccccatccacacctggcactcccctctaccaatccctggcacagggttcctggagagcaggtgctgtacattttacagctttacaatggggctgttgacagccataattagggaggcatgaattatgcggctataatgcagagccctacaattaaggcgggaatgaggggctggaggcagcaaacggaatctgccctatgagcgtggctgttgagtcctgtctcctgggtctgactttccgtaatatgattggggtacagtagaggtgattaatggggctggcatctctctttggcctgaggttctgtattctgggaaaggtacacagggtggagtagggagaagctgccccaggaggcgatgtagtggtggaaagaagaggcagagaggtcgtcgtcgtcgcccagcagcaagggctgcaaaatagtagaactcgtggttgctttggacaggtgtgatttgtgcaagccaggttcaacccttgcctcaagaaatcagatgggaccaatttagtgtccttccacctgtgagccaagcccccatttgaggacatctatcgtattcttgtgtgctgggtctcaaatagaattttaaagattc

SEQ ID NO: 29743 - DNA, 2894 bp, Homo sapiens
ctaccatttgttcattggttgacctttatcagacagtatgtcttccagatgccctctaagggccaagagccaataacataatccagatgttatttcatagtcctaaaattggctcttagaaaaatcctggtggaaatgttgatctagtctcgttttagttctgctttaccacaggcaggtgatctggctgcctcaagtgacgcctccccctactagtgaatgaatcagggccagcagcagctgcagctacagctcaggatgcctgtaacattgtcatctctgggcttctgggtcctgcttagcctgctttttccctggaggactgaccagggatgcggcccagcaacatgttactaaatcatactctcctccctacctttcccagacctctcactcctgcctggtgttccaacccgttctgtggccagagtatacattttggaacctcttcgaggccatcctgcagttccagatgaaccatagcatgcttcagaaggcccgagacatgtatgcagaggagcggaagaggcagcagctggagagggaccaggctacagtgacagagcagctgctgcgagaggggctccaagccagtggggacgcccagctccgaaggacacgcttgcacaaactctcggccagacgggaagagcgagtccaaggcttcctgcaggccttggaactcaagcgagctgactggctggcccgtctgggcactgcatcagcctgaatgaggctggccacctgccactttgccctgccctctgcctccagggctccactccccttccttttcttggtgaaaggcacctcctttcctgataatgaatggtgttccctttgcttggctggggagccccccaggccaggtttgctggccatagatacctttgggctgcctgggacaggctcctgaggaggattgagggtgaaagtctcccacgagtacactaaacctaggtctggtcaccaatagggtttggagagcaaagggccacaactcatcagctgcctgtctcttagatgcactttctttttccaccagcacatccttcaacacacagaatttcagggaagagttctccccaaaaccctagctctttacccttccattttagccttccacccagcttccacaaaagatttggctctaccttggatctgctagtaaataactaataggcaggcagttatttgggtaaggaaaaaaggggtgggagagacagaaaatttgcccatctgctgctcctcccccttggctctccacctgggatttgctattgaatctctaccctctcccaccacacagtactgattgctcactgaaagactcagcacccccaatggtgcgcggaagccaggcgggcgattacaatccaattacctattgtcgactcagcccacacaagcttttctcctcctcttgcagggcatggggccaggctccactcccaaatgagactggccccctccatggttcagggtaacagaagggcctgtaggccctggtgaactgaatccagcacaggcctcccctgtaacacaacaggactgagcagaaccaaacacttcttccaactgactctgctccctgccctcaccatctcaaactctgattcccactccactcttcgaggtttctctcagctttttgacctggctccctaagtaggccctagatgatttattcttggcatggcaaagcttgttctaggtcctctgcttgtgagggtcaaagctgtgtcctttcccttacctccctctgccaggacttgctgcagagctgctgagaggattagtgcctttgaagagctgtctgcctgagcaactctatttcaggtgccccacaccggcaagtaccagccagcaacaccaaccaaatgctactctctttaaagtccattttccttcttctttttttttttttttttttggagacagcatctcaccctgtcctggctggtctcgaactcctgacctcaggtgatccgccggcctcaccctcccaaagtgctgggattacaggcatgagccaccatgccagacttcccattttactttctgcaagctgtttccctagcagctccctctaggggagaggtgaaatcttgcaagttgtagcaagagcacacaggaaacccctaactttcctataccccacccgcctcttcccctttctgtcccgggatacctggcggcaagagacttcttggctattgtccatgctcccagaatcaagcataaatgccagacacggcgattgagaagccaatcagtgaaccctttggcaaagcccccatccacacctggcactcccctctaccaatccctggcacagggttcctggagagcaggtgctgtacattttacagctttacaatggggctgttgacagccataattagggaggcatgaattatgcggctataatgcagagccctacaattaaggcgggaatgaggggctggaggcagcaaacggaatctgccctatgagcgtggctgttgagtcctgtctcctgggtctgactttccgtaatatgattggggtacagtagaggtgattaatggggctggcatctctctttggcctgaggttctgtattctgggaaaggtacacagggtggagtagggagaagctgccccaggaggcgatgtagtggtggaaagaagaggcagagaggtcgtcgtcgtcgcccagcagcaagggctgcaaaatagtagaactcgtggttgctttggacaggtgtgatttgtgcaagccaggttcaacccttgcctcaagaaatcagatgggaccaatttagtgtccttccacctgtgagccaagcccccatttgaggacatctatcgtattcttgtgtgctgggtctcaaatagaattttaaagattc

SEQ ID NO: 29744 - DNA, 2044 bp, Homo sapiens
cctagttttagaagtttcaatagcacactgctgcctggggcattgctgcctgggacaggctcctgaggaggattgagggtgaaagtctcccacgagtacactaaacctaggtctggtcaccaatagggtttggagagcaaagggccacaactcatcagctgcctgtctcttagatgcactttctttttccaccagcacatccttcaacacacagaatttcagggaagagttctccccaaaaccctagctctttacccttccattttagccttccacccagcttccacaaaagatttggctctaccttggatctgctagtaaataactaataggcaggcagttatttgggtaaggaaaaaaggggtgggagagacagaaaatttgcccatctgctgctcctcccccttggctctccacctgggatttgctattgaatctctaccctctcccaccacacagtactgattgctcactgaaagactcagcacccccaatggtgcgcggaagccaggcgggcgattacaatccaattacctattgtcgactcagcccacacaagcttttctcctcctcttgcagggcatggggccaggctccactcccaaatgagactggccccctccatggttcagggtaacagaagggcctgtaggccctggtgaactgaatccagcacaggcctcccctgtaacacaacaggactgagcagaaccaaacacttcttccaactgactctgctccctgccctcaccatctcaaactctgattcccactccactcttcgaggtttctctcagctttttgacctggctccctaagtaggccctagatgatttattcttggcatggcaaagcttgttctaggtcctctgcttgtgagggtcaaagctgtgtcctttcccttacctccctctgccaggacttgctgcagagctgctgagaggattagtgcctttgaagagctgtctgcctgagcaactctatttcaggtgccccacaccggcaagtaccagccagcaacaccaaccaaatgctactctctttaaagtccattttccttcttctttttttttttttttttttggagacagcatctcaccctgtcctggctggtctcgaactcctgacctcaggtgatccgccggcctcaccctcccaaagtgctgggattacaggcatgagccaccatgccagacttcccattttactttctgcaagctgtttccctagcagctccctctaggggagaggtgaaatcttgcaagttgtagcaagagcacacaggaaacccctaactttcctataccccacccgcctcttcccctttctgtcccgggatacctggcggcaagagacttcttggctattgtccatgctcccagaatcaagcataaatgccagacacggcgattgagaagccaatcagtgaaccctttggcaaagcccccatccacacctggcactcccctctaccaatccctggcacagggttcctggagagcaggtgctgtacattttacagctttacaatggggctgttgacagccataattagggaggcatgaattatgcggctataatgcagagccctacaattaaggcgggaatgaggggctggaggcagcaaacggaatctgccctatgagcgtggctgttgagtcctgtctcctgggtctgactttccgtaatatgattggggtacagtagaggtgattaatggggctggcatctctctttggcctgaggttctgtattctgggaaaggtacacagggtggagtagggagaagctgccccaggaggcgatgtagtggtggaaagaagaggcagagaggtcgtcgtcgtcgcccagcagcaagggctgcaaaatagtagaactcgtggttgctttggacaggtgtgatttgtgcaagccaggttcaacccttgcctcaagaaatcagatgggaccaatttagtgtccttccacctgtgagccaagcccccatttgaggacatctatcgtattcttgtgtgctgggtctcaaatagaattttaaagattc

SEQ ID NO: 29745 - DNA, 1861 bp, Homo sapiens
aaagaaagtgcatctaagagacaggcagctgatgagttgtggccctttctccccaaaaccctagctctttacccttccattttagccttccacccagcttccacaaaagatttggctctaccttggatctgctagtaaataactaataggcaggcagttatttgggtaaggaaaaaaggggtgggagagacagaaaatttgcccatctgctgctcctcccccttggctctccacctgggatttgctattgaatctctaccctctcccaccacacagtactgattgctcactgaaagactcagcacccccaatggtgcgcggaagccaggcgggcgattacaatccaattacctattgtcgactcagcccacacaagcttttctcctcctcttgcagggcatggggccaggctccactcccaaatgagactggccccctccatggttcagggtaacagaagggcctgtaggccctggtgaactgaatccagcacaggcctcccctgtaacacaacaggactgagcagaaccaaacacttcttccaactgactctgctccctgccctcaccatctcaaactctgattcccactccactcttcgaggtttctctcagctttttgacctggctccctaagtaggccctagatgatttattcttggcatggcaaagcttgttctaggtcctctgcttgtgagggtcaaagctgtgtcctttcccttacctccctctgccaggacttgctgcagagctgctgagaggattagtgcctttgaagagctgtctgcctgagcaactctatttcaggtgccccacaccggcaagtaccagccagcaacaccaaccaaatgctactctctttaaagtccattttccttcttctttttttttttttttttttggagacagcatctcaccctgtcctggctggtctcgaactcctgacctcaggtgatccgccggcctcaccctcccaaagtgctgggattacaggcatgagccaccatgccagacttcccattttactttctgcaagctgtttccctagcagctccctctaggggagaggtgaaatcttgcaagttgtagcaagagcacacaggaaacccctaactttcctataccccacccgcctcttcccctttctgtcccgggatacctggcggcaagagacttcttggctattgtccatgctcccagaatcaagcataaatgccagacacggcgattgagaagccaatcagtgaaccctttggcaaagcccccatccacacctggcactcccctctaccaatccctggcacagggttcctggagagcaggtgctgtacattttacagctttacaatggggctgttgacagccataattagggaggcatgaattatgcggctataatgcagagccctacaattaaggcgggaatgaggggctggaggcagcaaacggaatctgccctatgagcgtggctgttgagtcctgtctcctgggtctgactttccgtaatatgattggggtacagtagaggtgattaatggggctggcatctctctttggcctgaggttctgtattctgggaaaggtacacagggtggagtagggagaagctgccccaggaggcgatgtagtggtggaaagaagaggcagagaggtcgtcgtcgtcgcccagcagcaagggctgcaaaatagtagaactcgtggttgctttggacaggtgtgatttgtgcaagccaggttcaacccttgcctcaagaaatcagatgggaccaatttagtgtccttccacctgtgagccaagcccccatttgaggacatctatcgtattcttgtgtgctgggtctcaaatagaattttaaagattc

SEQ ID NO: 29746 - DNA, 1483 bp, Homo sapiens
gccggcccactgaagccgtggggacgcgcccagcggagctaatcaggtgccactgaactgaaggggtgaactagaggagaagagggtgactgggcggggagcagctgcgggagaagcaaagggacgactgagggaataatcaggagaccactgaggcgtgaagtactaggcgtgcgataactgaaggagttagtaactgggagcacagagttggaaacagcttaggggaagatggagaaggaagaaacggggaatgatcaagatgtgggcaccatgatgtggcaggaaaccgacttagatgttcagaagaagtcagtgcagatacggaggaaatgggaatgggaagaagtctgcaaagccaggagaaccgaggaaaggcttttgcctccagaggtcacattgcgttataaaactctgggtggtaaaagattataggcttagaccagtgtctttggattctaatgctggctgctctccatagtccatctgattccccagaagtcagttatagctcttcgcaaaccttggtgacttcttattttctttcttgtttatccaagattacctggctggtgtttgcttgttctggagtgatcttctgactggaaaagaactatgtcatggatcaaggaaggagagctgtcactttgggagcggttctgtgccaacatcataaaggcaggcccaatgccgaaacacattgcattcataatggacgggaaccgtcgctatgccaagaagtgccaggtggagcggcaggaaggccactcacagggcttcaacaagctagctgagactctgcggtggtgtttgaacctgggcatcctagaggtgacagtctacgcattcagcattgagaacttcaaacgctccaagagtgaggtagacgggcttatggatctggcccggcagaagttcagccgcttgatggaagaaaaggagaaactgcagaagcatggggtgtgtatccgggtcctgggcgatctgcacttgttgcccttggatctccaggagctgattgcacaagctgtacaggccacgaagaactacaacaagtgtttcctgaatgtctgttttgcatacacatcccgtcatgagatcagcaatgctgtgagagagatggcctggggggtggagcaaggcctgttggatcccaggtatcccgagttgttttgcatggtaattgttaaggaaaacaggcctgggccagcatggcagctcacgcctgtaatcctagcacattgggaggccgaggtgggcagtccacttgaggcaggccaggagttcaagaccagcctggccaacatggcaaaactccctcttttcaacaacaacaacaaaaaagcaggcctgtaccaaaccataaagcccctctgtgccatgtacttggccagaggtctaattaggggagcatgtggaaagatttaaggggatctcccaaatttagagattaggattggcttattacaacctgcttcagaac

SEQ ID NO: 29747 - DNA, 1020 bp, Homo sapiens
  misc_feature (804)..(804): n is a, c, g, or t
  misc_feature (806)..(807): n is a, c, g, or t
  misc_feature (812)..(812): n is a, c, g, or t
  misc_feature (1018)..(1018): n is a, c, g, or t
gccggcccactgaagccgtggggacgcgcccagcggagctaatcaggtgccactgaactgaagggattacctggctggtgtttgcttgttctggagtgatcttctgactggaaaagaactatgtcatggatcaaggaaggagagctgtcactttgggagcggttctgtgccaacatcataaaggcaggcccaatgccgaaacacattgcattcataatggacgggaaccgtcgctatgccaagaagtgccaggtggagcggcaggaaggccactcacagggcttcaacaagctagctgagactctgcggtggtgtttgaacctgggcatcctagaggtgacagtctacgcattcagcattgagaacttcaaacgctccaagagtgaggtagacgggcttatggatctggcccggcagaagttcagccgcttgatggaagaaaaggagaaactgcagaagcatggggtgtgtatccgggtcctgggcgatctgcacttgttgcccttggatctccaggagctgattgcacaagctgtacaggccacgaagaactacaacaagtgtttcctgaatgtctgttttgcatacacatcccgtcatgagatcagcaatgctgtgagagagatggcctggggggtggagcaaggcctgttggatcccagtgatatctctgagtctctgcttgataagtgcctctataccaaccgctctcctcatcctgacatcttgatacggacttctggagaagtgcggctgagtgacttcttgctatggcagactctcaatcctgccggggtccaccgntnntgtgncagagttacatttggaactttcgaggcaccggcgttccaatgacatagtggtgaaagccgacagttcaaggcgaagccactggaggcgcacagacacacctcggagggctacctggccagcagacgcgaaaacgagcgaggatcccaacacaaaggccggcgaaaaacgacgagcccttagctagggcccggcagtgcacccgagnga

SEQ ID NO: 29748 - DNA, 545 bp, Homo sapiens
gccggcccactgaagccgtggggacgcgcccagcggagctaatcaggtgccactgaactgaaggggtgaactagaggagaagagggtgactgggcggggagcagctgcgggagaagcaaagggacgactgagggaataatcaggagaccactgaggcgtgaagtactaggcgtgcgataactgaaggagttagtaactgggagcacagagttggaaacagcttaggggaagatggagaaggaagaaacggggaatgatcaagatgtgggcaccatgatgtggcaggaaaccgacttagatgttcagaagaagtcagtgcagatacggaggaaatgggaatgggaagaagtctgcaaagccaggagaaccgaggaaaggcttttgcctccagaggtcacattgcgttataaaactctgggtggtaaaagattataggcttagaccagtgtctttggattctaatgctggctgctctccatagtccatctgattccccagaagtcagtcgtacggggttctcccacctcacgaccttgttatacgac

SEQ ID NO: 29749 - DNA, 284 bp, Homo sapiens
ataaaactagttacatgtttattccaagaaaacttggaaaccacaaaaaactcataatttcacctttcagaggtatccacaattaacatttgatgtgtatttgtttttctagggaaaggctggaagggcttctctgtaatcagtgacttcaatcatcagtccctgtccccctttggtaaattattctcttcttccctcctcaggtgtttcctgaatgtctgttttgcatacacatcccgtcatgagatcagcaatgctgtgagagagatggcctggggggtgga

SEQ ID NO: 29750 - DNA, 558 bp, Homo sapiens
ggaggcagcaaacggaatctgccctatgagcgtggctgttgagtcctgtctcctgggtctgactttccgtaatatgattggggtacagtagaggtgattaatggggctggcatctctctttggcctgaggttctgtattctgggaaaggtacacagggtggagtagggagaagctgccccaggaggcgatgtagtggtggaaagaagaggcagagaggtcgtcgtcgtcgcccagcagcaagggctgcaaaatagtagaactcgtggttgctttggacaggtgtgatttgtgcaagccaggttcaacccttgcctcaagaaatcagatgggaccaatttagtgtccttccacctgtgagccaagcccccatttgaggacatctatcgtattcttgtgtgctgggtctcaaatagaattttaaagattcttagatgtaaaacttgtttgctaactgcaacggaagaacaccttcttttgctgctgcaattgcctaccctccctcaggtgcacttggctagctccaagaccctggctttggactagggggcaccggaaga

SEQ ID NO: 29751 - DNA, 469 bp, Homo sapiens
aaatcactgttcttttcctctctttctcttgagaagctgtacatataccacctgattcatgcaagttgttttgtggatcatgccccacgtctttcccattattttgattgtgtcaattttttgattcgtgtttcctcctttttctcttcttagtaaaatcttacacttgagggcaacccccacgaggcctttttgacttctctagtccagtcatttagggcttacagcacttactatgtaccaagctctcgataaagttagcacgctaaagaagggtgctgttaaggaattttgcttgtcttggaaatagaattagttaacaattagggaaaattcagataatttgaactgaatgacagtgactttaagtgcattatacaattcaagcaggaagaaagtgatatgaattggaagagtctaagaagtttttgtggagatgctatgtattgaaaaattagtaagtttgggg

SEQ ID NO: 29752 - DNA, 526 bp, Homo sapiens
gcctggaacccgggcaatcaggagtctcctgcagccccagcagtgcctccatgcactggcacgctgcctgctcctcccctcacagccacagctgctggagtgttgcctacatctcagagccttttctgaagattttggcatccccacaccctgtcaccatgttcctgtgtctttccccatgaaggtttcaggcacacagaaagagttttccagccttatttgaagggaggccaaatgtctgctgcagtccctctgtgtcctgatttacagcaccagccttgatggaacatggcagggccttaacacccaactctttgggaaccttgaacgtgtggctgaatgaagccagcagaagctgacctccagtgtggacctctcagagaagtttgcatttacaagcccctttccttgaggatttcacagcatttaaataaatggctgtgtgcttatttggcctcatcgttagatgatttgcatggctatatcgtggtatattaaacaaggagtatatcctaccctcaagttc

SEQ ID NO: 29753 - DNA, 830 bp, Homo sapiens
ggcacaccttaatttttataacagcagagactacaatggaggctggtataaaagggtaatacttctttattattcaagggttgactggtgaacagtttcagttgtgccctgatttttcctatcttaggatattatcttagtgttttatcaacaaacctttcagagcttctttttgtgacatttctgcaatattgagtttatatgtactgtaggattaatctattattgctctatcagcattcttgactgagttcttctgtgtaactatgaccattcatgtgctatgagaaatttggaagtgtcatatttgtccttaccctcagaaaacatatagtttgattggacaaagcaataaaatttaaaagtatataatcaagaaaaaattagaatgcagagataaaaataatagatgttcagagaagagagaaataagtgaggggatgagatagtcatcaaatatacatgggagactgtgaaaccttgtggcagagccttgatgggatgcgtgtgggcttggaaaaggcggcaaagtgaagtctgggctttacttgacggagagaaacaagggaaaggggtttttgtgtgaccagtaaagattcaggcctgattatcctttaaagtagaacaaagagtcagaaattcaaagatggacatcactacagatccaataggtatcaaaaagataaggagatcttgaaactttatgcaaaaaatgaaatgggacattccttgaaaaactcaatacttatcaaaatagatttaagaaaaacagactatctgaatctgaataattggtaaagaaattaaattaattattaaacaaaaccccc

SEQ ID NO: 29754 - DNA, 818 bp, Homo sapiens
agtgattttgtatttgaacatgaagggcagtggcatcattgacctaagctagagtttcctcaccctcagcacttttgacattttagttgcataaccctttgcggtgggggcggtcccgtgcactgcagggtggctggcagcatcactggcctccacccagtgtatgctgttagcaaaacctcctttccccagtcttaccccagtcatgacaactaaaaatgtctccagataatgccaaatgacacttggggggcaaaatcacccatgatgggaggagtcatggacatggcatggatgctggggtgggtaggataggaaccctggggaaaggagttaggcccacacccttgaggagctcatgacctaggaagcttgttgagaacttttgactagggtagaatatttctagtagttgactgaaaatagctttggttgaggctattagtaaaaaatttgttttaaagaggtttaacatctgttttccatttctgcttttctgagttgctttgctgctcaattccttttattttagctgtcttccctcttgggacttcaaacatttgagtgtgtcaaaatttcccagtctaataggaaatatgttttgttcaaaaagaaataaagatatttataactgttgggctagaatgatggaagtttaacgctggttaagtgagactcaggtaacagacagcaaaggagatactttaatagtgaagggaacttgaagtctggttgtattcaagattcacttcctgttcttgtttatcactggaaagttgcaccttgtgaaagattttagatttagatcattgtattgt

SEQ ID NO: 29755 - DNA, 408 bp, Homo sapiens
gattctcctgcatggccagcaccatggagatttccagacactcttgctgtcctctgtaccattggagttggatgctcaggaatcagaatcagaagaaggatgggtgctggttgtgggcatgcatatagcagctggctgttgaggagaaaagggaaagcacagagagggggaggggagggttcttaggagccaggggcaggagcccagagcccagctcaggatgatggagtgggatgctgagctgggtcccaccagctcatgcgagctgattctttctatctcttcccaattctgcattcaatgacatcacattggtagcttcaaatcagtcatggctgggagtatttacaagacagaaattggcaaacaccataaatcaggattttatccttcttccagagctgattg

SEQ ID NO: 29756 - DNA, 947 bp, Homo sapiens
tttttaggctttttgatggaattgctacaacttggtgcatgcctgctcctaaaagaaatactcaggaattgtctcataaagtcctcacctactggcaaaaacaagatgttctactccccaggttgactttttcaagccccaagatgttgagtcagccattctccaaggatctcgatttccttttaatggaaaataacattaaacaccaaatataagcctcgctgtcccacatgcgtattggggacaagatgaaacctgcttccaggctactttggcagcagaactgaaaaaggctttttttccagatatatgatttctcatcgacagggttgcacagccctctttattgttcgtgtaaatgacacccttggatctgaacaatacacaccaggacaattgtgtgcaacagttctacaaactgatatttctaattaaaaaataaaaagtaaaaaaatttctaatgcatttctcattaaccaggatacgtacattttaaactctcattcagacagatattgcaatgtgtttgcttattatttgcttttgtgggtcacgcaaagccttccaatttgctgttagttggcatttgatgtacctatttccagacttcttatatacatatacaaatttggacacatgcagatagtattgtggttttgatacttgtttttttaaaaatagaattctactctataaattgttctgcaaattattatatctgaccagtataattttctgcaatgatgaaaatgttctatacctgtgactatggagcccttaaaaacatggctaatatgaacaaggaactaaacttttcattttattttatttcaatttacctaacttcgagtcgttagtagaagttacatgcagctagttgttaatgtattagacagctcagttctaaaggatcatatagattaccttcatgacctgagacaggaaaa

SEQ ID NO: 29757 - DNA, 303 bp, Homo sapiens
gatcacgaggtcaggagatcaagaccatcctgactaacacggtgaaaccctgtctctactaaaaatacaaaaaattagccaggtgtggcagcatgggcctgtagtccccagctacttgggaggctgaggcaggagaatggcgtgaacccaggaggcggagcttgcagtgagctgagatcacgccactgtactccagcctgggcaacaaagcaagactccgtttcaaaaaagaaaattgatggactagtcaaacaagttttatgttatcactactgaatggtaaagataataaaactatcaatc

SEQ ID NO: 29758 - DNA, 514 bp, Homo sapiens
caatccttcaaaaatgacgaggaaataaagaaattgccagataagcaatgtctgagaaaattcattcccagcagacctacttatatgaaatactaaatggaaacctataggtctggaaggaagtgaaaccagacagtaactctacccacagaaataaatatagagcatcagaaatggtatgtttagtacacataaaatattttataaatttatattttctcttaacatctctaaaagatataagattttatgcagcaatatttataacacttttttgttaaggttataacatacagatcacattacagagaggaggaaaaggagtgatagtgggcaataattctctatcttataggaataagttaataatattctgaaatggctgtgaaaggatgacgtagatactgtagtccatagagtaaccattaagaagttcatggctatttaaatataattaaatttttttatttccaaagggtaaaaatggtatgctaaaaagtacaaaataaggtat

SEQ ID NO: 29759 - DNA, 390 bp, Homo sapiens
aattcgcggccgcgtcgacagaagacgacagaagggggattgaattgactcaataggcaatgctgtgacacagggaagcacgaggccttgggggtcccatgggcaggcgcctcagccagcctcgggatgatgggcttcctaaaggaggcaattaataatgaggatggtgatagcatcaagaattatggttactctctgtggaataactgtctggagtgtctggagtgtcagacgctatgccacacggtttatgtactttatttaattttacaattgtcctataacacaggggtgtccaaccttttggcttccctggcccacattggaagaagaagaattgtcttgggctacacataaaatatacaaatactaatgatacctgatgagtga

SEQ ID NO: 29760 - DNA, 2423 bp, Homo sapiens
atggcaggctgtttccgcggagtaaaaggtggcgccggtcagtggtcgtttccaatgacggacattaaccagactgtcagatcctggggagtcgcgagccccgagtttggagttttttccccccacaacgtcacagtccgaactgcagagggaaaggaaggcggcaggaaggcgaagctcgggctccggcacgtagttgggaaacttgcgggtcctagaagtcgcctccccgccttgccggccgcccttgcagccccgagccgagcagcaaagtgagacattgtgcgcctgccagatccgccggccgcggaccggggctgcctcggaaacacagaggggtcttctctcgccctgcatataattagcctgcacacaaagggagcagctgaatggaggttgtcactctctggaaaaggatttctgaccgagcgcttccaatggacattctccagtctctctggaaagattctcgctaatggatttcctgctgctcggtctctgtctatactggctgctgaggaggccctcgggggtggtcttgtgtctgctgggggcctgctttcagatgctgcccgccgcccccagcgggtgcccgcagctgtgccggtgcgaggggcggctgctgtactgcgaggcgctcaacctcaccgaggcgccccacaacctgtccggcctgctgggcttgtccctgcgctacaacagcctctcggagctgcgcgccggccagttcacggggttaatgcagctcacgtggctctatctggatcacaatcacatctgctccgtgcagggggacgcctttcagaaactgcgccgagttaaggaactcacgctgagttccaaccagatcacccaactgcccaacaccaccttccggcccatgcccaacctgcgcagcgtggacctctcgtacaacaagctgcaggcgctcgcgcccgacctcttccacgggctgcggaagctcaccacgctgcatatgcgggccaacgccatccagtttgtgcccgtgcgcatcttccaggactgccgcagcctcaagtttctcgacatcggatacaatcagctcaagagtctggcgcgcaactctttcgccggcttgtttaagctcaccgagctgcacctcgagcacaacgacttggtcaaggtgaacttcgcccacttcccgcgcctcatctccctgcactcgctctgcctgcggaggaacaaggtggccattgtggtcagctcgctggactgggtttggaacctggagaaaatggacttgtcgggcaacgagatcgagtacatggagccccatgtgttcgagaccgtgccgcacctgcagtccctgcagctggactccaaccgcctcacctacatcgagccccggatcctcaactcttggaagtccctgacaagcatcaccctggccgggaacctgtgggattgcgggcgcaacgtgtgtgccctagcctcgtggctcaacaacttccaggggcgctacgatggcaacttgcagtgcgccagcccggagtacgcacagggcgaggacgtcctggacgccgtgtacgccttccacctgtgcgaggatggggccgagcccaccagcggccacctgctctcggccgtcaccaaccgcagtgatctggggccccctgccagctcggccaccacgctcgcggacggcggggaggggcagcacgacggcacattcgagcctgccaccgtggctcttccaggcggcgagcacgccgagaacgccgtgcagatccacaaggtggtcacgggcaccatggccctcatcttctccttcctcatcgtggtcctggtgctctacgtgtcctggaagtgtttcccagccagcctcaggcagctcagaacagtgctttgtcacgcagcgcaggaagcaaaagcagaaacagaccatgcatcagatggctgccatgtctgcccaggaatactacgttgattacaaaccgaaccacattgagggagccctggtgatcatcaacgagtatggctcgtgtacctgccaccagcagcccgcgagggaatgcgaggtgtgattgtcccagtggctctcaacccatgcgctaccaaatacgcctgggcagccgggacgggccggcgggcaccaggctggggtctccttgtctgtgctctgatatgctccttgactgaaactttaaggggatctctcccagagacttgacattttagctttattgtgtcttaaaaacaaaagcgaattaaaacacaacaaaaaaccccaccccacaaccttcaggacagtctatcttaaatttcatatgagaactccttcctccctttgaagatctgtccatattcaggaatctgagagtgtaaaaaaggtaccaatcattgattttttttttttttgtaaactaaaatgtttaaaataaaatagcatttacagttaaaaa

SEQ ID NO: 29761 - DNA, 558 bp, Homo sapiens
gaactgaccacattgcctggtacacagtcagtgcttgttcattgtgattggtcaaatggataaacgaatgaatagctaacactacacttcaagagacactgaagtgtcatctattgaaggcttcttcacttccatgcccacaccttccaccagtgagactctggtcccctcaacatgtgtctgtctctgacatatcacctaagacagtttatcttatttatttacatgtgtatcactgtaggagaccaggagctcagtactgagcacagtatacttagcaccttatagatgcttaatgcaagtttgctggatgaacaaattactcttacttccattgtcatggtgccagtaagtccgtttgggcagcctgagatttcatcaggtgttttttggcatctgtgttagactgtttgctcattttgtgtttgtaagtggctaaaaatccttaaatctttctcataggaaccagttataaaccaggtctcacaattctgttacttaagcagaatttccagctctaagtggaggactttgagcttaaccctattaaatttaatc

SEQ ID NO: 29762 - DNA, 396 bp, Homo sapiens
gcaaagtcatgacgtgattgaggggtggatatgtgagctactgctggtcaatggaagtgattaagatgatccttgaggaagataatcattgctgctgttcttaggttaaacatagtggaggctagaagctcagatttggtgttggccaaatggccaagagcatgagtattaggaattgaaagagtatagagccagggctagagagaggcaagttttgaaatgtgtgtccaggcggtgactaaatccatacccccagcaatggggctagggaaatctcaaggccaaagagacaagaggggaaatgagggaatgagctgttgacaaaatgatcacggggaacagtggcatccagatagtcttgtgttcatcagtgaaaatttgcccctagaggtgaag

SEQ ID NO: 29763 - DNA, 586 bp, Homo sapiens
tccaacacatgagtgaagccagcgtggagctccataccagccctccatccagcccaccgattcacctaagttgttatttggagtacgtgggctgtatgttttctctctaacctttctgttgtaaatttctccaagaaaggaaaccaaatagaatcttggagaagatgttcccagttgggatgtcttactaaaggaagttgatccaaaatgcacaggggatggactgtgctgggtgctgtgtctcaccaaccagatttttacttctcttggaaatatgagtgttgagaagtcacgtgtgagccgttttctgggaatttccctgagataaaaagtaccacctccttcaagtttcagacgcctgctcagtggtcacatatctaatgatggtggacgcaggagtgtgaaggtcagctccattttctccgtctgcctttgtcatacaaatatgaaagctgcccttgaggctaagtatcattttcatgaaatggtttgttagtaggcacttagtgattgctgtttaactctaatttgtttttaaaatgtttaataataactactggataaaccatattgaacctataaaaca

SEQ ID NO: 29764 - DNA, 902 bp, Homo sapiens
ccagaaggaaaatgaaagaagaaatttaaataccacttgaagagaggtgctgcccagttcatgagtgctgctgctgtcctgcccaagtacccagcttgcagagtgccagagttagagtcccaggggtgttctccacagctgcatgcttgatccaggcctatcagatatattccattgaaagtcctcattctcaaatttaaaacaaagactttttgtgtacctcaatagcaatgcacacacagttggcttcacaaacatattgtacatttctttttttcatatttattcaacaaatgtatattgactacccaccgtgtgacaggtgttatttgttggcggaaccaggcatcatcagcaaacaaaactgacaaagcttcctgccctctgtggaaggcatctgaggaagagactggattttgtagcaacatgttattctcattataaactttatcattggaatactaaagccaaatcatcccccatctccttgatcaggatacccacttaatctaggcagctacacaattgtgagagcctttgtttttttctgctgaaacatccttaaaaagatacctcacaacccaagatttggcttttcttaaatacgatttttaatttttttcatttctatctagagatttaattggaaatggaaaatcatcaattttccaattaaatgtctgttccaatcaacattataccttttaggttgtcattgtcatttttaagtttaagcaactttaaggattttgaatctggctgcctgtaaattaaaggtgaaagtaatcattgtgttggattggtacattttgtcaattgagagtggtttccttgttcttagtgtatgaaaagtttatttttctaatgtagattaataaaggagataaagaaaaacaaaatga

SEQ ID NO: 29765 - DNA, 1527 bp, Homo sapiens
gtaatctatgacaagtaagctatctataaatggcaatgaagggtagaacaaattcaatgaaaatatctatttaatcctagtgtttactggtctagaagaataggctgagtaaattagtatttctctggctgttgtggtaacacattgcatgctataacagttttaagtaattacaggtgcattgaaatttatctatggctttgtcatcatattctaaaatgtcatgagtacttttttctgacctcaattactatgaaattggtttccaatatttaattaaccaagaatatcaagtctatagggtattattaaggtgagacttctgtagccttttcaataaagaccagaattttggagtgccttgaaccttaatcattgatctttaattcttattaagtcaactgcccaccttttaaagactgaggcccaggaagagtaagtttctctgagacaatgcatacagtacagtgcttcttgggtattggctctaagaccagatgcaaagaaaggctaaaatcccatttcattgttcattaggtgagaaccctttgttaagctgtgtaacctctgtgcatagtttcctcatcagcaaagtcagaaaaagtatgtacctgaaggactgattgtaaggctgggatgagagaatccatgtgatcagccctcaccaacaggtgctgcccagttcatgagtgctgctgctgtcctgcccaagtacccagcttgcagagtgccagagttagagtcccaggggtgttctccacagctgcatgcttgatccaggcctatcagatatattccattgaaagtcctcattctcaaatttaaaacaaagactttttgtgtacctcaatagcaatgcacacacagttggcttcacaaacatattgtacatttctttttttcatatttattcaacaaatgtatattgactacccaccgtgtgacaggtgttatttgttggcggaaccaggcatcatcagcaaacaaaactgacaaagcttcctgccctctgtggaaggcatctgaggaagagactggattttgtagcaacatgttattctcattataaactttatcattggaatactaaagccaaatcatcccccatctccttgatcaggatacccacttaatctaggcagctacacaattgtgagagcctttgtttttttctgctgaaacatccttaaaaagatacctcacaacccaagatttggcttttcttaaatacgatttttaatttttttcatttctatctagagatttaattggaaatggaaaatcatcaattttccaattaaatgtctgttccaatcaacattataccttttaggttgtcattgtcatttttaagtttaagcaactttaaggattttgaatctggctgcctgtaaattaaaggtgaaagtaatcattgtgttggattggtacattttgtcaattgagagtggtttccttgttcttagtgtatgaaaagtttatttttctaatgtagattaataaaggagataaagaaaaacaaaatga

SEQ ID NO: 29766 - DNA, 1527 bp, Homo sapiens
gtaatctatgacaagtaagctatctataaatggcaatgaagggtagaacaaattcaatgaaaatatctatttaatcctagtgtttactggtctagaagaataggctgagtaaattagtatttctctggctgttgtggtaacacattgcatgctataacagttttaagtaattacaggtgcattgaaatttatctatggctttgtcatcatattctaaaatgtcatgagtacttttttctgacctcaattactatgaaattggtttccaatatttaattaaccaagaatatcaagtctatagggtattattaaggtgagacttctgtagccttttcaataaagaccagaattttggagtgccttgaaccttaatcattgatctttaattcttattaagtcaactgcccaccttttaaagactgaggcccaggaagagtaagtttctctgagacaatgcatacagtacagtgcttcttgggtattggctctaagaccagatgcaaagaaaggctaaaatcccatttcattgttcattaggtgagaaccctttgttaagctgtgtaacctctgtgcatagtttcctcatcagcaaagtcagaaaaagtatgtacctgaaggactgattgtaaggctgggatgagagaatccatgtgatcagccctcaccaacaggtgctgcccagttcatgagtgctgctgctgtcctgcccaagtacccagcttgcagagtgccagagttagagtcccaggggtgttctccacagctgcatgcttgatccaggcctatcagatatattccattgaaagtcctcattctcaaatttaaaacaaagactttttgtgtacctcaatagcaatgcacacacagttggcttcacaaacatattgtacatttctttttttcatatttattcaacaaatgtatattgactacccaccgtgtgacaggtgttatttgttggcggaaccaggcatcatcagcaaacaaaactgacaaagcttcctgccctctgtggaaggcatctgaggaagagactggattttgtagcaacatgttattctcattataaactttatcattggaatactaaagccaaatcatcccccatctccttgatcaggatacccacttaatctaggcagctacacaattgtgagagcctttgtttttttctgctgaaacatccttaaaaagatacctcacaacccaagatttggcctcttacccaggccccttttcatagtgttcccgtgtatggacagccttcattggctatcgacaaattcagtctccccccctccctgtcgtgggcaaagcacagcaggcatgcacggcaagaatgtccctgtaaatgtgtacatacctcagggctgttattttggatggaccgttcatgtaaagacaaggatggcttttagaagtatacggatataattgtctataaaggcaggtttttaggataacagcgcaccacagcttcttttttaaatagtctgaataagaataaaatgaatttctacagaaaaa

SEQ ID NO: 29767 - DNA, 548 bp, Homo sapiens
tatgtacctgaaggactgattgtaaggctgggatgagagaatccatgtgatcagccctcaccaacaggtgctgcccagttcatgagtgctgctgctgtcctgcccaagtacccagcttgcagagtgccagagttagagtcccaggggtgttctccacagctgcatgcttgatccaggcctatcaggtgagttggctcttggctagtggtttttcttctcttgctgtacaaaagtccagacagtaatgtctttttttcatttttatagatatattccattgaaagtcctcattctcaaatttaaaacaaagactttttgtgtacctcaatagcaatgcacacacagttggcttcacaaacatattgtacatttctttttttcatatttattcaacaaatgtatattgactacccaccgtgtgacaggtgttatttgttggcggaaccaggcatcatcagcaaacaaaactgacaaagcttcctgccctctgtggaaggcatctgaggaagagactggattttgtagcaacatgttattctcattataaa

SEQ ID NO: 29768 - DNA, 580 bp, Homo sapiens
gacgattccactagtacatatgttgacagaatggggccagtggtggttcatatacctgtttgttgtcaaataccaggtctagatgttttcctcatcctcaaatgagagatcacatagcaatatgggacttataaaactttcagaacaaagggaacatcattatgaagatttagaggaagagcaactctctgaaaattatttattatagaaatgtaagaaattttgaaacttttctagcatccttagttgattcaggaagatatagcctctgtggaactgaagtataaaagtataaggaacaggctgagtgaggtggctcatgcctgtaatcctagcactttgggaggccaaggcaggcagtaacaaggtcaggagttcgagaccagcctggccaatatggtgaaatcccgtctctactaaaaatacaaaaattacccaggcgtggtggtgggcgcctatagtcccagctactcggaaggctgaggcagcagaatcacttgaacccaggaggcagaggttgcagtgagccgagatcgtgccactgcaccccagcctgggcaacagagtgagactccatctc

SEQ ID NO: 29769 - DNA, 150 bp, Homo sapiens
tcaacatagtgctggaagtctagccagagctactgggcaagaaaaggaaataataggcattcaaatggaaaaggaagaaataaaatcatttctgtttgcagataatatgatcttatgtgttacagtcctaaagattccagaataatattg

SEQ ID NO: 29770 - DNA, 487 bp, Homo sapiens
agcttgtgctaggctctggattagcagggctggggctacattcacttcctccccaagaggccctatctttctataccagtatgtagtttctctgatgagatcagcatggaagccagttgcttggtgtggtccaggaaggcttctgagaggaggctgctgctggaccttgaaggttggggagaagatcactgatgggatttgggagcatgcagaacagcgttattgcttcaccctggcatgccctttccttcatggactggattctccttttatctggattcccccattatatttcctattgcagccataataagtttctccaacttaatgccttagaacaacacaaatttattattttacagttctggaggtgggaagtccaaaatcatcgtcatgggtccttggtgctgggcccaccttccagtaggtttcaagaactgtgtgcccataaataaatcctccaaagagatgccaatcagcaggtacc

SEQ ID NO: 29771 - DNA, 655 bp, Homo sapiens
agtgatctgcccgccttggcctcccaaaagccactgcgcccagcctgatatgtattgttgatttattaatattgaactggccaacagcactgctatgcttgaacaaagcttattttagcacacactttttttttttttttcttgcaaggtacgtcacagtctccttgtgcttagaaacactggatagcacttaagcactatgtttgggggccattttaaacaatgaaatcaggaagaaaaagccccaaaattcaaaatatgtgacactaagtagattgtgaatagggcacttgtttatagtatgagacctgaagcaagaaagagtgtcacctttttgaattctgctgggaacatgcatattgggcaccttaaatttattgctgcactgtgcatgtctgtcaatgaatgtgaaagctctgcaatgattgattttgaggttacaaattttaatgaatactcatatttgcaagcatggaaccgttgaataatctgactataaatcacctacctcaagagttttttggaatatctaatatgtcgtattaaccaaccaaatctagactacaggatactgaaatttcataacacaaactaaaaaaaatcagtgaggacattgtctcaatcctgtattctcattaaaaaaaaaaaaattatg

SEQ ID NO: 29772 - DNA, 141 bp, Homo sapiens
cctgcagagcatcctaagagaaactaaggtccaaagagaaattttcttggcacctctctctaaagcaaaggaaaaaaatagcacaaaatagcatatcaaaaaagcatcttactaaaattatattgagagcttatacaaatt

SEQ ID NO: 29773 - DNA, 433 bp, Homo sapiens
ctttgctaactggttacagctcagtctcctgggtagaggccaggctggccgcccctagagaatctaagacgtctggaccagtgaccatctcctctcccctcctccactgtccaatttaatttcttgtccattttctgggcactgagtaggcacatggctattcctcctgctctccctcaagcaggagcagttgtcccagttactacatggcaccctctcttatttcactgaggacactcttaaaatgtcacctccacaaagacgccatcgctaaagccctactccaaatgaaaaccaacgtcactctctagggctgacctctttccctgtttttttctttgttgttgtttttgttttgttttgttttgtttcagctgagatcgcaccactgcactccagcatgggcaacaagagtgaaactctgtctcaaaaa

SEQ ID NO: 29774 - DNA, 557 bp, Homo sapiens
gctatggttccgagggcaggactatgggaggctgccctgtacggaaaagaagaagaaatggcagtaaagagggcaaccatcattccacccagcccaaaaggaataagagaaaccctatctttcaggattctcaagatacagagttttcatggagtgataatgaaaggagcagcagccgcattaatatcccagagagagcaagtggaccagaaggcaacttaaaccagattgttactgaacccgatgcaaactttccccagttcttgcatgaggggtatgtaccatgccaaggtctttactcccatatcaaccagaccttgaaggaggctcacttcaacagcctgcagcagcgagggcaagctccaacatgatgaattaggacttccttattccaacctaaactgtgtttataaaagcaattgcatacacaccaaaaaaagtctattggtttttaagtctacattttaagtaacaagttaatgggcagttgtttaattggggttttacttcactgttgtacttttaaaggggctgtgaataaatgtttatgaaatttt

SEQ ID NO: 29775 - DNA, 752 bp, Homo sapiens
gtccgagctctggtccccacggtcatcacgctttgctttctcagccaagatctcggggctcagggcggaaacgcagcggatatgtattttcttccggggttggtggcgctcggctctcatgacctgcaggtgacagtgttggccggtgcgcggccctgcttgcctcgtgccccgcccttcgtgcttgaaaaaaaatcccgcgaagccttctccgaaagaacatgctggttctttggttgaaaagaagaagaaatggcagtaaagagggcaaccatcattccacccagcccaaaaggaataagagaaaccctatctttcaggattctcaagatacagagttttcatggagtgataatgaaaggagcagcagccgcattaatatcccagagagagcaagtggaccagaaggcaacttaaaccagattgttactgaacccgatgcaaactttccccagttcttgcatgaggggtatgtaccatgccaaggtctttactcccatatcaaccagaccttgaaggaggctcacttcaacagcctgcagcagcgagggcaagctccaacatgatgaattaggacttccttattccaacctaaactgtgtttataaaagcaattgcatacacaccaaaaaaagtctattggtttttaagtctacattttaagtaacaagttaatgggcagttgtttaattggggttttacttcactgttgtacttttaaaggggctgtgaataaatgtttatgaaatttt

SEQ ID NO: 29776 - DNA, 643 bp, Homo sapiens
gtccgagctctggtccccacggtcatcacgctttgctttctcagccaagatctcggggctcagggcggaaacgcagcggatatgtattttcttccggggttggtggcgctcggctctcatgacctgcaggaaaagaagaagaaatggcagtaaagagggcaaccatcattccacccagcccaaaaggaataagagaaaccctatctttcaggattctcaagatacagagttttcatggagtgataatgaaaggagcagcagccgcattaatatcccagagagagcaagtggaccagaaggcaacttaaaccagattgttactgaacccgatgcaaactttccccagttcttgcatgaggggtatgtaccatgccaaggtctttactcccatatcaaccagaccttgaaggaggctcacttcaacagcctgcagcagcgagggcaagctccaacatgatgaattaggacttccttattccaacctaaactgtgtttataaaagcaattgcatacacaccaaaaaaagtctattggtttttaagtctacattttaagtaacaagttaatgggcagttgtttaattggggttttacttcactgttgtacttttaaaggggctgtgaataaatgtttatgaaatttt

SEQ ID NO: 29777 - DNA, 1307 bp, Homo sapiens
gctatggttccgagggcaggactatgggaggctgccctgtacggaaaagaagaagaaatggcagtaaagagggcaaccatcattccacccagcccaaaaggaataagagaaaccctatctttcaggattctcaagatacagagttttcatggagtgataatgaaaggagcagcagccgcattaatatcccagagagagcaagtggaccagaaggcaacttaaaccagattgttactgaacccgatgcaaactttccccagttcttgcatgaggggtatgtaccatgccaaggtctttactcccatatcaaccagaccttgaaggaggctcacttcaacagcctgcagcagcgagggcaagctccaacatgatgaattaggacttccttattccaacctaaactgtgtttataaaagcaattgcatacacaccaaagtttaattggggttttacttcactgttgtacttttaaaggggctgtgaataaatgtttatgaaatttttatttttatttttattttactctttctacatagagttttcaagttgagtgtcaatttcatgttaaggtagcaatatgaggaaacttctcctgtgcattgaagccatatgtccaattcagattgatttccagatctgtcagttagaaactctatgttaaacatctttttaaaatacaagtaagtcttcatttttaaaaatacagtagcctagtaaagaggtatgtagctttcatttaaaaaacaaacaaaaaatccacactcaaaaaaccataagttagtattcccaaatatgcaaagccagattcagtcttgcactgaaatgaactgccatactcccctcagaaggtagatgttctgttgaaattgctctctagttgtaatggcaacaatcagacccagtttagactatgaacatgaaaatctctctctaataactgtctctacactttgtatttccagggagaatgtttctaaggctcttgtatacttagataccttctgtatcatttatcctctagagtgtgcacttcagacttagtaggaaacactgcacaattctgtcagataagaaatatgtaatattttgtcttaaacatttattacgttagcacattatgtgatctcataattccatctattatgtatagagttaatgttaatacagtgtaagctactaaactgatgtttgtaacaagaattatggaagtgggttggacaactgtccactttatgctacatagaccctttcccagagattagggggctagcttccattattaaaattgcaaagattcacatggctta

SEQ ID NO: 29778 - DNA, 1307 bp, Homo sapiens
gctatggttccgagggcaggactatgggaggctgccctgtacggaaaagaagaagaaatggcagtaaagagggcaaccatcattccacccagcccaaaaggaataagagaaaccctatctttcaggattctcaagatacagagttttcatggagtgataatgaaaggagcagcagccgcattaatatcccagagagagcaagtggaccagaaggcaacttaaaccagattgttactgaacccgatgcaaactttccccagttcttgcatgaggggtatgtaccatgccaaggtctttactcccatatcaaccagaccttgaaggaggctcacttcaacagcctgcagcagcgagggcaagctccaacatgatgaattaggacttccttattccaacctaaactgtgtttataaaagcaattgcatacacaccaaaaaaagtctattggtttttaagtctacattttaagtaacaagttaatgggcagttgtttaattggggttttacttcactgttgtacttttaaaggggctgtgaataaatgtttatgaaatttttatttttatttttattttactctttctacatagagttttcaagttgagtgtcaatttcatgttaaggtagcaatatgaggaaacttctcctgtgcattgaagccatatgtccaattcagattgatttccagatctgtcagttagaaactctatgttaaacatctttttaaaatacaagtaagtcttcatttttaaaaatacagtagcctagtaaagaggtatgtagctttcatttaaaaaacaaacaaaaaatccacactcaaaaaaccataagttagtattcccaaatatgcaaagccagattcagtcttgcactgaaatgaactgccatactcccctcagaaggtagatgttctgttgaaattgctctctagttgtaatggcaacaatcagacccagtttagactatgaacatgaaaatgctcttgtatacttagataccttctgtatcatttatcctctagagtgtgcacttcagacttagtaggaaacactgcacaattctgtcagataagaaatatgtaatattttgtcttaaacatttattacgttagcacattatgtgatctcataattccatctattatgtatagagttaatgttaatacagtgtaagctactaaactgatgtttgtaacaagaattatggaagtgggttggacaactgtccactttatgctacatagaccctttcccagagattagggggctagcttccattattaaaattgcaaagattcacatggctta

SEQ ID NO: 29779 - DNA, 1650 bp, Homo sapiens
ggaaaagaatacatacctacacacacacacacacacacattttcatggttgtttccttgaatatgggtaggattttaaggaagatacttgcagtagaattttagtgttatggggaaaaaattacagcaccacattggcctcaaacttagggagtaggcatgagtcaattatttcttaattagatggtttgagtaagaacattttttctatggccagtgcttccaaagtcaataccagatgtatggtgagaagaaatttaaattctaaaaggttttatggcagaaaatagagaaaggatacctagccaccagtttctctaacaataaagtgagcaactaagtactaaagaagatgagatatttgaattttcaacccacatgtacacaacaggattcagaaatacccaggaagaattctgcatgcttaaatacatagcatcctactgaaagaaagtgtctattaaaaacacagtgtagttgaacagctgagaaagcaaatttccattcattccccctatttaaagatatcaaagataaaactgtcaccatgacaaagcattattttttcaaagtaaaataataataataataataaagcaattacatacacacagaaaaagtgttggcttttcagtctctgtaagacttttcagtacttagttgaactaagtaagcacagtcttattccagagtggtcagtgtaaatctcttgtcctagtaaatacaatatgcaatctctgtcctgtcttttgcagattgtctaaacctgtttatgtcataaactggtttatgtcctttggtcctgaaataaaactcaatacttcacagcagggaaggaaccaagctgtttaaaactacttatctccgctatgaaggagaagtattttcaaggaatatcagaagaaagtagaaagtgagaggaggttccagctgggcttcctgggtcaagtaggggctcagaaagctgtgaaactcactcatttcctgcatgcggacttactttggtcctggatgaataatattgaagatatgtgcttaaaacattcctaacatcagaatttgcgcctgtgttttcttccccaagaaagctataaacagcgaaaattttgttgtaagcttccctgtgtcctctctccctctctcccttccccctcccctgaaactaaaaggaatgttaaaagcccacttttctgtgaccagcagaccttatctatggtcccaattccaattccttgtaaacacaatttgtaaaatcccgtgagatcctgtctcctttgccatcccgctgcaaggttataagtagagaaaacttaagttacaattccagttttcctcaagatctgagacatgttaattgtctttgtttctccctctggtaacatcttcccaccacacatatttcctgccttagagagtttaaaaggtgataaaaaaatctaacactggctaccccgctcgggaccccttccacgctgtgaaagctttgtactgtcactctgcttaataaagcctacagcttttttaaaaaaaaaaagaaagaaaaaaaaaaaggggggggggaaaaatcccggggggcacttgggcccgttttttgaaaagggcccaaagggggggaaaaaaggggggggggtaagcgggggaaaggtggttg

SEQ ID NO: 29780 - DNA, 1043 bp, Homo sapiens
gctatggttccgagggcaggactatgggaggctgccctgtacggaaaagaagaagaaatggcagtaaagagggcaaccatcattccacccagcccaaaaggaataagagaaaccctatctttcaggattctcaagatacagagttttcatggagtgataatgaaaggagcagcagccgcattaatatcccagagagagcaagtggaccagaaggcaacttaaaccagattgttactgaacccgatgcaaactttccccagttcttgcatgagggattgtctaaacctgtttatgtcataaactggtttatgtcctttggtcctgaaataaaactcaatacttcacagcagggaaggaaccaagctgtttaaaactacttatctccgctatgaaggagaagtattttcaaggaatatcagaagaaagtagaaagtgagaggaggttccagctgggcttcctgggtcaagtaggggctcagaaagctgtgaaactcactcatttcctgcatgcggacttactttggtcctggatgaataatattgaagatatgtgcttaaaacattcctaacatcagaatttgcgcctgtgttttcttccccaagaaagctataaacagcgaaaattttgttgtaagcttccctgtgtcctctctccctctctcccttccccctcccctgaaactaaaaggaatgttaaaagcccacttttctgtgaccagcagaccttatctatggtcccaattccaattccttgtaaacacaatttgtaaaatcccgtgagatcctgtctcctttgccatcccgctgcaaggttataagtagagaaaacttaagttacaattccagttttcctcaagatctgagacatgttaattgtctttgtttctccctctggtaacatcttcccaccacacatatttcctgccttagagagtttaaaaggtgataaaaaaatctaacactggctaccccgctcgggaccccttccacgctgtgaaagctttgtactgtcactctgcttaataaagcctacagctttttta

SEQ ID NO: 29781 - DNA, 1361 bp, Homo sapiens
gctatggttccgagggcaggactatgggaggctgccctgtacggaaaagaagaagaaatggcagtaaagagggcaaccatcattccacccagcccaaaaggaataagagaaaccctatctttcaggattctcaagatacagagttttcatggagtgataatgaaaggagcagcagccgcattaatatcccagagagagcaagtggaccagaaggcaacttaaaccagattgttactgaacccgatgcaaactttccccagttcttgcatgaggggtatgtaccatgccaaggtctttactcccatatcaaccagaccttgaaggaggctcacttcaacagcctgcagcagcgagggcaagctccaacatgatgaattaggacttccttattccaacctaaactgtgtttataaaagcaattgcatacacaccaaaaaaagtctattggtttttaagtctacattttaagtaacaagttaatgggcagttgtttaattggggttttacttcactgttgtacttttaaaggggctgtgaataaatgtttatgaaatttttatttttatttttattttactctttctacatagagttttcaagttgagtgtcaatttcatgttaaggtagcaatatgaggaaacttctcctgtgcattgaagccatatgtccaattcagattgatttccagatctgtcagttagaaactctatgttaaacatctttttaaaatacaagtaagtcttcatttttaaaaatacagtagcctagtaaagaggtatgtagctttcatttaaaaaacaaacaaaaaatccacactcaaaaaaccataagttagtattcccaaatatgcaaagccagattcagtcttgcactgaaatgaactgccatactcccctcagaaggtagatgttctgttgaaattgctctctagttgtaatggcaacaatcagacccagtttagactatgaacatgaaaatctctctctaataactgtctctacactttgtatttccagggagaatgtttctaaggctcttgtatacttagataccttctgtatcatttatcctctagagtgtgcacttcagacttagtaggaaacactgcacaattctgtcagataagaaatatgtaatattttgtcttaaacatttattacgttagcacattatgtgatctcataattccatctattatgtatagagttaatgttaatacagtgtaagctactaaactgatgtttgtaacaagaattatggaagtgggttggacaactgtccactttatgctacatagaccctttcccagagattagggggctagcttccattattaaaattgcaaagattcacatggctta

SEQ ID NO: 29782 - DNA, 888 bp, Homo sapiens
gtccgagctctggtccccacggtcatcacgctttgctttctcagccaagatctcggggctcagggcggaaacgcagcggatatgtattttcttccggggttggtggcgctcggctctcatgacctgcaggtgacagtgttggccggtgcgcggccctgcttgcctcgtgccccgcccttcgtgcttgaaaaaaaatcccgcgaagccttctccgaaagaacatgctggttctttggttgtcagtgccttacaagccctggaggcgggggtgaggtggggatgtggtccctcgcgaaaactcagtcagtggacaatagcattctgtttttcaaattggcatttcctcggaaacatgaacgaaggacacatggcaggtagacgacggcgcaagccaatcgattcctaccgctaggcccatagagatggatatcatgatgaaactcctatcttctcaggacttctcatgatgcagagttttcatggagtgataatgaaaggagcagcagccgcattaatatcccagagagagcaagtggaccagaaggcaacttaaaccagattgttactgaacccgatgcaaactttccccagttcttgcatgaggggtatgtaccatgccaaggtctttactcccatatcaaccagaccttgaaggaggctcacttcaacagcctgcagcagcgagggcaagctccaacatgatgaattaggacttccttattccaacctaaactgtgtttataaaagcaattgcatacacaccaaaaaaagtctattggtttttaagtctacattttaagtaacaagttaatgggcagttgtttaattggggttttacttcactgttgtacttttaaaggggctgtgaataaatgtttatgaaatttt

SEQ ID NO: 29783 - DNA, 425 bp, Homo sapiens
aatttttttgtatttttagtagagacagggtttcaccatattggtcaggctggtctcgaactcctgacctcaagtgatccacccacctcggcctcctaaagtgctgggattacaagcatgagccactatgcccggcctgctatttttaacatctcctggaaaatatattaatgatgctttttattgtgtcatttattaaaaacttccactgtacaatgtgcacctttcttctttaaaatatgcacggtattgttttgaattgatcacatctgcccagccctctcaactccctcaactttactaggtcacctaaagcattggaagtgcctggatcaaaaggacaaacagagaccctggtaccatagatgaaaatattcaagcattataaatcaaggaaacaaaattttaaataagatatatttcat

SEQ ID NO: 29784 - DNA, 1025 bp, Homo sapiens
gcttttccgtgctacctgcagaggggtccatacggcgttgttctggattcccgtcgtaacttaaagggaaattttcacaatgtccggagcccttgatgtcctgcaaatgaaggaggaggatgtccttaagttccttgcagcaggaacccacttaggtggcaccaatcttgacttccagatggaacagtacatctataaaaggaaaagtgatggcatctatatcataaatctcaagaggacctgggagaagcttctgctggcagctcgtgcaattgttgccattgaaaaccctgctgatgtcagtgttatatcctccaggaatactggccagagggctgtgctgaagtttgctgctgccactggagccactccaattgctggccgcttcactcctggaaccttcactaaccagatccaggcagccttccgggagccacggcttcttgtggttactgaccccagggctgaccaccagcctctcacggaggcatcttatgttaacctacctaccattgcgctgtgtaacacagattctcctctgcgctatgtggacattgccatcccatgcaacaacaagggagctcactcagtgggtttgatgtggtggatgctggctcgggaagttctgcgcatgcgtggcaccatttcccgtgaacacccatgggaggtcatgcctgatctgtacttctacagagatcctgaagagattgaaaaagaagagcaggctgctgctgagaaggcagtgaccaaggaggaattcagggtgaatggactgctccgtctgagttcactgtactcagcctgaggttgcagactggtctgaaggtgtacaggtgccctctgtgcctattcagcaattccctactgaagactggagcgctcagcctgccacggaaaactggtctgcagctcccactgctcaggccactgaatgggtaggagcaaccactgactggtcttaagctgttcttgcataggctcttaagcagcatggaaaaatggttgatggaaaataaacatcagtt

SEQ ID NO: 29785 - DNA, 872 bp, Homo sapiens
aatttattttttagagatagtattgctttgttgcccaggctggtctcaaattcctgggctcaagtgatcctcccacctcggcctcccaaagtgctaggattacaggcatgagccactatgccgggccaaggcttttaagagtacagatcttgtctcatttgtttctatatacaatgtctcacacaaaatgtttcgtacacaagttgctaaacacacatttattgaatgaagaagcaataattaccaaattaacttcacaatgtaaactcgtgttacattaaagaacattagaggcaagtacaaggcagtaaagccaagaggtatttgattttctttaatcaaatatttataaagaagtcaggcaataggattctactagaaaaacaatggctacattttaaaatcatgggtttttctagaagctgaaaagacctggtttggatgtgacacacccttgcttttcttcctcccaggcccactattattttgaccacaccatctacagagatgtcatagcacatccaggcaggcactggcttcataggagagttttctgtctgctttcttcccaccctctactcaaataaccatatcacaattgtgtcacacaactctacttctacgtgcaactttactgcctaacctctcccaaatcattcctaatggaaaaccaccaccacatccaaagtggtgtcacagagctggcaagctgagacatgcattagctttatattggaaaaagagcggccgggcatagtggctcatgtctgtaatcccagcactttgggaggccaaggtgggaggatcacgaggtcaagagatcaagaccatcctggccaacatggtgaaaccccatctctactaaaaataca

SEQ ID NO: 29786 - DNA, 422 bp, Homo sapiens
ggatggtggaagtatgggtgggagggagggatatttaggaagtacaaagaccagaacttggaacttcactggaagtggagagtcaataagagggacaggtccaggtccaggtcatggctggtgattttttgtacaagtgtacagagaagcagaggcagatttgtggggaaggtaagttaagttgtgaaagtgcagagtctaaggtgcccatgacatgggcatccaaggggctgtttggaggagccatgggctgtttctgccttgcagggaggattgttaggactgctaactgggctaatgcttgtgaaacacagggcctagcacatggtaaatacctcataaacaggaacccttattattattgggagttgtcaacttatatttgctaaatgaaaccccagttgctgataagattacttggg

SEQ ID NO: 29787 - DNA, 711 bp, Homo sapiens
gggtagctcaggtccaaaccggggctgggtgctgaagccactgtggggctgtggttttggcaagggtgagaaccctctctggtgtccttcctgggctccccagccccagctggggctcctgccacaaatgcagaccggggactgcctggtctctgaatttgctgtcctcatctgcacttagagtaattgcacttaagttgctgtcctcatctgcacttagagtaattaggtgcctcgcttagtcctgtgaccaagcctgattttgagtcgtggttacagaaacttagtctgtgtcttgtagccctgagctcctcctcttcctcaccagttaacaatatctcaaagaagggtgttgtcctgaaccattaccataaccccagcctaagctcaccctgaccaccactgtcccaggtatatcaccggctccagaactcctggctgccagggcaacccccgcccccagccccttgctctgggacaggagggagtgggtctcacctttagcctctgcccccggttctggtctgacccagcacatggcagctccaaagagcggacaaaaccttgaagcaaagccaaagggccaggcctgaatgggaggtcagagggaagaaggcccaggagagggtctaagccagccctgtctaagaggaatctaacgcaggcacataggtagctttctatggtggccacattagaaaaaagtaaaaa

SEQ ID NO: 29788 - DNA, 500 bp, Homo sapiens
ttgggatttagtatatggtttatgttgggcaactcattaatcactgtgcttcagtgtcatccatgaaactagggataaaacatgcatgggatgtgaagattaaaagtcaagaatatgaacagtacaagagagtaccataacaaatacaattttatttacaaatatacatggttggaccataccttggaatctacttgctaatgcagctgctgttaacagttcttgtatctgctcaagagatttctatgatcatataaaaatgcctttttaggttttcagtgttcatgccctgagtagtagtctgcagtttgctttaatacatggtaatacagagatcggctttaaatggctggctggttactgttgaatgaatgtatgataaattttttttcagaaccaacagtgtgaataatcctttcagttgtctatcagcatgaatttaaaaattactttcaagattcaacattacacaataaaacttagagttcttgcaatagaaa

SEQ ID NO: 29789 - DNA, 909 bp, Homo sapiens
ttattagcatttatcataatatgcaattattctgtttgttttgttgttcctcaagtgtttcttctattagaatgtaagctccctgaaggcaaaaaccacatctatcttgttcctgtagttccaatgcatagaacacaaattctccgattctggtggctaatagagtagggactcagtaaacattttaaaaataaaataaatgtactcaactataccaaaagatttattaagcaaaaaaggtaagatacaaaacagtatgtagtgtggaattccatttatattttgtaaaaattttgtgcagacacacacacacacgtgcatgcacattaaggatacacaaaaaactagtaactgtggttgcccctaggatagggactatgactcaagggagagaagatagaagtaattttaattttataatcattgttcctatttggatttttgttttactacatgtctatatttcttttataataataaaaataccatctagtactgttattttaaaaaggaaatatggaatagcaaaaaaaaaaaaaaaaaggaagaatcttagaataacagtcatttaaatggaacaaatttgtccttatgaaaaccccacaacattgtcctttttttttgcattccactgaggacctgggaaagcttcctccagccctgatgctggcctgcagtatggcacttgacagctactggtattgtggatagaagcaaaggctctggactcagcaacacttggtttgaattccagttctaccacttactagctgtggtgctgctgacaacttaaactccatgaacctcagttttcttcatctgtaaggtgggataacagtacttctctaatagggatattgtgaggatcaaatatgatgatctaaagcagttagcacaatatcttgcaca

SEQ ID NO: 29790 - DNA, 432 bp, Homo sapiens
taatagctagagttctatgaggatcctatttctcgtttctagctcaggcttcctttcattctctactttcttcttcttttttccccatctatcttcaagaattcccagagttccagtgccgctgttcccccaacagtcaccatcagaaaggccaactttgtatgatctgtatgcataaaataaatacatgatagaaataggagagaactctgtagatgattaggatagcagaattacatgatgtggagtagatgagagggcttgagtattccaaccaaagatgatggcttggtaggccgggcgtggtggttcacgcctgtaatcccagcactttgggaggctgaggcgggcggatcacgaggccaggagttcgtgaccagcctggccagcatggtgaaaccccgtctctactattaaaaaaactaataataa

SEQ ID NO: 29791 - DNA, 935 bp, Homo sapiens
aataaatatataagcaatgatgagaaactggaggtggctaatggaagtgagacagacaggggtggggggctccattatcttttaaaagcttcctccaaatgctcagtactgggaccaactaataggtagattttaatatggtggttttgttttggttttgtttttactacggtgctgatgtatatgtaatgtctaaaaaaagttatttgtacataagtttttacaatactgcagatatcactgggtctactatctgtaaaaaatatacatataaatatatatatactgtttgtttaaaatagagtatttttatttcattccttaactcatcatcacagcagtggtattgcacttcagatgacatctaattactaatttgtactgtatgacctctggcaacttgctccattttattcagatttttctagttttctgtttttactttgtacattgagcattgcttatttccttttaagaaatgtacagaacgctgaaatgtagaaatgaagtgatgttgacataccacttttaaagaaaacaaaaacaaaaataaaagattatctgaatcaatccaaagtatagtttattttaagatcctcactggatctccaatcttaattaagcagacatattattcctgggttttaattaactgcagttcttttctcaaaattttgatatcattctttaaacatttatttaatgggagagatcaatcattcccagcctttgcattcaactgcacaactgatgatgatactttctgaatttactgccgcactctgaaggatgtggcaaagggaagggaggaaagtcaactttgcatggaacatagtgcaatccatttgtagattcagtaccataacaattccatttccaactagttcatctggaggtagggaggctccactggaaaaataaatatttttgtcaaa

SEQ ID NO: 29792 - DNA, 320 bp, Homo sapiens
gcgtgttggtcagcctggtctcagactcctgacctcaggtgatctgcccgcctcggcctcccaaagtgctggggttgcaggtgtgagccaccgcgcccagcctacacctgctcttaattgtgttttgacatgctgggtactacaacattacataaaacataaccatggaaaaagaagtgagtactttacaatcttcaatgatatgtgatacaagaaaacttcattcttctgcagcaattgtccaccaaatacgtaaaaccatgaaatattaagtgagctcttacaaaataactgaaagtatttgcattcaaaaatgaaaa

SEQ ID NO: 29793 - DNA, 178 bp, Homo sapiens
tgaggacaaatgagatttcaaaggctgctaaaaggctgcttgagtattaaaggggacaatagcaacagcaaatatacttcaaataactccatgacagtgccatctgcttgtttaaccttgtactaagttactaaaacattttccacaattttccatcaaatacattttatagactcaa

SEQ ID NO: 29794 - DNA, 797 bp, Homo sapiens
  misc_feature (10)..(10): n is a, c, g, or t
  misc_feature (17)..(17): n is a, c, g, or t
  misc_feature (26)..(26): n is a, c, g, or t
  misc_feature (32)..(32): n is a, c, g, or t
  misc_feature (44)..(44): n is a, c, g, or t
  misc_feature (62)..(62): n is a, c, g, or t
atggggaaantgggccntggaggccnaaaaantggggcaacganggaaaagagctagcaccnatgagcttaaaaaaccctgggctctgtcactgtgcagctctgtccatcctttactgtgacaccaactcccaccttccccaaccctgccttcaacccctgggttcctcttcactttcttgcttcagcctggctcttcctttcaggcactaactccctggcatcccctcaacgtgcgactatcttctctccatacacaacctcttccctggcctaaagagaagtctttcttgctccttactgccacttccagatcactttccctttatctgccttaaaaatgcacaatggctcacatctgtaatcccaacattttggggggccaagcgggaggatcacttgagcccaggagcctgggcaacatggcaagaccctgtctctgcaaaaaaattaataccaaaaaaacccacaacatttactaacttagccatttttaagtgttctgtgacattaagtacattcgcgctgttggaaaacagatctgtgagtttttcatcttgcgtatctgaaactctatgcctgttggacaacagctccccttttccccctcctactagcccctggtaaccaccattatttctgtttctaccaatttgactactttagataacatatgtaagtggaatcataccatgtctgtttttcgtgacagacttatttcacttagtgtaatgtcctcaagactatccatgttgtactgtgtgccgcgatttctgaagacaggtagcggctcgattt

SEQ ID NO: 29795 - DNA, 998 bp, Homo sapiens
tgccactctggctgtgtgtctactgagtgcccgccagaccttgtgccaacagcttgacactgatcatcttcctgccctcccagcaagacccttttctcccagcttcctccagagtgaagagggggtcccagagctctgcagggtcctccagcccccacactggcccctccccaacacagccccacccccacagattgccctgaagaccagcagagctaccctccagggggccctttcttcctgttcacttcaaccattttgagaggccatcttcataccctgggctctgtcactgtgcagctctgtccatcctttactgtgacaccaactcccaccttccccaaccctgccttcaacccctgggttcctcttcactttcttgcttcagcctggctcttcctttcaggcactaactccctggcatcccctcaacgtgcgactatcttctctccatacacaacctcttccctggcctaaagagaagtctttcttgctccttactgccacttccagatcactttccctttatctgccttaaaaatgcacaatggctcacatctgtaatcccaacattttggggggccaagcgggaggatcacttgagcccaggagcctgggcaacatggcaagaccctgtctctgcaaaaaaattaataccaaaaaaacccacaacatttactaacttagccatttttaagtgttctgtgacattaagtacattcgcgctgttggaaaacagatctgtgagtttttcatcttgcgtatctgaaactctatgcctgttggacaacagctccccttttccccctcctactagcccctggtaaccaccattatttctgtttctaccaatttgactactttagataacatatgtaagtggaatcataccatgtctgtttttcgtgacagacttatttcacttagtgtaatgtcctcaagactatccatgttgtactgtgtgccgcgatttctgaagacaggtagcggctcgattt

SEQ ID NO: 29796 - DNA, 414 bp, Homo sapiens
gaccaatagcatcagcgtcccctgggaattgttagaatgcaaatcatcaggccctattccagacctagtgaaccagaaactgtgcagtggagccaggaatcctgatttaacaagctctacaggtgattctaaagcaggataaagaggaaaaaccatattagtaacacctgggagatttcaacaccaatgcccaggcccaggctcagatcaattaaatcagaatttctggaaacagggttttggcatcaatatggttctcaacgctcccagtagagaaccattgccttaggagcgtaccttttcaccccagagaaaaaagccaactggctgagtgccaaaactaaccctcactcaatgaattagttgaattctgcatttgtttgttttacttctttttacaatgaaagtttttcc

SEQ ID NO: 29797 - DNA, 397 bp, Homo sapiens
cccagctactcaggaggctgaggcaggagaatcgcttgaaaccccagaggccgaggttgcagtgagccacaacactccagcctgggcgacagagcaagactccatctcaaaaaaataaaaaaataaaaataaaataatctatcagattattctactaattagagtagcaggccaggtgtggtggctcacatctgcaatcccagcactttgggaggctgaagcgtgaggatcaccagcctgggcaacttagaccctgtctctacaaaagaacaaaaaatcaacactcgcctgtagtcccaactactcgggaagtgggatcccaggagggcgaggctgcagtgagccgtgatcataccactacactccagcctgggtgtcagagtagaccctatctcaa

SEQ ID NO: 29798 - DNA, 387 bp, Homo sapiens
tttttattttagaaagataatgtgcatacactgtacattatgtaacttccagcagagtttcagagcatatcaaacacctcaatatttctgctttgagatttatgattagtcactttaaatgagttaaataaaggctatgaagaagttcaggttttcccctcagatagattgtagtgccaaatttatggaggaaagatttggagtttttagaattttatggattttagaactgtgattaagggatcctggacatgtactagtctattttctgtgttttttgcatatttaaacatcttcaaaataaaaatttgttaaatagaaatatacaacttattcctaccactagtcacctaatttcatccactagaaacagccaaaggtattgat

SEQ ID NO: 29799 - DNA, 255 bp, Homo sapiens
gtttcctcatctgtaaaataagaataataacggttcctacctcacagggccagcgttagagtgaaaggagtcagtgtccacagagcagcaaccacagtgcccgcccatggtgagtgctggattggtgttcacatgagaacactgatgattacactgactatcatcaacttccctttaggcaccagagaagggcttggcgatcctcacctggggacccagacagcgcactgggttgctaaagaccacaggactggt

SEQ ID NO: 29800 - DNA, 378 bp, Homo sapiens
tgcactgaggagaaactgctgggaatagaatccaacctgacaataggaataacaacaccaacagaatgagaaattccggtgagaatgggagagggagcagagaaggaacatctcagaaagccaggatgtatttatctccttaaaaacaacaaaagaggtaattctagagctatgggcctagaaaagtgatctagacacatccttctctcctaaaagtggagaaaaactcatctttctgaaaaatgagcaacagaaaaaggatcgtgggtgaatcgcatacaaagttatgcaaaaaggaaaataaaaagcagaaaatgtctctattcaatgaagaatttagagaaatatgccgaaatagaagacaattataaccagatg

SEQ ID NO: 29801 - DNA, 268 bp, Homo sapiens
ctgcctcagcctgccaagtagctgggattacaggcgcccaccaccacgcccagctaatttttgtatttttagtagagacggggttttaccatgttggtcaggctggtctcaactcctgacctcaggtgatctgcccacctcggcctcccaaagagctgagattacaggcgtgagccaccaagcccggccttaaagtagggatttttacccccatcttacagaagagaaaaccgagccttagtgagaatagagaacttgcccaaggctc

SEQ ID NO: 29802 - DNA, 352 bp, Homo sapiens
tttttttttgagacggagtttcgctcttgttacccaggctggagtgcaatggtgtgatcttggctcaccgcaacctccgcctcccaggttcaagcaattctcctgcctcagcctcccgagtagctgagattacaggcatgcaccaccatgccaggctaattttgtatttttagtagagacggggtttctccatgttgaggctgctctcgaactcctgacctcaggtgatccgcccacctcggcctcccaaaagtgctgggattacaggcgtgagccaccgcacccgtccgagctagtttttttttgagtctcactgtgtctggagtgcagtggcgtgatcttggctcactgc

SEQ ID NO: 29803 - DNA, 680 bp, Homo sapiens
agttctgaaatcaatggagttaatttagggaatacaaaccagccatgggggtggagattgcctttgcctcagtgattctcacctgcctctcccttctggcagcaggagtctcccaggttgttcttctccagccagttccaactcaggagacaggtcccaaggccatgggagatctctcctgtggctttgccggccgctcatgagagtgtttttgtgtaaagtattttttagaatactgttgacttcttcatgatttaataaccatcctttgcgaagttttatgaggctttaggggaatgtcaaccctcaaatttttgttatactagatggcttccatttacccaccactattttaaggtccctttatttttaggttcaaggttcatttgacttgagaaagtgcccttctgcagcttcattgattttgtttatcttcactattaattgtaacgattaaaaaagaataagagcacgcagacctctaggagaatattttatccctgggtgcccctgacacatttatgtagtgatcccacaaatgtgattgttaatttaaatgttattctaatattagtacattcagttgtgatgtaatatgaataaccagaatctatttcttaaaagttttgagtatatttttcaactagatatttgtatagaaagactgaatagtgatgaag

SEQ ID NO: 29804 - DNA, 893 bp, Homo sapiens
gatagtgtttagcatctgtaaccaatctgacaataatgtgttcatgaggtgcctatggattaaatcacacactggcatatttaagctgaaggtcagtctggaaaataaatttactatattgactgaaataccactctttgtgtaggtatttgtgatatatttaagaaaacgctaaaaagaatggaaattgtatgacaataacttaagtctttctccaaagtgcatgcagtcttttgcgatacctcattcagccgagtatttgtgctcttcctcattcagtataaggcagctttcagtttgcttagaaggcaacattggaatgttagagttcatcagaaacatagaattttaaactgtgagttccactgaatacattttaatgtctgtaggaagaatcaaaacacctatttaaagatggcaatatataataatcattttaaaagtatttgattaaacctaaattttccagaaatgaaaaaaaaaaaatcagctctaaaaccaaagctgatttcagaaaatttgaaaatgtaaatcagccctatccataatatagtttctctaaaactttattttaaagagtcattttaaaataatataactattaaaaaatgtaactgctatcttaatgttctgaaataatttaaaacattttaaaatatgaatactgtagtataaaagaaagaaatggtgggaacgaaaagcagagaaagaaatgccaattccagtccaaagttttatttgccaagttttcttagaatgaattttaccagtttatgaattattgtaaacagaatgtgtcatggaaatactgaaagatttttccctagagtggccttattgactgctggtgtgatgccactgtaatgtaataaattattaaattgtttctaagt

SEQ ID NO: 29805 - DNA, 835 bp, Homo sapiens
gatagtgtttagcatctgtaaccaatctgacaataatgtgttcatgaggtgcctatggattaaatcacacactggcatatttaagctgaaggtcagtctggaaaataaatttactatattgactgaaataccactctttgtgtaggtatttgtgatatatttaagaaaacgctaaaaagaatggaaattgtatgacaataacttaagtctttctccaaagtgcatgcagtcttttgcgatacctcattcagccgagtatttgtgctcttcctcattcagtataaggcagctttcagtttgcttagaaggcaacattggaatgttagagttcatcagaaacatagaattttaaactgtgagttccactgaatacattttaatgtctgtaggaagaatcaaaacacctatttaaagatggcaatatataataatcattttaaaagtatttgattaaacctaaattttccagaaatgaaaaccctatccataatatagtttctctaaaactttattttaaagagtcattttaaaataatataactattaaaaaatgtaactgctatcttaatgttctgaaataatttaaaacattttaaaatatgaatactgtagtataaaagaaagaaatggtgggaacgaaaagcagagaaagaaatgccaattccagtccaaagttttatttgccaagttttcttagaatgaattttaccagtttatgaattattgtaaacagaatgtgtcatggaaatactgaaagatttttccctagagtggccttattgactgctggtgtgatgccactgtaatgtaataaattattaaattgtttctaagt

SEQ ID NO: 29806 - DNA, 320 bp, Homo sapiens
atagaaaggctgtttatgtatatctgatcttatatctagcagacttgttaaactgtctttgtatttgaaaaactgtaatttcttttagatttatatgtagacaattatatcttgtgcaaatagggatagtttttttttttttttcgaactcctgcagtacctgttatttcttgtactgaattggctaggaccgtcaagtacaacgttgaatgtaagttgtaacaacaagcatttttgttttatttctaattccaaaagagtggatctgtaaaattttactattaaataaaagctgtgaatatttgttagatgctcttttt

SEQ ID NO: 29807 - DNA, 165 bp, Homo sapiens
aaccaattagagctaataagcaagttcatcaagatctcgggatacaagatcaataaacaaaatcaactgcatttctacaagcgagaaatgaacaatcgaaaaataaaattaagaaaacaattctacttaaaacaacttcaaaataaaatacttaggaataaattt

SEQ ID NO: 29808 - DNA, 244 bp, Homo sapiens
ttttttagttagccaggcaggcatgatggtatatgcctatagtactattaataaccacttaggaggccggtgcaggaggatcacttgagcacagcagttcgaggttacggtgagctacgattgtgcccctgcactccagcctgggtgacagaaccagacctggtctcttcaaaaacaaaacaaaaaggccgggcccgggggctcacacctgtaatcccaggactttgggaggccgaggcgggcg

SEQ ID NO: 29809 - DNA, 395 bp, Homo sapiens
cctttatttcttttacttttttcaactccagtgagaaacaggcactaattatctacaacatatattgtagataacataacaacatatattctaacatgtaaaatagtttcagaattgctaatccatacccttctagggaaaaatacccattagaatcgagtgtttgtgtacatttcttaagtcatagtattcaatcaaaacgctgttttctgggccaggcgcggtggctcacgcctgtaataccagcactttgggtggatcacctgaggtcaggaattcaaggccagccttgccaatatggtgaaaccccatctctactaaaaatacgaaaattagctgggcatggtggcatgcacttatagtcccagagcaagactccgtctccaaaaaaaaaa

SEQ ID NO: 29810 - DNA, 657 bp, Homo sapiens
cttcctgatttttttcacctgaattctcaatttgttattgaatagttcagttttatttagggtttcaattttatttaggaaacaatatctctaccttacaaagaatctgcaagtagcactgactataatacctttatacccaaaggaagagctgggatagagctccctaagacttttctgcctgcaaaagatatgggtggggttgccatttgaatacagttaccaatgaaaaactatcagcttatctaggctttaacaataaagttcatgggggtaaagagaaaagatttaactttgaagtccccatatatcaaaaagaatattttacaggtaacttgacaaagatgtttcagtggtctcggaatgcaagacagaatcctgacggtagaaatttctaggcaagggtctaaattaggcaaactggtaagattgtgaatgtcccagcctttatttctgaatcttgacctctgaactctgctgcctctctctaaacatgtttctgcctacaggtacttcaggactgattttggtgtaagaagacagcaggtgtacacttgatgatgctacttccttacctctcattcattcctcaacccattgtaaaataatgtcaattaatataggttcctttgctgaacacctgtgaaccaaagcata

SEQ ID NO: 29811 - DNA, 482 bp, Homo sapiens
gaaaaaaagggcttactcattctagcagattctagcagcctcatcttgctaatcctgtcagttaatttcctcttgtccagtccccctgaagctacccttgtttcctgcaccgtttttttctcagcttgtttctcgaactgtcctatgaacctgggcactaccaataccctcccaatgtattgcttttgtgcttagtattaagactcagtttctgttatttgtgccaaacagtttcccaaacagaaagcaaaagccaaaaagaaaataaacgcccaacagaagcaatttgctaggtgctctgagatatacacacaggtatgaacttgtagggggaggtaggaaaattgggttcctgtctcaggtctgtcacctgtcttgctgtgtgaacttcaacaaacccccaaattcatcagtaaaatcaaagtctgggactagttaatcttcaaagtccttactggcgccagcagacaatgactgtgcca

SEQ ID NO: 29812 - DNA, 344 bp, Homo sapiens
gagttgctgggactacaggcacgtgccaccatgtctcactaatttttttgtatttttagtagagatggagtttcacattggccaggccggtctcgaactcctgacctcaagtgatccacccacctcggcctcccaaagtgcttggattacagatgtgagccaccgtgcccagccagaaaggctactatattatatagctttgtggtagactcctgtgggcctcttagatttaacaaaggtaagaattcccacttaattatttgaaaaaacatttcacttttattaaaaatactgctgtttgaaaaaggtgcttctccagtggcattcagtattggtggcctggc

SEQ ID NO: 29813 - DNA, 327 bp, Homo sapiens
ccaagggtcctgtggagtggggtggaggtaagggaaataaaatggccccagactgagaaccatgcctctaaagccagggctcctaacctggtatctaggatccccaaaataaaacataggtaggattctaggggtccttgaacttagatgggaaaattttacatctttacactaatatttaatagaaatttaacatttctttccataattaatgtaggcaacaggacttagtggtattattaccacgaattacacttgagacttgtaaccaataaaacatcaatggagtactattcagccataaaaaagagtgagatccaaccattt

SEQ ID NO: 29814 - DNA, 308 bp, Homo sapiens
ctcccgagtagctgggactacaggtgcctgccaccacgcccggctaattttttgtatttttagtagagactgggtttctactactacaacgattctttttttttaaacatatttttaacagttctttttaaaacagagacagttaaaatcaaaggaagccaggcataattactagcttcagtagtcttagtgacttgggaggttgaggcaggagatggcctcagcccagggttcgagtccagcctgggcaaccccatctggctttagacagtgagaccctgtctctatttaaaaaaaaaaaaaaaaaa

SEQ ID NO: 29815 - DNA, 438 bp, Homo sapiens
taaatttgttgaggcctgttttatggctcaagacacgagctatcttggtcatgttctgtggatacttgggaaaaaaaagtgtattctgctttgttgggtggaatgttatatgtatgtcactagatcctgttgtttatgttcagattatttatatccttgcttgttttctatagtagtactgtctagtagttctatcaatttttgagaaggggttgttgaaatccctgattataattgtaaatttatctatttttcctttcagctctgtcaggttttgtttcatgtattttgagactctattgttggtgtgtacacatttaggatcttatgtctttttcttattgttgaactttaagaatttgtggagccaggtgttgtggctcatgcctgtaatcccagcaagttgagagtccgaggtgggcagatcccttgagtcca

SEQ ID NO: 29816 - DNA, 372 bp, Homo sapiens
ggaagaacctcttactcttatacaactggttcctctacctggagaatagcttaatactgtccaatggagtaaagccccttggctggggaaggggaagtgaaggctccagcggcctgtggcgaaaaacaccaggcagatggctatgcaagacccttgggccatgcagggaagggagggcagaggggagccactgctcaccagtctgtcccaagaaaggaaagaaaagatcatagaaaggctgggttggtccccaacccctccgagcaacaggaggtgggggtgcagttttccataagcttagaagtctgaggatgaaaaacgacagtgagagattttgagtccccatttcactcaccgcttctggagccctat

SEQ ID NO: 29817 - DNA, 493 bp, Homo sapiens
ggcccctgaggggaaggtggggtttgagggagggaaagtgcagcacctgtggcaggaaaaaaaacaaaacagaactcgccaccaggaagcgttcctgggtcctgcacgcacgaaagttccttcccttcaatccctgcgctgggacccggggaccctggcgttcctgattccaacccagggagggcctcgggccagctaggggtatcgcaaagtgggcagaaggcccctgaggggaaggttaggtttgagggaggggatgtgaggcacctgtggcaggaaaaaaaaaaatcgcgccgccgagaagcggggcctgggtcccccatgcacgaaactgccttcccttcaacccctgctctgggtcccagggaacctggcgcccctgattcgaacccatggagcttctcgggcccgctaggggtaccccaaagcgggcagaaggcccctgaggtgaaggtaagatttgagggaggggaggtgaagcacctgtgtcagg

SEQ ID NO: 29818 - DNA, 223 bp, Homo sapiens
catcaccatcatcatcatcatcattgtcatttttgccatcaccatatcactttgtcctgtatctcccctcaaccctatgtcactgcatcattatgcttgattttaattatagtcatagaacccctacctactttcctcaattcagggcttctcctctattctatctaccacacgtaaaatcaccagagtgaaacttcaaccacagtggctactcctttgttgg

SEQ ID NO: 29819 - DNA, 281 bp, Homo sapiens
atcagagttatatagttttctttatatatagcttataaatgtattgttataatatatgtatttctttttccttttttggcaccaatgacaatggtaatgtgttttttaattgtaaattctacttgttcgttgctggcagatggggagcaattgacttgtatattaaccttgtagcctgtaatcttgctatgctcactcattagtttcagctttgttgttgattcttttggattttctacatagacaatcacatcatctgtgaataaatatagttttattgc

SEQ ID NO: 29820 - DNA, 359 bp, Homo sapiens
tttctttttcaaaatttttattcatctaggttacatgtcaaatgcacagtgaggaaaaggatattaagaaaatgcaataaaataaaaacagtaatttcataacattcttcccaaatcttaaagttatattaggaataagacttaattgccatagaatacacttctttgtggattattccttcactttttatgacatcttctattttacactgtggtaatttaatacaacatgagaatatctactcaatactagcaaacaaacagtttggttgcaacttccactaactttcctaaacttcagaggaaataaaaatagaaatcgggggaaaaatgagtaaagaaacttggaagttattccc

SEQ ID NO: 29821 - DNA, 1046 bp, Homo sapiens
tgtaactgaaggtgtctgtagtatggcccattcttctgagtcacttaggcaactgagtttggatttctgaatgatctgcatgttgtttctgtcttatgctttttcatgtcacgtcacttaagtagcataaatgcattagcattgataccagtatataaaacatttctgattcattcttacagtgagaaccagttagcatttaaccatgttttccatacattattttattaatttatgtcctcacttatctatccagtgccttatatatgtaaattactgtactattgttaaaacgactaagacatgctacttgcctttaaggcaggatccagcagactaccccatctggtgccaaatctggtctgtggcctgattttgtttagccctcaagctaagagtggtttttacatgtttaaagggttgtacaaacaaataaggaaacaaacaagaaaaagatgagacagagaccatatgtgtcctgcaaaacctgaaatatttactacctgatccttacagaaaaaattgtccaactcctgctttagaaaactttcattttaatcacacagatgtggaatacacacatgtacaaaaataaaaatagtacattttaataatagtgactgtattgatatttgcatgtatcaggcactgactaaataatttatatccattatttcatttagttctcacaacaaaactgtgagagatgtcttgttatttattaccattatacagataattcaaagaggtcaaataatttgtccatagtcatccagccagtaagtggtagagctagaatttaaaccaggctatttgattccagagtccattctctctgctattagagatctgaagtaagagatatatggtcaaaaaggaaagataaaattttctttcataagagcagtaaaaacttggaggaaatgggagcagggtgcggtggctcatggctataatcccagcactttaggaggctgaggtggagggttgcttgagcccaggagtttgagaccaacctcagcaacataatgagacctcgtctctac

SEQ ID NO: 29822 - DNA, 477 bp, Homo sapiens
atttgagccactttgtgaactccatgggagtcatcctgcactcctcagaaagtctcattatgtgaataataatcctttcataccctcttggtatatgcttgtaatcctaagtctcaacatccaaatgaagttttgggtggaggtcagtcctgcagggtgaccaccacaaaatcatagaatatgttctcagacaagaaatcaataactgcaagacaacaggataacctccaaacacttggaaattaaacaacatacttctaaatgatgcgtaggttgaggaagactcaaaaaaaaaaaaagaaaaaacattcaatcaactaaatgaaaatgaaaatataacatgtcaaaatttgtaggacacagttaaagcagtactgtgaggaaaatttatagcactaaatgtttacatcagcggagacaaaacgtctcaaatcaatcatctaagtttctacctcaagaaactagggggaaaaaaag

SEQ ID NO: 29823 - DNA, 530 bp, Homo sapiens
ggggtcagggccctcctaggaagcaactaggaaggaggggaggtttgcttgggagttgtccagctccaatcacccagaggccagtccccagggccccgcacccacgggggctgagcccagggaggcagcaggctgtgttgtcaaaggaagcctcaggccactgggaagttgctgggaaaagtttgcagcgctctcccccaggtgccctctgggcccctgggcccctgcttctccaaggacagaaacatgggttccctgaggcctcatgcctggctgccctcactctttccgaggagggtttcaagagccaagagctcaaagagaattagaccctgggcctgagagatcccagatctcacggggtggaggcccactgtatccaaccctcccaagacagtattttatcatctacagtcaggaagtgcttccttaggtctaactgccacgcctcctgctttcatgtaggtatgttctgcaaatgtggtatccaaaggtcaggccatatctgtatcttgggtgataaggaagtc

SEQ ID NO: 29824 - DNA, 557 bp, Homo sapiens
gttacatggtgtccccctaggactctccccagcttcaagctgctggcacccacttgcctaatcacgctggtaatcccgctgcttttccctgcaagctgcctgctttcactaaaggcacttccttaaacctggtgaaaaggcctcctcctcaaaaaatggatcgccccttcccactaaccttaggtcctactgtactcttggtgaatcacagctctttagagctccctcaagggccctaagcatcttttgttagaaaattctggctgaaattcctcatgagatgggtcagggaaccttggagtggcagcacttgtgtcacatcctaaaggcactcctctgactaaagagaagtggcagctgagcacactgcctgcccagggattttcttctgctctaaaggacattattaagacaactggtctgtactgtattgcctgatagtatcatatcaatgtcaatttcctcattttggtgattgttctaataagaatacgtaagaatgtgtccttgtttttagaaaatacacattaaatatcgagggatagagaaaaaaaaaa

SEQ ID NO: 29825 - DNA, 488 bp, Homo sapiens
gccatgtgttagatactgtgcatgtaaaacacaccagacatgggtaagatgttgccctcaaaaagctgacaggaatcccaacttcaaaaaaaaattatttcatcacacttgtaataagtctggtagcaaaaaaagctcaattgttggcacatacacactgaggcatttgagtcattgcttttagttattctaactaacatttctgtttggactgctcagaattaattactgattttgtggatcaaagctggagattcaaatacatgaatttctcaggtctttggggggaaaaccactgatgtaacttctactgaagagctgtgtctactggataccaagtcttgtctttctgcacattttaatatgcgactttctcaaggcagcatccacaggcactagacagggaactatagtgagcaccttctaaaagggagggcttgatttgtgagtgaaacaccgagatgctctctcaaaacacacaatttgct

SEQ ID NO: 29826 - DNA, 857 bp, Homo sapiens
cttaaagggtgaaatgacatttaaacattctttttgtatgcatattttccaaatgaagactcttaataatgctataaccaacatgatatttctccaaatgctctgtagtcatacctcaagtttatactttttattccatggtaaagggagttaataaatttaagattcacacttcaggcatgtggacatacacatacttccctctttccaagtgaagatcttagagcccttcctataagtgctgttggagttgaccttggcagccagcttagatactcctgtactggacaggtcctcactcagccccagccctagagtccatgcctgcaagggtgccacaccctaggtcttgggtgttgcttatctttcttcaagacatgcaaaagatgaataatatgtttatatttgtttttccaaagtccatacaagaagtgaagtaaagtaactatataccttaacctaagtaactatacaccttaacctgaaatctcatggagctgtatcaggtgcaaaagccatgctcttggccatctgcaggttcttccatagaggctgtgcatggtagtagataaaagcagacctcaggaatgagatttggtttccctatctttacaacagggatgctaataataccatatctgatttatagactaagaggactatgtgatttcttatgtgagtttcgttagaacactcatgacccttagcaagtggctccaccagagataactgtgatgtttattcccagtggaggctcttatgtctaacgtgtttcctttgtcttcttggtctttcttctctttcctatgtatattcctgaaattagggctctggggacatttactaaaaatgttaaa

SEQ ID NO: 29827 - DNA, 2900 bp, Homo sapiens
agcggaagccggtgtttcgcagcccagagcatttgcagctggtcactccagtctcctgggactttgactcgccgtactcggcgcgctcctgctgagggtcgccggagatgtcgctcggccgccttctaccaggagcctgatccgtgccgcccgccgcccggatgggaccaccagagtgctctaaagtctccagtgaatattgaattgctgaggattttgggaaaagacaaatcaaagttcccattccatggatcccttaggtgcaccttcccagtttgtggatgtggatacactaccaagctggggtgactcatgccaagatgaattaaattcctctgatactacagctgaaatatttcaggaagacactgttcgatcaccttttctttataataaggacgtcaatggaaaagtggttctttggaaaggagatgtggcattactgaactgtacagccattgtgaataccagcaatgaaagtctcacagataagaatcctgtgtcagaaagtatcttcatgcttgcagggcctgatttgaaggaagatctccagaaacttaaagggtgccgaacaggtgaagcaaaattgacaaaaggattcaatctagctgcccggttcatcattcacacagtgggacctaaatataaaagccgctatcgcacagcagctgagagttccctttatagctgctacagaaacgtacttcaactagcaaaagagcagtcaatgtcttctgttggcttctgtgtcatcaattctgcaaaacgtggttatcctttagaggatgcaacacacatagcacttcgcactgtaagaagattcctagagattcatggggaaaccattgaaaaagtagtatttgctgtctctgatcttgaagagggtacttaccaaaagctgctacctctctacttcccaaggtcattaaaagaggagaatcgatcattgccctacctacctgcagatattggaaatgcagaaggggagcctgtggtacctgaacgacagattagaataagtgagaaacctggtgctccagaagataaccaagaagaggaggatgaaggcttgggagttgatctctctttcattggctctcatgcttttgctcgaatggaaggagatattgacaagcaaagaaaactgatccttcagggacaattatcagaggcagctctgcagaagcagcatcaaagaaattataatcgctggttatgtcaagcaagatctgaggatctgtctgatattgcttctctaaaagccttataccaaacaggtgttgataactgtggtcgaacagtgatggtggtagttggaagaaacattcctgtaacattaatagatatggacaaggctctcttatatttcattcatgtaatggatcacattgctgtgaaggagtatgtattagtgtattttcacaccctgaccagcgaatacaatcacctggactccgacttcctgaagaaactctacgatgttgttgatgtcaagtacaagaggaatttgaaggctgtttattttgtacatcccacatttcgttcaaaggtgtcaacatggttttttaccaccttttctgtctcaggactgaaggacaaaatccaccatgtggacagcctccaccagctgttttctgccatatcaccagaacagattgactttcctccttttgtccttgaatatgatgccagggaaaacgggccttactatacatcatatcccccatcaccagatttgtgacctgccatctttcagtgcttcttggttcccaggatgccacttcctccacgaatagctacctgttgaagtgatattcattgttgctgtacagatccagagagccttttgtccccacctctctggtatttttttattgactgtatattttctggcacataagcaatctaaaaatggtaggccattctgaactgcacacattttaaatttgtatatttatatgaaatggaaatgttcatttttagattgttaatagaaattggggagcaacttttgagtatctttagtttcctgaaggacaccgaattctccattagataaaccaccaagactgttcacatcatctctctaacattgcacgcttcctttgtgtacttaagtgattctcgaaatatacagaaccaatgtatgctaaccagatgcattgtttgcttcagatccatggtgttaataccatgtatattttataaagataatttggctgtgttaaaagagaattacctgagtccaagaatgtggaaatgtatctgacaaaaaacatcaaaatcattagcaaaacataggacttagaatgttaatgtacaagttaagactaaagtttaaggactaaggttccttggattatatgacttgttaagattgccacagttccgatctcaacagtgtggggtgaaacaagaagactgtatcttcagcctttttcctataatcatggatgatttggtcttattcaaaaggaccgcacatattagtactcttaagagcatcttccaagactccagcagtgagcatttagagagtgtgttgtcttccagagtcatgaatgattttgtttagctatcaggtctactacctctaaggacatttcatagcagcatctcttgagttgcctgcatcagtgtggaggaagtgtgtcacagtgaacaaatccagggagctgataattggcaaaagaccacttttaccactcaggctctatttgtgccttagcttggttatgagtaaaaattagaattatgctgcctacctcacagaggtatcatgaagatagcatttagaaagggctttgttgtggtggggtatcttcagttagtttttaaatgggaataaatatatatgagggaatgctacacagcactcctcttgtccttgataaaattga

SEQ ID NO: 29828 - DNA, 1352 bp, Homo sapiens
agcggaagccggtgtttcgcagcccagagcatttgcagctggtcactccagtctcctgggactttgactcgccgtactcggcgcgctcctgctgagggtcgccggagatgtcgctcggccgccttctaccaggagcctgatccgtgccgcccgccgcccggatgggaccaccagagtgctctaaagtctccagtgaatattgaattgctgaggattttgggaaaagacaaatcaaagttcccattccatggatcccttaggtgcaccttcccagtttgtggatgtggatacactaccaagctggggtgactcatgccaagatgaattaaattcctctgatactacagctgaaatatttcaggaagacactgttcgatcaccttttctttataataaggacgtcaatggaaaagtggttctttggaaaggagatgtggcattactgaactgtacagccattgtgaataccagcaatgaaagtctcacagataagaatcctgtgtcagaaagtatcttcatgcttgcagggcctgatttgaaggaagatctccagaaacttaaagggtgccgaacaggtgaagcaaaattgacaaaaggattcaatctagctgcccggttcatcattcacacagtgggacctaaatataaaagccgctatcgcacagcagctgagagttccctttatagctgctacagaaacgtacttcaactagcaaaagagcagtcaatgtcttctgttggcttctgtgtcatcaattctgcaaaacgtggttatcctttagaggatgcaacacacatagcacttcgcactgtaagaagattcctagagattcatggggaaaccattgaaaaagtagtatttgctgtctctgatcttgaagagggtacttaccaaaagctgctacctctctacttcccaaggtcattaaaagaggagaatcgatcattgccctacctacctgcagatattggaaatgcagaaggggagcctgtggtacctgaacgacagattagaataagtgagaaacctggtgctccagaagataaccaagaagaggaggatgaaggcttgggagttgatctctctttcattggctctcatgcttttgctcgaatggaaggagatattgacaagcaaagaaaactgatccttcagggacaattatcagaggcagctctgcagaagcagcatcaaagaaagtaagacaacccttcaggactgttagatacataaggacatcagaagcaagaaaggaaccttgcatctgatgcatgagctacgtgtatatataatgcattccaatttatttttcatgacaatcagtgaggaagatatcgtcctcattttggag

SEQ ID NO: 29829 - DNA, 428 bp, Homo sapiens
tttttccagtatatgaagaattgttttagaggatagagactgattgttctcctctatcacttagaataagacagaaaggaattgtactgtagcacttatgagaattattaaacactgggatgattcactttcctggagctctttttaaagagaatggatattcatcactctgagttatccatttatgatgactagggcatagagtaggttaattttctattttgttttgttttgttttttcttggtctctgtgaaatagactactgttcaaaatgatcttcacctttattccccttttatcttttaggctctcttatatttcattcatgtaatggatcacattgctgtgaaggagtatgtattagtgtattttcacaccctgaccagcgaatacaatcacctggactccgacttcctgaagaaactct

SEQ ID NO: 29830 - DNA, 2488 bp, Homo sapiens
agcggaagccggtgtttcgcagcccagagcatttgcagctggtcactccagtctcctgggactttgactcgccgtactcggcgcgctcctgctgagggtcgccggagatgtcgctcggccgccttctaccaggagcctgatccgtgccgcccgccgcccggatgggaccaccagagtgctctaaagtctccagtgaatattgaattgctgaggattttgggaaaagacaaatcaaagttcccattccatggatcccttaggtgcaccttcccagtttgtggatgtggatacactaccaagctggggtgactcatgccaagatgaattaaattcctctgatactacagctgaaatatttcaggaagacactgttcgatcaccttttctttataataaggacgtcaatggaaaagtggttctttggaaaggagatgtggcattactgaactgtacagccattgtgaataccagcaatgaaagtctcacagataagaatcctgtgtcagaaagtatcttcatgcttgcagggcctgatttgaaggaagatctccagaaacttaaagggtgccgaacaggtgaagcaaaattgacaaaaggattcaatctagctgcccggttcatcattcacacagtgggacctaaatataaaagccgctatcgcacagcagctgagagttccctttatagctgctacagaaacgtacttcaactagcaaaagagcagtcaatgtcttctgttggcttctgtgtcatcaattctgcaaaacgtggttatcctttagaggatgcaacacacatagcacttcgcactgtaagaagattcctagagattcatggggaaaccattgaaaaagtagtatttgctgtctctgatcttgaagagggtacttaccaaaagctgctacctctctacttcccaaggtcattaaaagaggagaatcgatcattgccctacctacctgcagatattggaaatgcagaaggggagcctgtggtacctgaacgacagattagaataagtgagaaacctggtgctccagaagataaccaagaagaggaggatgaaggcttgggagttgatctctctttcattggctctcatgcttttgctcgaatggaaggagatattgacaagcaaagaaaactgatccttcagggacaattatcagaggcagctctgcagaagcagcatcaaagaaattataatcgctggttatgtcaagcaagatctgaggatctgtctgatattgcttctctaaaagccttataccaaacaggtgttgataactgtggtcgaacagtgatggtggtagttggaagaaacattcctgtaacattaatagatatggacaaggctctcttatatttcattcatgtaatggatcacattgctgtgaaggagtatgtattagtgtattttcacaccctgaccagcgaatacaatcacctggactccgacttcctgaagaaactctacgatgttgttgatgtcaagtacaagaggaatttgaaggctgtttattttgtacatcccacatttcgttcaaaggtgtcaacatggttttttaccaccttttctgtctcaggactgaaggacaaaatccaccatgtggacagcctccaccagctgttttctgccatatcaccagaacagattgactttcctccttttgtccttgaatatgatgccagggtaagaagtaccagaagttctccctcacctggtatggtatattaactgttctatagagcagcacttacgagcacaacatcctgtcattaccagatattaatgtaaattagtgagtcttaataaacttggtaatatcatttaacatactttccctatgataactttaggaaaaggatttgtcccaagagaggcattttctccagataaacgtttcagtgggagatctctctgctgtgagttcagaaccaattttcgtttgtattgtaagttttctaccatatttaaaacagatacctctgcctaattttcttaagattgaatggctttccatctacacagagccagaagaatttattggtgatcacttttagaattaattgcaaatcatgtggcctatctcagtagtctttaccctgctaaaagtttcatttatctaaaaggttgtataatgtttttaagagcatcatctgataatattattgttgttatttatagatgcgtttatggatctgttacataagcactagtcacaggactactcgtgaatttcatcaatttattctattgtgtttattcatgatatcaccttagtaatttttgaaaaaaaaaaagtaacacacttggccaaaagctcatcaagctgattgtttaactgttgctgattgcttatctttatattgtatgaaccaggggatagatttgaaagttatattaagtttgaaatgaattattcttccctaattattgtgcagtgtttatacagcaaaataaaaattctgcaacacaatttctctc

SEQ ID NO: 29831 - DNA, 471 bp, Homo sapiens
atgtatttgaagaaagtaacatactgatgaaatatgtagttcctactgcactgtgctaggtgcttttgtgcatactgtctcatttaattctccaccgtaacatggagaagttggtactgttatctccatttttatacaagaggtatctgaggctgaataccagacaaggctaaaacagaaactttcaatttgtgaaaaaggagtgttttagtgtcatatatatatgacaaatatatttattaagcctgttttatgtttgagggaaattgggtgcataaaaaggactatttttgagcttttgtacatatttataaaattgtatagttttgttgtcacatatgatggcatatatttatatatcttaatggataatttttgaagcatcactttgtaagaaagatgtttactacacagtaaaaagtttaaaagcaatgttaacctcgttatttatactcacactgtaaaaaactg

SEQ ID NO: 29832 - DNA, 358 bp, Homo sapiens
cgccaattggattattaagtactttacaatgtacaagaagaatttaagttagacacaagtcagtaaaggtggtgctatggtttgattgtgtcccctccaaaattcaggtgtggccagtatgatagtattaagaggtcggggctgggtgcagtggctcacacgtgtaatcccagcactttgggaggccaaggtgggcgaatcacaaggtcaagagatcgagaccatcctggccaacatggtgaaaccccgtctctactaaaaatacaaaaaattaccaggcgcagtggctcatacctgtaatcccagctacttgggaggccgaggcgggtggatcacctgaggtcgggagttcgggacc

SEQ ID NO: 29833 - DNA, 369 bp, Homo sapiens
gttttgtactatctcctttgatactctagaactacagaacagtgttgaagtgttacaactctgaggagagaagaatatacagtagttcttttttgttgttgtttttttgggacagggtctccctgtgtagcccaggttggagtatagtagcataatcacagctcactacactacaacctagacttcctggaccaagtgaccctcccacctgagtagccaggaccacaggtgcatgccaccatgcagtcctagccacttaaaaggctgaaacaagaggatcggttgagtccaggaatttgaggctacaatgagctatgatcataccagtttacttcagcccgggtgacagagtgagaccctgcctctcca

SEQ ID NO: 29834 - DNA, 3810 bp, Homo sapiens
acagagagattggtgtttttgtgaggcagtgagacctaaggtaacctttatcaaaaggatggagttgggaaaaggaaaactactcaggactggactgaatgcgttgcatcaagcagtgcatccgatccatggccttgcctggaccgatgggaatcaagttgtcctaactgatttgcggcttcacagtggagaggtcaagtttggggactccaaagtcattggacagtttgaatgtgtctgtgggttgtcctgggccccacctgttgcagatgatacacctgttctactcgctgtccagcatgagaagcatgtcactgtgtggcagctgtgtcccagccctatggagtcaagcaaatggctgacgtctcagacttgtgagattagaggatcactacctatccttccccagggctgtgtgtggcacccaaaatgtgctattctgactgtgttgactgctcaggatgtctccattttccctaatgttcactctgatgattcccaggtaaaggcagacatcaacacccagggccgcattcactgtgcatgttggacccaggatggcctgaggctggtggtggcagtaggcagcagcctgcattcttatatttgggacagcgctcagaagactcttcacaggtgctcctcctgcctggtgtttgatgtggacagccacgtctgctccatcacagcaactgtggactcacaggttgctatagctactgagcttccattggataagatctgtggcttaaatgcatctgaaacctttaatatcccacctaacagtaaagacatgactccgtatgctttaccagttattggtgaagtacgctctatggataaagaggcaactgattctgaaacaaattctgaagtatcagtttcttcttcctatttagaacctctggatctaactcacatacatttcaatcaacataagtctgagggtaattctcttatttgtctaagaaaaaaggactacttgacaggaactggccaagattcttcacatttggtccttgtgacctttaagaaggcagttaccatgacgagaaaagtcactattccaggcattctggttcctgatctgatagcatttaatcttaaagcccacgtagtggcagtggcttccaacacttgtaatataattttgatctactctgtcattccatcttcagtcccaaacatccagcaaattcgattagagaacactgaaagaccaaaagggatatgtttcttgacagaccaactattactaattttggtaggaaaacaaaaactcactgatacaacatttcttccttcttcaaagtctgatcagtatgccattagcttgattgttagagaaataatgttggaagaagaaccttcaataacatcaggtgaaagccagactacctactctactttcagtgctccgttaaataaagcaaatagaaaaaagttaattgaaagtctttccccagatttttgtcaccaaaacaaagggctgttgctgacagttaataccagtagtcagaatggaaggcctggaagaacacttattaaagaaatccagagtcctctgtctagtatctgtgatggctccatagctctagatgctgagcctgttacccagccagcatcgctgcccagacacagcagcacaccagaccacaccagcacactggagcctcctcgtttgcctcaaagaaagaacttacaaagtgaaaaggaaacttatcagctgtctaaggaagtggaaattttatctaggaacctggttgaaatgcaacggtgtctttctgaacttacaaaccgtctgcataatgggaagaaatcctcttcagtgtatccactctctcaagatcttccttatgttcacatcatttaccagaaaccttattatctaggtcctgttgttgaaaaaagagcggtgcttctctgtgatggtaaactaaggctcagtacagttcagcagacttttggcctttctctcattgaaatgctacatgattcccactggattcttctctctgctgacagtgagggctttatcccgttaaccttcacagccacacaggaaataatcataagagatggcagcctgtccaggtcagatgtcttcagagactctttttctcacagtccaggtgctgtttcttctcttaaagtctttacaggccttgctgcccccagtttagataccactggctgttgtaaccatgtagatggcatggcttgatatctgcagtgtccttgctgtgtagctcttcagatgagaccattacaaacaaggcctgcttgacactggacactcgccaatgagactcccactgcactcaggcgaagcgcttgccatggtcggctctcctggtttccccctgtttcccctgagctgaggctcgctgctgtgtagcagagctcagtctttattagatggctccgaaagtggtgtttatgtattcatgactgtgtggttttgactaagggcagaattctcagaacaaaacaatattatggtgccatatggatggtgttttatggtttctctgaggctttgtgtcccttgtccaaagctgcattgaagctgtcttaggagcacttaaaagataccttggcattgttataggtctttttcttggcttcaagaggaggttgaggagtctgctggggggcatgtgctctagcatattaacctcaaaccagcaagaattagcagagctccaaggaggaccagagacccactggcttctgctctcaggaacaggaagtggctctgatgttgcctggacctcccagaatttaaaccaaaccctcttgcttccttaacaaattctggctgacgaaggtccaggtactcttaaaaactggccctgggaaaattttgaatgaaatttcaagggaatttgtcccctctgggttccacttgaggttgtgccgatgctgctaccacactgtcgagcccaggtaagtcctactgcaggattttgtgctgtggccactcatgagtgtccctgaaataactttttttttttttaaatccagttttgggatcacgcaactttcctatttttctcccagtagtcagctcccttagttaacttgtcactttaatttgatatttttattttctctccttttaagtcttagagaccagcagagaatctgtgagagaaagtatttcaggaagttagaaattcaaccgaatctgaggtagtcctaaaaagtgccattttgtttcacttatgggctaaagtaccagcttagtcaggtaagagccctgacccacttcagatggtaacaccacttctcactgccttcagatggaatcacagatttcagtcacggcgcataacaaattgatcagtgagtggctaggcatctgcagataaattgtttcagccatagaagctccattagcacatatgcttccttttccccccttcctttaaaatcatctggaaagaaactattttgtgcccttggggactcctgtctgtctgttacagtttaccaagatggagctgggttaggaaagaagtgagggcccattttgtggttcaagtgcactagacagctgctggggtaggaagcacaggcaatgtctgtaatcagctgtgggagagcagtgactgagaacagtctgaggcctggctccacttggaagtatctggggtgcgatgaaatcacaattatcttgaagcctaaagagggaactacaagactgttaactaagatcaatgtgggcacctaaaagggtatgttaaaatcaccatttctcaggtcaaaatactgtgaataagtcttcaataaaatcactaatggtta

SEQ ID NO: 29835 - DNA, 3937 bp, Homo sapiens
acagagagattggtgtttttgtgaggcagtgagacctaaggtaacctttatcaaaaggatggagttgggaaaaggaaaactactcaggactggactgaatgcgttgcatcaagcagtgcatccgatccatggccttgcctggaccgatgggaatcaagttgtcctaactgatttgcggcttcacagtggagaggtcaagtttggggactccaaagtcattggacagtttgaatgtgtctgtgggttgtcctgggccccacctgttgcagatgatacacctgttctactcgctgtccagcatgagaagcatgtcactgtgtggcagctgtgtcccagccctatggagtcaagcaaatggctgacgtctcagacttgtgagattagaggatcactacctatccttccccagggctgtgtgtggcacccaaaatgtgctattctgactgtgttgactgctcaggatgtctccattttccctaatgttcactctgatgattcccaggtaaaggcagacatcaacacccagggccgcattcactgtgcatgttggacccaggatggcctgaggctggtggtggcagtaggcagcagcctgcattcttatatttgggacagcgctcagaagactcttcacaggtgctcctcctgcctggtgtttgatgtggacagccacgtctgctccatcacagcaactgtggactcacaggttgctatagctactgagcttccattggataagatctgtggcttaaatgcatctgaaacctttaatatcccacctaacagtaaagacatgactccgtatgctttaccagttattggtgaagtacgctctatggataaagaggcaactgattctgaaacaaattctgaagtatcagtttcttcttcctatttagaacctctggatctaactcacatacatttcaatcaacataagtctgagggtaattctcttatttgtctaagaaaaaaggactacttgacaggaactggccaagattcttcacatttggtccttgtgacctttaagaaggcagttaccatgacgagaaaagtcactattccaggcattctggttcctgatctgatagcatttaatcttaaagcccacgtagtggcagtggcttccaacacttgtaatataattttgatctactctgtcattccatcttcagtcccaaacatccagcaaattcgattagagaacactgaaagaccaaaagggatatgtttcttgacagaccaactattactaattttggtaggaaaacaaaaactcactgatacaacatttcttccttcttcaaagtctgatcagtatgccattagcttgattgttagagaaataatgttggaagaagaaccttcaataacatcaggtgaaagccagactacctactctactttcagtgctccgttaaataaagcaaatagaaaaaagttaattgaaagtctttccccagatttttgtcaccaaaacaaagggctgttgctgacagttaataccagtagtcagaatggaaggcctggaagaacacttattaaagaaatccagagtcctctgtctagtatctgtgatggctccatagctctagatgctgagcctgttacccagccagcatcgctgcccagacacagcagcacaccagaccacaccagcacactggagcctcctcgtttgcctcaaagaaagaacttacaaagtgaaaaggaaacttatcagctgtctaaggaagtggaaattttatctaggaacctggttgaaatgcaacggtgtctttctgaacttacaaaccgtctgcataatgggaagaaatcctcttcagtgtatccactctctcaagatcttccttatgttcacatcatttaccagaaaccttattatctaggtcctgttgttgaaaaaagagcggtgcttctctgtgatggtaaactaaggctcagtacagttcagcagacttttggcctttctctcattgaaatgctacatgattcccactggattcttctctctgctgacagtgagggctttatcccgttaaccttcacagccacacaggaaataatcataagagatggcagcctgtccaggtcagatgtcttcagagactctttttctcacagtccaggtgctgtttcttctcttaaagtctttacaggccttgctgcccccagtttagataccactggctgttgtaaccatgtagatggcatggcttgatatctgcagtgtccttgctgtgtagctcttcagatgagaccattacaaacaaggcctgcttgacactggacactcgccaatgagactcccactgcactcaggcgaagcgcttgccatggtcggctctcctggtttccccctgtttcccctgagctgaggctcgctgctgtgtagcagagctcagtctttattagatggctccgaaagtggtgtttatgtattcatgactgtgtggttttgactaagggcagaattctcagaacaaaacaatattatggtgccatatggatggtgttttatggtttctctgaggctttgtgtcccttgtccaaagctgcattgaagctgtcttaggagcacttaaaagataccttggcattgttataggtctttttcttggcttcaagaggaggttgaggagtctgctggggggcatgtgctctagcatattaacctcaaaccagcaagaattagcagagctccaaggaggaccagagacccactggcttctgctctcaggaacaggaagtggctctgatgttgcctggacctcccagaatttaaaccaaaccctcttgcttccttaacaaattctggctgacgaaggtccaggtactcttaaaaactggccctgggaaaattttgaatgaaatttcaagggaatttgtcccctctgggttccacttgaggttgtgccgatgctgctaccacactgtcgagcccaggtaagtcctactgcaggattttgtgctgtggccactcatgagtgtccctgaaataactttttttttttttaaatccagttttgggatcacgcaactttcctatttttctcccagtagtcagctcccttagttaacttgtcactttaatttgatatttttattttctctccttttaagtcttagagaccagcagagaatctgtgagagaaagtatttcaggaagttagaaattcaaccgaatctgaggtagtcctaaaaagtgccattttgtttcacttatgggctaaagtaccagcttagtcaggtaagagccctgacccacttcagatggtaacaccacttctcactgccttcagatggaatcacagatttcagtcacggcgcataacaaattgatcagtgagtggctaggcatctgcagataaattgtttcagccatagaagctccattagcacatatgcttccttttccccccttcctttaaaatcatctggaaagaaactattttgtgcccttggggactcctgtctgtctgttacagtttaccaagatggagctgggttaggaaagaagtgagggcccattttgtggttcaagtgcactagacagctgctggggtaggaagcacaggcaatgtctgtaatcagctgtgggagagcagtgactgagaacagtctgaggcctggctccacttggaagtatctggggtgcgatgaaatcacaattatcttgaagcctaaagagggaactacaagactgttaactaagatcaatgtgggcacctaaaagggtatgttaaaatcaccatttctcaggtcaaaatactgtgaataagtcctagctgcaggatgtttgtgctgtggccacgcaatgagtgtccactgaaataactttttttttttaaatccagtgtttgggatcacgcaactttcctatttttctcccagtagtcagctcccttagttaactggtcactttaagtttatc

SEQ ID NO: 29836 - DNA, 2280 bp, Homo sapiens
taggctaggtacgaggccggtggttgaatcggccgaggctagtatctgtgatggctccatagctctagatgctgagcctgttacccagccagcatcgctgcccagacacagcagcacaccagaccacaccagcacactggagcctcctcgtttgcctcaaagaaagaacttacaaagtgaaaaggaaacttatcagctgtctaaggaagtggaaattttatctaggaacctggttgaaatgcaacggtgtctttctgaacttacaaaccgtctgcataatgggaagaaatcctcttcagtgtatccactctctcaagatcttccttatgttcacatcatttaccagaaaccttattatctaggtcctgttgttgaaaaaagagcggtgcttctctgtgatggtaaactaaggctcagtacagttcagcagacttttggcctttctctcattgaaatgctacatgattcccactggattcttctctctgctgacagtgagggctttatcccgttaaccttcacagccacacaggaaataatcataagagatggcagcctgtccaggtcagatgtcttcagagactctttttctcacagtccaggtgctgtttcttctcttaaagtctttacaggccttgctgcccccagtttagataccactggctgttgtaaccatgtagatggcatggcttgatatctgcagtgtccttgctgtgtagctcttcagatgagaccattacaaacaaggcctgcttgacactggacactcgccaatgagactcccactgcactcaggcgaagcgcttgccatggtcggctctcctggtttccccctgtttcccctgagctgaggctcgctgctgtgtagcagagctcagtctttattagatggctccgaaagtggtgtttatgtattcatgactgtgtggttttgactaagggcagaattctcagaacaaaacaatattatggtgccatatggatggtgttttatggtttctctgaggctttgtgtcccttgtccaaagctgcattgaagctgtcttaggagcacttaaaagataccttggcattgttataggtctttttcttggcttcaagaggaggttgaggagtctgctggggggcatgtgctctagcatattaacctcaaaccagcaagaattagcagagctccaaggaggaccagagacccactggcttctgctctcaggaacaggaagtggctctgatgttgcctggacctcccagaatttaaaccaaaccctcttgcttccttaacaaattctggctgacgaaggtccaggtactcttaaaaactggccctgggaaaattttgaatgaaatttcaagggaatttgtcccctctgggttccacttgaggttgtgccgatgctgctaccacactgtcgagcccaggtaagtcctactgcaggattttgtgctgtggccactcatgagtgtccctgaaataactttttttttttttaaatccagttttgggatcacgcaactttcctatttttctcccagtagtcagctcccttagttaacttgtcactttaatttgatatttttattttctctccttttaagtcttagagaccagcagagaatctgtgagagaaagtatttcaggaagttagaaattcaaccgaatctgaggtagtcctaaaaagtgccattttgtttcacttatgggctaaagtaccagcttagtcaggtaagagccctgacccacttcagatggtaacaccacttctcactgccttcagatggaatcacagatttcagtcacggcgcataacaaattgatcagtgagtggctaggcatctgcagataaattgtttcagccatagaagctccattagcacatatgcttccttttccccccttcctttaaaatcatctggaaagaaactattttgtgcccttggggactcctgtctgtctgttacagtttaccaagatggagctgggttaggaaagaagtgagggcccattttgtggttcaagtgcactagacagctgctggggtaggaagcacaggcaatgtctgtaatcagctgtgggagagcagtgactgagaacagtctgaggcctggctccacttggaagtatctggggtgcgatgaaatcacaattatcttgaagcctaaagagggaactacaagactgttaactaagatcaatgtgggcacctaaaagggtatgttaaaatcaccatttctcaggtcaaaatactgtgaataagtcttcaataaaatcactaatggtta

SEQ ID NO: 29837 - DNA, 3841 bp, Homo sapiens
acagagagattggtgtttttgtgaggcagtgagacctaaggtaacctttatcaaaaggatggagttgggaaaaggaaaactactcaggactggactgaatgcgttgcatcaagcagtgcatccgatccatggccttgcctggaccgatgggaatcaagttgtcctaactgatttgcggcttcacagtggagaggtcaagtttggggactccaaagtcattggacagtttgaatgtgtctgtgggttgtcctgggccccacctgttgcagatgatacacctgttctactcgctgtccagcatgagaagcatgtcactgtgtggcagctgtgtcccagccctatggagtcaagcaaatggctgacgtctcagacttgtgagattagaggatcactacctatccttccccagggctgtgtgtggcacccaaaatgtgctattctgactgtgttgactgctcaggatgtctccattttccctaatgttcactctgatgattcccaggtaaaggcagacatcaacacccagggccgcattcactgtgcatgttggacccaggatggcctgaggctggtggtggcagtaggcagcagcctgcattcttatatttgggacagcgctcagaagactcttcacaggtgctcctcctgcctggtgtttgatgtggacagccacgtctgctccatcacagcaactgtggactcacaggttgctatagctactgagcttccattggataagatctgtggcttaaatgcatctgaaacctttaatatcccacctaacagtaaagacatgactccgtatgctttaccagttattggtgaagtacgctctatggataaagaggcaactgattctgaaacaaattctgaagtatcagtttcttcttcctatttagaacctctggatctaactcacatacatttcaatcaacataagtctgagggtaattctcttatttgtctaagaaaaaaggactacttgacaggaactggccaagattcttcacatttggtccttgtgacctttaagaaggcagttaccatgacgagaaaagtcactattccaggcattctggttcctgatctgatagcatttaatcttaaagcccacgtagtggcagtggcttccaacacttgtaatataattttgatctactctgtcattccatcttcagtcccaaacatccagcaaattcgattagagaacactgaaagaccaaaagggatatgtttcttgacagaccaactattactaattttggtaggaaaacaaaaactcactgatacaacatttcttccttcttcaaagtctgatcagtatgccattagcttgattgttagagaaataatgttggaagaagaaccttcaataacatcaggtgaaagccagactacctactctactttcagtgctccgttaaataaagcaaatagaaaaaagttaattgaaagtctttccccagatttttgtcaccaaaacaaagggctgttgctgacagttaataccagtagtcagaatggaaggcctggaagaacacttattaaagaaatccagagtcctctgtctagtatctgtgatggctccatagctctagatgctgagcctgttacccagccagcatcgctgcccagacacagcagcacaccagaccacaccagcacactggagcctcctcgtttgcctcaaagaaagaacttacaaagtgaaaaggaaacttatcagctgtctaaggaagtggaaattttatctaggaacctggttgaaatgcaacggtgtctttctgaacttacaaaccgtctgcataatgggaagaaatcctcttcagtgtatccactctctcaagatcttccttatgttcacatcatttaccagaaaccttattatctaggtcctgttgttgaaaaaagagcggtgcttctctgtgatggtaaactaaggctcagtacagttcagcagacttttggcctttctctcattgaaatgctacatgattcccactggattcttctctctgctgacagtgagggctttatcccgttaaccttcacagccacacaggaaataatcataagagatggcagcctgtccaggtcagatgtcttcagagactctttttctcacagtccaggtgctgtttcttctcttaaagtctttacaggccttgctgcccccagtttagataccactggctgttgtaaccatgtagatggcatggcttgatatctgcagtgtccttgctgtgtagctcttcagatgagaccattacaaacaaggcctgcttgacactggacactcgccaatgagactcccactgcactcaggcgaagcgcttgccatggtcggctctcctggtttccccctgtttcccctgagctgaggctcgctgctgtgtagcagagctcagtctttattagatggctccgaaagtggtgtttatgtattcatgactgtgtggttttgactaagggcagaattctcagaacaaaacaatattatggtgccatatggatggtgttttatggtttctctgaggctttgtgtcccttgtccaaagctgcattgaagctgtcttaggagcacttaaaagataccttggcattgttataggtctttttcttggcttcaagaggaggttgaggagtctgctggggggcatgtgctctagcatattaacctcaaaccagcaagaattagcagagctccaaggaggaccagagacccactggcttctgctctcaggaacaggaagtggctctgatgttgcctggacctcccagaatttaaaccaaaccctcttgcttccttaacaaattctggctgacgaaggtccaggtactcttaaaaactggccctgggaaaattttgaatgaaatttcaagggaatttgtcccctctgggttccacttgaggttgtgccgatgctgctaccacactgtcgagcccaggtaagtcctactgcaggattttgtgctgtggccactcatgagtgtccctgaaataactttttttttttttaaatccagttttgggatcacgcaactttcctatttttctcccagtagtcagctcccttagttaacttgtcactttaatttgatatttttattttctctccttttaagtcttagagaccagcagagaatctgtgagagaaagtatttcaggaagttagaaattcaaccgaatctgaggtagtcctaaaaagtgccattttgtttcacttatgggctaaagtaccagcttagtcaggtaagagccctgacccacttcagatggtaacaccacttctcactgccttcagatggaatcacagatttcagtcacggcgcataacaaattgatcagtgagtggctaggcatctgcagataaattgtttcagccatagaagctccattagcacatatgcttccttttccccccttcctttaaaatcatctggaaagaaactattttgtgcccttggggactcctgtctgtctgttacagtttaccaagatggagctgggttaggaaagaagtgagggcccattttgtggttcaagtgcactagacagctgctggggtaggaagcacaggcaatgtctgtaatcagctgtgggagagcagtgactgagaacagtctgaggcctggctccacttggaagtatctggggtgcgatgaaatcacaattatcttgaagcctaaagagggaactacaagactgttaactaagatcaatgtgggcacctaaaagggtatgttaaaatcaccatttctcaggtcaaaatactgtgaataagtcttcaataaaatcactaatggttattgtggctgttttggatgttttggtagtatt

SEQ ID NO: 29838 - DNA, 3501 bp, Homo sapiens
acagagagattggtgtttttgtgaggcagtgagacctaaggtaacctttatcaaaaggatggagttgggaaaaggaaaactactcaggactggactgaatgcgttgcatcaagcagtgcatccgatccatggccttgcctggaccgatgggaatcaagttgtcctaactgatttgcggcttcacagtggagaggtaaaggcagacatcaacacccagggccgcattcactgtgcatgttggacccaggatggcctgaggctggtggtggcagtaggcagcagcctgcattcttatatttgggacagcgctcagaagactcttcacaggtgctcctcctgcctggtgtttgatgtggacagccacgtctgctccatcacagcaactgtggactcacaggttgctatagctactgagcttccattggataagatctgtggcttaaatgcatctgaaacctttaatatcccacctaacagtaaagacatgactccgtatgctttaccagttattggtgaagtacgctctatggataaagaggcaactgattctgaaacaaattctgaagtatcagtttcttcttcctatttagaacctctggatctaactcacatacatttcaatcaacataagtctgagggtaattctcttatttgtctaagaaaaaaggactacttgacaggaactggccaagattcttcacatttggtccttgtgacctttaagaaggcagttaccatgacgagaaaagtcactattccaggcattctggttcctgatctgatagcatttaatcttaaagcccacgtagtggcagtggcttccaacacttgtaatataattttgatctactctgtcattccatcttcagtcccaaacatccagcaaattcgattagagaacactgaaagaccaaaagggatatgtttcttgacagaccaactattactaattttggtaggaaaacaaaaactcactgatacaacatttcttccttcttcaaagtctgatcagtatgccattagcttgattgttagagaaataatgttggaagaagaaccttcaataacatcaggtgaaagccagactacctactctactttcagtgctccgttaaataaagcaaatagaaaaaagttaattgaaagtctttccccagatttttgtcaccaaaacaaagggctgttgctgacagttaataccagtagtcagaatggaaggcctggaagaacacttattaaagaaatccagagtcctctgtctagtatctgtgatggctccatagctctagatgctgagcctgttacccagccagcatcgctgcccagacacagcagcacaccagaccacaccagcacactggagcctcctcgtttgcctcaaagaaagaacttacaaagtgaaaaggaaacttatcagctgtctaaggaagtggaaattttatctaggaacctggttgaaatgcaacggtgtctttctgaacttacaaaccgtctgcataatgggaagaaatcctcttcagtgtatccactctctcaagatcttccttatgttcacatcatttaccagaaaccttattatctaggtcctgttgttgaaaaaagagcggtgcttctctgtgatggtaaactaaggctcagtacagttcagcagacttttggcctttctctcattgaaatgctacatgattcccactggattcttctctctgctgacagtgagggctttatcccgttaaccttcacagccacacaggaaataatcataagagatggcagcctgtccaggtcagatgtcttcagagactctttttctcacagtccaggtgctgtttcttctcttaaagtctttacaggccttgctgcccccagtttagataccactggctgttgtaaccatgtagatggcatggcttgatatctgcagtgtccttgctgtgtagctcttcagatgagaccattacaaacaaggcctgcttgacactggacactcgccaatgagactcccactgcactcaggcgaagcgcttgccatggtcggctctcctggtttccccctgtttcccctgagctgaggctcgctgctgtgtagcagagctcagtctttattagatggctccgaaagtggtgtttatgtattcatgactgtgtggttttgactaagggcagaattctcagaacaaaacaatattatggtgccatatggatggtgttttatggtttctctgaggctttgtgtcccttgtccaaagctgcattgaagctgtcttaggagcacttaaaagataccttggcattgttataggtctttttcttggcttcaagaggaggttgaggagtctgctggggggcatgtgctctagcatattaacctcaaaccagcaagaattagcagagctccaaggaggaccagagacccactggcttctgctctcaggaacaggaagtggctctgatgttgcctggacctcccagaatttaaaccaaaccctcttgcttccttaacaaattctggctgacgaaggtccaggtactcttaaaaactggccctgggaaaattttgaatgaaatttcaagggaatttgtcccctctgggttccacttgaggttgtgccgatgctgctaccacactgtcgagcccaggtaagtcctactgcaggattttgtgctgtggccactcatgagtgtccctgaaataactttttttttttttaaatccagttttgggatcacgcaactttcctatttttctcccagtagtcagctcccttagttaacttgtcactttaatttgatatttttattttctctccttttaagtcttagagaccagcagagaatctgtgagagaaagtatttcaggaagttagaaattcaaccgaatctgaggtagtcctaaaaagtgccattttgtttcacttatgggctaaagtaccagcttagtcaggtaagagccctgacccacttcagatggtaacaccacttctcactgccttcagatggaatcacagatttcagtcacggcgcataacaaattgatcagtgagtggctaggcatctgcagataaattgtttcagccatagaagctccattagcacatatgcttccttttccccccttcctttaaaatcatctggaaagaaactattttgtgcccttggggactcctgtctgtctgttacagtttaccaagatggagctgggttaggaaagaagtgagggcccattttgtggttcaagtgcactagacagctgctggggtaggaagcacaggcaatgtctgtaatcagctgtgggagagcagtgactgagaacagtctgaggcctggctccacttggaagtatctggggtgcgatgaaatcacaattatcttgaagcctaaagagggaactacaagactgttaactaagatcaatgtgggcacctaaaagggtatgttaaaatcaccatttctcaggtcaaaatactgtgaataagtcttcaataaaatcactaatggtta

SEQ ID NO: 29839 - DNA, 2614 bp, Homo sapiens
acagagagattggtgtttttgtgaggcagtgagacctaaggtaacctttatcaaaaggatggagttgggaaaaggaaaactactcaggactggactgaatgcgttgcatcaagcagtgcatccgatccatggccttgcctggaccgatgggaatcaagttgtcctaactgatttgcggcttcacagtggagaggtcaagtttggggactccaaagtcattggacagtttgaatgtgtctgtgggttgtcctgggccccacctgttgcagatgatacacctgttctactcgctgtccagcatgagaagcatgtcactgtgtggcagctgtgtcccagccctatggagtcaagcaaatggctgacgtctcagacttgtgagattagaggatcactacctatccttccccagggctgtgtgtggcacccaaaatgtgctattctgactgtgttgactgctcaggatgtctccattttccctaatgttcactctgatgattcccaggtaaaggcagacatcaacacccagggccgcattcactgtgcatgttggacccaggatggcctgaggctggtggtggcagtaggcagcagcctgcattcttatatttgggacagcgctcagaagactcttcacaggtgctcctcctgcctggtgtttgatgtggacagccacgtctgctccatcacagcaactgtggactcacaggttgctatagctactgagcttccattggataagatctgtggcttaaatgcatctgaaacctttaatatcccacctaacagtaaagacatgactccgtatgctttaccagttattggtgaagtacgctctatggataaagaggcaactgattctgaaacaaattctgaagtatcagtttcttcttcctatttagaacctctggatctaactcacatacatttcaatcaacataagtctgagggtaattctcttatttgtctaagaaaaaaggactacttgacaggaactggccaagattcttcacatttggtccttgtgacctttaagaaggcagttaccatgacgagaaaagtcactattccaggcattctggttcctgatctgatagcatttaatcttaaagcccacgtagtggcagtggcttccaacacttgtaatataattttgatctactctgtcattccatcttcagtcccaaacatccagcaaattcgattagagaacactgaaagaccaaaagggatatgtttcttgacagaccaactattactaattttggtaggaaaacaaaaactcactgatacaacatttcttccttcttcaaagtctgatcagtatgccattagcttgattgttagagaaataatgttggaagaagaaccttcaataacatcaggtgaaagccagactacctactctactttcagtgctccgttaaataaagcaaatagaaaaaagttaattgaaagtctttccccagatttttgtcaccaaaacaaagggctgttgctgacagttaataccagtagtcagaatggaaggcctggaagaacacttattaaagaaatccagagtcctctgtctagtatctgtgatggctccatagctctagatgctgagcctgttacccagccagcatcgctgcccagacacagcagcacaccagaccacaccagcacactggagcctcctcgtttgcctcaaagaaagaacttacaaagtgaaaaggaaacttatcagctgtctaaggaagtggaaattttatctaggaacctggttgaaatgcaacggtgtctttctgaacttacaaaccgtctgcataatgggaagaaatcctcttcagtgtatccactctctcaagatcttccttatgttcacatcatttaccagaaaccttattatctaggtcctgttgttgaaaaaagagcggtgcttctctgtgatggtaaactaaggctcagtacagttcagcagacttttggcctttctctcattgaaatgctacatgattcccactggattcttctctctgctgacagtgagggctttatcccgttaaccttcacagccacacaggaaataatcataagagatggcagcctgtccaggtcagatgtcttcagagactctttttctcacagtccaggtgctgtttcttctcttaaagtctttacaggccttgctgcccccagtttagataccactggctgttgtaaccatgtagatggcatggcttgatatctgcagtgtccttgctgtgtagctcttcagatgagaccattacaaacaaggcctgcttgacactggacactcgccaatgagactcccactgcactcaggcgaagcgcttgccatggtcggctctcctggtttccccctgtttcccctgagctgaggctcgctgctgtgtagcagagctcagtctttattagatggctccgaaagtggtgtttatgtattcatgactgtgtggttttgactaagggcagaattctcagaacaaaacaatattatggcacctaaaagggtatgttaaaatcaccatttctcaggtcaaaatactgtgaataagtcttcaataaaatcactaatggttattgtggctgttttggatgttttggtagtatt

SEQ ID NO: 29840 - DNA, 452 bp, Homo sapiens
aagatggagagggaactccacccctcctcgttaaagacaggaataatcattcactttgcttagtggtccccaataaacaagcttagcagataagcgggaagacagggaaagggaatcagacttgggatccaggagctcgcaggaccctgttctgccccaggccactcaggaatggagagctgctagctggacctgggtaggtcaccattactcactggggcttttgtctggcatgaaaggtgacgggagaaaggggcagatttttatccaggcagccaccgtgggtgtggacactgagtaataaggaaagaaatgcagttcagaagcaaagagggaggagccaggtcctctgagctcttctgagaaaccagagcccagtcgagctctgcagctagagtggcagctgcggatgacagtgggtcagaagcttggtgggaggaggctgacccagc

SEQ ID NO: 29841 - DNA, 297 bp, Homo sapiens
tagtacagtgcactttatatgacctaactgatatataaagaataaggtactcaaaaatcaacaaatacacatcactttggaatggtatggaataattagtgaaatttaccacatagggggatcatacagtgtgtccacactatagattagcttcagatcttttatatccttactagttttttgtctgcttgctctataatgacacagagaccaacattaaactagttatgagtttgtttttccttttcatcctgtctcttttgtcttcctataatttcagtcatttttattagttac

SEQ ID NO: 29842 - DNA, 424 bp, Homo sapiens
tacaactaaattcgcggccgcgtcgacgttttagaaaaagacaaaaaaaaaaaagagagagagagagcgagagagcgagcgtgtgcaagaggttgcgagcggggccccgaggtgtccagagcccctgcaagtatgcactgagaaatttatctacaggtcgtttgacaaaaatgaacaatatcctatttattgtatatactgttttattataaatcgtggattgtatattgcattctgtaaacctgctgtggtcccgtggtgtgcaaattcgcatggtgggggggagggagaagaacctcttgcgggagctttttttttctttcttatttttcactcttttgggttttctcttctgttgttgttgttgttgttttctgttggcaggacacacccaaagatccaagtttgtattaaaaagaaatga

SEQ ID NO: 29843 - DNA, 2204 bp, Homo sapiens
agccctcgcccgagaactgtcggcagtttgcgggggcttctcagtggcctttccggcagggctatggaggcctggactgggcctcagaggcctttagtcagctctacaatcccagttttgactgccacgtcagcgagcccaacgtgatcctggacatctccaactacacaccgcagaaggtgaagcagcagacggctgtgtcggagaccttctctgagtcatcctccgacagcacccagttcaatcagccggttggtggcggggggtttcggcgtgccaacagcgaggcctcaagtagtgagggccagtcgagcctgtccagcctggagaaactgatgatggactggaacgaggcatcatctgcccccggctacaactggaaccagagtgtcctctttcagagtagctccaagccgggccgtggacggcggaagaaggtggacctgttcgaggcctcacatctgggcttcccgacatccgcctctgccgctgcctcaggctacccatccaaacggagcactgggccccggcagccgcgaggtggacggggcggtggggcctgctcagccaagaaggagcggggtggcgcagcggccaaagccaagttcatccccaagccacagccagtcaacccactgttccaggacagtcctgacctcggcctggactactatagcggggacagcagcatgtcaccactgccctcacagtcgagggccttcggcgtgggagagcgagacccctgtgacttcataggaccctactccatgaacccgtccacgccttccgatggcacctttggccaaggcttccactgcgactcgcccagcctgggtgctcccgagcttgatggcaagcatttcccaccgctggcccacccacccacggtgtttgacgccggcctgcagaaggcatactcgcccacctgctcgcctacactgggcttcaaggaagagctgcggccaccgcccacaaagctggctgcctgcgagcccctcaagcatggactccagggggccagcctgggccacgcagctgcagcccaggcccacctgagctgccgggacctgccgctgggccagccccactacgattcccccagctgcaagggcacagcctattggtaccctccaggctcagctgcccgcagcccgccctatgaaggcaaggtgggtacagggctgctggctgacttcctgggcaggacggaggccgcgtgcctcagtgcccctcacctggctagcccaccagccacgcccaaggccgacaaggagccactggaaatggcccggccccctggcccaccccgtggccctgctgcagccgctgctggctatggctgcccactccttagtgacttgaccctgtcccccgtgccgagggactcgctgctgcccctgcaggacaccgcctacaggtacccaggctttatgccccaggcgcatcctggcctgggtgggggccccaagagcggcttcctggggcccatggcggaacctcaccccgaggacacattcaccgtcacatccctgtagtgccaactgaagtgccgactggaccgcgaggttttgttcctggctttcagaaaaccaacgccaagatccctcccagcgtccacatcgtcctctggcaggagctcctgcccctctgcctcccaccctgccccctacaccccctgcagacccatctccctccaccccctcccacccatctcctccacgcagaagccgaaggtgagccctttctgcacaaaaccagcaattgtaaatactttttaaaaatgtacaaaacttaaaaacaaaacacagttttagaaaaagacaaaaaaaaaaaagagagagagagagcgagagagcgagcgtgtgcaagaggttgcgagcggggccccgaggtgtccagagcccctgcaagtatgcactgagaaatttatctacaggtcgtttgacaaaaatgaacaatatcctatttattgtatatactgttttattataaatcgtggattgtatattgcattctgtaaacctgctgtggtcccgtggtgtgcaaattcgcatggtgggggggagggagaagaacctcttgcgggagctttttttttctttcttatttttcactcttttgggttttctcttctgttgttgttgttgttgttttctgttggcaggacacacccaaagatccaagtttgtattaaaaagaaatga

SEQ ID NO: 29844 - DNA, 743 bp, Homo sapiens
tcaagcttctaacgatgtacggggccatggcggaacctcaccccgaggacacattcaccgtcacatccctgtagtgccaactgaagtgccgactggaccgcgaggttttgttcctggctttcagaaaaccaacgccaagatccctcccagcgtccacatcgtcctctggcaggagctcctgcccctctgcctcccaccctgccccctacaccccctgcagacccatctccctccaccccctcccacccatctcctccacgcagaagccgaaggtgagccctttctgcacaaaaccagcaattgtaaatactttttaaaaatgtacaaaacttaaaaacaaaacacagttttagaaaaagacaaaaaaaaaaaagagagagagagagcgagagagcgagcgtgtgcaagaggttgcgagcggggccccgaggtgtccagagcccctgcaagtatgcactgagaaatttatctacaggtcgtttgacaaaaatgaacaatatcctatttattgtatatactgttttattataaatcgtggattgtatattgcattctgtaaacctgctgtggtcccgtggtgtgcaaattcgcatggtgggggggagggagaagaacctcttgcgggagctttttttttctttcttatttttcactcttttgggttttctcttctgttgttgttgttgttgttttctgttggcaggacacacccaaagatccaagtttgtattaaaaagaaatga

SEQ ID NO: 29845 - DNA, 2239 bp, Homo sapiens
agccctcgcccgagaactgtcggcagtttgcgggggcttctcagtggcctttccggcagggctatggaggcctggactgggcctcagaggcctttagtcagctctacaatcccagttttgactgccacgtcagcgagcccaacgtgatcctggacatctccaactacacaccgcagaaggtgaagcagcagacggctgtgtcggagaccttctctgagtcatcctccgacagcacccagttcaatcagccggttggtggcggggggtttcggcgtgccaacagcgaggcctcaagtagtgagggccagtcgagcctgtccagcctggagaaactgatgatggactggaacgaggcatcatctgcccccggctacaactggaaccagagtgtcctctttcagagtagctccaagccgggccgtggacggcggaagaaggtggacctgttcgaggcctcacatctgggcttcccgacatccgcctctgccgctgcctcaggctacccatccaaacggagcactgggccccggcagccgcgaggtggacggggcggtggggcctgctcagccaagaaggagcggggtggcgcagcggccaaagccaagttcatccccaagccacagccagtcaacccactgttccaggacagtcctgacctcggcctggactactatagcggggacagcagcatgtcaccactgccctcacagtcgagggccttcggcgtgggagagcgagacccctgtgacttcataggaccctactccatgaacccgtccacgccttccgatggcacctttggccaaggcttccactgcgactcgcccagcctgggtgctcccgagcttgatggcaagcatttcccaccgctggcccacccacccacggtgtttgacgccggcctgcagaaggcatactcgcccacctgctcgcctacactgggcttcaaggaagagctgcggccaccgcccacaaagctggctgcctgcgagcccctcaagcatggactccagggggccagcctgggccacgcagctgcagcccaggcccacctgagctgccgggacctgccgctgggccagccccactacgattcccccagctgcaagggcacagcctattggtaccctccaggctcagctgcccgcagcccgccctatgaaggcaaggtgggtacagggctgctggctgacttcctgggcaggacggaggccgcgtgcctcagtgcccctcacctggctagcccaccagccacgcccaaggccgacaaggagccactggaaatggcccggccccctggcccaccccgtggccctgctgcagccgctgctggctatggctgcccactccttagtgacttgaccctgtcccccgtgccgagggactcgctgctgcccctgcaggacaccgcctacaggtacccaggctttatgccccaggcgcatcctggcctgggtgggggccccaagagcggcttcctggggcccatggcggaacctcaccccgaggacacattcaccgtcacatccctgtagtgccaactgaagtgccgactggaccgcgaggttttgttcctggctttcagaaaaccaacgccaagatccctcccagcgtccacatcgtcctctggcaggagctcctgcccctctgcctcccaccctgccccctacaccccctgcagacccatctccctccaccccctcccacccatctcctccacgcagaagccgaaggtgagccctttctgcacaaaaccagcaattgtaaatactttttaaaaatgtacaaaacttaaaaacaaaacacagttttagaaaaagacaaaaaaaaaaaagagagagagagagcgagagagcgagcgtgtgcaagaggttgcgagcggggccccgaggtgtccagagcccctgcaagtatgcactgagaaatttatctacaggtcgtttgacaaaaatgaacaatatcctatttattgtatatactgttttattataaatcgtggattgtatattgcattctgtaaacctgctgtggtcccgtggtgtgcaaattcgcatggtgggggggagggagaagaacctcttgcgggagctttttttttctttcttatttttcactcttttgggttttctcttctgttgttgttgttgttgttttctgttggcaggacacacccaaagatccaagtttgtattaaaaagaaatgaaaaaaagcaaaaaaaaaacaaaaaaaaaacaaaaa

SEQ ID NO: 29846 - DNA, 160 bp, Homo sapiens
ccctcaccctgctgaatcctgggaggagctgggtgggggtctccctcttcacttccctgatctcagagcacagtcgatgcgtgccgctcactcctgcctcttctcttgtgtttctttgcagctttcagaaaaccaacgccaagatccctcccagcgtcca

SEQ ID NO: 29847 - DNA, 490 bp, Homo sapiens
tttttctttttttgagacggagtcatgctcattgcccaggctggagtgcagtggcacgatcacagctcactgcaacctgtgcctcccaggtcaagagaatctcctgcctcagcctcccgagtagctcggattacaggtgcatgccaccaagcccagctaacctgtatatttttagtagagatggggtttcaccatgttggccaggctggtctcaaacttctgacgtcaggtcacctgacctcccaaagtgctggaattacaggtgtgagccaccatgcccagcctataaacattttttttttattaaatagtcaatcattatgataaagaacaggaaaggtaatgtttaggtatccaaagtccatgcatgaaagatgctaattaccagccccaggcaacataggctgaagaaagttagttctagcacccagtgaagctagctattgaccatggaacactgggtatgttagtttgtccatgtctcagatgc

SEQ ID NO: 29848 - DNA, 619 bp, Homo sapiens
attcctcgtgacttggttttctaagttaaaccaccttttcttgcctccttcttcttctcagaatgaatctgtgtaattggatgtgtgaggtatgcttagttgccatttacctaagtctgtttccaaaaatgaccgaacaaaagactattacaagagaagaggcccaaacaaaccctgtagttttaacaaatttccttttctcctcccttcttatctctctcactctcttttccactttcttctctcctctgtctttagctagttaattacatatctagagttaaaactcagggtttccgagtcatgtgtccttggtgtgcagtcattgggtgaggagctggggacgtcaaaaatgaatttaacgtagtccctcctctcaggcagctgcaaactagaagcaggcgtgggacacactgtatgcccaggagtggctttgcatttgagagccatccttctggcagctgtgcagggaatgggtcgacctggccttgcattttcctcactcccctcctggcccactccagcagctggtaggcaaagctgtaaaggaagtaatgatgtggctcaggaaagaggcatgaggttaaagaaaaactgtggcaagggtagcagagatgga

SEQ ID NO: 29849 - DNA, 331 bp, Homo sapiens
attatgactttgcacaaattagaaagataatctttaattttcaagcaactactgtgaaatcaataaatattacctatttcacttttacatcctctgatggggttaaaatataagatggctgtcttagctgattgttttccctgttagctactagaaaagaataatttgaattttatgaataaaagagacaagaaacattttttcctgaggaagaacatttgttattcctttttaaatatcttcatttaaatgattatgtattacaataaatgttaagtatgggtatattataaataatacaatgattaaaaaatttatctcttgaatcaca

SEQ ID NO: 29850 - DNA, 413 bp, Homo sapiens
gccacccctatgcatgggttccttcggcctgaccatcactatgtccttaatgtgctgggccttgctaccactgctgttttcagttaaactctcttgggtgctaaagttatggaggcacctcaaatcagaagttccaggtttgaggaagagagagcagaaagatatgagatcccaattcttgcataggctggaatctggtgggacaggagttgtaaaccaatgccactgtcctttgttatctgtgggggattgatttgaggacccctgaaggaccaaaatctgaggatgcttaaggccctgatataaaatgacagagtattttcatataacttatgcatatcctcccatatatttaaatcatctctagatcacttgtaactaataaaataaaaatgctatgtaaatagttgcta

SEQ ID NO: 29851 - DNA, 6196 bp, Homo sapiens
tgaggaactgcgtgtggagtcagcccagtctggatgcacaggaggatgctggcggcacagtgagtgaggcctggtgccagagctgtgcggaccccttgttggccatggagcagcaggcccagaggccctctccccagccctgcttgcctgcctcggagaggacagaggcctaggcccacgggggagggtgttggcagacagatgccctccaggccctggggcctccttaacggccccttaacgacacgcgtgccaagggtggaggatgccagccaaggggcgctacttcctcaacgagggcgaggagggccctgaccaagatgcgctctacgagaagtaccagctcaccagccagcatgggccgctgctgctcacgctcctgctggtggccgccactgcctgcgtggccctcatcatcattgccttcagccagggggacccctccagacaccaggccattctgggcatggcgttcctggtgctggcggtgtttgcggccctctctgtgctgatgtacgtcgagtgtctcctgcggcgctggctcagggccttggcgctgctcacctgggcctgcttggtggcgctgggctatgtgctggtgttcgacgcatggacaaaggcggcctgtgcgtgggagcaggtgcccttcttcctgttcattgtcttcgtggtgtacacactactgcccttcagcatgcggggcgctgtcgccgttggggccgtctccactgcctcccacctcctggtgctcggttctttgatgggaggcttcacgacacccagtgtccgggtggggctgcagctgctggccaacgcagtcatcttcctgtgtgggaacctgacaggcgccttccacaagcaccaaatgcaggatgcgtcccgggacctcttcacctacactgtgaagtgcatccagatccgccggaagctgcgcatcgagaagcgccagcaggagaacctgctgctgtcagtgcttccggcccacatctccatgggcatgaagctggccatcatcgaacggctcaaggagcatggtgaccgtcgctgcatgcctgacaacaacttccacagcctctacgtcaagaggcaccagaatgtcagcatcctctatgcggacatcgtgggcttcacgcagctggccagcgactgttctcccaaggagctggtggtggtgctgaatgagctctttggcaagttcgaccagatcgccaaggccaacgagtgcatgcgaatcaagatcctcggcgactgctactactgtgtatcgggcctgcccgtgtcgctgcctacccacgcccggaactgcgtgaagatggggctggacatgtgccaggccatcaagcaggtgcgggaggccacgggcgtggacatcaacatgcgtgtgggcatacactcggggaatgtgctgtgcggggtcatcgggctgcgcaagtggcagtatgacgtgtggtcccacgacgtgtccctggccaaccggatggaggcagccggagtacccggccgggtgcacatcacggaggccacgctaaagcacctggacaaggcgtacgaggtggaggatgggcacgggcagcagcgggacccctacctcaaggagatgaacatccgcacctacctggtcatcgacccccggagccagcagccacccccgcccagccaacacctccccaggcccaagggggacgcggccctgaagatgcgggcgtcagtgcgcatgacccggtacctcgagtcctggggggcggcacggccctttgcacatctcaaccaccgtgagagcgtgagcagtggtgagacccacgtccccaacgggcggaggcctaagagcgttccccagcgccaccgccggaccccagacagaagcatgtcccccaaggggcggtcggaggatgactcgtacgatgacgagatgctgtcagccattgaggggctcagctccacgaggccctgctgctccaagtccgatgacttctacacctttgggtccatcttcctggagaagggctttgagcgcgagtaccgcctggcacccatcccccgggcccgccacgactttgcctgcgccagcctgatcttcgtctgcatcctgctcgtccatgtcctgctcatgcccaggacggcggcactgggtgtgtccttcgggctggtggcctgtgtactggggctggtgctgggcctgtgctttgccaccaagttctcgaggtgctgcccagctcgggggacgctctgcactatctctgagagggtggagacacagcccctgctgaggctgaccctggccgtcctgaccatcggcagcctgctcactgtggccatcatcaacctgcccctgatgcctttccaagttccagagctgcctgttggcaatgagacaggcctactggccgcgagcagcaagacaagagccctgtgtgagcccctcccgtactacacctgcagctgtgtcctgggcttcatcgcctgctcggtcttcctgaggatgagcctggagccaaaggttgtgctgctgacagtggccctggtggcctacctggtgctcttcaacctctccccatgctggcagtgggactgctgcggccaaggcctgggcaacctcaccaagcccaacggcaccaccagtggcacccctagctgttcctggaaggacctgaagaccatgaccaatttctacctggtcctgttctacatcaccctgcttacactctccagacagattgactattactgccgcttggactgcctatggaagaagaagttcaagaaggagcacgaggagtttgagaccatggagaacgtgaaccgccttcttctggagaacgtcctgccagcccacgtggctgcccactttatcggtgacaagttaaacgaggactggtaccatcagtcctatgactgcgtctgtgtcatgtttgcctccgtgccggacttcaaagtgttctacacagagtgcgatgtcaacaaagaagggctggagtgcctacgcctgctcaatgagatcattgccgacttcgacgagctcctactgaagcccaagttcagcggcgtggagaagatcaagaccatcggcagcacgtacatggcagctgcagggctcagcgtcgcctcagggcacgagaaccaggagctggagcggcagcatgcccacattggtgtcatggtggagttcagcatcgccctgatgagtaagctggacggcatcaacaggcactccttcaactccttccgcctccgcgtcggcataaaccatgggcctgtgattgctggagtgattggggcccgaaaacctcagtatgacatctggggaaacactgtcaatgtggccagccgaatggaaagcactggagaacttgggaaaatccaggttaccgaggagacctgcaccatcctccagggcctcgggtactcttgtgaatgccgtggcctgatcaacgtcaaaggcaaaggcgagctgaggacttactttgtctgtacggacactgccaagtttcaggggctggggctgaactgagggctcctgctggattccgaaaaggccgggaagccagtctccttccctgaagcaagcccaggagaagactctccgccccacgccaatcccaaaggcatgcagatggctgtgcatgttggcttctttggacctgcactggaggatttctcagacacatgcaccagattctggctcgaagcagccactgagccataatgcgcaggggaggccagaagctctgtgcctggtctgtaacagtttccaggccagctggagaatgttcactggttcggggctgactttgagatctttgttccctgaggtgccaggcaggcaactttagcacatgatgaaaacagacttccacctcagtggcctgtgggcacgcacaagtgaggtctgtttttctagacaccaagggggagtaagctgagctgtctagcacggattggagactccctctccctggtgggcctggcaatgacagcatttctcacagaggcattctggtaaatgaagctgaaaggggtgttttacatctgtaaacggtttcaaacaggtagagagaaaaacaccacaattaacactgttactttttgccttgtctggcatgtttgttttaaatgaatacattaatggggtttttatccttttgaatgacttttcagacactagacataaatctcttccctccagtgtatgctctgcctttttaaccactgacatgtaaggaggactactgtctagcatcagcttatggggtcagctggctgtggggatagagtcctgaggaatgtggtcacagcaagaaggcggggagcagcagagccttgcctttgaatgaggcagcttgtgaggcaagcattctggagagaggtgctttgaaagtaaggtgcggcctttcacctcttccttgattactcacacatctttgcgttctcccctgccgtccttcaactgtatcttacttttcttaccagaaaggaatggagtctgtttagagacaacttggacaacctgtgagtgcatctcttctttcctttagtcttcacagctaactctggagagcttcaaaactagaaggatctactccgcatgggtgcatgcagaggctcctggatctgggaagcccgccccctcacaaatgctgagccgttcttgctctgaaactgcgtgagtcaaggcaaatgcaaaaagccaggttttggggatgtgtcttactgtgcttcaacttcccaaggaattgaaagtcaacctaactgtaacaacagggtgagaaatgaccaaactgcccgtgactttttctgaatggacttcataaccggaagacttaaccggtggcctcatcaccagagcatcgccaggatttctaatgcactcagtttccctacatagcagggattcttagctaggtgtccccatgaaccccgtaaagttctacacaaagtcttgcatacaggagcctttacaagatgattatacagggttgcagattgggtgactgaccagacttgttggggtcctgggatgagttgccccgggctgcaaattaagagtacagctaagtgcgggggtggcggtggagggaacgaaaattgaacctgtctgcctgtgctgtgtcgtgtggctttatcagcccgaggaagggcaggtgtattctaatttgcacaaaggtgctgggtagactagtggcagctctcatgtgctgcacataagtggaatcagtatgaatagaagaacttgctgtataaaggaatttcatggcaacaatgctggtaagggcaattagcctcgcttaagttgccttttttacacaccaaaactttttacatgaagggctggtttcacatgaatactatactgaaatctgtgccacaccaaaactttttacatgaagggctggtttcacatgaatactatactgaaatctgtgctctcaagatctagcagtgaccagggctgcccggcgggggctctcctggcaagtcaggaaggtttctgttgctaatataacatagaaacacattagtgcactgggcctctctgaggtcagcatatttgtactcttggaatatttgtttttttcttcagtaacaacagaaaccccagttgggagtttaacaaataactgactaccactcactcatgcatttttatttccaattaaagcaaagcactgtgctgtgctcagataataatagtttgtaagtaaaagtttttagttttcagtgttcaggttatagaatataactgaccataaaaattacctgcaggtattttctttttatgaacttgtttttaaattaccaagtaattactggtgtcattttgttttatgacagacacacgtatctaacaaacaaacaaacagtgaccttctccatgggtcaaggacttccttacaatttctcctgagttaacttttgtgaaaataatacctaaggttttctggcttattgaggaaatttcctaacaaacaaacaaacaaacaaacagaagagaagatcattaaccactgtatactttgtgtatataataggtcagtgtaaagaaatatgatttgaggtggtgcatgcaagtaactagggtttattctatataatgaatatttatagatctgtaacatttgtttcaaaatgctgtttcatttttataaagtaccagtgtttagctgctttttatacattaaattagcaatttgaaaaactc

SEQ ID NO: 29852 - DNA, 382 bp, Homo sapiens
tgagacagtgtctccccccattacccaggctgaagtgcagtggtgccatcgtagctcactgcagcctcaaactcctgggctcaaaccatcctcccgctttagcctccccgtgtagctggggatacaggtgtacactaccaaacctggccaaaacttttaaatgtatcaccaaattgccctccaagtgaagttacacatatgtacactctcatgagtgacatttgagtggctatttccccatgatctctccaacatcggttattgtgattttttaaaagaccttgccaatgtcataggtaaaaaaaatagcatatcattgtttgaatctattgttattttcattatactgttttatttctggtagaatgtaaaattgcataca

SEQ ID NO: 29853 - DNA, 374 bp, Homo sapiens
gggtgaaaccctgtctccactaaaaatgcaaaaattagctgggtgtgatggcgcgtgcctgtaatcccagctacttgagaggctgaggcaggcgaattgcttgaaccggggaggcgaaggttgcagtgagccaagatcacgccactgcactccagtctgggcgacagagcaagacttcatctcaaataaataaataaataaatattccgccaaattgttgactcctttttgtgattgtaaatgctagaattaaataattatttctgatctgtcaagttaaaaccctgagtattatcttttaatatacatatatatgtttatgtgtgcataaatatacgatagctttttttttctttcgatctgctactgaaata

SEQ ID NO: 29854 - DNA, 664 bp, Homo sapiens
cacagagtgggaagggaaggtgagcaaaggcaggaaatgaagaagctgaggctgagccaagggtcccaggggacattaagggggttcagcagacctgccctgctgtaaagagaaaagtggcagtgctcctgttcccagccctgtccctcctgttctccctgcagtcagtagagcctccctggtgggaggaaagtgaggacagagcagaggtgtacgttctgagagcacgcagctgcatagagcccagcaggggggctggttcacaggggtcccctgtgaacagatgctacattgcatgcacatatcttgaccaaaggacagagccttcctgtgaattagaaaaaggactctccgggccaggcacagtggctcacgcctgtaatcccagcactttgggaggctgaggcgggtggatcacctgaggtcaggagttcaagaccagcctgacaaacatagtgaaaccccatctctactaaaaaatacaaaagttagccaggcatagtggtgagcacctgtaatcccagctactcaggaggctgaggcaggagaatcacctgaacccagaggcagaggttgcagtgagccaggatctcaatattgcactccagcctgggtgacagagcaagactttgtctcaaaaaaaaaaaaaaaaaaaaaaaaaaaa

SEQ ID NO: 29855 - DNA, 130 bp, Homo sapiens
cagtgcaactcttcccaaactgcttgactagctttagaaaggggctaaaaaaagcttttgtgggctttttgttcttcctctgggtagctatacttactcgcctacctatacttactccccctacctccac

SEQ ID NO: 29856 - DNA, 595 bp, Homo sapiens
actttcctggatgtggcctgaacctttctatccaggcctaacttagacactggtcatggggtattccaagaaagtcatggggcaatgcagccctctacagctgagatagaccctgaaaaatttgacagcaggagatggtttgctgaccctcactcctcacagcagggcagcaagtttttcccattattaatatgaataattatcctatgttatcctagaaattgaatccctcccatcactggggaaaagggaggggggactgagaggtggatctccttattcatcacagcatctagggttccaacaatcttcagtgcttgagaactcaagggcctaggatcagtgcaaattgttctcgaaacctgctgattctcctcagattataatgactcaggtaattcatgacttgacatttcactttgacaatttacagatttatagataggtagttcttggttgacctgggcctgttgtggcttatccatggcaattttgaattaaggctcttataaataaatttaaatagagttcatgcttaaatttcttttaatcctcacttacgaaattggaaagcagaaataaaagtaagcttaga

SEQ ID NO: 29857 - DNA, 467 bp, Homo sapiens
actctcaagagatcagtattttatacctaaagatgctttcttggagtggtataggcatttagaacatgaatgttctaaaactgcactatctaatatggtagccacaagccccatgtggcaaactgcaatccagttctttggtctacaagtcacattcaagggctccacagacacacaaggtcagtggctcacactgcacagcacagagaccctttccaccaccaaagaagctctcgaacagccctgctctacaaggcaatgtgccaccccagcaggctggctgcccaggggcttcttatgacagactgccttgcccatgaattacagtatcatgattttcaccagcaggcttgcaagccagcaagcatggagcacatgcacacatacgcaggtccaagcacacgtctgtctctaaccatgccttcaaagtataaaatgactttgtaatttgggaactatatatatga

SEQ ID NO: 29858 - DNA, 474 bp, Homo sapiens
gttattttaaattctttcctttgaaatgaatgctttgctgtttccacattttctgataatcagaaatatacttttccagacctcttcctaaagcatgttgattttaaggtctgcaccagacctctgttctgctctcgactgttgaatatgtctggcttatttaaaaaaaactgtgtttgcccatagaggggcagggaactggggaggagaaggtagttaaggtaggattctgactccaaatgagctgattaaaaggtatctgagataattgttttcaaaggtggaaagagatggctggaaatcaatgggcagtcatgttggaatgtaaaagtaatcaacatgaacacaggccatatcatcaatgctttctgaatgcaaagggaaagggaactactatgccgtggcttccttcaaattgatgtgtctttccaaacttagaggagcaagagaaatgcttgcagggactttaacttg

SEQ ID NO: 29859 - DNA, 472 bp, Homo sapiens
ttcatctccttgttcttgtgtatttttgtacctcaaagctctttggaggattctctttggagggagacccacaggatcaagtgagttagggtggtgattgatttagtcaggttttataaaccagtattctctacttcacgtagaattttcactgtgcttgaatagtcttaacatcttattcagagaaaaggcttacattgattaatgtggcatatgtgtggttatcatacttagaaagtgctctgtttaaggagagctttgtcaagagcattctttcaatggagtcacgagaaagctttttaaaaaagctgacaacttcaagtacaatttcctttttcttctgtctattatgattgaaacccaatctttgttataacataattatctcagctgaagccaacagggagttgctgccttaatgtaaggggtgtgaagtcccctaaataaatagaggattaattacattcccagc

SEQ ID NO: 29860 - DNA, 486 bp, Homo sapiens
aaaccacctacatccctgagcctctgtcctcttaaaacccaggctgatagcaacagaaagtgaaacaccacatgttctcactcatatatggaagctaaataaagttaatctcatagaagtaaaaagtggattcgaggatactagaggctgggaaggctagggggaagggggcagttaggaagagattttgtaaaggatacaaaattacagctagataggaagaataagtctagtgttctatactattaggatgactacagttaacaagaatatatgtttcttgtgtatgtgtgtgacaagagtctcactgtgtcacccaggctggagtacagagatcttggctcactgcaacctctgcctcccaggctaagcgattcttctgcttcaacctcccgagtagctgggattacaggcatgtgccaccatgcccagctaatttttgtagttttagtagaggtggggtttcaccatgttggccaggctggt

SEQ ID NO: 29861 - DNA, 314 bp, Homo sapiens
ccatatcacatggtttaaaatttaaaacaataaggactcataatgcaatagaaaaattgagaagaggacttagataccttgaaaaagaggtgaaaaggttctcaacatcattaattatcagggaatcacaaattttattcacattgcaacactactatccaaacagtagaatgaataaaattaaaaagacagaatataccaagtgtgagtgaggatttggagcaacaggagctcttgtacactgctcatgggagtgttgattggttcaatcaattttgtaaattgtatgtcagtatctattaaaattgtagata

SEQ ID NO: 29862 - DNA, 386 bp, Homo sapiens
caagatccttagctttatatatatctgctgccacgtaggtaatattcacaggttctgggtattaggatgtgaatatatcattggaggggccattttcttgcctactacagacacttaacaccatagattagtaaataatataatatgggccaggcgtggtggcttacgcctgtaatcacctgaggtcaggagtttgagaccagcctggccaacatggggaaaccccgtctctactaaaaaatacaaaaattagctgggcgcagtgatacgtgcctatagtcccagctacttgggaggctaaggcaggagaaacgcttgaacctgggaggcagaggttgcagtgagcagaaatcatgtcactgcaccctagcctgggcaacagggcg

SEQ ID NO: 29863 - DNA, 461 bp, Homo sapiens
cactggcttccatccaggtagtggatggaagctgggaagaatcttgagactgttagcggaggcctaaagggtattgaggaaactgtcagcacaggctttaatgttattggaagctgagggtaaggatatgcttgttatatagtggaagaaagtttggcaacatcctcacctataataatatggaaaatagaaaatgtacctcatgaaccagaggatctagctaaggagatatccacgcagaagtcaaaggtactcttaatacctggcttctacctgcttaaataaaatgagaagagagacagcctaaaattcgagaagttaaatataaatcagtctggacttgctaggttcagcattaagtttattttctccgttctcaacctggggaatcatcaccccgcatggcagatggttctaaaactgggcaatggcttgtgagcaaaggtgaaatccaagggtgc

SEQ ID NO: 29864 - DNA, 1115 bp, Homo sapiens
gagactctctgttcttggccatgtctttgaatttctgaggaagtcttttttgtttgtttttgtttttccctggtctgatgtacctggagagggaattagcctcacacccagttagggaacaaaaagccaagtaaacaaaagaatgctgttccaccttcctccagggaactggcgcccatagctgcaggcacaggtgcccagcccgctcactggcccagcaaggtgcttggtctcaggcccccagagcccgtcctggagccgcaaacatgctcgctattatccatggaaaaagagaggcattctctttgtttatagtctaagccaagtcacctgattcactctcactactctgcagtttggaattgtaaaaagcaaaaggctacaaaaatcaaaaccatccacctatgtaatgaaccatttcttatcacagcccaggaaggcacagataggaatcagtgtgcgtaagctctccacgtggaaaccctgtgaaaacagcagcctttcctaagcatctggctcctaggagctggatgttaattgttgctaaagcctgggttcattactacaaaagaaaataaacattccagagtcattttgaaagcattttgattgttctagaatattcacccaaggttgagcgtctcatggtgcatggcaggttcggccaggagctggccgtggcctttccactcctttcctgccatcctgaggatgcagtgcctggggcctcgcagttctctttccactcaaatctaaggctctaaagcttcaacaactgtcctgggacaataagaagcgctgagtccccatcctgcctgctctcctttctactcagtggggaaattggatcactcgccttggtggatcactcgccttggggaaaagccttttacgtcactgaatacatccccttctacggttttcatccaacagtcagccaggctgctgcagcacacataaaaacttcccctgcctgcaaagagctccaagtaggtgggaaagagatggatgtgcggacaggcttaacccagcaaagactggcggaggggtgtggagacagtggtcaggggtgggttcccgggggtactgatgcccaaaataaaatgtcaaggacg

SEQ ID NO: 29865 - DNA, 312 bp, Homo sapiens
ttgcagagtaggaaatttttaaataggttgtatatatagtaggatattttgcaactattaaaaatcatgtggactagtattacatgggaaaaaaagcagattataaacagcatatatagtatattttataaaactacatgttaaaaatgtactttacacataaagaacaaaaatgtatgggaggccgtttgttttagactgacctgcactaggcaccagcagaccagacagaattagaatggaggcccttgtgctgagtgccacataatcaaactgaactttgaatttgaactgaaatgagccagttttcta

SEQ ID NO: 29866 - DNA, 639 bp, Homo sapiens
aaaatgtacttagaaattttaaaagcacaaaacaaacgcattctctccccatcctcctatctccagctcttagagactggagctcagcacctaagctgttaatgaatggggacagctttcatctccactggaaaaaagcctgctctctcacttggggtccctctcccccttccacttgcattcaatcagcacccatgcaaccatcctccctgctctgagctctgtgagcccctgaaaatagagaaattgggtgtttgtggagcaaaatatagctaagtaatttttcctgctcctttgaggccatgttctttcatggtgagggaggggcagagaaaatagaggctcacaaatcccttttcctgtgactcccacaacttaggccagggctttctttgagcctcataatgtgtgtgtgtagataggggaaaggaggtccacttccagaattttccctgtgttcttattcctcacttatgctaccgttggctcagctggcccgaaccaagatccatagccaggtttccatcactggatgagctccccaaaacagggtgaccttcccctccttcgtgggggtaagggaaagctctcatatcattggacttcaggcaggaagggtcagttggaaagaaacctttg

SEQ ID NO: 29867 - DNA, 586 bp, Homo sapiens
cttaaacagctactcagccacattcatgaggagagtggtgcaaatcaagctagacctaaaacttttgcctgttagactggtgggggtgtggggaattggtgccctcatgcattgctggtaggagcgtaaattgatggcaacttcactggagaacaatctcggagtatctatcaaaactacgtatgcaccttaccctttgacccagcaattctacttctagggatttgtcccacagatacactcacttctatgacattatgtctaaacagatttattgcaggcttgtatatggtactgaaagaccaggccaggcacagtggtcacgcctgtggtcccagcattttgggaggccaaggcgggcagattggctgagctcaggagtttgagaccagcctggcaacatggcgaaaccccgtctctactaaaaatacaaagtcaggtgtgatggtgcatgcctgtaatcccagctactcaggaggctgaggcaggagaatcgcttcaacctgggaggtggaggttgcagtgagccaagattgcaccactgcacttcaacctaggtgacagagaaagactctgtctcaaaaaa

SEQ ID NO: 29868 - DNA, 529 bp, Homo sapiens
ccctttaccacatgccaaccctgaagggctccgtattctcttgccagactggacaaccttgaacttgtgaggcctcttgcctgtgcacatgctgctgcttttactgggataagactgactcccacacatgcctgtggatgtacctgggtgctacctcctttggaaagccttccctggccaactgcaacctccttgcccaggttgccatggtgcttcccactattattttttatttttatttttattttttgagatggagtctcattctttcgcccagactggagtgcagtggtgcggtctcagctcactgtaaactctgcctcccaggttcaagcaattctcctgcttcagcctcctgagaggctgggattacaggtgtgcaccaccatgcccagctttttttttctttttcttttttaaaatttttagacggtgtcttgctctgtcgcccaggtggaggttgcagtgagccaagattgcaccactgcacttcaacctaggtgacagagaaagactctgtctcaaaaaa

SEQ ID NO: 29869 - DNA, 286 bp, Homo sapiens
ttcctgagcatatttatatactgggttgtgttgcaataaaaaaaaaaaagtttgaaatgcattgtcctaggttttagtctgtgaagcagctgagaccagtattctttttttttttttttttgagacagggtctcgctttgttgcccaggctggattgcagtggggaagatcttggctcactgtagcctttgcctcctggattcaagcgattcttgtgcctcagcctccagagtagctgggatcacaggcacgcactaccaacgcctggctaatttttgtgttttta

SEQ ID NO: 29870 - DNA, 278 bp, Homo sapiens
gttgtttttttttttaatggccacatctaagaaatactacatgattagtcaatctagaagcctactgccaaggactgggtgaagttcagagtgcccagagtttataaaactttcattgtcaggtgaaccagtgtgcaagcccacagtacgcagcacaactgtcaatgcaggtcaatgagaaaaggtggggaaggaaagagaaagttactacttaccctgtgcccttcaaacatgcctcccacctctacgtaagtagaatgcatttgttactaaaaatt

SEQ ID NO: 29871 - DNA, 223 bp, Homo sapiens
atctttttggagaggaggctagggagatgtgccagtgtccctataaaaagtccccagggtctcctgatttcaaggttcctctctcctgtgatgcaacgtactgtgtgcacaggcaacatttggcccacatcacattgccctaaggaattcaagcttagggaaccagcacaagatactgctctggctgatgcttttgctgtgaataataaaccatgtgttcgtg

SEQ ID NO: 29872 - DNA, 370 bp, Homo sapiens
taaaaactaaacaagaaggggtatgatttttactgaaggttttgctagtccctgcccccccgcccccgccccacacacacacccaggtcatattgatttgtcacctgtcagtgtctgctccaatgtaaaacacacactattttaatatattttctctcaaatttagtgttactgttttcatgtcagggataacattctaagctggaagactaagaattaagacatatactatggtgatcccaatagcaaaattacttggtgtgctgttctagagaacgctgaatatttatcagaaagagcccagggaaatttagaagtccttgtttcaggctctgtgttcagcccagaaaatttggtacaaggaaaacca

SEQ ID NO: 29873 - DNA, 960 bp, Homo sapiens
tttgggcatgtttttcagacgtttttgaaatatttatgataaatgtttgaagtctgttaaatccaacatttcggctcacttggaatcagtttctgttgactatcattttacctgcagagggtcaagatttcctatttttttcttgtctagtggaaagttggacatatgctgtagtgagtctgaactcttgtgttcttctgaggattattgtgtttttattgtagcagactgttaataaactgcttggtcaaactacacactttgtttttcctgtgatatgcagccgcttgtagctctcctctgctcttaggtctttgcactggtggtggttttagtgtggcaccctgtgagtctcccctgtgtctgcaaaatttgaaagttggctaaggatctgagtagagatggacttttctctgtggttgtctttattctggggattcccctagtttctagcactccaccagctttgagctctgtactctgacatttcaagctttatgccgccctagcttgagcatagttgggaaagagcatcatattcacagatttggctccatgttactcttttttaaaaatattgctttctggtttctgactgctttttcaccgtgctgcttgtggtttcctcagcacatatgtagtatgtaagttccagctgtcagctagggatttccagcatcttatgctctgaatttgagtgtcacctctatattctagtgctgtcagagtgctttaaatttctagctgcttccccaattccagattttgatatctggcacctttagttggtgaggaactggcttttgtttgcccccatgttttgcagcaatagctgtgggagttgagcagtgccttgagccaagatgccacaaactcacaattcttaacccttctagttacagtttttgagatttaactctcttcctggcttttgcaaatactacctttagatcattgaaa

SEQ ID NO: 29874 - DNA, 590 bp, Homo sapiens
atacactactgctgcagctcacaaacacctctgcatattacatgtacctcctcctgctcctcaagagtgtggtctattttgccatcatcacctgctgtctgcttggaagaacggctttctgctgcaatggagagaaatcataacagacggtggcacaaggaggccatcttttcctcatcggttattgtccctagaagcgtcttctgaggatctagttgggctttctttctgggtttgggccatttcagttctcatgtgtgtactattctatcattattgtataatggttttcaaaccagtgggcacacagagaacctcactctgtaataacaatgaggaatagccatggcgatctccagcaccaatctctccatgttttccacagctcctccagccaacccaaatagcgcctgctatagtgtagacagcctgcggcttctagccttgtccctctcttagtgttctttaatcagataactgcctggaagcctttcattttacacgccctgaagcagtcttctttgctagttgaattatgtggtgtgtttttccgtaataagcaaaataaatttaaaaaaatgaaaagttga

SEQ ID NO: 29875 - DNA, 418 bp, Homo sapiens
agatcttctacatgcttgctgattgtgaaatttttgtccaataattctatcaattgctgagataaggctgttaaaacccacaactataatttattattttttagttctataatttttctcttcatgttgtttaagactttgttatttggtgcatatatatttggaattgttatgtttactggtgaattgatccatttattattagtgttgcagtctcctcactccttaatttagtgaggtccaagatcttgtcccacaaccaagagaataaggcacacaaataccagagagtgagtaaggcaaattaacattcattaagcaacagaaaagctctcagcagcaagagtggacccaaacaagggttgccagaaatggggctgagttctgatccctttatgtgacagaaacaaggaagtcc

SEQ ID NO: 29876 - DNA, 85 bp, Homo sapiens
catgtgttggtagagcagctgttccgtgctgtgctggaggtccacttcagcccccggttgcctcagacactctgaaacctgaagg

SEQ ID NO: 29877 - DNA, 3827 bp, Homo sapiens
  misc_feature (263)..(263): n is a, c, g, or t
  misc_feature (286)..(286): n is a, c, g, or t
aatgcctagcttttaaaaatttaattaattgcctatttttgagacagagtctctctctgtcatctaggcttgagtgcacttgcgccatctcagctcactgccacctctacctccccgggtccagccatcctcctgcctcagccttcccagtattctggggcacaaggtgtgcgtccccccgcccggcttaattttttgcctttttttttttgagacggagtcttgctctgttgcccaggctggagtgcagtggtgcgatctcngctcactgcaacctccacctccngggttcaagcgattctcctgcctcagcctcccgagtagctgggattacaggcatgcgtcaccacaccaggctaattttgtatttttagtagagatggggtttctccatgttggtcaggctggtctcaaactcctgaccgcaggtgatccacctgcctcggcctcccaaagtgctgggattacaggcatgagccaccgcgcccggctcaggcagggttctttataaaaacagcctgatgcctgaaggacactctctggttgtaatatttgtttcatccatgaagtgtttaaatattgcaactgacttgcgattagccaccaaaacaggcccttttagatgcagtgcctctccgaccaagtattggatgattcatacgtaatggactatgatcattttctgtccatgttttctattactatatgctggtttttttggagcaataagattactttttttctgttctattttgagcgaatcctttacagtttttgataagaactgtgacatttgttctttgttgataaaactcctgaaaataactcacaaggccagtgctgcactctggcacatgtaggttgttttgagggtttgttggttggttggttggctggttgattggttggttggtttagaacactaatgtacttgttatgaaccaaactctggtcttacagtcttaaattccacctcatggggctgttttctctgttagcaatgaaacctgggccaggtgtagtggctcacacctataatcctggcactttgggaggctgaggtgggaggattactggatcccaggagtttgagaccagcctgggcaacatagtgagaccctggtttctataaataaataagataatcaaaccagaaagcaggcattttagtaacagcctgttgaattttaaggtgaatcaaggtaattttgcagaatgcgttcttgcaccgaaatgtccctgaccacatatcagtggtatagactgaacagtgtgcttcagggtcatgtgctgagtgcactgatcactctgctgtggcccagggcatctgtacctgttggacaagattatgataattcagaagtgaagtaaaatgcctccctctgatggcaaaaagccaacctgtttgcaaaatcacccttattgaagggtggcatggctgtggtccctccctcctgttacttgcatcaccaaccaaactaaaccaaaccatacctgggcctgttcagctggacttgaaatcagtttcctttttctctcccctttgcagcacttttcagtttccagctttgtcattctgtggcctttgctgtgacaatgctgggaagggttagaaatcctgtcacctccatccacaaaggcacagttccacgccctgtgataagatatcccctcttctctcccagactgtctccttaagcctttcaaactgagccccttgctgttggggtaatcacccttaaggccgccttgatgcccctctctccaatcaagtccaatagtagcattaactgagaagcactacacctgactggcttcactgaagcttaagtggttgaggatgaatcttcggtgtaaaatcttttactataaggatatattttaaatatttcatatcccatcaagttggaggttaattttatccatcacaatgagtcatgatttgttgcacccaaaaggagcagaaacacaggtgatgagatatgggaggtggcaccatggtgctttggaggcgttggtaagatgtgaccctctgttgcctatgcccataaaccagtggtgggagtggccatggagtagatggcaggggcttgttgaagggattgaaagctctcctaggctaggcatggtggctcacacctgtaatcctagcactttgggaggctgagatgggaggatcacttgaggttgggccagcctagccaacatgataaaaccccgtctcgactaaaaatacaaaaattagccaggtgtggtggtacacgcctgtaatcccagctactcgggaggctggggcaggagaatcgcttgaacccaggaggcagaggttgcagtgagctaggatcacgccactgcactccagcctgagcgacagagtgagactctgtctcaaaaaaaaaaaaggctctccaaagtgtcatgttcagcaccaaaagggaataggcacagggtgaccccagaagttcatttgtgacacttaaatctccagatatttatcccacgtgggtctgatgcgggctcagcactaaattaactgtatgtggaaagtgtcaattgcagagccttctgtatcgatgaggcttccgccacttgtccatgcttagcccccttgcctcttccttgggagcatgctttctattcctatgtgaaacagcctgacataagtgaaaggatttgggctcaagcaaacatgagatgtgggttcatatcttggcaccactcctgatagctgtgtgatcatggcaaacctcgttttcatcgtctgtcaggtggagatgaagagaaatggtgcatgtaaagtgctcagcatctgtgcttagcaggccatagtctccctgcctcctttttcttgagtaagcctttagaactttctgactcctctagagaaggcagagaaacgaatatattttgggtgccatttggagtctgggtcttttgttaaaattgtcctgtattatgttgaaaagtgtcggttacccccaggctctgggggcatctgtgatcatagaatactgccatgcttattttgcctttctatgttgagattaattcactgacgcctcattttccacgtgcatctgtcatagtctgggtaccagattgtatttagagaatggctcttgccactgttatgtacacacagatcgtgtgtgtaaacaagcaaattaaagtaaactgagataatgaaatcccaaaaaaaaaaaaaaaaaaaaaaaaaattggaggggaactctaatatgccggggtggcgcggaaacaagagggggtacaatgagaatggggcacctgtgggccataagccgtggtccctgagacccaggttttcgtgcgtgacacacggggggcaaaatctggcggggcccccatatagaggagagggcgaacaaaatttgcggaaaacgggcgcgtttcgaggacggccttctctggataaaaaagtggcgtggcaaaaaaacggggacacaaaaagagaggaacaaaaggaaaggagaaacgaaaggaggacagaggcgacaacagccgcgggggggacaatcaccaaccgacaagaggaagagaacgaacaaaagacggggagtggagcagagcaagacacgagagagaaaaaagaagaggagccgaaaaagagaaacaacgaattggcgacaagagcaaaagcgaagtcgcagacgaggagcacaagaagaaggaaagaacaagggggagggacacaaaaagaaacagaaaagaggagcggaggcgtggcggcagagagcgaccgggaagaaggatgggagacacaggaaaagaaagggggacgcggacagaaagaagcggaagggagggga

SEQ ID NO: 29878 - DNA, 3193 bp, Homo sapiens
  misc_feature (263)..(263): n is a, c, g, or t
  misc_feature (286)..(286): n is a, c, g, or t
aatgcctagcttttaaaaatttaattaattgcctatttttgagacagagtctctctctgtcatctaggcttgagtgcacttgcgccatctcagctcactgccacctctacctccccgggtccagccatcctcctgcctcagccttcccagtattctggggcacaaggtgtgcgtccccccgcccggcttaattttttgcctttttttttttgagacggagtcttgctctgttgcccaggctggagtgcagtggtgcgatctcngctcactgcaacctccacctccngggttcaagcgattctcctgcctcagcctcccgagtagctgggattacaggcatgcgtcaccacaccaggctaattttgtatttttagtagagatggggtttctccatgttggtcaggctggtctcaaactcctgaccgcaggtgatccacctgcctcggcctcccaaagtgctgggattacaggcatgagccaccgcgcccggctcaggcagggttctttataaaaacagcctgatgcctgaaggacactctctggttgtaatatttgtttcatccatgaagtgtttaaatattgcaactgacttgcgattagccaccaaaacaggcccttttagatgcagtgcctctccgaccaagtattggatgattcatacgtaatggactatgatcattttctgtccatgttttctattactatatgctggtttttttggagcaataagattactttttttctgttctattttgagcgaatcctttacagtttttgataagaactgtgacatttgttctttgttgataaaactcctgaaaataactcacaaggccagtgctgcactctggcacatgtaggttgttttgagggtttgttggttggttggttggctggttgattggttggttggtttagaacactaatgtacttgttatgaaccaaactctggtcttacagtcttaaattccacctcatggggctgttttctctgttagcaatgaaacctgggccaggtgtagtggctcacacctataatcctggcactttgggaggctgaggtgggaggattactggatcccaggagtttgagaccagcctgggcaacatagtgagaccctggtttctataaataaataagataatcaaaccagaaagcaggcattttagtaacagcctgttgaattttaaggtgaatcaaggtaattttgcagaatgcgttcttgcaccgaaatgtccctgaccacatatcagtggtatagactgaacagtgtgcttcagggtcatgtgctgagtgcactgatcactctgctgtggcccagggcatctgtacctgttggacaagattatgataattcagaagtgaagtaaaatgcctccctctgatggcaaaaagccaacctgtttgcaaaatcacccttattgaagggtggcatggctgtggtccctccctcctgttacttgcatcaccaaccaaactaaaccaaaccatacctgggcctgttcagctggacttgaaatcagtttcctttttctctcccctttgcagcacttttcagtttccagctttgtcattctgtggcctttgctgtgacaatgctgggaagggttagaaatcctgtcacctccatccacaaaggcacagttccacgccctgtgataagatatcccctcttctctcccagactgtctccttaagcctttcaaactgagccccttgctgttggggtaatcacccttaaggccgccttgatgcccctctctccaatcaagtccaatagtagcattaactgagaagcactacacctgactggcttcactgaagcttaagtggttgaggatgaatcttcggtgtaaaatcttttactataaggatatattttaaatatttcatatcccatcaagttggaggttaattttatccatcacaatgagtcatgatttgttgcacccaaaaggagcagaaacacaggtgatgagatatgggaggtggcaccatggtgctttggaggcgttggtaagatgtgaccctctgttgcctatgcccataaaccagtggtgggagtggccatggagtagatggcaggggcttgttgaagggattgaaagctctcctaggctaggcatggtggctcacacctgtaatcctagcactttgggaggctgagatgggaggatcacttgaggttgggccagcctagccaacatgataaaaccccgtctcgactaaaaatacaaaaattagccaggtgtggtggtacacgcctgtaatcccagctactcgggaggctggggcaggagaatcgcttgaacccaggaggcagaggttgcagtgagctaggatcacgccactgcactccagcctgagcgacagagtgagactctgtctcaaaaaaaaaaaaggctctccaaagtgtcatgttcagcaccaaaagggaataggcacagggtgaccccagaagttcatttgtgacacttaaatctccagatatttatcccacgtgggtctgatgcgggctcagcactaaattaactgtatgtggaaagtgtcaattgcagagccttctgtatcgatgaggcttccgccacttgtccatgcttagcccccttgcctcttccttgggagcatgctttctattcctatgtgaaacagcctgacataagtgaaaggatttgggctcaagcaaacatgagatgtgggttcatatcttggcaccactcctgatagctgtgtgatcatggcaaacctcgttttcatcgtctgtcaggtggagatgaagagaaatggtgcatgtaaagtgctcagcatctgtgcttagcaggccatagtctccctgcctcctttttcttgagtaagcctttagaactttctgactcctctagagaaggcagagaaacgaatatattttgggtgccatttggagtctgggtcttttgttaaaattgtcctgtattatgttgaaaagtgtcggttacccccaggctctgggggcatctgtgatcatagaatactgccatgcttattttgcctttctatgttgagattaattcactgacgcctcattttccacgtgcatctgtcatagtctgggtaccagattgtatttagagaatggctcttgccactgttatgtacacacagatcgtgtgtgtaaacaagcaaattaaagtaaactgagataatgaaatccca

SEQ ID NO: 29879 - DNA, 3767 bp, Homo sapiens
attattgatcctacttcagagggaaagtgtaccaggcagttttggtgggtggtgctgaagtctggggagtgagtttagtcttcagactattcttggcgacatcaccagtgttgcaagcaccaccattcccagttaggcactttttgtccctggtaagacttgacctttatctggaacactccttttgtccctagagtggggacctaaggctcagcaaaagggcagaatcaggaaagcctttatggtgtggctaaaggagtggccagagccttgggactcctttgctgccttctccctggttccagttgtctttagattttcacggctcttactgctgttacttaacagtattttccagccaggcatggtggttcacacctctaatccctcccaaagtgctgggattacaggcatgagccaccgcgcccggctcaggcagggttctttataaaaacagcctgatgcctgaaggacactctctggttgtaatatttgtttcatccatgaagtgtttaaatattgcaactgacttgcgattagccaccaaaacaggcccttttagatgcagtgcctctccgaccaagtattggatgattcatacgtaatggactatgatcattttctgtccatgttttctattactatatgctggtttttttggagcaataagattactttttttctgttctattttgagcgaatcctttacagtttttgataagaactgtgacatttgttctttgttgataaaactcctgaaaataactcacaaggccagtgctgcactctggcacatgtaggttgttttgagggtttgttggttggttggttggctggttgattggttggttggtttagaacactaatgtacttgttatgaaccaaactctggtcttacagtcttaaattccacctcatggggctgttttctctgttagcaatgaaacctgggccaggtgtagtggctcacacctataatcctggcactttgggaggctgaggtgggaggattactggatcccaggagtttgagaccagcctgggcaacatagtgagaccctggtttctataaataaataagataatcaaaccagaaagcaggcattttagtaacagcctgttgaattttaaggtgaatcaaggtaattttgcagaatgcgttcttgcaccgaaatgtccctgaccacatatcagtggtatagactgaacagtgtgcttcagggtcatgtgctgagtgcactgatcactctgctgtggcccagggcatctgtacctgttggacaagattatgataattcagaagtgaagtaaaatgcctccctctgatggcaaaaagccaacctgtttgcaaaatcacccttattgaagggtggcatggctgtggtccctccctcctgttacttgcatcaccaaccaaactaaaccaaaccatacctgggcctgttcagctggacttgaaatcagtttcctttttctctcccctttgcagcacttttcagtttccagctttgtcattctgtggcctttgctgtgacaatgctgggaagggttagaaatcctgtcacctccatccacaaaggcacagttccacgccctgtgataagatatcccctcttctctcccagactgtctccttaagcctttcaaactgagccccttgctgttggggtaatcacccttaaggccgccttgatgcccctctctccaatcaagtccaatagtagcattaactgagaagcactacacctgactggcttcactgaagcttaagtggttgaggatgaatcttcggtgtaaaatcttttactataaggatatattttaaatatttcatatcccatcaagttggaggttaattttatccatcacaatgagtcatgatttgttgcacccaaaaggagcagaaacacaggtgatgagatatgggaggtggcaccatggtgctttggaggcgttggtaagatgtgaccctctgttgcctatgcccataaaccagtggtgggagtggccatggagtagatggcaggggcttgttgaagggattgaaagctctcctaggctaggcatggtggctcacacctgtaatcctagcactttgggaggctgagatgggaggatcacttgaggttgggccagcctagccaacatgataaaaccccgtctcgactaaaaatacaaaaattagccaggtgtggtggtacacgcctgtaatcccagctactcgggaggctggggcaggagaatcgcttgaacccaggaggcagaggttgcagtgagctaggatcacgccactgcactccagcctgagcgacagagtgagactctgtctcaaaaaaaaaaaaggctctccaaagtgtcatgttcagcaccaaaagggaataggcacagggtgaccccagaagttcatttgtgacacttaaatctccagatatttatcccacgtgggtctgatgcgggctcagcactaaattaactgtatgtggaaagtgtcaattgcagagccttctgtatcgatgaggcttccgccacttgtccatgcttagcccccttgcctcttccttgggagcatgctttctattcctatgtgaaacagcctgacataagtgaaaggatttgggctcaagcaaacatgagatgtgggttcatatcttggcaccactcctgatagctgtgtgatcatggcaaacctcgttttcatcgtctgtcaggtggagatgaagagaaatggtgcatgtaaagtgctcagcatctgtgcttagcaggccatagtctccctgcctcctttttcttgagtaagcctttagaactttctgactcctctagagaaggcagagaaacgaatatattttgggtgccatttggagtctgggtcttttgttaaaattgtcctgtattatgttgaaaagtgtcggttacccccaggctctgggggcatctgtgatcatagaatactgccatgcttattttgcctttctatgttgagattaattcactgacgcctcattttccacgtgcatctgtcatagtctgggtaccagattgtatttagagaatggctcttgccactgttatgtacacacagatcgtgtgtgtaaacaagcaaattaaagtaaactgagataatgaaatcccaaaaaaaaaaaaaaaaaaaaaaaaaattggaggggaactctaatatgccggggtggcgcggaaacaagagggggtacaatgagaatggggcacctgtgggccataagccgtggtccctgagacccaggttttcgtgcgtgacacacggggggcaaaatctggcggggcccccatatagaggagagggcgaacaaaatttgcggaaaacgggcgcgtttcgaggacggccttctctggataaaaaagtggcgtggcaaaaaaacggggacacaaaaagagaggaacaaaaggaaaggagaaacgaaaggaggacagaggcgacaacagccgcgggggggacaatcaccaaccgacaagaggaagagaacgaacaaaagacggggagtggagcagagcaagacacgagagagaaaaaagaagaggagccgaaaaagagaaacaacgaattggcgacaagagcaaaagcgaagtcgcagacgaggagcacaagaagaaggaaagaacaagggggagggacacaaaaagaaacagaaaagaggagcggaggcgtggcggcagagagcgaccgggaagaaggatgggagacacaggaaaagaaagggggacgcggacagaaagaagcggaagggagggga

SEQ ID NO: 29880 - DNA, 635 bp, Homo sapiens
attattgatcctacttcagagggaaagtgtaccaggcagttttggtgggtggtgctgaagtctggggagtgagtttagtcttcagactattcttggcgacatcaccagtgttgcaagcaccaccattcccagttaggcactttttgtccctggtaagacttgacctttatctggaacactccttttgtccctagagtggggacctaaggctcagcaaaagggcagaatcaggaaagcctttatggtgtggctaaaggagtggccagagccttgggactcctttgctgccttctccctggttccagttgtctttagattttcacggctcttactgctgttacttaacagtattttccagccaggcatggtggttcacacctctaatccctgcactttgggaggccgaggcaggcggatcacctgggattgggagttcgggaccagcctgtccaacatggcgaacctcgtctcttctgagagtacaaaaattagctgggtgtggtggcacatgcctgtggtcccagctgctcgggaggctgaggcgggagagttgcttggacctgggaggtggaggttgcggtgagctgaggtcgcaccactgcactccagcctgggtgacagagcagactccatct

SEQ ID NO: 29881 - DNA, 115 bp, Homo sapiens
ttcaggtaaaggccaagagacagacaagtagggtcacgaattgcccaaggcctacagccagtggtgtactagtaaatgtttcacagtccaccctccaaaaaaaaccaaaaataaa

SEQ ID NO: 29882 - DNA, 422 bp, Homo sapiens
tttttttttaaggtatgatcttactctgtcacccaaggtaagagtgcagtggcacaatcatgattcactgcagcctcaacctcctgggcttaagcaatccttccacctcagcttcccaagtagctgggaccacaggcatgcaccaccatgcccagctaattcaaaaaaatctttttgtgcagatgtggtctccctatgttgctcaagctggtcttgaactcttgggctcaagtgatcctcctaccttggcctcccaaagccaagaggcatgagccactgggcctggcccaacttttctagtgaatggtttttcacagtggatataccaattgatacccccatcagcaatatgtgagtgatcctaatgactaaaaccctctccaaaacttgactttattgtgtttcttcattttcaccaatcg

SEQ ID NO: 29883 - DNA, 290 bp, Homo sapiens
ctgggccgcctgtaatcccaacattttgggaggcctaggtgggcagatcgagaggtcaggagtttgagatcagcctggccaacatagtgaaatcccgtctctactaaaaacacattaaaaaaaaaaaaaaaaaacacctagctgggcgtggtggtggacacctgtaatcccagctacttgggaggctgagggaggagaatcacttgaacccaggaagtagagggtgcagtaagacgagattgtgccactgcactcgaaccctggcaacagtgccagactccctctcaaaa

SEQ ID NO: 29884 - DNA, 426 bp, Homo sapiens
gacaggagtgtcagtttcctgaatcagattccccggacttagcagacaacagtgcaggagctgtgagttgggtctcggctctgctgttaacctgtatcttgtatttgtcacttctggacctcatatcttttggaagtcagaacctaacaggaagtggtatttaggaaagtcagaatatcagctccaaacctgagcattccatcaaagaaacacagaaggggctggaatatggtgtccaatacctggggaaggttgaggagtaacagccctggggcagttattgggcagtattcctgtatatctcagggttaccttgggctcatgtggctgtaaaatgtgtggttcttggagcaggtgtactgagaagatgaggatgatatgagctctgagaggggctaaggcagctcctgccaggaatcttctatg

SEQ ID NO: 29885 - DNA, 1056 bp, Homo sapiens
gcggccgccgccgacctcagcatcccagaagccgggcgcacgtgggtcggggcggggacgcggcgctcaggctgcagccgcggcagcctgcggggggcgggaatggggcgccgcggcgggggctcggctgatgacatcacggccaggctgcggcagcgcgggcgcgcggacatggctgcggcggtttcggcggcgtccgcgggctgcacccgggcctgagagcccagcgccctcccgcggggccgcccgccagtccgcgccgtccgcgggtgcattggccgggtgcctctagcttcccggacacccggagcttccgcctatccagcctccctcggccaaattgctgcggagcccgtcgtcagggggcgccaaggagccagggggaaaaccaagaggcgctgacaggagcctcccggcggtgctaccctccacctcccacctccctgcgccccgccccgaggttggggctttgaagaatgcagccggggaaagcattaacttttgagctacgtccagaatagcatcatcttcatgggtattccctactcctaggatttcagaaaacctttgataactaattgagaaaatgcagaagatcgtgcagacagatgaaattaccaatacacaagcttttagaaaaggaaagaggaaaagaacagagacaatggactcagaaaatgcaaatagtgacatggataaaggacagagagacccatattcgggaaatgcctttctgcctggtgaaagctccagtgaggatgaagagcctttagcagaattgtcaaaggaagaattgtgcgccaaaataaaaagcctgaaagaaaaactaacaaacacccggaaagaaaacagccgacttcgacagtctttggtcatgcttcaagcttggtccagagagctgccttagactctccaatgaatgtgttcaaacagctgcctctgttaccttgactcatctcagatacgggtcctggtgctaggaatcaaagactgtctctattattttggcttgctccaggttgggcagaagcccatgcaaggctactactgatcatg

SEQ ID NO: 29886 - DNA, 2137 bp, Homo sapiens
gcggccgccgccgacctcagcatcccagaagccgggcgcacgtgggtcggggcggggacgcggcgctcaggctgcagccgcggcagcctgcggggggcgggaatggggcgccgcggcgggggctcggctgatgacatcacggccaggctgcggcagcgcgggcgcgcggacatggctgcggcggtttcggcggcgtccgcgggctgcacccgggcctgagagcccagcgccctcccgcggggccgcccgccagtccgcgccgtccgcgggtgcattggccgggtgcctctagcttcccggacacccggagcttccgcctatccagcctccctcggccaaattgctgcggagcccgtcgtcagggggcgccaaggagccagggggaaaaccaagaggcgctgacaggagcctcccggcggtgctaccctccacctcccacctccctgcgccccgccccgaggttggggctttgaagaatgcagccggggaaagcattaacttttgagctacgtccagaatagcatcatcttcatgggtattccctactcctaggatttcagaaaacctttgataactaattgagaaaatgcagaagatcgtgcagacagatgaaattaccaatacacaagcttttagaaaaggaaagaggaaaagaacagagacaatggactcagaaaatgcaaatagtgacatggataaaggacagagagacccatattcgggaaatgcctttctgcctggtgaaagctccagtgaggatgaagagcctttagcagaattgtcaaaggaagaattgtgcgccaaaataaaaagcctgaaagaaaaactaacaaacacccggaaagaaaacagccgacttcgacagtctttggtcatgcttcaagtgttaccacaagcagtcacccagtttgaagaattggttggtatggccgaggctctgcttaagggtgggggaaccatgtctacatctgcatccaccctctggagagcaacaaacaactcctcgccagattcatttgcctcaacatgcagtaattctaattctaactccagttcaccagtttccttaaagcctgaggaagagcatcagactgatgagaaacagttccagattgaaaaatggcagattgcccgttgtaacaagagcaagcctcagaagtttattaatgatttaatgcaagtactttacacaaatgaatacatggccactcacagcctgacaggggcaaaatcctctacttcaagggacaaagctgtaaaaccagctatgaatcagaatgaagtccaagaaatcataggagtaacaaaacaattatttcccaatacggatgatgtttcaattaggagaatgatagggcaaaagctaaacaactgtaccaagaagccaaatttaagcaaaaatcttaactctcaggatattaaatagatccttttggtattacaggtatctgaaacaaagcaccttcaattctaaatctagcactggattttgttggagaatctgcagccttcctggcagtgagaaagacagacatgtgcagtgacaggctgtaagacatatgtaacattgctgagctctcctaagggaccaacaagcttgctgaagaagctgcatgtagattccaccctcagtactagtgatgcatcaaaccagagaatttctgccagtcaaataagcatgcaatatggtttctttggaaataagcatttcccaatccccaaatacccctctgtacagttaatctaacaggatagtcagagctcttatcatagcagccaaaacttcagcccataggttagtcattgtcctaaccaatcattgtacattgattattaccagtgacttcccattatagtttttggatctttagcataagcacatgcttgcaaaagtaaacagtgaaataattaatgttggcaaatatgagaacaacaaagtcagcccaaaatctgataatcatgtctaaccaagtaataatgttttagcaataaaattacaggattattctgttatctaaaaatgtataaaatgggaatatgaaaaaaatgacaacagcaagatgttttattttaatgttaagcaattccaccacacttctgaagaataaacctaagtttttgtgattgttaaaacaat

SEQ ID NO: 29887 - DNA, 1532 bp, Homo sapiens
ctccaaaacgacatggatcacatctggttttgctcccagttttatccctcacacctagcgtagtggttggcaaatactgagaatctgtgtaacatggacttgggaggcagccagtctgaatttgaatcttggctcttctcttcactaactatgtttgactctggacaaattactttacttcttcttgcctaattgacttcatctggaaatggcaggaaacaaactagatataacaacagagaagaccattttacatggaggcatgaaaactttgaatgttgttaccacaagcagtcacccagtttgaagaattggttggtatggccgaggctctgcttaagggtgggggaaccatgtctacatctgcatccaccctctggagagcaacaaacaactcctcgccagattcatttgcctcaacatgcagtaattctaattctaactccagttcaccagtttccttaaagcctgaggaagagcatcagactgatgagaaacagttccagattgaaaaatggcagattgcccgttgtaacaagagcaagcctcagaagtttattaatgatttaatgcaagtactttacacaaatgaatacatggccactcacagcctgacaggggcaaaatcctctacttcaagggacaaagctgtaaaaccagctatgaatcagaatgaagtccaagaaatcataggagtaacaaaacaattatttcccaatacggatgatgtttcaattaggagaatgatagggcaaaagctaaacaactgtaccaagaagccaaatttaagcaaaaatcttaactctcaggatattaaatagatccttttggtattacaggtatctgaaacaaagcaccttcaattctaaatctagcactggattttgttggagaatctgcagccttcctggcagtgagaaagacagacatgtgcagtgacaggctgtaagacatatgtaacattgctgagctctcctaagggaccaacaagcttgctgaagaagctgcatgtagattccaccctcagtactagtgatgcatcaaaccagagaatttctgccagtcaaataagcatgcaatatggtttctttggaaataagcatttcccaatccccaaatacccctctgtacagttaatctaacaggatagtcagagctcttatcatagcagccaaaacttcagcccataggttagtcattgtcctaaccaatcattgtacattgattattaccagtgacttcccattatagtttttggatctttagcataagcacatgcttgcaaaagtaaacagtgaaataattaatgttggcaaatatgagaacaacaaagtcagcccaaaatctgataatcatgtctaaccaagtaataatgttttagcaataaaattacaggattattctgttatctaaaaatgtataaaatgggaatatgaaaaaaatgacaacagcaagatgttttattttaatgttaagcaattccaccacacttctgaagaataaacctaagtttttgtgattgttaaaacaat

SEQ ID NO: 29888 - DNA, 2201 bp, Homo sapiens
gcggccgccgccgacctcagcatcccagaagccgggcgcacgtgggtcggggcggggacgcggcgctcaggctgcagccgcggcagcctgcggggggcgggaatggggcgccgcggcgggggctcggctgatgacatcacggccaggctgcggcagcgcgggcgcgcggacatggctgcggcggtttcggcggcgtccgcgggctgcacccgggcctgagagcccagcgccctcccgcggggccgcccgccagtccgcgccgtccgcgggtgcattggccgggtgcctctagcttcccggacacccggagcttccgcctatccagcctccctcggccaaattgctgcggagcccgtcgtcagggggcgccaaggagccagggggaaaaccaagaggcgctgacaggagcctcccggcggtgctaccctccacctcccacctccctgcgccccgccccgaggttggggctttgaagaatgcagccggggaaagcattaacttttgagctacgtccagaatagcatcatcttcatgggtattccctactcctaggatttcagaaaacctttgataactaattgagaaaatgcagaagatcgtgcagacagatgaaattaccaatacacaagcttttagaaaaggaaagaggaaaagaacagagacaatggactcagaaaatgcaaatagtgacatggataaaggacagagagacccatattcgggaaatgcctttctgcctggtgaaagctccagtgaggatgaagagcctttagcagaattgtcaaaggaagaattgtgcgccaaaataaaaagcctgaaagaaaaactaacaaacacccggaaagaaaacagccgacttcgacagtctttggtcatgcttcaaggaaacaaactagatataacaacagagaagaccattttacatggaggcatgaaaactttgaatgttgttaccacaagcagtcacccagtttgaagaattggttggtatggccgaggctctgcttaagggtgggggaaccatgtctacatctgcatccaccctctggagagcaacaaacaactcctcgccagattcatttgcctcaacatgcagtaattctaattctaactccagttcaccagtttccttaaagcctgaggaagagcatcagactgatgagaaacagttccagattgaaaaatggcagattgcccgttgtaacaagagcaagcctcagaagtttattaatgatttaatgcaagtactttacacaaatgaatacatggccactcacagcctgacaggggcaaaatcctctacttcaagggacaaagctgtaaaaccagctatgaatcagaatgaagtccaagaaatcataggagtaacaaaacaattatttcccaatacggatgatgtttcaattaggagaatgatagggcaaaagctaaacaactgtaccaagaagccaaatttaagcaaaaatcttaactctcaggatattaaatagatccttttggtattacaggtatctgaaacaaagcaccttcaattctaaatctagcactggattttgttggagaatctgcagccttcctggcagtgagaaagacagacatgtgcagtgacaggctgtaagacatatgtaacattgctgagctctcctaagggaccaacaagcttgctgaagaagctgcatgtagattccaccctcagtactagtgatgcatcaaaccagagaatttctgccagtcaaataagcatgcaatatggtttctttggaaataagcatttcccaatccccaaatacccctctgtacagttaatctaacaggatagtcagagctcttatcatagcagccaaaacttcagcccataggttagtcattgtcctaaccaatcattgtacattgattattaccagtgacttcccattatagtttttggatctttagcataagcacatgcttgcaaaagtaaacagtgaaataattaatgttggcaaatatgagaacaacaaagtcagcccaaaatctgataatcatgtctaaccaagtaataatgttttagcaataaaattacaggattattctgttatctaaaaatgtataaaatgggaatatgaaaaaaatgacaacagcaagatgttttattttaatgttaagcaattccaccacacttctgaagaataaacctaagtttttgtgattgttaaaacaat

SEQ ID NO: 29889 - DNA, 1203 bp, Homo sapiens
gcggccgccgccgacctcagcatcccagaagccgggcgcacgtgggtcggggcggggacgcggcgctcaggctgcagccgcggcagcctgcggggggcgggaatggggcgccgcggcgggggctcggctgatgacatcacggccaggctgcggcagcgcgggcgcgcggacatggctgcggcggtttcggcggcgtccgcgggctgcacccgggcctgagagcccagcgccctcccgcggggccgcccgccagtccgcgccgtccgcgggtgcattggccgggtgcctctagcttcccggacacccggagcttccgcctatccagcctccctcggccaaattgctgcggagcccgtcgtcagggggcgccaaggagccagggggaaaaccaagaggcgctgacaggagcctcccggcggtgctaccctccacctcccacctccctgcgccccgccccgaggttggggctttgaagaatgcagccggggaaagcattaacttttgagctacgtccagaatagcatcatcttcatgggtattccctactcctaggatttcagaaaacctttgataactaattgagaaaatgcagaagatcgtgcagacagatgaaattaccaatacacaagcttttagaaaaggaaagaggaaaagaacagagacaatggactcagaaaatgcaaatagtgacatggataaaggacagagagacccatattcgggaaatgcctttctgcctggtgaaagctccagtgaggatgaagagcctttagcagaattgtcaaaggaagaattgtgcgccaaaataaaaagcctgaaagaaaaactaacaaacacccggaaagaaaacagccgacttcgacagtctttggtcatgcttcaagtgttaccacaagcagtcacccagtttgaagaattggttggtatggccgaggctctgcttaagggtgggggaaccatgtctacatctgcatccaccctctggagagcaacaaacaactcctcgccagattcatttgcctcaacatgcagtaattctaattctaactccagttcaccagtttccttaaagcctgaggaagagcatcagactgatgagaaacagttcagatgaaaaatgcgattgcgtgtacagagcagctaagttttatgttatgcagcttccaagatctgcctcagcgaagcaatcttctaggcagtgaa

SEQ ID NO: 29890 - DNA, 536 bp, Homo sapiens
ggggccgctcccacttcaggcattggataattcaccgaaggcaccgctgaatggagtgggccctcagtaaatacctggaggaatgtgacctggccagtgaggttattttcttttgtaggtgaaaggtgtagcagtcactcggcctacacccacagcatcgaccttgtgaacccagcgacctgactgccttgggtgagtctaggcaagctccattctcgccagagcggacttgctccttgtcttcctcttgctgctctggccactcttcttggtccctcccctgttccctccccggactcccggttgtactcccgctgcttttctgtgtactcacctgctgggagacccctgatgccagcaccacgcttcactgctgtcttcattttcttctttctttcttgaaagtgggcattgctggctttactgactacctgttcttttgttacaaagctgctaaaaattgtatctcttccgctccagacccagtaggatagagatgatctgtgtaggcatcaaaaatgtagaacatctgcaag

SEQ ID NO: 29891 - DNA, 3050 bp, Homo sapiens
agcggggtcttaacccttcaattacgagcgggcggcgctgcgtttccagggcagaggaaacgaggcgccgcgttggcgcttggacggcgggaaccggctccggagcgagaacgcgcgtgagagagcccgagagagacggagagcgagcgagcgcgcgggagagactgagagcgggggggtgggagagagacttccagagagacagagcgagaggccgagacggaggctgtccctagcacaggccagggtgtcttgggactcgaatccctgggttgggctggccgggagtggggctttcgaaggaagcgggtgattttccacgtcgtccatatctccccggtgtgggaatggcggtcgtgcactctgggggtggcgttgttctcgttccctacttgggggtggcctttttcagcggagaaagaggatgccgcgggcattggtagccggcgggactacacttgggctaggatcagtgttcagcgggttcagaaatcaccgtgtccttggcatcacctccctccccacctcctctcccatcgcacagcaggagacagtgactggagggttttcaaggaggactgcattgcccctattgaaacaaaccgtccgacaaaccctttctccgacgtgtgacagagggacggtcgtaatgtgaaatacgactagacatgcgtttaatgggcggtgtgattgctgcattcgtgcgcaatgaatggtccaggccatttgtgtccagtagccgcacaagctgcagggtctcatgtttagagagggagggcctctccgccgtccaccttgctggagtacaggcgaccctgggcggtagccctctccgccatcagaaatgtggtgctctgagtagccacagattcccatctgcatctccaataccatttccctctactcactgacccgttgggtgcgttggatttgtgcgtgggtgtgagggtagtttggtgtgtttgcttgcaaatggaaaagcgaatggccttggttggctgagcttatcagggcactagcagtggagagagaaaggactactgtattcttaggagcagaatctcaacaacttcctataaaacgggcagtgtgtcttacctggaatgctttggcatttaataaaatgtcctgtgaatacttttcatagggaagcactttgtttttactgtttctggttggacagtggttacatttcaaatcgtagttcagaattcgtgaaatacccaaattaaatctctacgtggcagtaatccattttctttccttggtgtgtggttggaagattaatttgagataagtgttcagttctgggctgggcagtcgtgccgggcacgggaaattcaggttctttaagggaaaggcctgatgtgctaagacgaaatctataccgtgtgtagccgcttatgagaatatgaaactaaggagagccacaggtgaaaggtgtagcagtcactcggcctacacccacagcatcgaccttgtgaacccagcgacctgactgccttgggagaattgaagcgaatgagagtggggagtgtgagaggtgcgtttggtgcagcatttctggcatgggaacagaactggccaggaggaagtgacgtctgggttctgcccgcacacattcctcgccaccttcttggtgtctgagaacctccagcttcacctccttttctggacccgagggcctggcggagcttccagctgggaccagacctccatggatccactccagaaacggaatccagcatcgccttccaaatcttccccgatgacagctgcagagacttcccaggaaggtccagcgccctctcagccttcgtactcagaacagccgatgatgggcctcagtaacctgagccccggtcctggccccagccaggccgtgcctctcccagaggggctgctccgccagcggtacagagaggagaagaccctggaagagcggcggtgggagaggctggagttccttcagaggaagaaagcattcctgcggcatgtgaggaggagacaccgcgatcacatggccccctatgctgttgggagggaagccagaatctccccattaggtgacagaagtcagaatcgattccgatgtgaatgtcgatactgccagagccacaggccgaatctttctgggatccctggggagagtaacagggccccacatccctcctcctgggagacgctggtgcagggcctcagtggcttgactctcagcctaggcaccaaccagcccgggcctctgcctgaagcggcactccagccacaggagacagaggagaagcgccagcgagagaggcagcaggagagcaaaataatgtttcagaggctgctcaagcagtggttagaggaaaactgagacgtgcacccccatgggatggagacccgaagggactcagacggagccgccgtgttggcagcgcctgggtgtgggcccattttggggaccaaacagcaagctgtggtcggatgagtgccaggacctgtgtaccgggacacgtgggagtcctcccagcatgatgcttgactgacccgaggaaggtcctcatgtttcgtgcctgtcattctcggatggctgtgaggcattccttggcaagggacgctgcgtaccagcggtcctcaccgcatctcacatggctcctgtgatgcatgttgtcgctttcccacccgggatctccatctctcttcccttcctgctgtcagtaagagatcacatgtctgtgtagtgtgaatgccttgtcgctgtcctgtgcttttgcaccattgagttgactgcctctgagaagcagcactaggcctgttgaaatgcaatgtgctgccctgagatccagtttcaagaatgggcaggtaaacgcagtgtgggaaaggaatgtggaatgagaacttggtggttcaccgctgtactatttgtgtaaatgtttacgtatgtgataagctacatgtatgtaaatgttgcaatacccctaacagtcgagtagtagtctcccttacaggaatttttgacggggttcctcatcatcaataccaaataaatatatgtaggaatggaa

SEQ ID NO: 29892 - DNA, 2536 bp, Homo sapiens
agcggggtcttaacccttcaattacgagcgggcggcgctgcgtttccagggcagaggaaacgaggcgccgcgttggcgcttggacggcgggaaccggctccggagcgagaacgcgcgtgagagagcccgagagagacggagagcgagcgagcgcgcgggagagactgagagcgggggggtgggagagagacttccagagagacagagcgagaggccgagacggaggctgtccctagcacaggccagggtgtcttgggactcgaatccctgggttgggctggccgggagtggggctttcgaaggaagcgggtgattttccacgtcgtccatatctccccggtgtgggaatggcggtcgtgcactctgggggtggcgttgttctcgttccctacttgggggtggcctttttcagcggagaaagaggatgccgcgggcattggtagccggcgggactacacttgggctaggatcagtgttcagcgggttcagaaatcaccgtgtccttggcatcacctccctccccacctcctctcccatcgcacagcaggagacagtgactggagggttttcaaggaggactgcattgcccctattgaaacaaaccgtccgacaaaccctttctccgacgtgtgacagagggacggtcgtaatgtgaaatacgactagacatgcgtttaatgggcggtgtgattgctgcattcgtgcgcaatgaatggtccaggccatttgtgtccagtagccgcacaagctgcagggtctcatgtttagagagggagggcctctccgccgtccaccttgctggagtacaggcgaccctgggcggtagccctctccgccatcagaaatgtggtgctctgagtagccacagattcccatctgcatctccaataccatttccctctactcactgacccgttgggtgaaaggtgtagcagtcactcggcctacacccacagcatcgaccttgtgaacccagcgacctgactgccttgggagaattgaagcgaatgagagtggggagtgtgagaggtgcgtttggtgcagcatttctggcatgggaacagaactggccaggaggaagtgacgtctgggttctgcccgcacacattcctcgccaccttcttggtgtctgagaacctccagcttcacctccttttctggacccgagggcctggcggagcttccagctgggaccagacctccatggatccactccagaaacggaatccagcatcgccttccaaatcttccccgatgacagctgcagagacttcccaggaaggtccagcgccctctcagccttcgtactcagaacagccgatgatgggcctcagtaacctgagccccggtcctggccccagccaggccgtgcctctcccagaggggctgctccgccagcggtacagagaggagaagaccctggaagagcggcggtgggagaggctggagttccttcagaggaagaaagcattcctgcggcatgtgaggaggagacaccgcgatcacatggccccctatgctgttgggagggaagccagaatctccccattaggtgacagaagtcagaatcgattccgatgtgaatgtcgatactgccagagccacaggccgaatctttctgggatccctggggagagtaacagggccccacatccctcctcctgggagacgctggtgcagggcctcagtggcttgactctcagcctaggcaccaaccagcccgggcctctgcctgaagcggcactccagccacaggagacagaggagaagcgccagcgagagaggcagcaggagagcaaaataatgtttcagaggctgctcaagcagtggttagaggaaaactgagacgtgcacccccatgggatggagacccgaagggactcagacggagccgccgtgttggcagcgcctgggtgtgggcccattttggggaccaaacagcaagctgtggtcggatgagtgccaggacctgtgtaccgggacacgtgggagtcctcccagcatgatgcttgactgacccgaggaaggtcctcatgtttcgtgcctgtcattctcggatggctgtgaggcattccttggcaagggacgctgcgtaccagcggtcctcaccgcatctcacatggctcctgtgatgcatgttgtcgctttcccacccgggatctccatctctcttcccttcctgctgtcagtaagagatcacatgtctgtgtagtgtgaatgccttgtcgctgtcctgtgcttttgcaccattgagttgactgcctctgagaagcagcactaggcctgttgaaatgcaatgtgctgccctgagatccagtttcaagaatgggcaggtaaacgcagtgtgggaaaggaatgtggaatgagaacttggtggttcaccgctgtactatttgtgtaaatgtttacgtatgtgataagctacatgtatgtaaatgttgcaatacccctaacagtcgagtagtagtctcccttacaggaatttttgacggggttcctcatcatcaataccaaataaatatatgtaggaatggaa

SEQ ID NO: 29893 - DNA, 2895 bp, Homo sapiens
caggaaacaggtatgactcgttacttggaaaaacctgcggtgggatttaccggtagtttggtgtgtttgcttgcaaatggaaaagcgaatggccttggttggctgagcttatcagggcactagcagtggagagagaaaggactactgtattcttaggagcagaatctcaacaacttcctataaaacgggcagtgtgtcttacctggaatgctttggcatttaataaaatgtcctgtgaatacttttcatagggaagcactttgtttttactgtttctggttggacagtggttacatttcaaatcgtagttcagaattcgtgaaatacccaaattaaatctctacgtggcagtaatccattttctttccttggtgtgtggttggaagattaatttgagataagtgttcagttctgggctgggcagtcgtgccgggcacgggaaattcaggttctttaagggaaaggcctgatgtgctaagacgaaatctataccgtgtgtagccgcttatgagaatatgaaactaaggagagccacaggtaagtatacgtctatgaatgcgaattaaaacgggtgacaatataaagagagattggtgtcacaaatggtggagtgacttttgtatttcagcagacctcagtgagaaatggtcaccaccactccctagatgtgtgaccttgagtgagttgcttaacctctctgatcctgttacctcatctgcaactggggatgagaatatatatcatagcatgccctgggagaagctgttcctgaccacctgggctatggtgattttgacttcctctgtgtcagaagtacccccgtctcatgcctgccatagttgtctttttgttttgttttgtgatttcagatggactcaccctgtcacccaggttggactgcactggcctcaacctcctgagttcaagtgatcgtcccacctcagcctccccagtagctgggaccatagctgtgcagcatcatgcctggctaattttttaagttttttgttgagatggtggtctcgccctgttgctcaggctggcctcaaactcctgggctgaagcagtcctcccacctcagcctcccaaagtgcttggattagaggcgtgagccaccattcctggctccttggacaatattttattcctcagattaagacacgtccttgggatggggctgcattggataattcaccgaaggcaccgctgaatggagtgggccctcagtaaatacctggaggaatgtgacctggccagtgaggttattttcttttgtaggtgaaaggtgtagcagtcactcggcctacacccacagcatcgaccttgtgaacccagcgacctgactgccttgggagaattgaagcgaatgagagtggggagtgtgagaggtgcgtttggtgcagcatttctggcatgggaacagaactggccaggaggaagtgacgtctgggttctgcccgcacacattcctcgccaccttcttggtgtctgagaacctccagcttcacctccttttctggacccgagggcctggcggagcttccagctgggaccagacctccatggatccactccagaaacggaatccagcatcgccttccaaatcttccccgatgacagctgcagagacttcccaggaaggtccagcgccctctcagccttcgtactcagaacagccgatgatgggcctcagtaacctgagccccggtcctggccccagccaggccgtgcctctcccagaggggctgctccgccagcggtacagagaggagaagaccctggaagagcggcggtgggagaggctggagttccttcagaggaagaaagcattcctgcggcatgtgaggaggagacaccgcgatcacatggccccctatgctgttgggagggaagccagaatctccccattaggtgacagaagtcagaatcgattccgatgtgaatgtcgatactgccagagccacaggccgaatctttctgggatccctggggagagtaacagggccccacatccctcctcctgggagacgctggtgcagggcctcagtggcttgactctcagcctaggcaccaaccagcccgggcctctgcctgaagcggcactccagccacaggagacagaggagaagcgccagcgagagaggcagcaggagagcaaaataatgtttcagaggctgctcaagcagtggttagaggaaaactgagacgtgcacccccatgggatggagacccgaagggactcagacggagccgccgtgttggcagcgcctgggtgtgggcccattttggggaccaaacagcaagctgtggtcggatgagtgccaggacctgtgtaccgggacacgtgggagtcctcccagcatgatgcttgactgacccgaggaaggtcctcatgtttcgtgcctgtcattctcggatggctgtgaggcattccttggcaagggacgctgcgtaccagcggtcctcaccgcatctcacatggctcctgtgatgcatgttgtcgctttcccacccgggatctccatctctcttcccttcctgctgtcagtaagagatcacatgtctgtgtagtgtgaatgccttgtcgctgtcctgtgcttttgcaccattgagttgactgcctctgagaagcagcactaggcctgttgaaatgcaatgtgctgccctgagatccagtttcaagaatgggcaggtaaacgcagtgtgggaaaggaatgtggaatgagaacttggtggttcaccgctgtactatttgtgtaaatgtttacgtatgtgataagctacatgtatgtaaatgttgcaatacccctaacagtcgagtagtagtctcccttacaggaatttttgacggggttcctcatcatcaataccaaataaatatatgtaggaatggaa

SEQ ID NO: 29894 - DNA, 2443 bp, Homo sapiens
agcggggtcttaacccttcaattacgagcgggcggcgctgcgtttccagggcagaggaaacgaggcgccgcgttggcgcttggacggcgggaaccggctccggagcgagaacgcgcgtgagagagcccgagagagacggagagcgagcgagcgcgcgggagagactgagagcgggggggtgggagagagacttccagagagacagagcgagaggccgagacggaggctgtccctagcacaggccagggtgtcttgggactcgaatccctgggttgggctggccgggagtggggctttcgaaggaagcgggtgattttccacgtcgtccatatctccccggtgtgggaatggcggtcgtgcactctgggggtggcgttgttctcgttccctacttgggggtggcctttttcagcggagaaagaggatgccgcgggcattggtagccggcgggactacacttgggctaggatcagtgttcagcgggttcagaaatcaccgtgtccttggcatcacctccctccccacctcctctcccatcgcacagcaggagacagtgactggagggttttcaaggaggactgcattgcccctattgaaacaaaccgtccgacaaaccctttctccgacgtgtgacagagggacggtcgtaatgtgaaatacgactagacatgcgtttaatgggcggtgtgattgctgcattcgtgcgcaatgaatggtccaggccatttgtgtccagtagccgcacaagctgcagggtctcatgtttagagagggagggcctctccgccgtccaccttgctggagtacaggcgaccctgggcggtagccctctccgccatcagaaatgtggtgctctgagtagccacagattcccatctgcatctccaataccatttccctctactcactgacccgttgggtgaaaggtgtagcagtcactcggcctacacccacagcatcgaccttgtgaacccagcgacctgactgccttggtctgggttctgcccgcacacattcctcgccaccttcttggtgtctgagaacctccagcttcacctccttttctggacccgagggcctggcggagcttccagctgggaccagacctccatggatccactccagaaacggaatccagcatcgccttccaaatcttccccgatgacagctgcagagacttcccaggaaggtccagcgccctctcagccttcgtactcagaacagccgatgatgggcctcagtaacctgagccccggtcctggccccagccaggccgtgcctctcccagaggggctgctccgccagcggtacagagaggagaagaccctggaagagcggcggtgggagaggctggagttccttcagaggaagaaagcattcctgcggcatgtgaggaggagacaccgcgatcacatggccccctatgctgttgggagggaagccagaatctccccattaggtgacagaagtcagaatcgattccgatgtgaatgtcgatactgccagagccacaggccgaatctttctgggatccctggggagagtaacagggccccacatccctcctcctgggagacgctggtgcagggcctcagtggcttgactctcagcctaggcaccaaccagcccgggcctctgcctgaagcggcactccagccacaggagacagaggagaagcgccagcgagagaggcagcaggagagcaaaataatgtttcagaggctgctcaagcagtggttagaggaaaactgagacgtgcacccccatgggatggagacccgaagggactcagacggagccgccgtgttggcagcgcctgggtgtgggcccattttggggaccaaacagcaagctgtggtcggatgagtgccaggacctgtgtaccgggacacgtgggagtcctcccagcatgatgcttgactgacccgaggaaggtcctcatgtttcgtgcctgtcattctcggatggctgtgaggcattccttggcaagggacgctgcgtaccagcggtcctcaccgcatctcacatggctcctgtgatgcatgttgtcgctttcccacccgggatctccatctctcttcccttcctgctgtcagtaagagatcacatgtctgtgtagtgtgaatgccttgtcgctgtcctgtgcttttgcaccattgagttgactgcctctgagaagcagcactaggcctgttgaaatgcaatgtgctgccctgagatccagtttcaagaatgggcaggtaaacgcagtgtgggaaaggaatgtggaatgagaacttggtggttcaccgctgtactatttgtgtaaatgtttacgtatgtgataagctacatgtatgtaaatgttgcaatacccctaacagtcgagtagtagtctcccttacaggaatttttgacggggttcctcatcatcaataccaaataaatatatgtaggaatggaa

SEQ ID NO: 29895 - DNA, 1824 bp, Homo sapiens
aggctaggtagaggcggggggaatttggagagggcagtccacaagccacgcttcagagaagccgctccgggaacgccgcggcgcacctccggaagggatgacctccacgccttctcccctcgcagtccacccgagcggcgtgggtcgcgagaagccacccaaccgctccgtcttccggctccggcggtccgcggcagccaatcaaaggtgaaaggtgtagcagtcactcggcctacacccacagcatcgaccttgtgaacccagcgacctgactgccttgggagaattgaagcgaatgagagtggggagtgtgagaggtgcgtttggtgcagcatttctggcatgggaacagaactggccaggaggaagtgacgtctgggttctgcccgcacacattcctcgccaccttcttggtgtctgagaacctccagcttcacctccttttctggacccgagggcctggcggagcttccagctgggaccagacctccatggatccactccagaaacggaatccagcatcgccttccaaatcttccccgatgacagctgcagagacttcccaggaaggtccagcgccctctcagccttcgtactcagaacagccgatgatgggcctcagtaacctgagccccggtcctggccccagccaggccgtgcctctcccagaggggctgctccgccagcggtacagagaggagaagaccctggaagagcggcggtgggagaggctggagttccttcagaggaagaaagcattcctgcggcatgtgaggaggagacaccgcgatcacatggccccctatgctgttgggagggaagccagaatctccccattaggtgacagaagtcagaatcgattccgatgtgaatgtcgatactgccagagccacaggccgaatctttctgggatccctggggagagtaacagggccccacatccctcctcctgggagacgctggtgcagggcctcagtggcttgactctcagcctaggcaccaaccagcccgggcctctgcctgaagcggcactccagccacaggagacagaggagaagcgccagcgagagaggcagcaggagagcaaaataatgtttcagaggctgctcaagcagtggttagaggaaaactgagacgtgcacccccatgggatggagacccgaagggactcagacggagccgccgtgttggcagcgcctgggtgtgggcccattttggggaccaaacagcaagctgtggtcggatgagtgccaggacctgtgtaccgggacacgtgggagtcctcccagcatgatgcttgactgacccgaggaaggtcctcatgtttcgtgcctgtcattctcggatggctgtgaggcattccttggcaagggacgctgcgtaccagcggtcctcaccgcatctcacatggctcctgtgatgcatgttgtcgctttcccacccgggatctccatctctcttcccttcctgctgtcagtaagagatcacatgtctgtgtagtgtgaatgccttgtcgctgtcctgtgcttttgcaccattgagttgactgcctctgagaagcagcactaggcctgttgaaatgcaatgtgctgccctgagatccagtttcaagaatgggcaggtaaacgcagtgtgggaaaggaatgtggaatgagaacttggtggttcaccgctgtactatttgtgtaaatgtttacgtatgtgataagctacatgtatgtaaatgttgcaatacccctaacagtcgagtagtagtctcccttacaggaatttttgacggggttcctcatcatcaataccaaataaatatatgtaggaatggaa

SEQ ID NO: 29896 - DNA, 1841 bp, Homo sapiens
agtcacgtccgctacagggagtgtcttcccatggcctccggaagcattcggcagtccacaagccacgcttcagagaagccgctccgggaacgccgcggcgcacctccggaagggatgacctccacgccttctcccctcgcagtccacccgagcggcgtgggtcgcgagaagccacccaaccgctccgtcttccggctccggcggtccgcggcagccaatcaaaggtgaaaggtgtagcagtcactcggcctacacccacagcatcgaccttgtgaacccagcgacctgactgccttgggagaattgaagcgaatgagagtggggagtgtgagaggtgcgtttggtgcagcatttctggcatgggaacagaactggccaggaggaagtgacgtctgggttctgcccgcacacattcctcgccaccttcttggtgtctgagaacctccagcttcacctccttttctggacccgagggcctggcggagcttccagctgggaccagacctccatggatccactccagaaacggaatccagcatcgccttccaaatcttccccgatgacagctgcagagacttcccaggaaggtccagcgccctctcagccttcgtactcagaacagccgatgatgggcctcagtaacctgagccccggtcctggccccagccaggccgtgcctctcccagaggggctgctccgccagcggtacagagaggagaagaccctggaagagcggcggtgggagaggctggagttccttcagaggaagaaagcattcctgcggcatgtgaggaggagacaccgcgatcacatggccccctatgctgttgggagggaagccagaatctccccattaggtgacagaagtcagaatcgattccgatgtgaatgtcgatactgccagagccacaggccgaatctttctgggatccctggggagagtaacagggccccacatccctcctcctgggagacgctggtgcagggcctcagtggcttgactctcagcctaggcaccaaccagcccgggcctctgcctgaagcggcactccagccacaggagacagaggagaagcgccagcgagagaggcagcaggagagcaaaataatgtttcagaggctgctcaagcagtggttagaggaaaactgagacgtgcacccccatgggatggagacccgaagggactcagacggagccgccgtgttggcagcgcctgggtgtgggcccattttggggaccaaacagcaagctgtggtcggatgagtgccaggacctgtgtaccgggacacgtgggagtcctcccagcatgatgcttgactgacccgaggaaggtcctcatgtttcgtgcctgtcattctcggatggctgtgaggcattccttggcaagggacgctgcgtaccagcggtcctcaccgcatctcacatggctcctgtgatgcatgttgtcgctttcccacccgggatctccatctctcttcccttcctgctgtcagtaagagatcacatgtctgtgtagtgtgaatgccttgtcgctgtcctgtgcttttgcaccattgagttgactgcctctgagaagcagcactaggcctgttgaaatgcaatgtgctgccctgagatccagtttcaagaatgggcaggtaaacgcagtgtgggaaaggaatgtggaatgagaacttggtggttcaccgctgtactatttgtgtaaatgtttacgtatgtgataagctacatgtatgtaaatgttgcaatacccctaacagtcgagtagtagtctcccttacaggaatttttgacggggttcctcatcatcaataccaaataaatatatgtaggaatggaa

SEQ ID NO: 29897 - DNA, 1808 bp, Homo sapiens
gcatgctccgagcgcggcgcccccgacgcggcgctcggctcggctcgggcatttccgcctctttgttttaaactccggacgggcttttttctcctcctcttgtggtggggacccagagggagcggcgccccctcccccctccggcgcggaccccgcgtgcgccttgctcgcccgcagccccgagaccgcaggtgaaaggtgtagcagtcactcggcctacacccacagcatcgaccttgtgaacccagcgacctgactgccttgggagaattgaagcgaatgagagtggggagtgtgagaggtgcgtttggtgcagcatttctggcatgggaacagaactggccaggaggaagtgacgtctgggttctgcccgcacacattcctcgccaccttcttggtgtctgagaacctccagcttcacctccttttctggacccgagggcctggcggagcttccagctgggaccagacctccatggatccactccagaaacggaatccagcatcgccttccaaatcttccccgatgacagctgcagagacttcccaggaaggtccagcgccctctcagccttcgtactcagaacagccgatgatgggcctcagtaacctgagccccggtcctggccccagccaggccgtgcctctcccagaggggctgctccgccagcggtacagagaggagaagaccctggaagagcggcggtgggagaggctggagttccttcagaggaagaaagcattcctgcggcatgtgaggaggagacaccgcgatcacatggccccctatgctgttgggagggaagccagaatctccccattaggtgacagaagtcagaatcgattccgatgtgaatgtcgatactgccagagccacaggccgaatctttctgggatccctggggagagtaacagggccccacatccctcctcctgggagacgctggtgcagggcctcagtggcttgactctcagcctaggcaccaaccagcccgggcctctgcctgaagcggcactccagccacaggagacagaggagaagcgccagcgagagaggcagcaggagagcaaaataatgtttcagaggctgctcaagcagtggttagaggaaaactgagacgtgcacccccatgggatggagacccgaagggactcagacggagccgccgtgttggcagcgcctgggtgtgggcccattttggggaccaaacagcaagctgtggtcggatgagtgccaggacctgtgtaccgggacacgtgggagtcctcccagcatgatgcttgactgacccgaggaaggtcctcatgtttcgtgcctgtcattctcggatggctgtgaggcattccttggcaagggacgctgcgtaccagcggtcctcaccgcatctcacatggctcctgtgatgcatgttgtcgctttcccacccgggatctccatctctcttcccttcctgctgtcagtaagagatcacatgtctgtgtagtgtgaatgccttgtcgctgtcctgtgcttttgcaccattgagttgactgcctctgagaagcagcactaggcctgttgaaatgcaatgtgctgccctgagatccagtttcaagaatgggcaggtaaacgcagtgtgggaaaggaatgtggaatgagaacttggtggttcaccgctgtactatttgtgtaaatgtttacgtatgtgataagctacatgtatgtaaatgttgcaatacccctaacagtcgagtagtagtctcccttacaggaatttttgacggggttcctcatcatcaataccaaataaatatatgtaggaatggaa

SEQ ID NO: 29898 - DNA, 1688 bp, Homo sapiens
agcggacaggcacgacgatcgcggagctgaagttcaggcagcgggagcgaggagggtgtgtggcttttgatacagtagagttctttggcctactcaccaactgacagtcccaaaggggctggagatgccaccccggcaaagttcgccctagtcatttgcttcacgtgaaaggtgtagcagtcactcggcctacacccacagcatcgaccttgtgaacccagcgacctgactgccttggtctgggttctgcccgcacacattcctcgccaccttcttggtgtctgagaacctccagcttcacctccttttctggacccgagggcctggcggagcttccagctgggaccagacctccatggatccactccagaaacggaatccagcatcgccttccaaatcttccccgatgacagctgcagagacttcccaggaaggtccagcgccctctcagccttcgtactcagaacagccgatgatgggcctcagtaacctgagccccggtcctggccccagccaggccgtgcctctcccagaggggctgctccgccagcggtacagagaggagaagaccctggaagagcggcggtgggagaggctggagttccttcagaggaagaaagcattcctgcggcatgtgaggaggagacaccgcgatcacatggccccctatgctgttgggagggaagccagaatctccccattaggtgacagaagtcagaatcgattccgatgtgaatgtcgatactgccagagccacaggccgaatctttctgggatccctggggagagtaacagggccccacatccctcctcctgggagacgctggtgcagggcctcagtggcttgactctcagcctaggcaccaaccagcccgggcctctgcctgaagcggcactccagccacaggagacagaggagaagcgccagcgagagaggcagcaggagagcaaaataatgtttcagaggctgctcaagcagtggttagaggaaaactgagacgtgcacccccatgggatggagacccgaagggactcagacggagccgccgtgttggcagcgcctgggtgtgggcccattttggggaccaaacagcaagctgtggtcggatgagtgccaggacctgtgtaccgggacacgtgggagtcctcccagcatgatgcttgactgacccgaggaaggtcctcatgtttcgtgcctgtcattctcggatggctgtgaggcattccttggcaagggacgctgcgtaccagcggtcctcaccgcatctcacatggctcctgtgatgcatgttgtcgctttcccacccgggatctccatctctcttcccttcctgctgtcagtaagagatcacatgtctgtgtagtgtgaatgccttgtcgctgtcctgtgcttttgcaccattgagttgactgcctctgagaagcagcactaggcctgttgaaatgcaatgtgctgccctgagatccagtttcaagaatgggcaggtaaacgcagtgtgggaaaggaatgtggaatgagaacttggtggttcaccgctgtactatttgtgtaaatgtttacgtatgtgataagctacatgtatgtaaatgttgcaatacccctaacagtcgagtagtagtctcccttacaggaatttttgacggggttcctcatcatcaataccaaataaatatatgtaggaatggaa

SEQ ID NO: 29899 - DNA, 4014 bp, Homo sapiens
agcggggtcttaacccttcaattacgagcgggcggcgctgcgtttccagggcagaggaaacgaggcgccgcgttggcgcttggacggcgggaaccggctccggagcgagaacgcgcgtgagagagcccgagagagacggagagcgagcgagcgcgcgggagagactgagagcgggggggtgggagagagacttccagagagacagagcgagaggccgagacggaggctgtccctagcacaggccagggtgtcttgggactcgaatccctgggttgggctggccgggagtggggctttcgaaggaagcgggtgattttccacgtcgtccatatctccccggtgtgggaatggcggtcgtgcactctgggggtggcgttgttctcgttccctacttgggggtggcctttttcagcggagaaagaggatgccgcgggcattggtagccggcgggactacacttgggctaggatcagtgttcagcgggttcagaaatcaccgtgtccttggcatcacctccctccccacctcctctcccatcgcacagcaggagacagtgactggagggttttcaaggaggactgcattgcccctattgaaacaaaccgtccgacaaaccctttctccgacgtgtgacagagggacggtcgtaatgtgaaatacgactagacatgcgtttaatgggcggtgtgattgctgcattcgtgcgcaatgaatggtccaggccatttgtgtccagtagccgcacaagctgcagggtctcatgtttagagagggagggcctctccgccgtccaccttgctggagtacaggcgaccctgggcggtagccctctccgccatcagaaatgtggtgctctgagtagccacagattcccatctgcatctccaataccatttccctctactcactgacccgttgggtgcgttggatttgtgcgtgggtgtgagggtagtttggtgtgtttgcttgcaaatggaaaagcgaatggccttggttggctgagcttatcagggcactagcagtggagagagaaaggactactgtattcttaggagcagaatctcaacaacttcctataaaacgggcagtgtgtcttacctggaatgctttggcatttaataaaatgtcctgtgaatacttttcatagggaagcactttgtttttactgtttctggttggacagtggttacatttcaaatcgtagttcagaattcgtgaaatacccaaattaaatctctacgtggcagtaatccattttctttccttggtgtgtggttggaagattaatttgagataagtgttcagttctgggctgggcagtcgtgccgggcacgggaaattcaggttctttaagggaaaggcctgatgtgctaagacgaaatctataccgtgtgtagccgcttatgagaatatgaaactaaggagagccacaggtaagtatacgtctatgaatgcgaattaaaacgggtgacaatataaagagagattggtgtcacaaatggtggagtgacttttgtatttcagcagacctcagtgagaaatggtcaccaccactccctagatgtgtgaccttgagtgagttgcttaacctctctgatcctgttacctcatctgcaactggggatgagaatatatatcatagcatgccctgggagaagctgttcctgaccacctgggctatggtgattttgacttcctctgtgtcagaagtacccccgtctcatgcctgccatagttgtctttttgttttgttttgtgatttcagatggactcaccctgtcacccaggttggactgcactggcctcaacctcctgagttcaagtgatcgtcccacctcagcctccccagtagctgggaccatagctgtgcagcatcatgcctggctaattttttaagttttttgttgagatggtggtctcgccctgttgctcaggctggcctcaaactcctgggctgaagcagtcctcccacctcagcctcccaaagtgcttggattagaggcgtgagccaccattcctggctccttggacaatattttattcctcagattaagacacgtccttgggatggggctgcattggataattcaccgaaggcaccgctgaatggagtgggccctcagtaaatacctggaggaatgtgacctggccagtgaggttattttcttttgtaggtgaaaggtgtagcagtcactcggcctacacccacagcatcgaccttgtgaacccagcgacctgactgccttgggagaattgaagcgaatgagagtggggagtgtgagaggtgcgtttggtgcagcatttctggcatgggaacagaactggccaggaggaagtgacgtctgggttctgcccgcacacattcctcgccaccttcttggtgtctgagaacctccagcttcacctccttttctggacccgagggcctggcggagcttccagctgggaccagacctccatggatccactccagaaacggaatccagcatcgccttccaaatcttccccgatgacagctgcagagacttcccaggaaggtccagcgccctctcagccttcgtactcagaacagccgatgatgggcctcagtaacctgagccccggtcctggccccagccaggccgtgcctctcccagaggggctgctccgccagcggtacagagaggagaagaccctggaagagcggcggtgggagaggctggagttccttcagaggaagaaagcattcctgcggcatgtgaggaggagacaccgcgatcacatggccccctatgctgttgggagggaagccagaatctccccattaggtgacagaagtcagaatcgattccgatgtgaatgtcgatactgccagagccacaggccgaatctttctgggatccctggggagagtaacagggccccacatccctcctcctgggagacgctggtgcagggcctcagtggcttgactctcagcctaggcaccaaccagcccgggcctctgcctgaagcggcactccagccacaggagacagaggagaagcgccagcgagagaggcagcaggagagcaaaataatgtttcagaggctgctcaagcagtggttagaggaaaactgagacgtgcacccccatgggatggagacccgaagggactcagacggagccgccgtgttggcagcgcctgggtgtgggcccattttggggaccaaacagcaagctgtggtcggatgagtgccaggacctgtgtaccgggacacgtgggagtcctcccagcatgatgcttgactgacccgaggaaggtcctcatgtttcgtgcctgtcattctcggatggctgtgaggcattccttggcaagggacgctgcgtaccagcggtcctcaccgcatctcacatggctcctgtgatgcatgttgtcgctttcccacccgggatctccatctctcttcccttcctgctgtcagtaagagatcacatgtctgtgtagtgtgaatgccttgtcgctgtcctgtgcttttgcaccattgagttgactgcctctgagaagcagcactaggcctgttgaaatgcaatgtgctgccctgagatccagtttcaagaatgggcaggtaaacgcagtgtgggaaaggaatgtggaatgagaacttggtggttcaccgctgtactatttgtgtaaatgtttacgtatgtgataagctacatgtatgtaaatgttgcaatacccctaacagtcgagtagtagtctcccttacaggaatttttgacggggttcctcatcatcaataccaaataaatatatgtaggaatggaacaaaaaaaaagaaaaaaaaaaaaaaataagaaataaatatcacatagaaaaaaacatgacacagatataaactatgatacatcactgcgcaagatataggagagctcacagaattcttatacttatagatgtgccatggcttcgtgcatttccttcattcctgtaatgtagacccatgtatatgaacattagatacattacactagtgagcacataaatcgag

SEQ ID NO: 29900 - DNA, 3710 bp, Homo sapiens
agcggggtcttaacccttcaattacgagcgggcggcgctgcgtttccagggcagaggaaacgaggcgccgcgttggcgcttggacggcgggaaccggctccggagcgagaacgcgcgtgagagagcccgagagagacggagagcgagcgagcgcgcgggagagactgagagcgggggggtgggagagagacttccagagagacagagcgagaggccgagacggaggctgtccctagcacaggccagggtgtcttgggactcgaatccctgggttgggctggccgggagtggggctttcgaaggaagcgggtgattttccacgtcgtccatatctccccggtgtgggaatggcggtcgtgcactctgggggtggcgttgttctcgttccctacttgggggtggcctttttcagcggagaaagaggatgccgcgggcattggtagccggcgggactacacttgggctaggatcagtgttcagcgggttcagaaatcaccgtgtccttggcatcacctccctccccacctcctctcccatcgcacagcaggagacagtgactggagggttttcaaggaggactgcattgcccctattgaaacaaaccgtccgacaaaccctttctccgacgtgtgacagagggacggtcgtaatgtgaaatacgactagacatgcgtttaatgggcggtgtgattgctgcattcgtgcgcaatgaatggtccaggccatttgtgtccagtagccgcacaagctgcagggtctcatgtttagagagggagggcctctccgccgtccaccttgctggagtacaggcgaccctgggcggtagccctctccgccatcagaaatgtggtgctctgagtagccacagattcccatctgcatctccaataccatttccctctactcactgacccgttgggtgcgttggatttgtgcgtgggtgtgagggtagtttggtgtgtttgcttgcaaatggaaaagcgaatggccttggttggctgagcttatcagggcactagcagtggagagagaaaggactactgtattcttaggagcagaatctcaacaacttcctataaaacgggcagtgtgtcttacctggaatgctttggcatttaataaaatgtcctgtgaatacttttcatagggaagcactttgtttttactgtttctggttggacagtggttacatttcaaatcgtagttcagaattcgtgaaatacccaaattaaatctctacgtggcagtaatccattttctttccttggtgtgtggttggaagattaatttgagataagtgttcagttctgggctgggcagtcgtgccgggcacgggaaattcaggttctttaagggaaaggcctgatgtgctaagacgaaatctataccgtgtgtagccgcttatgagaatatgaaactaaggagagccacaggtaagtatacgtctatgaatgcgaattaaaacgggtgacaatataaagagagattggtgtcacaaatggtggagtgacttttgtatttcagcagacctcagtgagaaatggtcaccaccactccctagatgtgtgaccttgagtgagttgcttaacctctctgatcctgttacctcatctgcaactggggatgagaatatatatcatagcatgccctgggagaagctgttcctgaccacctgggctatggtgattttgacttcctctgtgtcagaagtacccccgtctcatgcctgccatagttgtctttttgttttgttttgtgatttcagatggactcaccctgtcacccaggttggactgcactggcctcaacctcctgagttcaagtgatcgtcccacctcagcctccccagtagctgggaccatagctgtgcagcatcatgcctggctaattttttaagttttttgttgagatggtggtctcgccctgttgctcaggctggcctcaaactcctgggctgaagcagtcctcccacctcagcctcccaaagtgcttggattagaggcgtgagccaccattcctggctccttggacaatattttattcctcagattaagacacgtccttgggatggggctgcattggataattcaccgaaggcaccgctgaatggagtgggccctcagtaaatacctggaggaatgtgacctggccagtgaggttattttcttttgtaggtgaaaggtgtagcagtcactcggcctacacccacagcatcgaccttgtgaacccagcgacctgactgccttgggagaattgaagcgaatgagagtggggagtgtgagaggtgcgtttggtgcagcatttctggcatgggaacagaactggccaggaggaagtgacgtctgggttctgcccgcacacattcctcgccaccttcttggtgtctgagaacctccagcttcacctccttttctggacccgagggcctggcggagcttccagctgggaccagacctccatggatccactccagaaacggaatccagcatcgccttccaaatcttccccgatgacagctgcagagacttcccaggaaggtccagcgccctctcagccttcgtactcagaacagccgatgatgggcctcagtaacctgagccccggtcctggccccagccaggccgtgcctctcccagaggggctgctccgccagcggtacagagaggagaagaccctggaagagcggcggtgggagaggctggagttccttcagaggaagaaagcattcctgcggcatgtgaggaggagacaccgcgatcacatggccccctatgctgttgggagggaagccagaatctccccattaggtgacagaagtcagaatcgattccgatgtgaatgtcgatactgccagagccacaggccgaatctttctgggatccctggggagagtaacagggccccacatccctcctcctgggagacgctggtgcagggcctcagtggcttgactctcagcctaggcaccaaccagcccgggcctctgcctgaagcggcactccagccacaggagacagaggagaagcgccagcgagagaggcagcaggagagcaaaataatgtttcagaggctgctcaagcagtggttagaggaaaactgagacgtgcacccccatgggatggagacccgaagggactcagacggagccgccgtgttggcagcgcctgggtgtgggcccattttggggaccaaacagcaagctgtggtcggatgagtgccaggacctgtgtaccgggacacgtgggagtcctcccagcatgatgcttgactgacccgaggaaggtcctcatgtttcgtgcctgtcattctcggatggctgtgaggcattccttggcaagggacgctgcgtaccagcggtcctcaccgcatatcacatgtctgtgtagtgtgaatgccttgtcgctgtcctgtgcttttgcaccattgagttgactgcctctgagaagcagcactaggcctgttgaaatgcaatgtgctgccctgagatccagtttcaagaatgggcaggtaaacgcagtgtgggaaaggaatgtggaatgagaacttggtggttcaccgctgtactatttgtgtaaatgtttacgtatgtgataagctacatgtatgtaaatgttgcaatacccctaacagtcgagtagtagtctcccttacaggaatttttgacggggttcctcatcatcaataccaaataaatatatgtaggaatggaa

SEQ ID NO: 29901 - DNA, 4252 bp, Homo sapiens
agcggggtcttaacccttcaattacgagcgggcggcgctgcgtttccagggcagaggaaacgaggcgccgcgttggcgcttggacggcgggaaccggctccggagcgagaacgcgcgtgagagagcccgagagagacggagagcgagcgagcgcgcgggagagactgagagcgggggggtgggagagagacttccagagagacagagcgagaggccgagacggaggctgtccctagcacaggccagggtgtcttgggactcgaatccctgggttgggctggccgggagtggggctttcgaaggaagcgggtgattttccacgtcgtccatatctccccggtgtgggaatggcggtcgtgcactctgggggtggcgttgttctcgttccctacttgggggtggcctttttcagcggagaaagaggatgccgcgggcattggtagccggcgggactacacttgggctaggatcagtgttcagcgggttcagaaatcaccgtgtccttggcatcacctccctccccacctcctctcccatcgcacagcaggagacagtgactggagggttttcaaggaggactgcattgcccctattgaaacaaaccgtccgacaaaccctttctccgacgtgtgacagagggacggtcgtaatgtgaaatacgactagacatgcgtttaatgggcggtgtgattgctgcattcgtgcgcaatgaatggtccaggccatttgtgtccagtagccgcacaagctgcagggtctcatgtttagagagggagggcctctccgccgtccaccttgctggagtacaggcgaccctgggcggtagccctctccgccatcagaaatgtggtgctctgagtagccacagattcccatctgcatctccaataccatttccctctactcactgacccgttgggtgcgttggatttgtgcgtgggtgtgagggtagtttggtgtgtttgcttgcaaatggaaaagcgaatggccttggttggctgagcttatcagggcactagcagtggagagagaaaggactactgtattcttaggagcagaatctcaacaacttcctataaaacgggcagtgtgtcttacctggaatgctttggcatttaataaaatgtcctgtgaatacttttcatagggaagcactttgtttttactgtttctggttggacagtggttacatttcaaatcgtagttcagaattcgtgaaatacccaaattaaatctctacgtggcagtaatccattttctttccttggtgtgtggttggaagattaatttgagataagtgttcagttctgggctgggcagtcgtgccgggcacgggaaattcaggttctttaagggaaaggcctgatgtgctaagacgaaatctataccgtgtgtagccgcttatgagaatatgaaactaaggagagccacaggtaagtatacgtctatgaatgcgaattaaaacgggtgacaatataaagagagattggtgtcacaaatggtggagtgacttttgtatttcagcagacctcagtgagaaatggtcaccaccactccctagatgtgtgaccttgagtgagttgcttaacctctctgatcctgttacctcatctgcaactggggatgagaatatatatcatagcatgccctgggagaagctgttcctgaccacctgggctatggtgattttgacttcctctgtgtcagaagtacccccgtctcatgcctgccatagttgtctttttgttttgttttgtgatttcagatggactcaccctgtcacccaggttggactgcactggcctcaacctcctgagttcaagtgatcgtcccacctcagcctccccagtagctgggaccatagctgtgcagcatcatgcctggctaattttttaagttttttgttgagatggtggtctcgccctgttgctcaggctggcctcaaactcctgggctgaagcagtcctcccacctcagcctcccaaagtgcttggattagaggcgtgagccaccattcctggctccttggacaatattttattcctcagattaagacacgtccttgggatggggctgcattggataattcaccgaaggcaccgctgaatggagtgggccctcagtaaatacctggaggaatgtgacctggccagtgaggttattttcttttgtaggtgaaaggtgtagcagtcactcggcctacacccacagcatcgaccttgtgaacccagcgacctgactgccttgggagaattgaagcgaatgagagtggggagtgtgagaggtgcgtttggtgcagcatttctggcatgggaacagaactggccaggaggaagtgacgtctgggttctgcccgcacacattcctcgccaccttcttggtgtctgagaacctccagcttcacctccttttctggacccgagggcctggcggagcttccagctgggaccagacctccatggatccactccagaaacggaatccagcatcgccttccaaatcttccccgatgacagctgcagagacttcccaggaaggtccagcgccctctcagccttcgtactcagaacagccgatgatgggcctcagtaacctgagccccggtcctggccccagccaggccgtgcctctcccagaggggctgctccgccagcggtacagagaggagaagaccctggaagagcggcggtgggagaggctggagttccttcagaggaagaaagcattcctgcggcatgtgaggaggagacaccgcgatcacatggccccctatgctgttgggagggaagccagaatctccccattaggtgacagaagtcagaatcgattccgatgtgaatgtcgatactgccagagccacaggccgaatctttctgggatccctggggagagtaacagggccccacatccctcctcctgggagacgctggtgcagggcctcagtggcttgactctcagcctaggcaccaaccagcccgggcctctgcctgaagcggcactccagccacaggagacagaggagaagcgccagcgagagaggcagcaggagagcaaaataatgtttcagaggctgctcaagcagtggttagaggaaaactgagacgtgcatctccatctctcttcccttcctgctgtcagtaagagatcacatgtctgtgtagtgtgaatgccttgtcgctgtcctgtgcttttgcaccattgagttgactgcctctgagaagcagcactaggcctgttgaaatgcaatgtgctgccctgagatccagtttcaagaatgggcaggtaaacgcagtgtgggaaaggaatgtggaatgagaacttggtggttcaccgctgtactatttgtgtaaatgtttacgtatgtgataagctacatgtatgtaaatgttgcaatacccctaacagtcgagtagtagtctcccttacaggaatttttgacggggttcctcatcatcaataccaaataaatatatgtaggaatggaaaaaaaaaacaaaaaaaaaaacacaaaaacaacacaaacacacaaaacaacaaaacaaaacatacaaacaacaaaaacccgggggcctctcattgcgagggggggcgacaacaaggtgttcacaaaggcgcgcacatgtgcacacagtctgttacccgcgcccacaactttctggccacaggcggacaaaacgtgggggaccccaaaaggggggccataaactccaacaacaccgcgggttcaccgtttattatatcgtgcgcgagaatcggccgataccaccgccacacgcccgtcgcgccgcccacacccagcgccgccacgctcccacagcgcctacacacgctacccgcgccagcaccaacgacgtcactctgcgcggtgccctccctggtcggcgaaaacacatcggagcgagtctggagtcagtactcacatctgtgagtataggcacaatcatgtctccacagccgcaggaacgagaagcaactacatcatcctcatccaacacatctaatcaaatatctatctcaccatcctctagacatatatcaacttataccatatcagaatacaactcaacaccacacaaagacagccatatgaacatacaactaaaatcaacacagaagagtaaacatagattactgcagaaaatcttacagctaattataataaataaactcataaccacactgaatcaataaacaatctcctaaacataccagacatctcaacaccacctatttctactttagtatcttactc

SEQ ID NO: 29902 - DNA, 2935 bp, Homo sapiens
agcggggtcttaacccttcaattacgagcgggcggcgctgcgtttccagggcagaggaaacgaggcgccgcgttggcgcttggacggcgggaaccggctccggagcgagaacgcgcgtgagagagcccgagagagacggagagcgagcgagcgcgcgggagagactgagagcgggggggtgggagagagacttccagagagacagagcgagaggccgagacggaggctgtccctagcacaggccagggtgtcttgggactcgaatccctgggttgggctggccgggagtggggctttcgaaggaagcgggtgattttccacgtcgtccatatctccccggtgtgggaatggcggtcgtgcactctgggggtggcgttgttctcgttccctacttgggggtggcctttttcagcggagaaagaggatgccgcgggcattggtagccggcgggactacacttgggctaggatcagtgttcagcgggttcagaaatcaccgtgtccttggcatcacctccctccccacctcctctcccatcgcacagcaggagacagtgactggagggttttcaaggaggactgcattgcccctattgaaacaaaccgtccgacaaaccctttctccgacgtgtgacagagggacggtcgtaatgtgaaatacgactagacatgcgtttaatgggcggtgtgattgctgcattcgtgcgcaatgaatggtccaggccatttgtgtccagtagccgcacaagctgcagggtctcatgtttagagagggagggcctctccgccgtccaccttgctggagtacaggcgaccctgggcggtagccctctccgccatcagaaatgtggtgctctgagtagccacagattcccatctgcatctccaataccatttccctctactcactgacccgttgggtgcgttggatttgtgcgtgggtgtgagggtagtttggtgtgtttgcttgcaaatggaaaagcgaatggccttggttggctgagcttatcagggcactagcagtggagagagaaaggactactgtattcttaggagcagaatctcaacaacttcctataaaacgggcagtgtgtcttacctggaatgctttggcatttaataaaatgtcctgtgaatacttttcatagggaagcactttgtttttactgtttctggttggacagtggttacatttcaaatcgtagttcagaattcgtgaaatacccaaattaaatctctacgtggcagtaatccattttctttccttggtgtgtggttggaagattaatttgagataagtgttcagttctgggctgggcagtcgtgccgggcacgggaaattcaggttctttaagggaaaggcctgatgtgctaagacgaaatctataccgtgtgtagccgcttatgagaatatgaaactaaggagagccacaggtaagtatacgtctatgaatgcgaattaaaacgggtgacaatataaagagagattggtgtcacaaatggtggagtgacttttgtatttcagcagacctcagtgagaaatggtcaccaccactccctagatgtgtgaccttgagtgagttgcttaacctctctgatcctgttacctcatctgcaactggggatgagaatatatatcatagcatgccctgggagaagctgttcctgaccacctgggctatggtgattttgacttcctctgtgtcagaagtacccccgtctcatgcctgccatagttgtctttttgttttgttttgtgatttcagatggactcaccctgtcacccaggttggactgcactggcctcaacctcctgagttcaagtgatcgtcccacctcagcctccccagtagctgggaccatagctgtgcagcatcatgcctggctaattttttaagttttttgttgagatggtggtctcgccctgttgctcaggctggcctcaaactcctgggctgaagcagtcctcccacctcagcctcccaaagtgcttggattagaggcgtgagccaccattcctggctccttggacaatattttattcctcagattaagacacgtccttgggatggggctgcattggataattcaccgaaggcaccgctgaatggagtgggccctcagtaaatacctggaggaatgtgacctggccagtgaggttattttcttttgtaggtgaaaggtgtagcagtcactcggcctacacccacagcatcgaccttgtgaacccagcgacctgactgccttgggagaattgaagcgaatgagagtggggagtgtgagaggtgcgtttggtgcagcatttctggcatgggaacagaactggccaggaggaagtgacgtctgggttctgcccgcacacattcctcgccaccttcttggtgtctgagaacctccagcttcacctccttttctggacccgagggcctggcggagcttccagctgggaccagacctccatggatccactccagaaacggaatccagcatcgccttccaaatcttccccgatgacagctgcagagacttcccaggaaggtccagcgccctctcagccttcgtactcagaacagccgatgatgggcctcagtaacctgagccccggtcctggccccagccaggccgtgcctctcccagaggggctgctccgccagcggtacagagaggagaagaccctggaagagcggcggtgggagaggctggagttccttcagaggaagaaagcattcctgcggcatgtgaggaggagacaccgcgatcacatggccccctatgctgttgggagggaagccagaatctccccattaggtgacagaagtcagaatcgattccgatgtgaatgtcgatactgccagagccacacagcagaacagctatgggaatcgatgacgagatcgacagccgacacaactctacctgttgcattggtagaactg

SEQ ID NO: 29903 - DNA, 2569 bp, Homo sapiens
agcggggtcttaacccttcaattacgagcgggcggcgctgcgtttccagggcagaggaaacgaggcgccgcgttggcgcttggacggcgggaaccggctccggagcgagaacgcgcgtgagagagcccgagagagacggagagcgagcgagcgcgcgggagagactgagagcgggggggtgggagagagacttccagagagacagagcgagaggccgagacggaggctgtccctagcacaggccagggtgtcttgggactcgaatccctgggttgggctggccgggagtggggctttcgaaggaagcgggtgattttccacgtcgtccatatctccccggtgtgggaatggcggtcgtgcactctgggggtggcgttgttctcgttccctacttgggggtggcctttttcagcggagaaagaggatgccgcgggcattggtagccggcgggactacacttgggctaggatcagtgttcagcgggttcagaaatcaccgtgtccttggcatcacctccctccccacctcctctcccatcgcacagcaggagacagtgactggagggttttcaaggaggactgcattgcccctattgaaacaaaccgtccgacaaaccctttctccgacgtgtgacagagggacggtcgtaatgtgaaatacgactagacatgcgtttaatgggcggtgtgattgctgcattcgtgcgcaatgaatggtccaggccatttgtgtccagtagccgcacaagctgcagggtctcatgtttagagagggagggcctctccgccgtccaccttgctggagtacaggcgaccctgggcggtagccctctccgccatcagaaatgtggtgctctgagtagccacagattcccatctgcatctccaataccatttccctctactcactgacccgttgggtgcgttggatttgtgcgtgggtgtgagggtagtttggtgtgtttgcttgcaaatggaaaagcgaatggccttggttggctgagcttatcagggcactagcagtggagagagaaaggactactgtattcttaggagcagaatctcaacaacttcctataaaacgggcagtgtgtcttacctggaatgctttggcatttaataaaatgtcctgtgaatacttttcatagggaagcactttgtttttactgtttctggttggacagtggttacatttcaaatcgtagttcagaattcgtgaaatacccaaattaaatctctacgtggcagtaatccattttctttccttggtgtgtggttggaagattaatttgagataagtgttcagttctgggctgggcagtcgtgccgggcacgggaaattcaggttctttaagggaaaggcctgatgtgctaagacgaaatctataccgtgtgtagccgcttatgagaatatgaaactaaggagagccacaggtaagtatacgtctatgaatgcgaattaaaacgggtgacaatataaagagagattggtgtcacaaatggtggagtgacttttgtatttcagcagacctcagtgagaaatggtcaccaccactccctagatgtgtgaccttgagtgagttgcttaacctctctgatcctgttacctcatctgcaactggggatgagaatatatatcatagcatgccctgggagaagctgttcctgaccacctgggctatggtgattttgacttcctctgtgtcagaagtacccccgtctcatgcctgccatagttgtctttttgttttgttttgtgatttcagatggactcaccctgtcacccaggttggactgcactggcctcaacctcctgagttcaagtgatcgtcccacctcagcctccccagtagctgggaccatagctgtgcagcatcatgcctggctaattttttaagttttttgttgagatggtggtctcgccctgttgctcaggctggcctcaaactcctgggctgaagcagtcctcccacctcagcctcccaaagtgcttggattagaggcgtgagccaccattcctggctccttggacaatattttattcctcagattaagacacgtccttgggatggggctgcattggataattcaccgaaggcaccgctgaatggagtgggccctcagtaaatacctggaggaatgtgacctggccagtgaggttattttcttttgtaggtgaaaggtgtagcagtcactcggcctacacccacagcatcgaccttgtgaacccagcgacctgactgccttgggagaattgaagcgaatgagagtggggagtgtgagaggtgcgtttggtgcagcatttctggcatgggaacagaactggccaggaggaagtgacgtctgggttctgcccgcacacattcctcgccaccttcttggtgtctgagaacctccagcttcacctccttttctggacccgagggcctggcggagcttccagctgggaccagacctccatggatccactccagaaacggaatccagcatcgccttccaaatcttccccttttccacagtctgcatgacccttgttgaactagttcctggcagacctttcaacctgccat

SEQ ID NO: 29904 - DNA, 2592 bp, Homo sapiens
agcggggtcttaacccttcaattacgagcgggcggcgctgcgtttccagggcagaggaaacgaggcgccgcgttggcgcttggacggcgggaaccggctccggagcgagaacgcgcgtgagagagcccgagagagacggagagcgagcgagcgcgcgggagagactgagagcgggggggtgggagagagacttccagagagacagagcgagaggccgagacggaggctgtccctagcacaggccagggtgtcttgggactcgaatccctgggttgggctggccgggagtggggctttcgaaggaagcgggtgattttccacgtcgtccatatctccccggtgtgggaatggcggtcgtgcactctgggggtggcgttgttctcgttccctacttgggggtggcctttttcagcggagaaagaggatgccgcgggcattggtagccggcgggactacacttgggctaggatcagtgttcagcgggttcagaaatcaccgtgtccttggcatcacctccctccccacctcctctcccatcgcacagcaggagacagtgactggagggttttcaaggaggactgcattgcccctattgaaacaaaccgtccgacaaaccctttctccgacgtgtgacagagggacggtcgtaatgtgaaatacgactagacatgcgtttaatgggcggtgtgattgctgcattcgtgcgcaatgaatggtccaggccatttgtgtccagtagccgcacaagctgcagggtctcatgtttagagagggagggcctctccgccgtccaccttgctggagtacaggcgaccctgggcggtagccctctccgccatcagaaatgtggtgctctgagtagccacagattcccatctgcatctccaataccatttccctctactcactgacccgttgggtgcgttggatttgtgcgtgggtgtgagggtagtttggtgtgtttgcttgcaaatggaaaagcgaatggccttggttggctgagcttatcagggcactagcagtggagagagaaaggactactgtattcttaggagcagaatctcaacaacttcctataaaacgggcagtgtgtcttacctggaatgctttggcatttaataaaatgtcctgtgaatacttttcatagggaagcactttgtttttactgtttctggttggacagtggttacatttcaaatcgtagttcagaattcgtgaaatacccaaattaaatctctacgtggcagtaatccattttctttccttggtgtgtggttggaagattaatttgagataagtgttcagttctgggctgggcagtcgtgccgggcacgggaaattcaggttctttaagggaaaggcctgatgtgctaagacgaaatctataccgtgtgtagccgcttatgagaatatgaaactaaggagagccacaggtaagtatacgtctatgaatgcgaattaaaacgggtgacaatataaagagagattggtgtcacaaatggtggagtgacttttgtatttcagcagacctcagtgagaaatggtcaccaccactccctagatgtgtgaccttgagtgagttgcttaacctctctgatcctgttacctcatctgcaactggggatgagaatatatatcatagcatgccctgggagaagctgttcctgaccacctgggctatggtgattttgacttcctctgtgtcagaagtacccccgtctcatgcctgccatagttgtctttttgttttgttttgtgatttcagatggactcaccctgtcacccaggttggactgcactggcctcaacctcctgagttcaagtgatcgtcccacctcagcctccccagtagctgggaccatagctgtgcagcatcatgcctggctaattttttaagttttttgttgagatggtggtctcgccctgttgctcaggctggcctcaaactcctgggctgaagcagtcctcccacctcagcctcccaaagtgcttggattagaggcgtgagccaccattcctggctccttggacaatattttattcctcagattaagacacgtccttgggatggggctgcattggataattcaccgaaggcaccgctgaatggagtgggccctcagtaaatacctggaggaatgtgacctggccagtgaggttattttcttttgtaggtgaaaggtgtagcagtcactcggcctacacccacagcatcgaccttgtgaacccagcgacctgactgccttgggtgagtctaggcaagctccattctcgccagagcggacttgctccttgtcttcctcttgctgctctggccactcttcttggtccctcccctgttccctccccggactcccggttgtactcccgctgcttttctgtgtactcacctgctgggagacccctgatgccagcaccacgcttcactgctgtcttcattttcttctttctttcttgaaagtgggcattgctggctttactgactacctgttcttttgttacaaagctgctaaaaattgtatctcttccgctccagacccagtaggatagagatgatctgtgtaggcatcaaaaatgtagaacatctgcaag

SEQ ID NO: 29905 - DNA, 700 bp, Homo sapiens
agcggacaggcacgacgatcgcggagctgaagttcaggcagcgggagcgaggagggtgtgtggcttttgatacagtagagttctttggcctactcaccaactgacagtcccaaaggggctggagatgccaccccggcaaagttcgccctagtcatttgcttcacgccttccagacagagggagcagttggaaaaaagtcggaggctgagtcgttccaacatggcgcagatgccacaaggacactagcacaccagcaggaagctgaacagaaggctggaggtgccacggtgacaaggacgggatcctgtcaggccaggtaagcttctgctctgccagtgacacggaaagggacaatgaagggccacagatacagaaagcatgtctgtgcagcctgcagagttcaggtgaaggagggacccaggcaggagcagtcagaaccaggagggcttaggcaagagacaggacaggcaaaggcactgatgcagcccacccagacttgacagacgcgttcatccaggtgttcatgtccttgtcactgtggacatctgtgttgcagccacagaaccacatactcgattaggacgcctgaacccaatcaatagtcgtttttccctacagaccctgggggaggcccacatgcacttgccctagggtactctgacattttggcactgcagtcccactgggaggccacatggag

SEQ ID NO: 29906 - DNA, 506 bp, Homo sapiens
agcggggtcttaacccttcaattacgagcgggcggcgctgcgtttccagggcagaggaaacgaggcgccgcgttggcgcttggacggcgggaaccggctccggagcgagaacgcgcgtgagagagcccgagagagacggagagcgagcgagcgcgcgggagagactgagagcgggggggtgggagagagacttccagagagacagagcgagaggccgagacggaggctgtccctagcacaggccagggtgtcttgggactcgaatccctgggttgggctggccgggagtggggctttcgaaggaagcgggtgattttccacgtcgtccatatctccccggtgtgggaatggcggtcgtgcactctgggggtggcgttgttctcgttccctacttgggggtggcctttttcagcggagaaagaggatgccgcgggcattggtagccggcgggactacactggcgaggctaggacactggcgaggctaggacactggcgaggctagga

SEQ ID NO: 29907 - DNA, 244 bp, Homo sapiens
aggctaggtagaggcggggggaatttggagagggcagtccacaagccacgcttcagagaagccgctccgggaacgccgcggcgcacctccggaagggatgacctccacgccttctcccctcgcagtccacccgagcggcgtgggtcgcgagaagccacccaaccgctccgtcttccggctccggcggtccgcggcagccaatcaaaggttcagtttctcagcggcgtcgcatccctgtgacgtg

SEQ ID NO: 29908 - DNA, 342 bp, Homo sapiens
gtaaggattcgcagcattgcacccgatccccgggcagctgtggacatgcgggtcagcccctaggactctgctgtctgaactcttccctcaggattactttctcgcttaggtatcaggggaggctgaacacccagagaggcaatgccaccaggggtgtgttcatctgcagtcagggagacctgggagggaattctgtccctgagtggttgtgtgatctgagggaagttacttgacctctccatgcaggaatttctgcctttgcaacgtgggaaaatatggattctgcagggttgacttgacattctcagtgagatgtttatcacgggccccacatccttcttg

SEQ ID NO: 29909 - DNA, 3791 bp, Homo sapiens
agcggggtcttaacccttcaattacgagcgggcggcgctgcgtttccagggcagaggaaacgaggcgccgcgttggcgcttggacggcgggaaccggctccggagcgagaacgcgcgtgagagagcccgagagagacggagagcgagcgagcgcgcgggagagactgagagcgggggggtgggagagagacttccagagagacagagcgagaggccgagacggaggctgtccctagcacaggccagggtgtcttgggactcgaatccctgggttgggctggccgggagtggggctttcgaaggaagcgggtgattttccacgtcgtccatatctccccggtgtgggaatggcggtcgtgcactctgggggtggcgttgttctcgttccctacttgggggtggcctttttcagcggagaaagaggatgccgcgggcattggtagccggcgggactacacttgggctaggatcagtgttcagcgggttcagaaatcaccgtgtccttggcatcacctccctccccacctcctctcccatcgcacagcaggagacagtgactggagggttttcaaggaggactgcattgcccctattgaaacaaaccgtccgacaaaccctttctccgacgtgtgacagagggacggtcgtaatgtgaaatacgactagacatgcgtttaatgggcggtgtgattgctgcattcgtgcgcaatgaatggtccaggccatttgtgtccagtagccgcacaagctgcagggtctcatgtttagagagggagggcctctccgccgtccaccttgctggagtacaggcgaccctgggcggtagccctctccgccatcagaaatgtggtgctctgagtagccacagattcccatctgcatctccaataccatttccctctactcactgacccgttgggtgcgttggatttgtgcgtgggtgtgagggtagtttggtgtgtttgcttgcaaatggaaaagcgaatggccttggttggctgagcttatcagggcactagcagtggagagagaaaggactactgtattcttaggagcagaatctcaacaacttcctataaaacgggcagtgtgtcttacctggaatgctttggcatttaataaaatgtcctgtgaatacttttcatagggaagcactttgtttttactgtttctggttggacagtggttacatttcaaatcgtagttcagaattcgtgaaatacccaaattaaatctctacgtggcagtaatccattttctttccttggtgtgtggttggaagattaatttgagataagtgttcagttctgggctgggcagtcgtgccgggcacgggaaattcaggttctttaagggaaaggcctgatgtgctaagacgaaatctataccgtgtgtagccgcttatgagaatatgaaactaaggagagccacaggtaagtatacgtctatgaatgcgaattaaaacgggtgacaatataaagagagattggtgtcacaaatggtggagtgacttttgtatttcagcagacctcagtgagaaatggtcaccaccactccctagatgtgtgaccttgagtgagttgcttaacctctctgatcctgttacctcatctgcaactggggatgagaatatatatcatagcatgccctgggagaagctgttcctgaccacctgggctatggtgattttgacttcctctgtgtcagaagtacccccgtctcatgcctgccatagttgtctttttgttttgttttgtgatttcagatggactcaccctgtcacccaggttggactgcactggcctcaacctcctgagttcaagtgatcgtcccacctcagcctccccagtagctgggaccatagctgtgcagcatcatgcctggctaattttttaagttttttgttgagatggtggtctcgccctgttgctcaggctggcctcaaactcctgggctgaagcagtcctcccacctcagcctcccaaagtgcttggattagaggcgtgagccaccattcctggctccttggacaatattttattcctcagattaagacacgtccttgggatggggctgcattggataattcaccgaaggcaccgctgaatggagtgggccctcagtaaatacctggaggaatgtgacctggccagtgaggttattttcttttgtaggtgaaaggtgtagcagtcactcggcctacacccacagcatcgaccttgtgaacccagcgacctgactgccttgggagaattgaagcgaatgagagtggggagtgtgagaggtgcgtttggtgcagcatttctggcatgggaacagaactggccaggaggaagtgacgtctgggttctgcccgcacacattcctcgccaccttcttggtgtctgagaacctccagcttcacctccttttctggacccgagggcctggcggagcttccagctgggaccagacctccatggatccactccagaaacggaatccagcatcgccttccaaatcttccccgatgacagctgcagagacttcccaggaaggtccagcgccctctcagccttcgtactcagaacagccgatgatgggcctcagtaacctgagccccggtcctggccccagccaggccgtgcctctcccagaggggctgctccgccagcggtacagagaggagaagaccctggaagagcggcggtgggagaggctggagttccttcagaggaagaaagcattcctgcggcatgtgaggaggagacaccgcgatcacatggccccctatgctgttgggagggaagccagaatctccccattaggtgacagaagtcagaatcgattccgatgtgaatgtcgatactgccagagccacaggccgaatctttctgggatccctggggagagtaacagggccccacatccctcctcctgggagacgctggtgcagggcctcagtggcttgactctcagcctaggcaccaaccagcccgggcctctgcctgaagcggcactccagccacaggagacagaggagaagcgccagcgagagaggcagcaggagagcaaaataatgtttcagaggctgctcaagcagtggttagaggaaaactgagacgtgcacccccatgggatggagacccgaagggactcagacggagccgccgtgttggcagcgcctgggtgtgggcccattttggggaccaaacagcaagctgtggtcggatgagtgccaggacctgtgtaccgggacacgtgggagtcctcccagcatgatgcttgactgacccgaggaaggtcctcatgtttcgtgcctgtcattctcggatggctgtgaggcattccttggcaagggacgctgcgtaccagcggtcctcaccgcatctcacatggctcctgtgatgcatgttgtcgctttcccacccgggatctccatctctcttcccttcctgctgtcagtaagagatcacatgtctgtgtagtgtgaatgccttgtcgctgtcctgtgcttttgcaccattgagttgactgcctctgagaagcagcactaggcctgttgaaatgcaatgtgctgccctgagatccagtttcaagaatgggcaggtaaacgcagtgtgggaaaggaatgtggaatgagaacttggtggttcaccgctgtactatttgtgtaaatgtttacgtatgtgataagctacatgtatgtaaatgttgcaatacccctaacagtcgagtagtagtctcccttacaggaatttttgacggggttcctcatcatcaataccaaataaatatatgtaggaatggaa

SEQ ID NO: 29910 - DNA, 2342 bp, Homo sapiens
agcggacaggcacgacgatcgcggagctgaagttcaggcagcgggagcgaggagggtgtgtggcttttgatacagtagagttctttggcctactcaccaactgacagtcccaaaggggctggagatgccaccccggcaaagttcgccctagtcatttgcttcacgccttccagacagagggagcagttggaaaaaagtcggaggctgagtcgttccaacatggcgcagatgccacaaggacactagcacaccagcaggaagctgaacagaaggctggaggtgccacggtgacaaggacgggatcctgtcaggccagatggactcaccctgtcacccaggttggactgcactggcctcaacctcctgagttcaagtgatcgtcccacctcagcctccccagtagctgggaccatagctgtgcagcatcatgcctggctaattttttaagttttttgttgagatggtggtctcgccctgttgctcaggctggcctcaaactcctgggctgaagcagtcctcccacctcagcctcccaaagtgcttggattagaggcgtgagccaccattcctggctccttggacaatattttattcctcagattaagacacgtccttgggatggggctgcattggataattcaccgaaggcaccgctgaatggagtgggccctcagtaaatacctggaggaatgtgacctggccagtgaggttattttcttttgtaggtgaaaggtgtagcagtcactcggcctacacccacagcatcgaccttgtgaacccagcgacctgactgccttgggagaattgaagcgaatgagagtggggagtgtgagaggtgcgtttggtgcagcatttctggcatgggaacagaactggccaggaggaagtgacgtctgggttctgcccgcacacattcctcgccaccttcttggtgtctgagaacctccagcttcacctccttttctggacccgagggcctggcggagcttccagctgggaccagacctccatggatccactccagaaacggaatccagcatcgccttccaaatcttccccgatgacagctgcagagacttcccaggaaggtccagcgccctctcagccttcgtactcagaacagccgatgatgggcctcagtaacctgagccccggtcctggccccagccaggccgtgcctctcccagaggggctgctccgccagcggtacagagaggagaagaccctggaagagcggcggtgggagaggctggagttccttcagaggaagaaagcattcctgcggcatgtgaggaggagacaccgcgatcacatggccccctatgctgttgggagggaagccagaatctccccattaggtgacagaagtcagaatcgattccgatgtgaatgtcgatactgccagagccacaggccgaatctttctgggatccctggggagagtaacagggccccacatccctcctcctgggagacgctggtgcagggcctcagtggcttgactctcagcctaggcaccaaccagcccgggcctctgcctgaagcggcactccagccacaggagacagaggagaagcgccagcgagagaggcagcaggagagcaaaataatgtttcagaggctgctcaagcagtggttagaggaaaactgagacgtgcacccccatgggatggagacccgaagggactcagacggagccgccgtgttggcagcgcctgggtgtgggcccattttggggaccaaacagcaagctgtggtcggatgagtgccaggacctgtgtaccgggacacgtgggagtcctcccagcatgatgcttgactgacccgaggaaggtcctcatgtttcgtgcctgtcattctcggatggctgtgaggcattccttggcaagggacgctgcgtaccagcggtcctcaccgcatctcacatggctcctgtgatgcatgttgtcgctttcccacccgggatctccatctctcttcccttcctgctgtcagtaagagatcacatgtctgtgtagtgtgaatgccttgtcgctgtcctgtgcttttgcaccattgagttgactgcctctgagaagcagcactaggcctgttgaaatgcaatgtgctgccctgagatccagtttcaagaatgggcaggtaaacgcagtgtgggaaaggaatgtggaatgagaacttggtggttcaccgctgtactatttgtgtaaatgtttacgtatgtgataagctacatgtatgtaaatgttgcaatacccctaacagtcgagtagtagtctcccttacaggaatttttgacggggttcctcatcatcaataccaaataaatatatgtaggaatggaa

SEQ ID NO: 29911 - DNA, 1733 bp, Homo sapiens
agcggggtcttaacccttcaattacgagcgggcggcgctgcgtttccagggcagaggaaacgaggcgccgcgttggcgcttggacggcgggaaccggctccggagcgagaacgcgcgtgaaaggtgtagcagtcactcggcctacacccacagcatcgaccttgtgaacccagcgacctgactgccttgggagaattgaagcgaatgagagtggggagtgtgagaggtgcgtttggtgcagcatttctggcatgggaacagaactggccaggaggaagtgacgtctgggttctgcccgcacacattcctcgccaccttcttggtgtctgagaacctccagcttcacctccttttctggacccgagggcctggcggagcttccagctgggaccagacctccatggatccactccagaaacggaatccagcatcgccttccaaatcttccccgatgacagctgcagagacttcccaggaaggtccagcgccctctcagccttcgtactcagaacagccgatgatgggcctcagtaacctgagccccggtcctggccccagccaggccgtgcctctcccagaggggctgctccgccagcggtacagagaggagaagaccctggaagagcggcggtgggagaggctggagttccttcagaggaagaaagcattcctgcggcatgtgaggaggagacaccgcgatcacatggccccctatgctgttgggagggaagccagaatctccccattaggtgacagaagtcagaatcgattccgatgtgaatgtcgatactgccagagccacaggccgaatctttctgggatccctggggagagtaacagggccccacatccctcctcctgggagacgctggtgcagggcctcagtggcttgactctcagcctaggcaccaaccagcccgggcctctgcctgaagcggcactccagccacaggagacagaggagaagcgccagcgagagaggcagcaggagagcaaaataatgtttcagaggctgctcaagcagtggttagaggaaaactgagacgtgcacccccatgggatggagacccgaagggactcagacggagccgccgtgttggcagcgcctgggtgtgggcccattttggggaccaaacagcaagctgtggtcggatgagtgccaggacctgtgtaccgggacacgtgggagtcctcccagcatgatgcttgactgacccgaggaaggtcctcatgtttcgtgcctgtcattctcggatggctgtgaggcattccttggcaagggacgctgcgtaccagcggtcctcaccgcatctcacatggctcctgtgatgcatgttgtcgctttcccacccgggatctccatctctcttcccttcctgctgtcagtaagagatcacatgtctgtgtagtgtgaatgccttgtcgctgtcctgtgcttttgcaccattgagttgactgcctctgagaagcagcactaggcctgttgaaatgcaatgtgctgccctgagatccagtttcaagaatgggcaggtaaacgcagtgtgggaaaggaatgtggaatgagaacttggtggttcaccgctgtactatttgtgtaaatgtttacgtatgtgataagctacatgtatgtaaatgttgcaatacccctaacagtcgagtagtagtctcccttacaggaatttttgacggggttcctcatcatcaataccaaataaatatatgtaggaatggaa

SEQ ID NO: 29912 - DNA, 1933 bp, Homo sapiens
agcggacaggcacgacgatcgcggagctgaagttcaggcagcgggagcgaggagggtgtgtggcttttgatacagtagagttctttggcctactcaccaactgacagtcccaaaggggctggagatgccaccccggcaaagttcgccctagtcatttgcttcacgccttccagacagagggagcagttggaaaaaagtcggaggctgagtcgttccaacatggcgcagatgccacaaggacactagcacaccagcaggaagctgaacagaaggctggaggtgccacggtgacaaggacgggatcctgtcaggccaggtgaaaggtgtagcagtcactcggcctacacccacagcatcgaccttgtgaacccagcgacctgactgccttgggagaattgaagcgaatgagagtggggagtgtgagaggtgcgtttggtgcagcatttctggcatgggaacagaactggccaggaggaagtgacgtctgggttctgcccgcacacattcctcgccaccttcttggtgtctgagaacctccagcttcacctccttttctggacccgagggcctggcggagcttccagctgggaccagacctccatggatccactccagaaacggaatccagcatcgccttccaaatcttccccgatgacagctgcagagacttcccaggaaggtccagcgccctctcagccttcgtactcagaacagccgatgatgggcctcagtaacctgagccccggtcctggccccagccaggccgtgcctctcccagaggggctgctccgccagcggtacagagaggagaagaccctggaagagcggcggtgggagaggctggagttccttcagaggaagaaagcattcctgcggcatgtgaggaggagacaccgcgatcacatggccccctatgctgttgggagggaagccagaatctccccattaggtgacagaagtcagaatcgattccgatgtgaatgtcgatactgccagagccacaggccgaatctttctgggatccctggggagagtaacagggccccacatccctcctcctgggagacgctggtgcagggcctcagtggcttgactctcagcctaggcaccaaccagcccgggcctctgcctgaagcggcactccagccacaggagacagaggagaagcgccagcgagagaggcagcaggagagcaaaataatgtttcagaggctgctcaagcagtggttagaggaaaactgagacgtgcacccccatgggatggagacccgaagggactcagacggagccgccgtgttggcagcgcctgggtgtgggcccattttggggaccaaacagcaagctgtggtcggatgagtgccaggacctgtgtaccgggacacgtgggagtcctcccagcatgatgcttgactgacccgaggaaggtcctcatgtttcgtgcctgtcattctcggatggctgtgaggcattccttggcaagggacgctgcgtaccagcggtcctcaccgcatctcacatggctcctgtgatgcatgttgtcgctttcccacccgggatctccatctctcttcccttcctgctgtcagtaagagatcacatgtctgtgtagtgtgaatgccttgtcgctgtcctgtgcttttgcaccattgagttgactgcctctgagaagcagcactaggcctgttgaaatgcaatgtgctgccctgagatccagtttcaagaatgggcaggtaaacgcagtgtgggaaaggaatgtggaatgagaacttggtggttcaccgctgtactatttgtgtaaatgtttacgtatgtgataagctacatgtatgtaaatgttgcaatacccctaacagtcgagtagtagtctcccttacaggaatttttgacggggttcctcatcatcaataccaaataaatatatgtaggaatggaa

SEQ ID NO: 29913 - DNA, 1781 bp, Homo sapiens
agcggacaggcacgacgatcgcggagctgaagttcaggcagcgggagcgaggagggtgtgtggcttttgatacagtagagttctttggcctactcaccaactgacagtcccaaaggggctggagatgccaccccggcaaagttcgccctagtcatttgcttcacgtgaaaggtgtagcagtcactcggcctacacccacagcatcgaccttgtgaacccagcgacctgactgccttgggagaattgaagcgaatgagagtggggagtgtgagaggtgcgtttggtgcagcatttctggcatgggaacagaactggccaggaggaagtgacgtctgggttctgcccgcacacattcctcgccaccttcttggtgtctgagaacctccagcttcacctccttttctggacccgagggcctggcggagcttccagctgggaccagacctccatggatccactccagaaacggaatccagcatcgccttccaaatcttccccgatgacagctgcagagacttcccaggaaggtccagcgccctctcagccttcgtactcagaacagccgatgatgggcctcagtaacctgagccccggtcctggccccagccaggccgtgcctctcccagaggggctgctccgccagcggtacagagaggagaagaccctggaagagcggcggtgggagaggctggagttccttcagaggaagaaagcattcctgcggcatgtgaggaggagacaccgcgatcacatggccccctatgctgttgggagggaagccagaatctccccattaggtgacagaagtcagaatcgattccgatgtgaatgtcgatactgccagagccacaggccgaatctttctgggatccctggggagagtaacagggccccacatccctcctcctgggagacgctggtgcagggcctcagtggcttgactctcagcctaggcaccaaccagcccgggcctctgcctgaagcggcactccagccacaggagacagaggagaagcgccagcgagagaggcagcaggagagcaaaataatgtttcagaggctgctcaagcagtggttagaggaaaactgagacgtgcacccccatgggatggagacccgaagggactcagacggagccgccgtgttggcagcgcctgggtgtgggcccattttggggaccaaacagcaagctgtggtcggatgagtgccaggacctgtgtaccgggacacgtgggagtcctcccagcatgatgcttgactgacccgaggaaggtcctcatgtttcgtgcctgtcattctcggatggctgtgaggcattccttggcaagggacgctgcgtaccagcggtcctcaccgcatctcacatggctcctgtgatgcatgttgtcgctttcccacccgggatctccatctctcttcccttcctgctgtcagtaagagatcacatgtctgtgtagtgtgaatgccttgtcgctgtcctgtgcttttgcaccattgagttgactgcctctgagaagcagcactaggcctgttgaaatgcaatgtgctgccctgagatccagtttcaagaatgggcaggtaaacgcagtgtgggaaaggaatgtggaatgagaacttggtggttcaccgctgtactatttgtgtaaatgtttacgtatgtgataagctacatgtatgtaaatgttgcaatacccctaacagtcgagtagtagtctcccttacaggaatttttgacggggttcctcatcatcaataccaaataaatatatgtaggaatggaa

SEQ ID NO: 29914 - DNA, 1582 bp, Homo sapiens
ctctcatatcactcaaccggattggctggagatcatgaaggcgcaatgagagttggaggtagatgtgggagtgtgcgttaggtgcacgcgtttcgtggtcatggcaacagaccggcccgtcgttaacagacgtctgggttctgcccgcacacattcctcgccaccttcttggtgtctgagaacctccagcttcacctccttttctggacccgagggcctggcggagcttccagctgggaccagacctccatggatccactccagaaacggaatccagcatcgccttccaaatcttccccgatgacagctgcagagacttcccaggaaggtccagcgccctctcagccttcgtactcagaacagccgatgatgggcctcagtaacctgagccccggtcctggccccagccaggccgtgcctctcccagaggggctgctccgccagcggtacagagaggagaagaccctggaagagcggcggtgggagaggctggagttccttcagaggaagaaagcattcctgcggcatgtgaggaggagacaccgcgatcacatggccccctatgctgttgggagggaagccagaatctccccattaggtgacagaagtcagaatcgattccgatgtgaatgtcgatactgccagagccacaggccgaatctttctgggatccctggggagagtaacagggccccacatccctcctcctgggagacgctggtgcagggcctcagtggcttgactctcagcctaggcaccaaccagcccgggcctctgcctgaagcggcactccagccacaggagacagaggagaagcgccagcgagagaggcagcaggagagcaaaataatgtttcagaggctgctcaagcagtggttagaggaaaactgagacgtgcacccccatgggatggagacccgaagggactcagacggagccgccgtgttggcagcgcctgggtgtgggcccattttggggaccaaacagcaagctgtggtcggatgagtgccaggacctgtgtaccgggacacgtgggagtcctcccagcatgatgcttgactgacccgaggaaggtcctcatgtttcgtgcctgtcattctcggatggctgtgaggcattccttggcaagggacgctgcgtaccagcggtcctcaccgcatctcacatggctcctgtgatgcatgttgtcgctttcccacccgggatctccatctctcttcccttcctgctgtcagtaagagatcacatgtctgtgtagtgtgaatgccttgtcgctgtcctgtgcttttgcaccattgagttgactgcctctgagaagcagcactaggcctgttgaaatgcaatgtgctgccctgagatccagtttcaagaatgggcaggtaaacgcagtgtgggaaaggaatgtggaatgagaacttggtggttcaccgctgtactatttgtgtaaatgtttacgtatgtgataagctacatgtatgtaaatgttgcaatacccctaacagtcgagtagtagtctcccttacaggaatttttgacggggttcctcatcatcaataccaaataaatatatgtaggaatggaa

SEQ ID NO: 29915 - DNA, 3829 bp, Homo sapiens
agcggggtcttaacccttcaattacgagcgggcggcgctgcgtttccagggcagaggaaacgaggcgccgcgttggcgcttggacggcgggaaccggctccggagcgagaacgcgcgtgagagagcccgagagagacggagagcgagcgagcgcgcgggagagactgagagcgggggggtgggagagagacttccagagagacagagcgagaggccgagacggaggctgtccctagcacaggccagggtgtcttgggactcgaatccctgggttgggctggccgggagtggggctttcgaaggaagcgggtgattttccacgtcgtccatatctccccggtgtgggaatggcggtcgtgcactctgggggtggcgttgttctcgttccctacttgggggtggcctttttcagcggagaaagaggatgccgcgggcattggtagccggcgggactacacttgggctaggatcagtgttcagcgggttcagaaatcaccgtgtccttggcatcacctccctccccacctcctctcccatcgcacagcaggagacagtgactggagggttttcaaggaggactgcattgcccctattgaaacaaaccgtccgacaaaccctttctccgacgtgtgacagagggacggtcgtaatgtgaaatacgactagacatgcgtttaatgggcggtgtgattgctgcattcgtgcgcaatgaatggtccaggccatttgtgtccagtagccgcacaagctgcagggtctcatgtttagagagggagggcctctccgccgtccaccttgctggagtacaggcgaccctgggcggtagccctctccgccatcagaaatgtggtgctctgagtagccacagattcccatctgcatctccaataccatttccctctactcactgacccgttgggtgcgttggatttgtgcgtgggtgtgagggtagtttggtgtgtttgcttgcaaatggaaaagcgaatggccttggttggctgagcttatcagggcactagcagtggagagagaaaggactactgtattcttaggagcagaatctcaacaacttcctataaaacgggcagtgtgtcttacctggaatgctttggcatttaataaaatgtcctgtgaatacttttcatagggaagcactttgtttttactgtttctggttggacagtggttacatttcaaatcgtagttcagaattcgtgaaatacccaaattaaatctctacgtggcagtaatccattttctttccttggtgtgtggttggaagattaatttgagataagtgttcagttctgggctgggcagtcgtgccgggcacgggaaattcaggttctttaagggaaaggcctgatgtgctaagacgaaatctataccgtgtgtagccgcttatgagaatatgaaactaaggagagccacaggtaagtatacgtctatgaatgcgaattaaaacgggtgacaatataaagagagattggtgtcacaaatggtggagtgacttttgtatttcagcagacctcagtgagaaatggtcaccaccactccctagatgtgtgaccttgagtgagttgcttaacctctctgatcctgttacctcatctgcaactggggatgagaatatatatcatagcatgccctgggagaagctgttcctgaccacctgggctatggtgattttgacttcctctgtgtcagaagtacccccgtctcatgcctgccatagttgtctttttgttttgttttgtgatttcagatggactcaccctgtcacccaggttggactgcactggcctcaacctcctgagttcaagtgatcgtcccacctcagcctccccagtagctgggaccatagctgtgcagcatcatgcctggctaattttttaagttttttgttgagatggtggtctcgccctgttgctcaggctggcctcaaactcctgggctgaagcagtcctcccacctcagcctcccaaagtgcttggattagaggcgtgagccaccattcctggctccttggacaatattttattcctcagattaagacacgtccttgggatggggctgcattggataattcaccgaaggcaccgctgaatggagtgggccctcagtaaatacctggaggaatgtgacctggccagtgaggttattttcttttgtaggtgaaaggtgtagcagtcactcggcctacacccacagcatcgaccttgtgaacccagcgacctgactgccttgggagaattgaagcgaatgagagtggggagtgtgagaggtgcgtttggtgcagcatttctggcatgggaacagaactggccaggaggaagtgacgtctgggttctgcccgcacacattcctcgccaccttcttggtgtctgagaacctccagcttcacctccttttctggacccgagggcctggcggagcttccagctgggaccagacctccatggatccactccagaaacggaatccagcatcgccttccaaatcttccccgatgacagctgcagagacttcccaggaaggtccagcgccctctcagccttcgtactcagaacagccgatgatgggcctcagtaacctgagccccggtcctggccccagccaggccgtgcctctcccagaggggctgctccgccagcggtacagagaggagaagaccctggaagagcggcggtgggagaggctggagttccttcagaggaagaaagcattcctgcggcatgtgaggaggagacaccgcgatcacatggccccctatgctgttgggagggaagccagaatctccccattaggtgacagaagtcagaatcgattccgatgtgaatgtcgatactgccagagccacaggccgaatctttctgggatccctggggagagtaacagggccccacatccctcctcctgggagacgctggtgcagggcctcagtggcttgactctcagcctaggcaccaaccagcccgggcctctgcctgaagcggcactccagccacaggagacagaggagaagcgccagcgagagaggcagcaggagagcaaaataatgtttcagaggctgctcaagcagtggttagaggaaaactgagacgtgcacccccatgggatggagacccgaagggactcagacggagccgccgtgttggcagcgcctgggtgtgggcccattttggggaccaaacagcaagctgtggtcggatgagtgccaggacctgtgtaccgggacacgtgggagtcctcccagcatgatgcttgactgacccgaggaaggtcctcatgtttcgtgcctgtcattctcggatggctgtgaggcattccttggcaagggacgctgcgtaccagcggtcctcaccgcatctcacatggctcctgtgatgcatgttgtcgctttcccacccgggatctccatctctcttcccttcctgctgtcagtaagagatcacatgtctgtgtagtgtgaatgccttgtcgctgtcctgtgcttttgcaccattgagttgactgcctctgagaagcagcactaggcctgttgaaatgcaatgtgctgccctgagatccagtttcaagaatgggcaggtaaacgcagtgtgggaaaggaatgtggaatgagaacttggtggttcaccgctgtactatttgtgtaaatgtttacgtatgtgataagctacatgtatgtaaatgttgcaatacccctaacagtcgagtagtagtctcccttacaggaatttttgacggggttcctcatcatcaataccaaataaatatatgtaggaatggaacaacacaaacaaccaacgcacaacaacacaaaaacggc

SEQ ID NO: 29916 - DNA, 809 bp, Homo sapiens
ggcgtgagtgaattaatgcatgaaattcaggattgtactatagcatacttcctccagaacatagcaggaacctggaggcagaagggccagtgcactgactgcatcggcctctttccttctgcccctgaagtctacactgaatgacattgggtcgattttcctggtcagacttagtaagagacttgttaggggcaacagcagaggagggcttgatatttggctctttgctgatttggagacaaagaggcaaaggggaacagttcttattcaaaacatttaattatctagactctcctaaggacataaattcttcctgcaaatatctcttacatgcttttaaaaatattcagagtaacaggtttccacttataagttatgaagtttaagaatggttaagtactctctgtagtctgaaaaaaaatagcattgcgtctaaaggaagctaactttctctagaagaacaattttaacagtgggggaatctgtccccacacttgggccaatgtttatgacaaaccatcaagctcattaaaactcccagagaagaaagcaaagaggatggtacttggtccttgattaaggttttgccattgaatccttcaacctcctaccactgcttctagctgtcagttccagaatttgaaacgcggtggaagaggctagtgggtgtacagaaaaaccttccttgtgaagcagggcagtttcctcacactctgaccacaatcaaataccattaacttacaaaagacacaggctgcaaagctgaagagaaggagaattgtattccccgagacaacctgaaacaggca

SEQ ID NO: 29917 - DNA, 353 bp, Homo sapiens
aaaaaagaccctggtcccttaagcaaactgagcaatgggggttaggcacctccacatggaaacccctttagtttcactggccacagccagaaacctacagttgttttcctctttaggcactgcccagcaagggtcacaagttggaaaggaaaagagagagcaacagagagaaagagagagagattcccctgtatggagcaaaaaggaaaggatgaaggagaaaaatcccaagctttgggcctaccttctggaatttctcctgactggcttgccgaaatatgttattgatggagtgtgtccagtttcttggcatcttaaacacagaattggacaaactgcataaacaaagcagg

SEQ ID NO: 29918 - DNA, 441 bp, Homo sapiens
tttgcttccagttaacccttgctctgcccagtaccgaatttctgtcactgcctcctccaagaccttctcttgtattttgcccaaagcaggtgtcagaaccctttctgggggccgagcagcttggtgttgggaggctgtggttgagattcccggctctcttactcccttcccagggcttgggcaaattcttgcccccagtgcctcctctctgcttcctgactctcccttgagagcttggaccatagaccccagcacccttcctgctcaaggacacactccactctgagtatacacccaacagaaacacatacatatgttctctaaaagatgtgtattagaagccgggcacagtggctcacgcctgtaatcccaggaccttgggaggccaaggcaggtggatcacttgagcccaggagtttgagaccagcctgggcaacacag

SEQ ID NO: 29919 - DNA, 1173 bp, Homo sapiens
atcccagcaagttgggaggccgaggcgggcggatcgcttgaggtcgggagttcgagactagcctgtccaacatggtgaaacccggtctctactcaaatacaaaaattagccgggtgtggtggtgcacacctgtaattccagctactcaggaggctgaagcaggagaatcacttgagccgggaggcagaggttgcagtgagccgagatcgcgccactgcactcccgcctgggcgacagagcgagactgtctcaaaaataagaagttaaaatgggccaggcgcgcgcgcgcccctgtagccccaacgctttgaggctgaggcgggaggatctcgaacccaggacttcgcgccactgcactccaacctgaacgagtgagcggaccctgtctcataaaaaaagaaaaaagaaaacacacaagatgcgcctagttaacaccgccaattggtcactgctagtcgcgattccatatcgggagcttaacaaggtaatgaccttaatgatttgtggaatttctgagtattacccagtaaacttctggatgaaccagcagctacccagacaccctcagagcactggtcctatccctgccgtgttaaactgaatgtgcaccctaactcccatgtgaaatcctcaccccaaggcgttggtgcttcggaggtgactaggtcatgaggacagagccttcataaaagggaccccaagagctttgtgcagctttctactgtgtgaaggcagcgggaaggaagtctgcagtctggaagaaaccccttaccagaacctcagcgtgctgggcaccctgattttggaggttgtgacgtacccctgcttcccctttccactttcattcccagtgctgactgagaaacagagtcccttggccactctgtgacttcgccaactgtataatttcctctgcagacttgaacccgagccatagccatgaacgttcccaggcacagatgacagtaactaggttgttgctcaaaacacagaaagaaactggactcagcctgagccagattcctcaaaccctcatataaattccattcaccaaccccctcccccacggacatacctagagagaacttcatttctctcactgcctattgcaagaactgctgcagcccactctgtacaaaagccccacgaataaatgctctgggcgaatcaccc

SEQ ID NO: 29920 - DNA, 476 bp, Homo sapiens
ctaccctagctaatttacataaaaagactatctttatttttatagtaacaaaaaaagctaggattatctcatttaatccttataccatcattatgaagtgggtaatattatactcacaaaaggaagttaatcatttcttattttccacagacaccacaagctcaggaggctgcatcagcgtttcttattggaggcattttcttttcctccagattttgtttttgactgttaaggtagcttgttatagctacaaacaatcgatcaagcctaaaagggcatttataaaccacctacatctacatttttttcttactgttgatggatttaaaaagccgtttcaagatgaaatcttacaagtctttttcatgtcttctgagggctgagatataactttgaagtagagcccaaacatgaagatcatgaagacggcttcttctccaaatgatgttatcttaaaaacttgagaaaaaaaaaac

SEQ ID NO: 29921 - DNA, 900 bp, Homo sapiens
caggctggtaccgcccggagtatgagataaaaatgtaattgctccatttcctttattctttctttcattttcttccctctcactgtatattttagattgtcctgcttgactgccaggtcagacccagcacacaaagatatctgtcataagactggggagctgcagtgttctttttcataagaaatgaaatgcttgaaatttctcttccaaatgaatcacaaaacttccatggtcattttcattttaaattattttatgtctatgtaaactcatgcattgcctataacggaataatattcccagccatgtggatagtgacagagaatgagctgaaggcagcaatacttcacaggcaaagtggtacatgcatttttttttcatcttgcttttttccttttccatattcactcatccttttaaattctttgaatctactttttcctccctcgctcccttcctatcctccatctctatctttgtcatttattaattctttttcttctttttctccagacttggatatttctctatcctctcatcattctctttcatacacattctctgacttgtaggtcctaagattctcatattctaaaattaaccctctgcttaacagggtatgtttataaaccattggactgaggaggaattgcccaagttatcaaagacatcctatcaggaatgtcagccttttactctcattcatgctcagagaaacagtgctgcagggattatagcctggaatatggcagaaccagattttaaatttgtttgccctttgcctcctaatatccattttcccctaagtttaactgggcatatttcccagtttgccttgcaaatgtgttgccatatgactgcactttgtctaataaaatgaaactgagtatgttttgtgta

SEQ ID NO: 29922 - DNA, 517 bp, Homo sapiens
gttccttgggggttaaggttgccccaggttgccccactctcttaaactaattagcgtttacccttaggtctcacatgggagaggtggacatccaattaaattagtactctgccagcagggaaggaagaaatggatgctagtaggtaaccaacagtgtctgctgcatggagtaaggctgttttcagtttagaatctttgaaactaacatgaggtagcttctgtatgtttactattctcaggtgtatcatctttgtaacactggcaattggagatgttcctgatcacctgtggcacctataaccctttaccagctttccagcacttggtgacagtttgtctcaattgtccataaattgacacttggattagcctggtctgtcccaacaagattatcagctccttgacagcagggatatgccctctcttcatggtgtattcctcatgtcatgttagagatgcagtaggtatttagcagttatattggttcactgtgtattcattgagtgtttattatgta

SEQ ID NO: 29923 - DNA, 528 bp, Homo sapiens
aaaattcaccttttaagaccttaaagagccccacttaagacataaaggcaagggccaggtgtggtggctcacacctgaaatcccagtgctttgggaggccaggtgaaaggatcacatgaggccaagagtttgagatccagcctgggcaacagtgagactctgtctctccctctctctatacataaaaatacataaagagaattatttacttaagaactgctaccctgattgcttccagagagtccaacttaataaactacaggaattatctgtaatttattctacagatttagtcccctaatgaagaccaatgtgactttttgttgtggggaaggtgaagactgtcaagtattaatattctttttgaggggggttcttttaaggtggttaagatacatataatatacaatttgccattttaactatgttatatatacaattcagtgactattaattatattcacaatattgtgtaatcatcactaccatctatttccaaaactttttcataaccacaatcagaaactt

SEQ ID NO: 29924 - DNA, 413 bp, Homo sapiens
gctcagttgggcatcattttattcacctgagagggatggggaaagagtgagccctctttaacttctggatctacttccagatgctttagggagtttattaagaaaaagtgctggctgggtgcattggctcatgcctgtaatcccagcactttaggatgccaaggcgggcagatcacctgcggtcaggagcttgaggccagcttgaccaatgtggcaaaaccccacctctactaaaaatacaaaaattagccaggtgtggtggcggggggcgcctgtaatcccagctactggggaggctaaggcaggagaatcgcacaaacccaggaggtggaagttgtgctttggagctaaggtcatgccactgcactccagcctgggcaacatggtgagactctgtctcaaatttaaaaaaa

SEQ ID NO: 29925 - DNA, 638 bp, Homo sapiens
tggaagttctgacaaaataaaatgagaaaaacaaaaggtgtaaggattagaaagaattagaactaccactatttgcagatgattagattatcttcacagataacaaagattcatagtaaattatcagctttaattagaatctagtaagtagatcttctaagattactatacaaaaatcaagtgtatctctacataccaccaacacggaaaatgtcactaaaagatatattacttccaagagtaaaaaaacaatacaagacacttagaaataaacacaccaaagatatgcaagactcttataaagacaattagaaatgttactgaaaagcattaaggagatctaaacaatgaagagagagagagatgaagtttctggataggaagacatcatcatatagatataagttctccccaaactgatatattcaatttaatgcaaataaagatatcaacaagattcttttgtgaacttgtcaaaactaatttaaaaacctatgtaagaaagaaagaaaaattaaaacacctcggccgggtgtggtggctcacacctgtaatcccagcactgtgggaggcccaggcgggcggatcacgaggtcagcagattgagaccatcctggttaacatggtgaaatcccgtc

SEQ ID NO: 29926 - DNA, 460 bp, Homo sapiens
actctctcttccgcgtcgacataaatgaggggctactcccactttacagcagaatggcaggctactcagtatcgtgagatgcaccattccagaacctgagtcgatccagacaggttgtcaccgggtattcaacagagagcagcaacaattaccctcccgactagggtcccttgagacacaggtctggagaattctggcatgaagaaacagtgtttgtgacaatcaataatctttcaggttgacttaatgtggaaagaaaacagcattaaacaattatgctgcacatgaacatgctatataagagggtatagttgatcatttttatggtttcataaaaattcatttgcttttgggtgttacaaacacactaggaaactgaaacatctaacacaggcaaggcaccacctaaaaaataaaagcctgacaaattaagaaaataaaatatcaatttctaacccaa

SEQ ID NO: 29927 - DNA, 264 bp, Homo sapiens
agggacttgagcatccatggattttggtatccaatggagatcctataaccaatcccctatggataccaagggacaactgtatttactgaactgttaccagcaggctgcagatatagtcagatactaatggacacttaaaattgaaaacctgttaagaagtgcactgtacattttctttgtttgcttaaaagcagcttcctagaagctgtctagttctacctcgtgttaatcttttcacatcctacagagttttacagactttta

SEQ ID NO: 29928 - DNA, 349 bp, Homo sapiens
tttttttttgagaaaatttgaagtggattccaggactgatagatttatcgtgctttccagagatgacttgtagccatggttaagagccatagtaaataaaccaaagccataagaaagagggttcttcaaaaatttcaaacaatcagcagcactgaatgaccgtcacagccactaatgaagtttttttttttattattatgatactgaattgtaaaggttttcaacatgtcttaaaattgacactttcccatggggaagtagggtctgcattctctcccctggaacctggactaaacttagggaatgattgactggtagagcacagaggaggtgatactcggtgtcgacg

SEQ ID NO: 29929 - DNA, 320 bp, Homo sapiens
aaagttcttttagacttttgtgcatataaaaaatgaaatacaagcaaaatactatatatctgacatttttcagaatctaacttctcagagttacattttaactcaaactatctttatccttatttttccatcacagtattgtgtcttattccatctaaagtattgataaatcagcattacttaaaagaattctcagctgggtgtggggctcacacctgtaatctcaacactttgggaggccgaggtgggaggatcacttgagcccaggagttcaagaccaagcctgagcaatatagcaagaccttgtttttacaagaaac

SEQ ID NO: 29930 - DNA, 620 bp, Homo sapiens
aatttatcagcctaaattatgttgaacaacgcctaccttctgccccacaagcaaacttatgaaagcttcctggtgctgcctgaagacctatatctgtgagctcacaggtgtctaacctcagcttccttcctatcctgatgggctgaataaatttcttgaccttaccttttaaaataaatcatctttaaataattgtggggcttaggctgacctttctcaagaggttgacttatagctattacccttgtaactgaattctgcaagtttgcctgtcttacccaagattagcctatgaggatttccacaggtccagtgctagctttgagcagtgccttctttcaagctttaattttgctttctggcagctgggttttttaaattttatttatttatttatttatttatttttgagacgaagtctcactctgttgcccgggctggagtgcagtggcatgatctctgctcactgcagcctgcgcctcctgggttcaagtgattctactgcctcagccttccaagtagctgggatcacaggcatgtgccaccacgcccagctaatttttgtatttttagtagaaacggggtttcactgtgttggccaggctggtctcgaactccta

SEQ ID NO: 29931 - DNA, 479 bp, Homo sapiens
tgggccactgcactccagcccttcctggccttttccttgtgcatttgtactttttttttccagacagggtctcactctgtcacccaggctggagtggcttgacttcccaggctcaagcggttctcctgcctcagcctctggagttgcttgaactatacatggacgctgccatgctcagctatttttatcttcttattttttttatagagacggggtgtcactgtgttgctggtttcaaactcccggcctctcaaaagtggcctcaaagtgctgggatgactggtgcgagccactgcacccagccacatttgtacatttcaaacacaggttttgttttaagcaaaatggtcatgttgtacatattgttgcgcaacccgtttctttcacttaatttctgtggcatacagaaattctgcatatttctcacactatgggtgggtgggccaaaatttacttctttgctgctgtgaacatttctg

SEQ ID NO: 29932 - DNA, 416 bp, Homo sapiens
aggtggaaaggcccaggtgatgagccagccacatcacctcaaccacaggacccctgatggtggccctagagcctcctcttgaaatccaaagctcagtcccctcttcccagttcaggagcaaggaggtttctggcaggttaaaatggctaactcaggagcttgccacctttgaaaggcagcactgtgtagacagaggcagaaggatgggcttacgagacagtcctgggttcatatccttctctgacttaccagctctggaaccttaagcaagtgacgtaacctctctaagcctcagttgcctcatctttaaaatggcatccattagtggggcagcgcaccagcatggcacatgtatacatatgtaactaaccctgacaatgtgcacatgtaccctaaaacttagagtataataaaaa

SEQ ID NO: 29933 - DNA, 949 bp, Homo sapiens
aatagaggcacttttttaaaaagctaagacagcaacaagatccaatgataggagacttgatgatataaagatcttttctccctcttttctgtagacctgctagctgttgtagtctttctgttcattctctattcttaactatttcccttgagttcagtttgatgaaacctgtgtctgcctatgtcctcatacacaaattctggggtacaatgtaaacctattactgatttcaaccttagtttggagaaaaagtccacattttgtttgcccctccctttgcactaataattttcatggaaactgaaagcccactcttttttttgagatacagtctcactctgtcacccagggctggagtacagtgggcgcaatctcggctcactgcaacctacggccgcccacattcaggtgattctcctgcctcagcctccatagtgctggggattacaggtgtgagccaccactcccagccaaaagcacactctttttatactaacttaatcaatcttgagatcctcataagaaatatctagttacccatcttggtctctccataccctagtttctttgtatctacactctgtactgacttgagattctgttaagctcctctatctcatccctagaacctaagagacccaaagcaatcaaacaagcatacagttggccctcccatatcctcgagggattggttcccaggactccctgtggataccaaatccacagatgcgcaagtctcttatataaaatggcttagtacagtcagccctctgtatatgcaggtttgtatcagtagttttgtatcagccatgggttgaatgcttggatgtaaaacccaaagataaggaggactgactgactgtacttagcattacacacagtgaccaagcccatggtagcaattaaaaatcaacaccattgtttccaaacccctgtgtgaaagaaaaaa

SEQ ID NO: 29934 - DNA, 139 bp, Homo sapiens
ggcagaggagagatatgattaaagtgatgtatcagatagtcagaaggaggagaagaaactcatcatcaggaataatcatcctgagttctgtcatccaccacattgacattgatatgaccagggcaggattcctgaatct

SEQ ID NO: 29935 - DNA, 389 bp, Homo sapiens
tctcatactgaaagagagacctcacttcccatttcccaatccaaagtaaatgctgtgaaagaccaggaatgtagtaccgtcagcacacatctgggactgtttgtagcctacgttctgaaatcaggggatgctgacaggctcaagctgcgatactgaaaggaggcctggtttcccttctgttggaattacattacaaggagaaatattgatccagcatactcaagaatgggctgggtgtggtagctcatgcctgttatcccaacactttgggaggctgagacaggcagatctcttgagcccaagagttcaagacaagcctggacaacatggtgaaaccccgtctctacaaaaactacaaaaattagctgggcgtggtggcatgcgcctgt

SEQ ID NO: 29936 - DNA, 898 bp, Homo sapiens
tttcacttgaacacttagaggctataatagggtttttaattggcctaatttcaatattgttgtgtctcagaatagggaggcctgagtagaggaagacaggagaattactagtcagcatcgcagtcagaacacgtttctcaagtttgccatcttccatgtgtatggttcatagcatcccccaattacaatagtaacatcaaagatcactggtcacagatcaccgtaacagatataacaataatgaaaaaggttgaaatattccaggaattaccaaaatgtgacacagagacacaaagtaagcacatattgttggaaaaatggcattgatagacttgcccaaggcagggttaccataaaccttcaatttgtaaataacgcaacatctgtaaagtgcattaaagccaaggtatgcctgtaatgtgaaatagtgtcaagcgcataaatctgtgtgtgttactactaaattaggtaatccattttgggaggaaggtagaaaatcaagaagtaaagaaaggcaagatgccagaattttcggagcagcttcctagaagatagagcttgagcccttaaagggttcagctcctcaggaagggaaataaaggatttacacaagaagttgacttcatggaaacagcaaagatgtgttccaactccactaagagctgatgagtcaccctcattccacttcgggagactctttgattgctgaacgtctcacctctgtcttaggggttcccctggtgctgccggagttgcggttgacaatatcagagtcagtgtagggcaggggtttatgtgatgcttagatgctaacaatctaatgcaaaattaaggagttgaattaccagcagtaattgttagcagagcccttaccatctccatggtaaactaaaaaatt

SEQ ID NO: 29937 - DNA, 449 bp, Homo sapiens
cgtctttctgtgcctttatcaatgtgtgtgtgggcagttttgatttacacgtagaagaccatcaaagtgcaatgcagcttgctttttcacataatgtaaatacttctggtatctgcatataaacaccagcattgacatttttaatgattttgtagcattttgatgtatgaattgcaataatttcattacagtaatgttttccctaaaaatggacatatcaattgttttcaacttctccttttgcaaatataggatatccacaagtgaaattccaccaagtcaaaggttattcacatgtaaatttagctacatactgtaacttctcctccagaagtccgtaccagttttcattcctattaacaaaatgtgaatgcctgtctttcccacctgagctcagtgttccattttcaacaatctgatagataaaataaaagatattgtcagtttca

SEQ ID NO: 29938 - DNA, 556 bp, Homo sapiens
gcagaggaggctgggcttcgttctggaggtggggacacggtgaggtgaggtttagaaagcacacctgagccgcagtgtgtaggatgctggaaatggtggagatgggcctgcgaaagtgatgacccaggagcagcagccgggcacctaacaatgggtcagcaccgtgggcgtggagacgagagcggggattgatcaataccggagaagtacaatgtacaggacttgggttccatttggatggagtgggtgagggagagggaggagtcagaaatggcttccggtttccagcttgggcctggggattggagatgtccccactgagagtagggcacaagtgaggaaatggtttggagaggaagataagttacatcatggacatgctgagtctgagttgcctatgggacttggaatggggggtggcaaaatgtgtgtgatcttgagcaagatattcaacccttctgggccttggtcttcttatttgtaaaatggcgataagaatattacttcccatttgtgttgctgtgaatattaaatgcgctaccacatgtaaaaaaat

SEQ ID NO: 29939 - DNA, 401 bp, Homo sapiens
acccgggttatgctggtcgaaccgaattaccggaaaatctcaaagctcttttcagaccctgtgccatggtggcccctgacattgagctaatctgtgaaatcttgttagttgctgaaggttttgtggatgcgcgtgcattagcccgaaagttcattacgttgtacacgctttgcaaggagcttctctccaagcaggatcattacgactggggacttcgtgctattaagtctgtcttggttgtggctggatctctgaaacgaggagataaaaatagacccgaagatcaggtacttcatgagagcattaagggatttcaatatgcccaaaatagtgactgacgacatcccagtgtttctgggcctggtcggtgacctgtttccagccctggatgtgccccggag

SEQ ID NO: 29940 - DNA, 732 bp, Homo sapiens
aattcaaaaaagtgcaacctccagcataaataagttaatatctcctgatgattagaaacactcaataaactaaatatataagagaagattccataagatgacaagagaggcactaggaacacagaaaaatctactataaagacgtgtattaaaaatgcaagctggaggccaaggcggacagatcatttgagccccgcagttcgagaccagcctgggcaacataaggagatacccgtctccataataaaataaaaaattagacatggtggcacaaaacaaatggtattgaaacacctgaattagcaaatgcaaagaaatgaattagacacagaactgcaccttttacaaaactacttcctaatgaatcgtttacttatatggaaaatgcaaaactcacaatttcacacttgtcaaaaccaagacgaccttgatttggcaataagatttcacacacaacacaaaaagcatgatctgtgaatgagaaaatcaataaattggacttcattcaaaacaaaaatgttttggaaaagactgttaacagaataaaaagacaggcggcagactgggacaaaatatttgcagaacagctatctgatcaagaactggtacccaaaaggtatgaagaactcctaaaattctataagaaaaaaaccaaccaatcaaaaaataagcaaaacgctgggtgcggtggctcatgccttaatcccagcactttgggaggcagagacgggt

SEQ ID NO: 29941 - DNA, 693 bp, Homo sapiens
aatctgatgctaagttactaatcagaaacattgaagacaaggaacggctttgtcaaagatgcagtacaaaagtcagcatgtccgacatatgaatgtcagaaaacagccaggagggcaaaagaacactgggccagcagctagaacttcatcccaccatttactggttggggcaagtgactttctgcctactccttattctcctcatctgtcaaatgggggctaaaagtcctactttacaaaactgtagttgagattttaaaacactaacctaggtgataagacttggcaaagtctatgacaaaaagaaggaattttgtaagtgtttaatgaataaatgaatgggtgactcaaagtcaaaatagacctctgataatgaaagatgaataaaatgacactcctctgaacccttttttaacagtgggtaactcttaaagcatgagcaggcaaaaaggattcaagatcttttagcaggtttatgccatcacactgtgctatgtgcagaccaatgaggcaaggtccacatctacaaccaaaagagtccaaaaaggtagctgggcatggtggcatgtgcctctaatcccagctacttgggagactgaggctggagaataacttgggaggcagaggttgcaatgagccaagatcatgccactgcactccagcctgggtaatagagtgagaccctatctcaaa

SEQ ID NO: 29942 - DNA, 1136 bp, Homo sapiens
  misc_feature (959)..(959): n is a, c, g, or t
ctgagtcaggaatgaagggagaagtggtgtttaatgaaagccagtctggatcgtttgcacaagaaggactgggacagagagttgggggctggaaggagaggggaggagaaagagcctagtgcagatgttcagaaaaaaggtatagttatttggcaagaagctgcagatctcagagaaacataagatcccaaatctaagagcaagacattagccaaggaaagaacacccctgaaagtgacagctagcaatttctgcatcccagatggagttaatgtcaccaagagaacttgtactaggagtaggaggagactgacagcccccagggtctctcctcaggagagaattcagttatactgaagatgccttccaggccccccttggtcccttctgacgtcaccacagatgatcaggccaggggtgggagtctgaacagcagataattggccaaacaagtctatgaggtcacctgtcaaggaagaccttatcaaagagggacaatagtaattaactgaaaccatcaggtcctctcggagattcagaagggatccatgatgaatgtgtcattagttggcaagaagagcagacacagagagaatcagagatgcatgtgcagccacgatgtattggaacaggtgtccatgacccatgctgctgagaggccgcaggaatatccagtcttcacgcttctttggacttcgagcccacttcttaccggtaggtcctgggcatacaacataccactgcataatggtcatgagcacagactcgggagccaaaccacaagacttcaaatgctggctctgcgacttactatcagctgatttgagaccagctgctcggcctccacatgtctcagttctcttatgtacaagatgggcacctacctcctgaggttgttgtgaggattaaatgagttaatatatacaaatatttattatggtgtttggccaaaataagtnctatgtgtgtgattgttatcagcatttttggaatctctagttcttcctacaggaacgagtggtgaccccaccaactcactcacgcctgacatagcttctcacggggcctggctcatggtggaaaatcgcattttccttatttctgcttttataataaacttacctatcatttgaact

SEQ ID NO: 29943 - DNA, 991 bp, Homo sapiens
ctgagtcaggaatgaagggagaagtggtgtttaatgaaagccagtctggatcgtttgcacaagaaggactgggacagagagttgggggctggaaggagaggggaggagaaagagcctagtgcagatgttcagaaaaaaggtatagttatttggcaagaagctgcagatctcagagaaacataagatcccaaatctaagagcaagacattagccaaggaaagaacacccctgaaagtgacagctagcaatttctgcatcccagatggagttaatgtcaccaagagaacttgtactaggagtaggaggagactgacagcccccagggtctctcctcaggagagaattcagttatactgaagatgccttccaggccccccttggtcccttctgacgtcaccacagatgatcaggccaggggtgggagtctgaacagcagataattggccaaacaagtctatgaggtcacctgtcaaggaagaccttatcaaagagggacaatagtaattaactgaaaccatcaggtcctctcggagattcagaagggatccatgatgaatgtgtcattagttggcaagaagagcagacacagagagaatcagagatgcatgtgcagccacgatgtattggaacaggtgtccatgacccatgctgctgagaggccgcaggaatatccagtcttcacgcttctttggacttcgagcccacttcttaccggtaggtcctgggcatacaacataccactgcataatggtcatgagcacagactcgggagccaaaccacaagacttcaaatgctggctctgcgacttactatcagctgatttgagaccagctgctcggcctccacatgtctcagttctcttatgtacaagatgggcacctacctcctgaggttgttgtgaggattaaatgagttaatatatacaggtcttcggtgctgccattgctgctgctgaagttgctgctgtgcatgagctgccgtccaaaggcc

SEQ ID NO: 29944 - DNA, 338 bp, Homo sapiens
tggtgtaggaaatattttcacagaaatatttctcttttagagagttttttcggataaagaaggcttgtttaattcaggaagagttatttcataggaaattaaatctttgtaaatcctctatcacatttccacacttgctagttctgtggcaaatgatggctttcgagtggttcaggaagggtttcctgaaagcaaacaattccatgttttatacatatttgtgtttttatttttgaattggataagtaagggacatgtactttcccctttgtatttgtctctgggtgatattgctggttctcaaactcagaatggtaattaattacttataatgattt

SEQ ID NO: 29945 - DNA, 350 bp, Homo sapiens
ctatcattgtgttactatctctttctataggtttaataatatttctatttaaaatctgggtgctttgatgttgggtgcatagatatttagaattgttatatctttttgctgaaaagatttctttattattggatgattaccttctttaccctttttgttgcactttttatttaaagtgttttatttgatatacatacagatactcctgtttgcttttggtttctgtttctgttgatatctttcctcccttatttttaatctatatgtgtcttacaagtaaggtgagattcttgtaggcaccatagagttggacgattttttcttattcatatcataaatctatacatttt

SEQ ID NO: 29946 - DNA, 845 bp, Homo sapiens
agggcagggcaattaaagtcaggaagaaagagacctgcatattgatggatatattttgtgatccagccttatgtatgttctgaagagaaatacaaaatttgtatctaaatacctgtcctgtgtccctcttttcaaattcttctgttttttcttttttctttctgttttttttttttttttttttttctgttttgagacagagtcttgctctgcagcccaggctggaagggcagtggcgccatcttggctcactgcagccttgacttcctggggctcaagtgatcctcccacctcagactctagagtagctgggattacaagcatgcaccaccacgcccagctaattttaaaactttttataggagacagagttccactatgttgcccaggctggtcttgaatccctggcttgagtaaccctccttccttggcctcccaaagtgttgggattacaggcatgagccaccacgcctggatgatttaacttaaatttctcccatccaaatagcactaaagacaggcttgaaaaatccatgtctcactgacccttatctcagcatgctacgtgtactaacccactaaagctcataaaaaccctgtgagggttaggaagccaaggcaggcggatcacatgaggtcaggaatttgagaccagcctggccaacatagtgaaaccccctcctactaaaaacacaaaaaattagccaggtgtggtggtgcgcacctgtaatcccagctactcgggaggctgaggcaggagaaccgctcgaacccgggaggtgaaggttgccgtgagccaagatctgtcactgcattccagccagggtgacggagtgagattctgt

SEQ ID NO: 29947 - DNA, 375 bp, Homo sapiens
ataagaaaccatctgaaggtacaaaaaaacacaccaaaacttgacttgtactagtaagtgcaaagaagaacagaatgttataactgttaactatggtgtgtaaactaaattttcttaagtaaaaagactaaaagatgaacgagtcaagaataacaacctttcaagacacagacagtacaataggatataaatcgaagcaagaaaaagttaataagccaagcaacacagttaaagtgtagagtttcaatatttttgtttgtgcttgttagtttgtttatataatcagggttaagttgtcagcttaaaatgattagttatagaataatatttgcaagccttttgttaacttcaaatcaaataacatacaacaaatac

SEQ ID NO: 29948 - DNA, 186 bp, Homo sapiens
caagacatcaacaggagttaggcaaataaaatgaggaaagccataaaattagtatccaaatgtaaaaagcatctatcaagacttattcataattcaaatcaatatctcccaaagccttatcttattgaaattaaaatgtattattttcaatgccccttttctcttaccaaaaaaaggaagaaaact

SEQ ID NO: 29949 - DNA, 474 bp, Homo sapiens
gctgctgaggactgagaattgactgttagatttggcagcgcggaggccacttggcagcagctctttcagtggagtatggagactggagtctggcatgggctcatgagagaatgggaagagaggatttagaggtggtgattatgggcgactcctcggaagggtttcatggaaagagaactgggagtgccgggcagctccggggtttgtttgcttaaagacagaggaatgatggtagttgtgtgatgatgggaaagagctcgggaaggggagggccaggagagagagagtgcagggacagtggctggaatgatttcctgagatggccagaagggattgcatcgaagagcatggggtgcatgtcccttactcgtatctcgtctctctcagtaatgttttgttatgaaccttttgaaagttttgcataacctttcttgattgattcctagaaactagagtttttgttgttgttgttgt

SEQ ID NO: 29950 - DNA, 281 bp, Homo sapiens
gatcccggccatgctttagtagatgttgaccaggctgttctcaaactcctgccctcaggtgatctgcctacctctgcctcccaaagtgctagattacaggtgtgagccgcccactgggcctgcctggaaaacatttgttgaagtccgaagttgaaattctagagatgaaacctaaaacattttagatgaaaaatacactggatgggactaaaggcaggttaaacactacaaaggacaaagattagtgaagattaagacacagtcataacaatagaactatc

SEQ ID NO: 29951 - DNA, 385 bp, Homo sapiens
aagtttactatgttaatgtgttttccttaatataaaatttaattttttaaaacatattttaaaaacttccaaaatatagattgtgtgtgttatactgcttttaggtttgagaaagataaaagattttggtttttcttggttgagcacggtggctcatgcccgtaatcccagtacttggagaggccaaggtgggaggattgcttgggccaggagtttgagaccagtctgggcaagacttgtctctacaaaaaatagaaaattagctggacatggtggtgcatgcctatagtcctagctacgcaggaggctgaagcaggagcatcacttgagccccaggagatcaaggctgcagtgagctatgatcacaccattgcactctagcctg

SEQ ID NO: 29952 - DNA, 496 bp, Homo sapiens
ttgatcatatgatatattaggggtggattattcatgagttttctgggaattcttcctttcagaccatatagggtaacttccagatgttgccatggcatttgtaaactgctgtggtgctggtgggagtttaagtatggtaatgcattataattcacatataatgaccagtgaggacgaccagaggtcactttcatcgccatcttggttttggctgccttctttactgcatcctgttttagtagcagggtttttgtgacctgtattttgtgccaacctccaatgtcatcctgtgactctgaatgcttaacctcctgggaatacagggcaggagctttcagcctcattttacccaatgcctattcaagatggagtcactctggttccaaggcctctgacagacctagggcaagttccccaaatgtttgtttttaacaagcaccacaggtgaatgcaagggcagccagatttgggagccagtgagctatcaaacactttt

SEQ ID NO: 29953 - DNA, 452 bp, Homo sapiens
caaataaacatatacatatagtacatgtcaattagataagtccatgaggagaaatagataagggactagagaaatgggtaatgggagccctgaggttgttttttagatagaatggtcagtgcagacttctctgaggaagtgatatttgagagacctgaatgaaataaggagatgtgccattgggcgtggtagctcacacttgtaatctcggcactttgggaggccgaggtgggcagatcacctgaggtcaggagttgaagaccagcccgggcaatgtggtgaaaccccgtctgatctaaaaatagaaaaattagccaggtgaggtggtggatgcctgtagtcccagctactcggtaggctgaggcaggagactcacttgaacttgggaggcagaggttgcagtgacctgagatcatgccattgtactccaacctgggtaactccgtctcaaa

SEQ ID NO: 29954 - DNA, 325 bp, Homo sapiens
aaaaaaagtttttacccatgttataagggaaatttttgagctaactttagagtgtggtagttaatggtgagtttatttattaaagtgtttatttactatgtgccaggcgttattttaatgctgtatatatattaactcatttaatcctctaacataactagctactgttaggttagttagttattaataacataacagtaccagcagtgaaatagctactgttattttacaggtgaagaaactgaggcataaaagagatttcagtaacttgctgaagtcacacaaatattaggtggcagagctgggatttgaatttgggtcgacg

SEQ ID NO: 29955 - DNA, 1081 bp, Homo sapiens
acctttcaaaatcaatccagtgtgaaatattggttgcctgagaggtcagtcatacagaattgtgtgctttattatttgaaatgttatttgttttcagcctggtgcagaaatccttttccttcagttatattttagaaccactgtgtgagtacattactttttaggttttgggcctcatggacattcttagcaacttgttttcacagccctttctttgatgttcatttgaaccatagcgttgttgatattcagagtattttgacctacaaacataaacattttatatggttcaaactaacagttaatttgcttcagtttaccaggcatggatgagtacagtttcaatgctaatagcaaatattttacttattttactttcctgagcactttacatgttttcactgttttcctcctcacatcaacaaccccaatgaattttatctctcatttataaataaagaaataggtgtaaagagataaagtaatatgcccaagtaagtgggaaactcaggatttgaacccaactcctcttgctccagagtctacacgctgaacaacaatgctattccgccctctacccttgatctagtcccctcttggccatctggtagttttgtaaattcaagcatagctccttctatggccttgagcccctcctttccctgcacagtagagaggggttggacttttattggattgtgtttgtattgtaattgtgtgtttttccagatgtgttttctagccacaggaagagatactcaaataagtctttcaacagtatctattatgctgacattcacacttgtttgtgttattttgtacgttttggaagccttctgtagttaagtattagttgagctaattccttactgtttttgtgtcatactttgttatggagcaacgtaatatgtgtatgttgttaactgaatcgatagaaatctaagaatcaacttggtctatatcatctgatgattcaggggctggtttggatcattgataaagtaaattattccctgttttacttaactccttagtggcagttttctagattcccattattggcttgcatcaaaaaaaaaaa

SEQ ID NO: 29956 - DNA, 93 bp, Homo sapiens
catgtgcagttaaaatgtgttgcagggtctttctcctggggtcatggcctgttctctagtcagtggtttcaacgttgaaaaattaacttaaat

SEQ ID NO: 29957 - DNA, 737 bp, Homo sapiens
ggtctcaaactcctgagctcaagagatccacccactgcctcagcctcccgagtagctgggattacaggcgcctgccaccacgcttggctaatttttgtatttttagtagaggccgggtttcaccgtcttggctaggctggtcttgaactcctgaccgcaactgatccacccatctcggcctccaaaaatcctgggattacagccatgagccactgtgcccggctgaaacctgctttttaaaaactcaatactgcacaaagattttgccatgtcagctcatacagatttattccactcttcatgtatgttgcagggagtccacagatcagaactgatgaactactgtaccatctgatagcgcagccttaatgttgtcgtagatttttcactatcatattcaatgatacaaaaagattcttgtatacatacaatttccttttcatatgtgtgaatatctttctagggtaggtatctaggagagaagttctagactattagaggttttctgtattttacattttacaggtctcctggcatttaggatttatgtctgttattattactgacaaagataagagcttatgaggactggctggagaggtgatactctggcctagacagtacctgagcaagcccagaaaaccatcagataatctacaaactcactgaaattttattccttccttgtaaaatttaccaaggaaacatcatcatgatattttttagttagcacacat

SEQ ID NO: 29958 - DNA, 286 bp, Homo sapiens
tgtgtgaatttggtcaacctgtaactcagtggcttcagttaaacacatcagaatcttttcccttcttcagtgtacctgtacacatttgaaaatcaatattggcgatggttgtggaaaaagttagagaggagggggcaaagttaaattcagacctcaacagacctgtgaactatcatcttttcttttgttggaaggtgtgccagataacctgtgtaactaaatgttttaactgtctagtgactttgtcaccttggaggcaaaagtatgtcatcagtgaataagagga

SEQ ID NO: 29959 - DNA, 408 bp, Homo sapiens
tcacaatgtttttatggacaagttcagcccataaatcaaaaattacctttatggatgaaatattagttaagtcaagatcatctttttcatttcctacatgcaggttgaatctcatttatggagtgagatgtcaaataacaacaaaaaatgcacttaatttgcataaagatgcttgtaaggtaacattgctccacactttgctttattcacatcattagaggaaatatcttattcctctagctgtttctggccatggctcaaggaattaaaaacttccattcattccttcagacagtacagttaacaagaggataactttttttattatctctgtccttctccctcaggaagcagagaattatcagattggtgagagaaaggaaataaaggtctgaacatgtgtctcaa

SEQ ID NO: 29960 - DNA, 169 bp, Homo sapiens
  misc_feature (56)..(56): n is a, c, g, or t
caccttggcccagggcctcttacctccagatccttcagggtaacagatgatgcagnaagtaataaaaatgagaaattcaaaaaaacaaaaacttacatgggaaacagttatggatatagagaaagtataaaaacagcaatgagccaggcatggtggctcatgcacgtaa

SEQ ID NO: 29961 - DNA, 375 bp, Homo sapiens
acctctggctcctgggctcaagcagtcctcctgcctcacctcccaagtagctgggactacaggcgtatgccaccacacctggctaagttttatgttttttgtagagatgaggttttgccatgttgcccaggctggtctcgaactcctaagctcaagcaatccaccaaccttggcctcccaaagtactgtgattacaggcaagaaccactgtgccagcacatttttaaagttctaaaagaagaaaaaacttccaacatagaattatatacccagagaaagtatctttcaaaaacttaagtaaaataagcatttttttggacacacaaaaacagaaagaattcatcattcatagaccttcactaaatgaaatgttaa

SEQ ID NO: 29962 - DNA, 444 bp, Homo sapiens
agcaatgggctgtacccatagtgtgttctctcctgctactctctcttcctccccatccccctcctacattaaataaaatttttgctgtaaaaatttgaaagagatttacaaaatctatttacaattatttgcctatgagttaattatagattgactgatttttttagcaatctctctgcatacttagaaattcttttgagttgtaaaaaaaccaaaagtgtaacctttttgcaattgatattttttaaaataataaattctaagtgtaataattactaaaattggcataagcttccatttcagggataaacatttattaatttcacacttggatttatgttcatacattacagccaataattttgttcatatctcacatacttcagtaggtttttgtaaagcttataggctctaggccttgtgcctatagtgactcataagaaa

SEQ ID NO: 29963 - DNA, 344 bp, Homo sapiens
gttctcattcttgttcccataagccaggattggctgagccttagccaggataccacctggcattcagccacatcggctaaagagatgaggaacctgagaggaaacaaatgtgaggaagaggatgattcaagaggaccagaaatacaaggaaaggacagaggccctcggatggttcactgcagagaagacaggctgaaagatttaggaaccggctgaaagccaacatgccagagcctcccaaagggtggaatcagagatctctcctgctattattgtatcagcagcctcacgtctaccctcgggcctgaattttgttatagatttatacacatttgatatagagt

SEQ ID NO: 29964 - DNA, 415 bp, Homo sapiens
aattagcctggcgtggtagcactcacctataataccagctacttgggaggctgaggcaggagaagtgcttgaacctgagaggcgaggttgcagtgagctgagatcataccactgcactccagcccgagtgacagaatgagactccgtcaaaaaaaaaaaattaataaaaataaaaataaataaaagcacagaccctacagaaaagactgcctgggttcaaatcctgtgtccatgactcactctgagccttagcttcctcagctgttaaaaaagaaaaaaaaaaaaaaagggacaatagtagtctttacttcagaggacttttgtaagaattaagtgagttaagatggttataacatatagttctcccaaaacagtgcttcatagaagttttcattatcatcccccttcccacttt

SEQ ID NO: 29965 - DNA, 366 bp, Homo sapiens
gtcacaatctcgactcgctgcatcctcaacctcccgggctcgggtgatcctcccgcctcagcctcctgagtagtgtgcaccaccacacctggctaatttgtgtgttttttgtagtgatgggatgtcgccgtgttgcccagactgctctcgaactcctcactttgggcaatcctctctcctcggccctccagagtgttgggattacaggcgtgacacgcgcacccggccatctgttgcccttaaggaagttaagatacaaacactaggaatacatgcccttaattcaacccacacccccatgcttgtttggttttgttgggttttttggggatcttcttgtttgtttgtttttgagactccatctca

SEQ ID NO: 29966 - DNA, 406 bp, Homo sapiens
gggtaccaagatctgaagggtcacatccctgttaactggctctgttacaataaatactagcgataataaatatttatcaggtgtacataccatgccatatcctgttctgaagagtctttgaaattttaatagatttggtaaagaatttttgaacttaaataaaaggaaataattctggaacaaaatatgcccaagcaaaagtaaattgttttacattcttttcatatagaacagagaaatgcataccacccttgacaataggatcagaagaacaaacagtatcagatgttacagaacgtttttgaagtttttcactgtgtgagctgcatgggtctgcacagcacctcccacagtggttctgcattggccagttcaacctcatttcataccagtttttctgtttgtt

SEQ ID NO: 29967 - DNA, 448 bp, Homo sapiens
gaaacattaaatcaccccatgtgttctgttttggggtattgtattcatcacttaatctttatagcatcaataaatatagaactttatcatcattttaaatggctggagagtgatatttcataatatgtgtattgacagctccatcattatttcaaaatcgtcttatcctcacctttcactccagatattgccgttatggctagctacaaagaggcattgaccagctttgtgcagaaacaattcagtcatcttctcagaaatggtgctgaaacaactggatattcacatgcaaaaatgaacctcaatccctgcctcatttcatacataaaaattaaagtgaaatagatcatagccctaactgtaagatctaatagtataaaatttccacataaagtaggagaaaatcttttttgaccttgggttagacaaaaatttttagataggaccc

SEQ ID NO: 29968 - DNA, 655 bp, Homo sapiens
ctagagagcccatcccatggagttagttttgcgatacttgtagttctgggctgacatgtgggaaggaattgggaaacaggaaaatgtgcttgtgttgtttattgcagaaatccaagaacggtagcaatgtagttgacgccctcagcctagagtcttctgagagctcaccgtccttggtcattggttctaggagcacaactgggagtaggatgcataggcagtatgcagggccatacagtcaagaccgggactgctcagcctgggcgacagagcgagactctgtctcaaaaaaaaaaaaaaaaattatcagagagaatggtagctcttctctgctcatcgaggcattatctaacagtagccacaagtgccaagcagacattagacatatcctgaataagaatgggtaagtgtgcgtctgggaggagtggtaggggacagagcctttatgttccaattcttgtcagctctgctgctgtctcagagccatctggatgagtgtcccgacaccctctcggatgcagggcaggaccacccagctggtcagactctgatgttgggtagctggcctctgtggggattgtaagtgccctgaggcgctctgtactagaaactgctcttaataataacggtgattattggttgctgcaaagctgtt

SEQ ID NO: 29969 - DNA, 1465 bp, Homo sapiens
caagggcccccagtcccgggtgccgcggggacagtgtagggtcattagctgttgagccgccccgggcgggcccaagcctttggatctcaggtgaccggcacaggcggccgcggggtccggaactgcttgttccggcagtggaagagacgcgccggcgttggccgctgctgctagcagcttgaaccccagggtcgggaccgatgtcggcttgggctgctgccagcctaagcagggccgctgcccgatgcttgctggcacgaggccccggggtcagggcggctcctccgcgcgacccccggccctcccaccccgagccccggggctgcggtgccgctccgggcaggacgctgcactttaccgcggctgtccccgccgggcacaacaagtggtccaaagtcaggcacatcaagggtccgaaggacgtcgaaaggagtcgcatcttctccaaactctgtttgaacatccgcctggcagtgaaagaaggaggccccaaccctgagcacaacagcaacctggccaatatcttagaggtgtgtcgcagcaaacatatgcccaagtcaacgattgagacagcactgaaaatggagaaatccaaggacacttatttgctgtatgagggtcgaggccctggtggctcttctctgctcatcgaggcattatctaacagtagccacaagtgccaagcagacattagacatatcctgaataagaatggaggagtgatggctgtaggagctcgtcactcttttgacaaaaagggggtgattgtggttgaagtggaggacagagagaagaaggctgtgaacctagagcgtgccctggagatggcaatcgaagcaggagctgaggatgtcaaggaaactgaagatgaagaagaaaggaacgtttttaaatttatttgtgatgcctcttcactgcaccaagtgaggaagaagctggactccctgggcctgtgttctgtgtcctgtgcactagagttcatccccaactcaaaggtgcagctggctgagcccgacctggaacaggccgcacatctcattcaggctctcagcaaccacgaggatgtgattcacgtctatgataacattgaataaccaggctacatgtgcccccgggttccttcctagaaatgtggcagcccattccagcacacaggcttctgcagcaatctctgagggtaaagccggtgggaggctcagcaggccaggaggcccaaggacaggacttgcgaccttgaagccaaaggaatctcacttgtggggcctccttgtcagctctgctgctgtctcagagccatctggatgagtgtcccgacaccctctcggatgcagggcaggaccacccagctggtcagactctgatgttgggtagctggcctctgtggggattgtaagtgccctgaggcgctctgtactagaaactgctcttaataataacggtgattattggttgctgcaaagctgtt

SEQ ID NO: 29970 - DNA, 1283 bp, Homo sapiens
ctgtgcaattcgggtgagttccttcacccttctgagccatcccttggctcgtctggaaaatgcaaaaaaaaaaaaaagaaaaacaccaggtttttgcatcctcctggatgagggatataaagtgcctgacacagcatatgacagggatttgataaatgggggctgttagctgtcccattgtggatgtgagaatagcattctgctggctaaaaggcagacatgaatgttctagaacatggcgatcccggaatgtgcagtgaaggcaggaagaggaagaatgggcagggaagaacaagttgggatggaggaatgaactcttatctccagaagcagagctaagaatgcccacggagccttggcacatgacagcctccgctgagccaaatggcccaaagacttctgaatgagcttttgctgcaacaaaaaactttggatcattttgagagcctcccgtgaggtgccaatatgttgcagtaccttcccggccccgacactgatgtgattcatcgtaggtaacatatgaataagaatggaggagtgatggctgtaggagctcgtcactcttttgacaaaaagggggtgattgtggttgaagtggaggacagagagaagaaggctgtgaacctagagcgtgccctggagatggcaatcgaagcaggagctgaggatgtcaaggaaactgaagatgaagaagaaaggaacgtttttaaatttatttgtgatgcctcttcactgcaccaagtgaggaagaagctggactccctgggcctgtgttctgtgtcctgtgcactagagttcatccccaactcaaaggtgcagctggctgagcccgacctggaacaggccgcacatctcattcaggctctcagcaaccacgaggatgtgattcacgtctatgataacattgaataaccaggctacatgtgcccccgggttccttcctagaaatgtggcagcccattccagcacacaggcttctgcagcaatctctgagggtaaagccggtgggaggctcagcaggccaggaggcccaaggacaggacttgcgaccttgaagccaaaggaatctcacttgtggggcctccttgtcagctctgctgctgtctcagagccatctggatgagtgtcccgacaccctctcggatgcagggcaggaccacccagctggtcagactctgatgttgggtagctggcctctgtggggattgtaagtgccctgaggcgctctgtactagaaactgctcttaataataacggtgattattggttgctgcaaagctgtt

SEQ ID NO: 29971 - DNA, 679 bp, Homo sapiens
caagggcccccagtcccgggtgccgcggggacagtgtagggtcattagctgttgagccgccccgggcgggcccaagcctttggatctcaggtgaccggcacaggcggccgcggggtccggaactgcttgttccggcagtggaagagacgcgccggcgttggccgctgctgctagcagcttgaaccccagggtcgggaccgatgtcggcttgggctgctgccagcctaagcagggccgctgcccgatgcttgctggcacgaggccccggggtcagggcggctcctccgcgcgacccccggccctcccaccccgagccccggggctgcggtgccgctccgggcaggacgctgcactttaccgcggctgtccccgccgggcacaacaagtggtccaaagtcaggcacatcaagggtccgaaggacgtcgaaaggagtcgcatcttctccaaactctgtttgaacatccgcctggcagtgaaagcttgtcagctctgctgctgtctcagagccatctggatgagtgtcccgacaccctctcggatgcagggcaggaccacccagctggtcagactctgatgttgggtagctggcctctgtggggattgtaagtgccctgaggcgctctgtactagaaactgctcttaataataacggtgattattggttgctgcaaagctgtt

SEQ ID NO: 29972 - DNA, 741 bp, Homo sapiens
caagggcccccagtcccgggtgccgcggggacagtgtagggtcattagctgttgagccgccccgggcgggcccaagcctttggatctcaggtgaccggcacaggcggccgcggggtccggaactgcttgttccggcagtggaagagacgcgccggcgttggccgctgctgctagcagcttgaaccccagggtcgggaccgatgtcggcttgggctgctgccagcctaagcagggccgctgcccgatgcttgctggcacgaggccccggggtcagggcggctcctccgcgcgacccccggccctcccaccccgagccccggggctgcggtgccgctccgggcaggacgctgcactttaccgcggctgtccccgccgggcacaacaagtggtccaaagtcaggcacatcaagggtccgaaggacgtcgaaaggagtcgcatcttctccaaactctgtttgaacatccgcctggcagtgaaagcaggaggcccaaggacaggacttgcgaccttgaagccaaaggaatctcacttgtggggcctccttgtcagctctgctgctgtctcagagccatctggatgagtgtcccgacaccctctcggatgcagggcaggaccacccagctggtcagactctgatgttgggtagctggcctctgtggggattgtaagtgccctgaggcgctctgtactagaaactgctcttaataataacggtgattattggttgctgcaaagctgtt

SEQ ID NO: 29973 - DNA, 545 bp, Homo sapiens
caaatggaactacactttttaagtgatggatacatgctacttgggggtgggtgggtgtcgggaccgatgtcggcttgggctgctgccagcctaagcagggccgctgcccgatgcttgctggcacgaggccccggggtcagggcggctcctccgcgcgacccccggccctcccaccccgagccccggggctgcggtgccgctccgggcaggacgctgcactttaccgcggctgtccccgccgggcacaacaagtggtccaaagtcaggcacatcaagggtccgaaggacgtcgaaaggagtcgcatcttctccaaactctgtttgaacatccgcctggcagtgaaagcttgtcagctctgctgctgtctcagagccatctggatgagtgtcccgacaccctctcggatgcagggcaggaccacccagctggtcagactctgatgttgggtagctggcctctgtggggattgtaagtgccctgaggcgctctgtactagaaactgctcttaataataacggtgattattggttgctgcaaagctgtt

SEQ ID NO: 29974 - DNA, 477 bp, Homo sapiens
  misc_feature (98)..(98): n is a, c, g, or t
  misc_feature (193)..(193): n is a, c, g, or t
tcacaatacttttaacttagggagtttggggccacatggaaaataagtggaagttgttctgaaataagcccccggtgattttccgtaatgaaaagganccgagatccttttcttataatgctcagcctcagagataaccattttggaggcaagaaattaataatttagttacaaagtgaagcttcactggtgnataccttatgatgtgaatcacaaggttgatctgatggtgagccatgggtgctcagatggggcaggtatagacagagagaagaaggctgtgaacctagagcgtgccctggagatggcaatcgaagcaggagctgaggatgtcaaggaaactgaagatgaagaagaaaggaacgtttttaaagtaagcatgaaaacatgggtgtttggtgggcttccgggaggaccctgatagatgccttatgcatgcctcttggtttcttccttcatgtgccccagggtataggt

SEQ ID NO: 29975 - DNA, 1285 bp, Homo sapiens
caagggcccccagtcccgggtgccgcggggacagtgtagggtcattagctgttgagccgccccgggcgggcccaagcctttggatctcaggtgaccggcacaggcggccgcggggtccggaactgcttgttccggcagtggaagagacgcgccggcgttggccgctgctgcactttaccgcggctgtccccgccgggcacaacaagtggtccaaagtcaggcacatcaagggtccgaaggacgtcgaaaggagtcgcatcttctccaaactctgtttgaacatccgcctggcagtgaaagaaggaggccccaaccctgagcacaacagcaacctggccaatatcttagaggtgtgtcgcagcaaacatatgcccaagtcaacgattgagacagcactgaaaatggagaaatccaaggacacttatttgctgtatgagggtcgaggccctggtggctcttctctgctcatcgaggcattatctaacagtagccacaagtgccaagcagacattagacatatcctgaataagaatggaggagtgatggctgtaggagctcgtcactcttttgacaaaaagggggtgattgtggttgaagtggaggacagagagaagaaggctgtgaacctagagcgtgccctggagatggcaatcgaagcaggagctgaggatgtcaaggaaactgaagatgaagaagaaaggaacgtttttaaatttatttgtgatgcctcttcactgcaccaagtgaggaagaagctggactccctgggcctgtgttctgtgtcctgtgcactagagttcatccccaactcaaaggtgcagctggctgagcccgacctggaacaggccgcacatctcattcaggctctcagcaaccacgaggatgtgattcacgtctatgataacattgaataaccaggctacatgtgcccccgggttccttcctagaaatgtggcagcccattccagcacacaggcttctgcagcaatctctgagggtaaagccggtgggaggctcagcaggccaggaggcccaaggacaggacttgcgaccttgaagccaaaggaatctcacttgtggggcctccttgtcagctctgctgctgtctcagagccatctggatgagtgtcccgacaccctctcggatgcagggcaggaccacccagctggtcagactctgatgttgggtagctggcctctgtggggattgtaagtgccctgaggcgctctgtactagaaactgctcttaataataacggtgattattggttgctgcaaagctgtt

SEQ ID NO: 29976 - DNA, 1259 bp, Homo sapiens
caagggcccccagtcccgggtgccgcggggacagtgtagggtcattagctgttgagccgccccgggcgggcccaagcctttggatctcaggtgaccggcacaggcggccgcggggtccggaactgcttgttccggcagtggaagagacgcgccggcgttggccgctgctgctagcagcttgaaccccaggtcaggcacatcaagggtccgaaggacgtcgaaaggagtcgcatcttctccaaactctgtttgaacatccgcctggcagtgaaagaaggaggccccaaccctgagcacaacagcaacctggccaatatcttagaggtgtgtcgcagcaaacatatgcccaagtcaacgattgagacagcactgaaaatggagaaatccaaggacacttatttgctgtatgagggtcgaggccctggtggctcttctctgctcatcgaggcattatctaacagtagccacaagtgccaagcagacattagacatatcctgaataagaatggaggagtgatggctgtaggagctcgtcactcttttgacaaaaagggggtgattgtggttgaagtggaggacagagagaagaaggctgtgaacctagagcgtgccctggagatggcaatcgaagcaggagctgaggatgtcaaggaaactgaagatgaagaagaaaggaacgtttttaaatttatttgtgatgcctcttcactgcaccaagtgaggaagaagctggactccctgggcctgtgttctgtgtcctgtgcactagagttcatccccaactcaaaggtgcagctggctgagcccgacctggaacaggccgcacatctcattcaggctctcagcaaccacgaggatgtgattcacgtctatgataacattgaataaccaggctacatgtgcccccgggttccttcctagaaatgtggcagcccattccagcacacaggcttctgcagcaatctctgagggtaaagccggtgggaggctcagcaggccaggaggcccaaggacaggacttgcgaccttgaagccaaaggaatctcacttgtggggcctccttgtcagctctgctgctgtctcagagccatctggatgagtgtcccgacaccctctcggatgcagggcaggaccacccagctggtcagactctgatgttgggtagctggcctctgtggggattgtaagtgccctgaggcgctctgtactagaaactgctcttaataataacggtgattattggttgctgcaaagctgtt

SEQ ID NO: 29977 - DNA, 1153 bp, Homo sapiens
ctagagagcccatcccatggagttagttttgcgatacttgtagttctgggctgacatgtgggaaggaattgggaaacaggaaaatgtgcttgtgttgtttattgcagaaatccaagaacggtagcaatgtagttgacgccctcagcctagagtcttctgagagctcaccgtccttggtcattggttctaggagcacaactgggagtaggatgcataggcagtatgcagggccatacagtcaagaccgggactgctcagcctgggcgacagagcgagactctgtctcaaaaaaaaaaaaaaaaattatcagagagaatggtagctcttctctgctcatcgaggcattatctaacagtagccacaagtgccaagcagacattagacatatcctgaataagaatggaggagtgatggctgtaggagctcgtcactcttttgacaaaaagggggtgattgtggttgaagtggaggacagagagaagaaggctgtgaacctagagcgtgccctggagatggcaatcgaagcaggagctgaggatgtcaaggaaactgaagatgaagaagaaaggaacgtttttaaatttatttgtgatgcctcttcactgcaccaagtgaggaagaagctggactccctgggcctgtgttctgtgtcctgtgcactagagttcatccccaactcaaaggtgcagctggctgagcccgacctggaacaggccgcacatctcattcaggctctcagcaaccacgaggatgtgattcacgtctatgataacattgaataaccaggctacatgtgcccccgggttccttcctagaaatgtggcagcccattccagcacacaggcttctgcagcaatctctgagggtaaagccggtgggaggctcagcaggccaggaggcccaaggacaggacttgcgaccttgaagccaaaggaatctcacttgtggggcctccttgtcagctctgctgctgtctcagagccatctggatgagtgtcccgacaccctctcggatgcagggcaggaccacccagctggtcagactctgatgttgggtagctggcctctgtggggattgtaagtgccctgaggcgctctgtactagaaactgctcttaataataacggtgattattggttgctgcaaagctgtt

SEQ ID NO: 29978 - DNA, 929 bp, Homo sapiens
caagggcccccagtcccgggtgccgcggggacagtgtagggtcattagctgttgagccgccccgggcgggcccaagcctttggatctcaggtgaccggcacaggcggccgcggggtccggaactgcttgttccggcagtggaagagacgcgccggcgttggccgctgctgctagcagcttgaaccccagggtcgggaccgatgtcggcttgggctgctgccagcctaagcagggccgctgcccgatgcttgctggcacgaggccccggggtcagggcggctcctccgcgcgacccccggccctcccaccccgagccccggggctgcggtgccgctccgggcaggacgctgcactttaccgcggctgtccccgccgggcacaacaagtggtccaaagtcaggcacatcaagggtccgaaggacgtcgaaaggagtcgcatcttctccaaactctgtttgaacatccgcctggcagtgaaagaaggaggccccaaccctgagcacaacagcaacctggccaatatcttagaggtgtgtcgcagcaaacatatgcccaagtcaacgattgagacagcactgaaaatggagaaatccaaggacacttatttgctgtatgagggtcgaggccctggtggctcttctctgctcatcgaggcattatctaacagtagccacaagtgccaagcagacttgcgaccttgaagccaaaggaatctcacttgtggggcctccttgtcagctctgctgctgtctcagagccatctggatgagtgtcccgacaccctctcggatgcagggcaggaccacccagctggtcagactctgatgttgggtagctggcctctgtggggattgtaagtgccctgaggcgctctgtactagaaactgctcttaataataacggtgattattggttgctgcaaagctgtt

SEQ ID NO: 29979 - DNA, 749 bp, Homo sapiens
caagggcccccagtcccgggtgccgcggggacagtgtagggtcattagctgttgagccgccccgggcgggcccaagcctttggatctcaggtgaccggcacaggcggccgcggggtccggaactgcttgttccggcagtggaagagacgcgccggcgttggccgctgctgcactttaccgcggctgtccccgccgggcacaacaagtggtccaaagtcaggcacatcaagggtccgaaggacgtcgaaaggagtcgcatcttctccaaactctgtttgaacatccgcctggcagtgaaagaaggaggccccaaccctgagcacaacagcaacctggccaatatcttagaggtgtgtcgcagcaaacatatgcccaagtcaacgattgagacagcactgaaaatggagaaatccaaggacacttatttgctgtatgagggtcgaggccctggtggctcttctctgctcatcgaggcattatctaacagtagccacaagtgccaagcagacttgcgaccttgaagccaaaggaatctcacttgtggggcctccttgtcagctctgctgctgtctcagagccatctggatgagtgtcccgacaccctctcggatgcagggcaggaccacccagctggtcagactctgatgttgggtagctggcctctgtggggattgtaagtgccctgaggcgctctgtactagaaactgctcttaataataacggtgattattggttgctgcaaagctgtt

SEQ ID NO: 29980 - DNA, 625 bp, Homo sapiens
cgcggggacagtgtagggtcattagctgttgagccgccccgggcgggcccaagcctttggatctcaggtgaccggcacaggcggccgcggggtccggaactgcttgttccggcagtggaagagacgcgccggcgttggccgctgctgctagcagcttgaaccccagggtcgggaccgatgtcggcttgggctgctgccagcctaagcagggccgctgcccgatgcttgctggcacgaggccccggggtcagggcggctcctccgcgcgacccccggccctcccaccccgagccccggggctgcggtgccgctccgggcaggacgctgcactttaccgcggctgtccccgccgggcacaacaagtggtccaaagtcaggcacatcaagggtccgaaggacgtcgaaaggagtcgcatcttctccaaactctgtttgaacatccgcctggcagtgaaagaaaggtgagaccctgacggtcacccagcactggctgccgctgccctctcagtgcccgcagcctcgcttgcctctcggaattgggcccacctagatctccggcccttcactttgttttccttccccagtacccaccattgcccacctcataaatcctcaaaacacctac

SEQ ID NO: 29981 - DNA, 246 bp, Homo sapiens
tcaaagcatttccttgaacaatggaagccaagataaatctacttatgctaagaaacaatagaaatgaaatttccactgggatcaagttcaacacagcttattagcatccctttcatgctaggtatttggcttagatatcaggttaggggttaggagaagagagtccatgaccattatactaaacatgaacgttcaccagagagtcatcaacttgtgttttacttcttcaaatgctctttctcattc

SEQ ID NO: 29982 - DNA, 459 bp, Homo sapiens
gaaccttccaagtcagggcttggcaatacatatttgacctatgaaactgttggtcaggtgagtcttgacatgaatttgtcagtaatcctcatctcatctgggtctctcctcttgcatgagtcagaagcctctgagggcagagccaccctatcaggcatctagaggttaccatgcaaattgaagacatgtgtccctgtccctgtgagctgactgtgagaggctgggtgctcacttctccatggccagtgctgggctcacatttggagactggcattctcaagcctaaatcagacctcagaaaggtgaagtatttacttcttctctgtggactgctggatacatagataatcattctttagtaaacattgtatgagtacaaaaacacacagaggcacgcagacagacagaaacacacacattccatagggccagccaaatttaaaagattagcctctctga

SEQ ID NO: 29983 - DNA, 503 bp, Homo sapiens
tttttttttttctccatgataaatgactctcaacttcttttccctcatttaattgcttatctacatacaatgcctggaaggaaataaatgtaatggcccgtagcagttggccttcaggtatcaagtttaagtccctttaagcagaacagcaaattgagcacagaatgaactggtttcatggtagcgtactgcaattagatgcaagaatagggaaagcagggtgcttcaattggtgacacaattagtatagcactgggggacttctctttccacttcttcaactccgcctgcattccgctggctgaagagttgatgacatccctgaaaaatcttccctctcttgtttctctgatgccacctctgtgttctccggcctcactggccacacttcctttacctcccaaacttttaactctgagtgtcccaaacttgtctcatcacctacccctgcttgcccagctccccagcctgtttccccttctgacacgggcactctccttctg

SEQ ID NO: 29984 - DNA, 1263 bp, Homo sapiens
aacatcctcagaatttctgtcttaggaggaagaccatcttataatgaagccattagtgcttttcctgtgtactagaaaatgggctaaggtctttgcatcttttactcattccatcctctccacaaccatagccctattattcttattttacaaagaagaaaactggggcttagagatgtgaagtcacttgtccaagatcacacagttaggaagcggtgaaggtaaggattggaatttcgttctgactcctaagccactgcactcaactggtgctcaattaaagatgtgattccaacttctgttttaatctacaaaaaggatagagtcttcgccatctaacttgggtgtccaatggtttctattagggccttttgtggctctttatttggttctaaaatgatgtaaggacaatctctgctctgtctacttgaaaatattcactaagccaatcattaatgggaaccaagttctagaggaaacttttaatctttttaaagggcagaaccactttcaaacactttaccagcacttccttttacatactagcaattaatgtgcacatcacaggcaaactcttgctaattcattgaatcagagatgaggaacagctgtttaagaactcagaaagagcacttggtttgtgtttgagaatgtacttaaaatttaaaggatagtcttgccttaaaaatattccataaccctgtctcttccatctcctcacttgtctagagtggtagagttctataaatatgcttccacttaaactttctttataaaacaatggagggaagaaataatagatgttttaaaatcctcagtttaaactcagctttcctttttttgcctcgagttacgagcctatgagagctgccatgggttgataagtttgaaatggtgaaaattaaactgaataaatgaaagaacccttagtgatttagcttagttctattctcagcaaaatctcagctaaatcactaactggctctaccctcttaggtgagtcacttgtcctttctagtcttccgatgcctcaactttgcatgcaggaggttgcactggattaattcttctctctctctttttttttttttctttccaagacagtcttgcactcttgcccaggttggagtgcagtggtgtgatcttggctcgctgcaacctccaccccccaggagaatctcttgaatccaggaggcggggttgcagtgaaccgagatcatgccattgcactccagcctcggccacaagagtgaaactccatct

SEQ ID NO: 29985 - DNA, 506 bp, Homo sapiens
gggaagtttagtggaaatattgctaggcaacataaagagcctacttgagattcgtggtcatgagttgaaggagaccagacagcaagattgtgtatgagggcacccacagagtaaatggagagttgaaattaatgcagttgtgattttaccacgtggatatgaagaagtgagggggagaagtacaaaggagttctcttaatgattgaccatggaatttaagctggctaagaaaggaagtgagaggccgggcgcggtggctcacgcctgtaatcccagcactttgggagactgaggtgggtggattacctgaggtcaggagtttgagaccaacctggccgatatggcgaaaccccatctctaataaaaatacagaaaaattagccgggaatggtggcaggtgcctgtaatcccagctactcaagaggctgtggcaggagtatcccttggacccaggaggtggaggttgcagtgagccgagatcacgccactgtactccagcctggacg

SEQ ID NO: 29986 - DNA, 405 bp, Homo sapiens
  misc_feature (124)..(124): n is a, c, g, or t
  misc_feature (395)..(395): n is a, c, g, or t
atgaaatcactgacttggatcttgggcctttgggctcttgcagcgtgtttcacacctggtgagagtcaaagaggccccaggggaccatatccacctggaccactggctcctcctcctccaccangttttccttttggaacaggatttgttccaccaccccatcctccaccctatggtccagggagatttccaccacccctttctccaccctatggtccagggagaatcccaccatcccctcctccaccctatggtccagggagaattcaatcacactctcttcctcctccttatggcccaggttatccacagccaccttcccaaccaagaccctatccacctggacctccatttttccctgtaaattctccaactgatcctgccctccctactcntgcaccctaa

SEQ ID NO: 29987 - DNA, 520 bp, Homo sapiens
gaggaattccccgccaagttgaaaagttgaacctgcctcccaaactttctcctgtagtccagacggggacgccctgagggagcgtttgtgtcagtaatgggaaatctgcaagctagacggaaatgacctgctagtgattgcgctgtaaagaagccggaatccacctcttgaaggcatgaagttcaggtgctggacactttttgattgtctttcgctcatacaaaaaaaaaaatgaaccactggacacaatggcttctgctagtaatcccaacactttgggaggctgagacaggaggatcgcttgaggccaggagtcagagacaaacctgggcaacatagtgtgattccatctttacaaaaaaaaaaattttaacttagctgggcatggttgtgtacacctgtagtcccagctatatgggaggttgagatggaaggattggttaagcccaggagtttgaatttgcagtgaactatgggtcgtgccacagcactccagcctggatgacagagtgagactctg

SEQ ID NO: 29988 - DNA, 1002 bp, Homo sapiens
  misc_feature (111)..(111): n is a, c, g, or t
atggagtcctcaggcaacccagagagcaccacctttttttactatgaccttcagagccagccgtgtgagaaccaggcctgggtctttgctaccctcgccaccactgtcctntactgcctggtgtttctcctcagcctagtgggcaacagcctggtcctgtgggtcctggtgaagtatgagagcctggagtccctcaccaacatcttcatcctcaacctgtgcctctcagacctggtgttcgcctgcttgttgcctgtgtggatctccccataccactggggctgggtgctgggagacttcctctgcaaactcctcaatatgatcttctccatcagcctctacagcagcatcttcttcctgaccatcatgaccatccaccgctacctgtcggtagtgagccccctctccaccctgcgcgtccccaccctccgctgccgggtgctggtgaccatggctgtgtgggtagccagcatcctgtcctccatcctcgacaccatcttccacaaggtgctttcttcgggctgtgattattccgaactcacgtggtacctcacctccgtctaccagcacaacctcttcttcctgctgtccctggggattatcctgttctgctacgtggagatcctcaggaccctgttccgctcacgctccaagcggcgccaccgcacggtcaagctcatcttcgccatcgtggtggcctacttcctcagctggggtccctacaacttcaccctgtttctgcagacgctgtttcggacccagatcatccggagctgcgaggccaaacagcagctagaatacgccctgctcatctgccgcaacctcgccttctcccactgctgctttaacccggtgctctatgtcttcgtgggggtcaagttccgcacacacctgaaacatgttctccggcagttctggttctgccggctgcaggcacccagcccagcctcgatcccccactcccctggtgccttcgcctatgagggcgcctccttctactga

SEQ ID NO: 29989 - DNA, 436 bp, Homo sapiens
agtgacgacctagaaaaggccattgaatttcataattacttagagctattcccaaatacaatggaattccttacttagaggtaaaatcctatacaggccagaaagtctggctacagagtccacgtttaagaactattccagtcttcatttccatgatacacacaatatcatttaagattaatggagaggaaattcatgcattgtgcacagcaggaatttttccattccagcagttacatgaaaaagtccgaagattaaaaaagaaatgtggggggaaaaaaaggtggcaagagatacaatttcacctaattcattagtagaccacatagagaaggggaagtagctccagtgaaaagtttaatgttttcacttcaaaaaagctaaagaataccacctcccctgactcccacccaatacagagtaggtaaaaaacaaa

SEQ ID NO: 29990 - DNA, 537 bp, Homo sapiens
gccagtagcgtggctcagtccaagtctgcaagcctcagaaccagggacgccactgggataattctcagtccaaggctgaagagcctagagttttgatatccaaagggcaggagaaggagaatcttccagctccaggagagacagagacagaaagaggaaaattttctcctcttttgtttttattcaagccgtgaaccaattgcatactgccacccacattgagagcggatcttccccactcagtccactgactcccacgccaatctcctctggaaacaccctcacagacacacccagaagtcatgtttcaccattctctaggtattccttactccagtccagctgccacctaacattaaccagcagcacacatccacgctgccagacattcgtcagttgcagttcaggttttcccacccaggtgctgattccagggaaggtttctgctctggcaaatcatgattctctgtatctacctttctgcctctccagtttgggggcagcaggttaccctgtgacctaattttctgatgaact

SEQ ID NO: 29991 - DNA, 346 bp, Homo sapiens
tttttttttgagacagagtcttgctttgttgcccaagctggtgtacattggtacaatcacagctcatagcagccttgacctcttggactcaagtgatcctcctgcctcagcctcccagggactacaggcacgccctactacgcctagctattgtttttgtttgtttgttttagtacagataagccttgttatgttgcccaggctggtctcgaactcctggggtcaagtgatcctcccagcttggctgcccaaagtactgggattacaggtgtaagccaccccacctggcctggatatttatattgtctcttttaagaggtcacaaagaacataaaaattggggaat

SEQ ID NO: 29992 - DNA, 660 bp, Homo sapiens
ttaaaaataattatggtttttgattatataactaatcaacaaacatacaaaacctatattcattctcagttgtaatggaaatccaaaataaaacaacattaagacacattttttttactggtataaatagtatttttctaattgataatattcaatgtaaatgcaaagatggtacagtgtagagtttctgtttggataattgggtggtcattacttttatcttcttgattttatttttttaaatgtctttaatggtgattttttttacttttataattaaaaaaattaaaagtgacaacatatatgtatagtaattaagaaaaatatcttctcgaattggggcgaatttgtaatcctatacactgggccaactggcatcagaacttccacggactgttgttaaagaatctgctcaaaaacagtgagatttttcagtgaagaaggcttatttccatctatcaggatctgctgaggcagcagaacagagaactatctgttgtcaatcagttcaaaatacttaataacaaaataggtgttatacagctatcatgagtcaaaggcagaattttttatagaaaagaacacactataatgattgaaacatgcatattcagcagagatttactccacagaattctaggcagcaggattaaaaaaaaa

SEQ ID NO: 29993 - DNA, 890 bp, Homo sapiens
cagatagtaacttcttatcaactttaaatactactagtatcttttcctaatttgtcatctgtgcattttgcctgtaaaatgtctaagtttgatgaagtcaaaatgtaggattttttttttcctaaaagatatatgcgctctttcccttcggtgtgccactgaagatcctggtgttgccatgggccgccgccccgcctgttgttaccggtattgtaagaacaagccgtacccaaagtctcgcttctgccgaggtgtccctgatgccaagattcgcatttttgacctggggcggaaaaaggcaaaagtggatgagtttccgctttgtggccacatggtgtcagatgaatatgagcagctgtcctctgaagcctggaggctgcccgaatttgtgccaataagtacatggtaaaaagttgtggcaaagatggcttccatatccgggtgcggctccaccctttccacgtcatccgcatcaacaagatgttgtcctgtgctggggctgacaggctccaaacaggcatgcgaggtgcctttggaaagccccagggcactgtggccagggttcacattggccaagttatcatgtccatccgcaccaagctgcagaacaaggagcatgtgattgaggccctgcgcagggccaagttcaagtttcctggccgccagaagatccacatctcaaagaagtggggcttcaccaagttcaatgctgatgaatttgaagacatggtggctgaaaagcggctcatcccagatggctgtggggtcaagtacatccccagtcgtggccctctggacaagtggcgggccctgcactcatgagggcttccaatgtgctgcccccctcttaatactcaccaataaattctacttcctgtccaaaaaaaaaa

SEQ ID NO: 29994 - DNA, 488 bp, Homo sapiens
agaatcgagccggtacccccgactagcccgacagtccgggtgcggctccaccctttccacgtcatccgcatcaacaagatgttgtcctgtgctggggctgacaggctccaaacaggcatgcgaggtgcctttggaaagccccagggcactgtggccagggttcacattggccaagttatcatgtccatccgcaccaagctgcagaacaaggagcatgtgattgaggccctgcgcagggccaagttcaagtttcctggccgccagaagatccacatctcaaagaagtggggcttcaccaagttcaatgctgatgaatttgaagacatggtggctgaaaagcggctcatcccagatggctgtggggtcaagtacatccccagtcgtggccctctggacaagtggcgggccctgcactcatgagggcttccaatgtgctgcccccctcttaatactcaccaataaattctacttcctgtccaaaaaaaaaa

SEQ ID NO: 29995 - DNA, 455 bp, Homo sapiens
tcccgtaagggaaagttgaaaagaactttgaagagagagttcaagatgttgtcctgtgctggggctgacaggctccaaacaggcatgcgaggtgcctttggaaagccccagggcactgtggccagggttcacattggccaagttatcatgtccatccgcaccaagctgcagaacaaggagcatgtgattgaggccctgcgcagggccaagttcaagtttcctggccgccagaagatccacatctcaaagaagtggggcttcaccaagttcaatgctgatgaatttgaagacatggtggctgaaaagcggctcatcccagatggctgtggggtcaagtacatccccagtcgtggccctctggacaagtggcgggccctgcactcatgagggcttccaatgtgctgcccccctcttaatactcaccaataaattctacttcctgtccaaaaaaaaaa

SEQ ID NO: 29996 - DNA, 729 bp, Homo sapiens
cagatagtaacttcttatcaactttaaatactactagtatcttttcctaatttgtcatctgtgcattttgcctgtaaaatgtctaagtttgatgaagtcaaaatgtaggattttttttttcctaaaagatatatgcgctctttcccttcggtgtgccactgaagatcctggtgttgccatgggccgccgccccgcctgttgttaccggtattgtaagaacaagccgtacccaaagtctcgcttctgccgaggtgtccctgatgccaagattcgcatttttgacctggggcggaaaaaggcaaaagtggatgagtttccgctttgtggccacatggtgtcagatgaatatgagcagctgtcctctgaagcctggaggctgcccgaatttgtgccaataagtacatggtaaaaagttgtggcaaagatggcttccatatccgggtgcggctccaccctttccacgtcatccgcatcaacaagatgttgtcctgtgctggggctgacagagatccacatctcaaagaagtggggcttcaccaagttcaatgctgatgaatttgaagacatggtggctgaaaagcggctcatcccagatggctgtggggtcaagtacatccccagtcgtggccctctggacaagtggcgggccctgcactcatgagggcttccaatgtgctgcccccctcttaatactcaccaataaattctacttcctgtccaaaaaaaaaa

SEQ ID NO: 29997 - DNA, 964 bp, Homo sapiens
cagatagtaacttcttatcaactttaaatactactagtatcttttcctaatttgtcatctgtgcattttgcctgtaaaatgtctaagtttgatgaagtcaaaatgtaggattttttttttcctaaaagatatatgcgctctttcccttcggtgtgccactgaagatcctggtgttgccatgggccgccgccccgcctgttgttaccggtattgtaagaacaagccgtacccaaagtctcgcttctgccgaggtgtccctgatgccaagattcgcatttttgacctggggcggaaaaaggcaaaagtggatgagtttccgctttgtggccacatggtgtcagatgaatatgagcagctgtcctctgaagcctggaggctgcccgaatttgtgccaataagtacatggtaaaaagttgtggcaaagatggcttccatatccgggtgcggctccaccctttccacgtcatccgcatcaacaagatgttgtcctgtgctggggctgacaggctccaaacaggcatgcgaggtgcctttggaaagccccagggcactgtggccagggttcacattggccaagttatcatgtccatccgcaccaagctgcagaacaaggagcatgtgattgaggccctgcgcagggccaagttcaagtttcctggccgccagaaggtatgtagtgctgcagcccccttctcccacctttgccccagcctcctgactcagttctttccattgctccttagatccacatctcaaagaagtggggcttcaccaagttcaatgctgatgaatttgaagacatggtggctgaaaagcggctcatcccagatggctgtggggtcaagtacatccccagtcgtggccctctggacaagtggcgggccctgcactcatgagggcttccaatgtgctgcccccctcttaatactcaccaataaattctacttcctgtccaaaaaaaaaa

SEQ ID NO: 29998 - DNA, 357 bp, Homo sapiens
gctcaatcaacatttctggctgggctatctgatgtctgccgtgtgattcaaaggtgattcgaggtgaccctgaggatggcaggggtccagggagggtggagacccatgccatcctacaccctgctctcacctagtgcagcctcggccccttcctgtggagagggacagggacaggactcggtgcaggtgtgcagtgagtggctggcatctctggaggtcagtatgtgagggtgggggtcccctccaggcagctgcgagggcttggctgctcccagaactgcctggaacctggggagactgtaaacaacctcttgcaaccccaagaataaagctgccatgtgtgagggcttgctctga

SEQ ID NO: 29999 - DNA, 1203 bp, Homo sapiens
tgtccaataattctatcaattgctgagataaggctgttaaaacccacaactataatttattattttttagttctataatttttctcttcatgttgtttaagactttgttatttggtgcatatatatttggaattgttatgtttactggtgaattgatccatttattattagtgttgcagtctcctcactccttaatttagtgaggtccaagatcttgtcccacaaccaagagaataaggcacacaaataccagagagtgagtaaggcaaattaacattcattaaggcaacagaaaagctctcaggcaggcaagagtgggacccaaacaaggggttgccaggaaatgggggctggagttctgatccctttatgtgacagaaacaaggaagtcctttgtgggtcctgccttaatggaaggggtaaaattccctgctgggagtgttctgtctgtgcatacctaggtttggcagcagtgactccatcttgattattagtcataagtgcctaagcaaaattcatgggggcaccaaaactgcaatgctaatgatattacaattagctctgggtcaagttaaggacatttagttgatttattgaaacataattgggacagtcccttctgagagacatcttggtataagaggaagttgttaaccacatttccacattctagctacaccacaaaggtagtgcaggtgcattcccatgggtgctgtctttctcccaagacccttcctctctatctgcctagccagcctctaactgcctcctctgttgttagtaatgttctttgtaagattttttgaatctaacttctagattatcagatattaatatagccacttttgcccttttattgataaatatttccatggtatgtatttttatattattttactttcaacatactgatactattgaattaaaagtgtatttcttactatagcaatagttaaggttgcattttttaatttattcagctaatttctcttttgattggtgtatttatgtcacttatatttaatgtaattattaatgtactaacacctaagcatttcattttattatttactacatattcatttgttttgttctcatttttcagttttcctttttttttggacttactgtgtgctactcgagctttcatgttgctttacttacaatgtttgaatacatctacaatatacaatctttgctttg

SEQ ID NO: 30000 - DNA, 1239 bp, Homo sapiens
atgggcagcccctggaacggcagcgacggccccgagggggcgcgggagccgccgtggcccgcgctgccgccttgcgacgagcgccgctgctcgccctttcccctgggggcgctggtgccggtgaccgctgtgtgcctgtgcctgttcgtcgtcggggtgagcggcaacgtggtgaccgtgatgctgatcgggcgctaccgggacatgcggaccaccaccaacttgtacctgggcagcatggccgtgtccgacctactcatcctgctcgggctgccgttcgacctgtaccgcctctggcgctcgcggccctgggtgttcgggccgctgctctgccgcctgtccctctacgtgggcgagggctgcacctacgccacgctgctgcacatgaccgcgctcagcgtcgagcgctacctggccatctgccgcccgctccgcgcccgcgtcttggtcacccggcgccgcgtccgcgcgctcatcgctgtgctctgggccgtggcgctgctctctgccggtcccttcttgttcctggtgggcgtcgagcaggaccccggcatctccgtagtcccgggcctcaatggcaccgcgcggatcgcctcctcgcctctcgcctcgtcgccgcctctctggctctcgcgggcgccaccgccgtccccgccgtcggggcccgagaccgcggaggccgcggcgctgttcagccgcgaatgccggccgagccccgcgcagctgggcgcgctgcgtgtcatgctgtgggtcaccaccgcctacttcttcctgccctttctgtgcctcagcatcctctacgggctcatcgggcgggagctgtggagcagccggcggccgctgcgaggcccggccgcctcggggcgggagagaggccaccggcagaccgtccgcgtcctgctggtggtggttctggcatttataatttgctggttgcccttccacgttggcagaatcatttacataaacacggaagattcgcggatgatgtacttctctcagtactttaacatcgtcgctctgcaacttttctatctgagcgcatctatcaacccaatcctctacaacctcatttcaaagaagtacagagcggcggcctttaaactgctgctcgcaaggaagtccaggccgagaggcttccacagaagcagggacactgcgggggaagttgcaggggacactggaggagacacggtgggctacaccgagacaagcgctaacgtgaagacgatgggataa

SEQ ID NO: 30001 - DNA, 1424 bp, Homo sapiens
atgggcagcccctggaacggcagcgacggccccgagggggcgcgggagccgccgtggcccgcgctgccgccttgcgacgagcgccgctgctcgccctttcccctgggggcgctggtgccggtgaccgctgtgtgcctgtgcctgttcgtcgtcggggtgagcggcaacgtggtgaccgtgatgctgatcgggcgctaccgggacatgcggaccaccaccaacttgtacctgggcagcatggccgtgtccgacctactcatcctgctcgggctgccgttcgacctgtaccgcctctggcgctcgcggccctgggtgttcgggccgctgctctgccgcctgtccctctacgtgggcgagggctgcacctacgccacgctgctgcacatgaccgcgctcagcgtcgagcgctacctggccatctgccgcccgctccgcgcccgcgtcttggtcacccggcgccgcgtccgcgcgctcatcgctgtgctctgggccgtggcgctgctctctgccggtcccttcttgttcctggtgggcgtcgagcaggaccccggcatctccgtagtcccgggcctcaatggcaccgcgcggatcgcctcctcgcctctcgcctcgtcgccgcctctctggctctcgcgggcgccaccgccgtccccgccgtcggggcccgagaccgcggaggccgcggcgctgttcagccgcgaatgccggccgagccccgcgcagctgggcgcgctgcgtgtcatgctgtgggtcaccaccgcctacttcttcctgccctttctgtgcctcagcatcctctacgggctcatcgggcgggagctgtggagcagccggcggccgctgcgaggcccggccgcctcggggcgggagagaggccaccggcagaccgtccgcgtcctgcgtaagtggagccgccgtggttccaaagacgcctgcctgcagtccgccccgccggggaccgcgcaaacgctgggtccccttcccctgctcgcccagctctgggcgccgcttccagctccctttcctatttcgattccagcctccacccgccggtacttcccatcccccgagaaaaccatgtcctgtcccccaggagctctgggggaccccagggcgctttgagggtgggatccccggatccgattcagtaaccagcagtgcttttccagagcctctgagaccagaaaggagagttggtaattcttaatccaaccacctgttagatgccacagatgaggagtcctcacagtgctcttgagaagacgagggagatttcattaagctaaaattttttatttaatgttaagtgatgctgaaggctaaagtaaaccttgctcgtatcaaaaagtaaagattgtgcagacctgttgtagaattcttttcaacagagaacagaaaacttgtctccgaagtgggtttgtgga

SEQ ID NO: 30002 - DNA, 461 bp, Homo sapiens
caaatagtgaatgattacactgacaggaacatacttgtggaaaatgtgcctgtgcctgtttttacaaaagaccctttccatggcaacagaaattttcatgtattagttgggaatactctaccctaatcaaaatcagaaactgtctttaccaagtgatgaaaggcagtgatgatagctgagggtgagcacgagatcctgatatatagaaatacttttatgtttggccagataatatgcctccatatgcctctttgagaatggtttggaaatgcttcatcagtcatcgtcagaataactactctacagagaactcagtatttaggaagaagagcaaaaaaaaaaaaaatgtccaccaggtacttcaatgcctattatgttctgggatacaaaatgaatgaggcacacctctgccctcatggagttcacaagccagccaacgcagagagaaagtcatcccccac

SEQ ID NO: 30003 - DNA, 263 bp, Homo sapiens
atgtaaaccttagaaaatctgatgactatgtgttgtattatttagttctagtactgctataaaggaatacctgagactgggtaatttataaagaaaatatgtttaattggcttatggttttataggctgtataggaagcatagcagcttctgctttgggggaggattaagaaaacttacaatcatggtagaaggcaaagtgggagggaagcatgtcacatggatggggcaagaggaaagttgcaggggatgtgctacacattt

SEQ ID NO: 30004 - DNA, 1005 bp, Homo sapiens
aaaaaatatatgtatacatatcatatatatatataaaataaaacttataaatagtttttatggctgggtgaagtgactcatgtctgtaattctagccctttgggaggctgagcgaggaggatcacttgagcctaggcattcgagcccagcctgggcaacattgcaagactctgtctcatttttttatataaaatgtttttttaaaaaaccctatgtataattatttattttttttccccaaggattattcccaaactatgtacaattaatgggttgccttgcagagttggatcaataatacctgacacacttgtatagcaagcatacactttacatagttcctcgcatctattctttgaaacccagacacattctagtattgggcactagaaactggtgataaataataacaattacatatatttcctgaagaattatgtggcattccttgttttaagcacctttgatgccttagctcaatctccattacaatactatgatataagtaccatttaatatttctttttgacagatgggaataatcgaggcctagggagattaaattacttggccaggttcatgtaagtggcagatctaggattcaaattcagccggtctgaatctagagcctattcttttagctatgatgctatactttaatacagtaatacactgttcaaatgaaactgtaacatgtcattaaatttgaacttgtcaataaacataccaagcaataaaataattacagcttgtggaaagtgcttatgaaaacagtaaataagctacttgagaatggtcaaggaaaggtttctttgatgtgctatatgtacattcaacagacacatggaggatgaaaaggaaacagccatgcaaagagttcaggggaaagactggcccaggtgaagagaacgccaagcacaaaaaccctgaaacaggaaaaagtttggtttgacaatggaattgccgaaaggctggtgtgactgaagtattgtgcgtgaaggagta

SEQ ID NO: 30005 - DNA, 611 bp, Homo sapiens
tatcacacaataattccggaatggaaaaaatagcctctggtactgaaaggagattagtggctgcatgggaactgggttggttgggtggagcgagacagctattgactgcagataggcataaggaatcttaccgaagtgatgggaataatcgaggcctagggagattaaattacttggccaggttcatgtaagtggcagatctaggattcaaattcagccggtctgaatctagagcctattcttttagctatgatgctatactttaatacagtaatacactgttcaaatgaaactgtaacatgtcattaaatttgaacttgtcaataaacataccaagcaataaaataattacagcttgtggaaagtgcttatgaaaacagtaaataagctacttgagaatggtcaaggaaaggtttctttgatgtgctatatgtacattcaacagacacatggaggatgaaaaggaaacagccatgcaaagagttcaggggaaagactggcccaggtgaagagaacgccaagcacaaaaaccctgaaacaggaaaaagtttggtttgacaatggaattgccgaaaggctggtgtgactgaagtattgtgcgtgaaggagta

SEQ ID NO: 30006 - DNA, 510 bp, Homo sapiens
gacatgggttagttcagcttgaagagctaggaagaagaaaagaaaggagaagactgaaggtggcccctccagaaacactgcagactgtcagccttgtcaaatgcttgggttcttgcatgaagcgctcccttttccttgtggcttagtggcagcaagtatgaaaaatggaagtattgatggaaaaaatatacattggcagaagatgggtagttggggactctattggttagaaatgcacatgcaaacggctgggcgtggtggctcacacctctaatcctagcactttgggaggccaaggcaggtggatcacttcaggtcaggagtttgagaccagcctggcttctactaaaactacaaaaattagctgggcgttgtgatgtacgcctgtagtcccaactactcaggcttctggggcagaagaagcacttgaacctggtaggtggaggttgcggtgagccgagatcatgccactgtgctccagcctgggtgatagagtgaaactccgtctcg

SEQ ID NO: 30007 - DNA, 930 bp, Homo sapiens
atggggttcgttctcctgaggctctctgcccacccagagctggaaaagacattcttcgtgctcatcctgctgatgtacctcgtgatcctgctgggcaatggggtcctcatcctggtgaccatccttgactcccgcctgcacacgcccatgtacttcttcctagggaacctctccttcctggacatctgcttcactacctcctcagtcccactggtcctggacagctttttgactccccaggaaaccatctccttctcagcctgtgctgtgcagatggcactctcctttgccatggcaggaacagagtgcttgctcctgagcatgatggcatttgatcgctatgtggccatctgcaacccccttaggtactccgtgatcatgagcaaggctgcctacatgcccatggctgccagctcctgggctattggtggtgctgcttccgtggtacacacatccttggcaattcagctgcccttctgtggagacaatgtcatcaaccacttcacctgtgagattctggctgttctaaagttggcctgtgctgacatttccatcaatgtgatcagcatggaggtgacgaatgtgatcttcctaggagtcccggttctgttcatctctttctcctatgtcttcatcatcaccaccatcctgaggatcccctcagctgaggggaggaaaaaggtcttctccacctgctctgcccacctcaccgtggtgatcgtcttctacgggaccttattcttcatgtatgggaagcctaagtctaaggactccatgggagcagacaaagaggatctttcagacaaactcatcccccttttctatggggtggtgaccccgatgctcaaccccatcatctatagcctgaggaacaaggatgtgaaggctgctgtgaggagactgctgagaccaaaaggcttcactcagtga

SEQ ID NO: 30008 - DNA, 307 bp, Homo sapiens
gtatcttcaaaataagccaagcatctgactacttcttatcacctcctctcttgctactctggttctagctgccatcatctctggcttgaatgactgtgataatctcttaactggtaaccctgtttctacttccctaacatcactcattctcaaaagagtgattcgttaaacatgtaagccaggtgatatcattcctttgttgcaaatcctcagtattacctagaataaaagccaaagtccttacagtgatttagaaagctctgcccagtctctgaccctctcccaggcactcaggctccttctgccc

SEQ ID NO: 30009 - DNA, 435 bp, Homo sapiens
tattatgacttacatttctataaaatcacaatcttcagcctctgtgtgcattaatgactttattttttctacctttttaataagcattcactttgttttatgaccctcaactaatataaaaagaaattatcttagtcaggcgcagtggctttatgcctataatcccagcactttggaaggctgaggcaggcagatcagttgagctcaagaattcgagaccagcctggccaacatggtgaaaccctgtctctactaaaactacaaaaacaaaaaaaattagccaggcgtagtggctgtagtcccacctacttgggaggggaaggcagaagaatcgcttgaacctaagaggtgaaggttgcagtgaccctagattgtgccacagcacttcagcctaggtgacatggcgagactccgtctcaaaaaaaaaaaaaaaaa

SEQ ID NO: 30010 - DNA, 345 bp, Homo sapiens
tttttttttttaagcttgggtaaaaacagggtccagagaatcttgaagtttcaattgttttcagttactcagcttttccctaactgcccaccatctttctggcctcccaaaatgacttcattgccatgaattaagagttgacccaagagctggctgaaaggcatcagaaaaaaagaaaatggcattacctaaaatatatgtcctcattaccattcatttcatatatatgatattcattttcacattttctatctcctttacttttcaaagtgaggcacagaaacactgaactacagaaagcaaagggcaaaggatggagctcggatttgaactgaattacaaagc

SEQ ID NO: 30011 - DNA, 402 bp, Homo sapiens
agcgcaccctcgccccaatttcacctgtcaaatctttgcactgtaaacagcagacccacgctcctcttttccaagatcctgcatccaggcctgccaaagcccagagctatttgtagatgttggcgaggacacgtctctctgtctgctcagtcaataattcactgcaataccaggtattgcaaaagaaggcctttgccttgccttccaataagagttacagggtagaaagcagaaacctgccctgcagctgccatgaaccccacctgagcaggcaagttaggctacacttgacagtggaagctcatcagccacagtgaagcagcccccaccacttgtttatttatttatttccctttgcacccaaccctgctgtgggcgccccccccccaaccaggctctcag

SEQ ID NO: 30012 - DNA, 483 bp, Homo sapiens
atgggacgatgggtgtccagcagaggaatgggactggtagtggaacctaaatttgtacttctatgtataatatgaagcaaatataacaaaaaattagtatttgttcattgtaggtgactaaacagctgtttaatatattgtcctttatatttttccatacaagtattttaattttttttttttttttgagatggagtcttgctctgttgcccagcctggagtgcagtggcacgatattggctcactgcaacctctgcctcccaggttcaagcaattctcccgcctcagcctcccgagtagctgggattacaggtgtgcgccacaatgcctggctaatttttatacttttaatagaaacaggatttcatcatgttggccaggctggtctcgaactcctgacctcaggtgatccgcccgccttggcctcccaaagtgctaggattacaggcatgagccaacacgccagcaccggccaagtgtttt

SEQ ID NO: 30013 - DNA, 817 bp, Homo sapiens
ggctgctccatgcctgtgctgtgcatcatgggccacaagcctcatgtgactgttgacacctaaactcactcatgccagctaaactcattcacgccagttaaactcattcatactagctaaactcatttgtaccagctaaactcactcacaccagttaaactcactcacaccagttaaactcattcgtaccagctaaactcactcatgccagctaaactcactcacgccggctaaactcactcgtaccagctaaactcattcgtaccagctaaactcattcataccagctaaactcactcatgccagctaaactcactcacgccggctaaactcactcataccagctaaactcattcgtaccagctaaactcattcgtaccagctaaactcactcgtacccgctaaactcactcataccagttaaactcactcatgccagctaactcactcatgtcagctaaactcactcatgccagctaaactcactcatgccaattaaactcattcgtaccagctaaactcactcatgccagccacacttcaggtgctcactggccgcccatggttagcggccacttccggcccagcatgtgctgctctctgtcttctggtgggcgtgcagtggaggctgcctgtgctctgattctgtcttcttgatgaactgtgaggccgagcaccttggatagccttctttgtcttttgcccattttcctcttagctttcattttcttattattaataggaattctttatatattctctgtatgattcctttgtcaagtatgtatattaaaaatattttctattcactttttac

SEQ ID NO: 30014 - DNA, 389 bp, Homo sapiens
ggggaatcgcttgaatccgggaggcggaggctgcagtgagccgagagcacactgttgcactccagcctggcaacaagagcaaaactcagtctcaaaaaaaaaaaaaaaaagctccaaatgggtacctggaatggaattggtgccactcagctcctttaggggttaacatgttgtcaaaatgcagggaggtggaggttgcaggactcagctggggagactgtggtctgatctgaaaggttgcccacaggtgtctgcctgcagcgatgtggggatctggttgatagtgaggcatttcttcacgctgtcaatgggacagcagttctctgtagagagacctggccgacttagcttgtctgaggagagtacagaatcttcctcggacccctgga

SEQ ID NO: 30015 - DNA, 291 bp, Homo sapiens
acagatggagacatggaggctcccagcaagtgaggagtcaccgcagatcagagaaccgctggccacaaaccttacctaaattccagatcttgctgtttctgctctacctttctagcatatccacaaaattattaaaatagcaaatgttttctttaaacatggcttcttaaaggtgtgtgtgggggcgggggaataaagatggcagagccggggttggagaacagtgatgtcagctgtttgctttctggctcctaagggttttactttgccattcatgagacaaaaaaaaaa

SEQ ID NO: 30016 - DNA, 427 bp, Homo sapiens
cttcccacaccaccaagcaagcaatcaattttgtaggggacaacatctgggtatccctcaattcaattcaatcctgatgctatctacctggagatagcttcagaaaccacaggctgagggctcagtcacataaggccaccctctccttcccatcagacctgccatggcctttccagggaccagcctcatcccaaagctacctaggggctgccaaccatcatcaactcactgggatacaaagacatcattttgaagtttccacagattttaggagttgtttaccaggaaacagaatcaaagaccaaatatatatttcacagtgtcacagtaaggaatggaattaccaaaataagggtaggcagcaattctaatggtcaactgatccatactgtggtacatagaggcctaggagaagaatttccaaggc

SEQ ID NO: 30017 - DNA, 3457 bp, Homo sapiens
cgggctcacgctcttcttcgtggtgctcggctctctgtcggtgcaagtgttcagcttccgctggtttgtgcacgatttcagcaccgaggacagcgccacggccgctgctgcctccagctgcccgcagcctggagccgattgcaagacggtggtcggcggtgggtctgcagccggggaaggcgaggctcgtccttccacgccgcaaaggcaagcatctaacgccagcaagagcaacatcgccgcggccaacagcggcagcaacagcagcggggctacccgggccagtggcaagcacaggtctgcgtcctgctccttctgcatctggctcctgcagtcactcatccacatcttgcagctcgggcaaatctggagatatttccacacaatatacttaggtattcgaagccgacagagtggggagaatgacagatggaggttttactggaaaatggtatatgagtatgcggatgtgagtatgctgcatttgctagccacctttctggaaagtgctccacagctggtcctgcagctctgcattatcgtacagactcatagcttacaggccctccaaggtttcacagcggcagcttccctcgtgtccctggcctgggccttggcctcctaccagaaggccctccgggactctcgagatgacaagaagcccatcagctacatggccgtcatcatccagttctgctggcacttcttcaccatcgccgccagggtcatcacgtttgccctctttgcctcggttttccagctgtactttgggatcttcatcgtccttcactggtgcatcatgaccttctggatcgtccactgtgagacagaattctgtatcaccaaatgggaagagattgtgttcgacatggtggtggggattatctatatcttcagttggttcaatgtcaaggaaggcaggacacgctgcaggctattcatttactattttgtgatccttttggaaaatacagccttgagtgccctctggtacctctacaaggctccccagattgcagacgcatttgccattccagcgctgtgtgtggtgttcagcagctttttaactggcgttgtttttatgctgatgtattatgccttctttcatcccaatggacccagattcgggcagtcaccaagttgtgcttgtgaggacccagccgctgccttcactttgcccccagacgtggccacaagcaccctacggtccatctccaacaaccgcagtgttgtcagcgaccgcgatcagaaattcgcagagcgggatgggtgtgtacctgtctttcaagtgaggcccactgccccatccaccccatcatctcgcccaccacggattgaagaatcagtcattaaaattgacttgttcaggaataggtacccagcatgggagagacatgttttggaccgaagcctccgaaaggctattttagcttttgaatgttccccatctcctccaaggctgcagtacaaagatgatgcccttattcaggagcggttggagtacgaaaccactttataaagcaaaaggagttgcaggacccacaacatccagatgaaggggtgacagcagggctgtggccataatgacacttcatcctagagcagggcagtgagccgtgaagttcctagtgggaccgtcatcaccattatcatttgatcctgtcggctgggggcggctggtctccttccaaagcagctgcacccgagagtctctgactccacctgaaagaatgacgctggcttaataggactctccattgctaccaaactcctcctgcacggtcttgggtgcacccaccagagggtactactattatggaaaaattttgcctccaatcattagggtgtcttgatggcgttaactgatctttccataaaaatagattcagtcatacacacatacacacactaacacacataagttacaccagtcctctgtcaaaaaagcttaggtgacttttcttgatgcaaagctctgattcccacaggaatataaaaacaaagaaagagggaaacatccctcgagaaaaaaaatagtattgcttagaaaagaaaccattttctcatttggaaatccataccatgtgtgaaaatcctatccaacggacagcaaacccaaatgttgtctacacatgtgttagcattgatggagtggttcattttctacacatttcaggatttgttttatattttaaattttcagttgcgaacatcctttttgacagaaatcctatgcagcccatgtacggctttcaacaagaccaaggagctcaataacttcatgatgtaaattaaatagtaatcatgattcagtattcaattgcaaaaatgtaacaggtacacaaagaggaagtggggaaaaaggcaaaatgagagtctgattcccaggcatgtgcagcgcccattgggacataacggcagtgcggcgcgagcagaaggaatgggctggaaccggatctgtttccagacgcagaatgagtggctctgtgtgaccataggcagatgctgactctggaagactccgtgccactcctttctagtgccaaacaccatccaaccacaggactgacgtggaagccccaaacaactgagaatgagtggcatgagccccctaaaagcaggcgagagaacgagcaatcaagttctccactgtgtacagacttttcctccccccaatccaaggtcaaagtgatgtgtcttttagaggctttggggacactttttagtaagtatgagcagacaaatgcaatgaatatgctatgaaaaaacccttcttgaactgaggagagggctttatcactatatccagctaagatttgtatttgaatcatctgtaaagtcgcactcttacaacaagcttctgggttttaaatacctccgtacagcaagtaaacgttccccgctttctgttctcagtgtcctcggtcatggtgcttttcgttgcattaaaagtgccggtcaaactttgatagtatttttttatagttggtgcagagtggaataactcatggattatttcaatatttttgtaataaaaaatatagggtatacacataggcatcatcacattttttatagaccctggaatcgtttaaaatactttaagcatcataattacttgggatgtcagaaactggtcccacaaattccatcagcctgcctcagcagattgaaaacatttgtctcttgcaagatcaccctactttgcaagttggtgcccccaggaacctggccaggggtgctatcagaatatcaggtgaagagagaatcagcttaaatagaaagggcttgtcaagactggccaatgtttcccaggaaatcaaagatgtaaatgattactttcatccatccattataacaaacctgaccacagtggaagctgtcttaaacttccttccctggttttatattaacccaactgatagattaagtattagtcaaaccactaaaaaaaaaa

SEQ ID NO: 30018 - DNA, 1651 bp, Homo sapiens
gtttaccgagagagcccgtccaagttgggctccatcgctgccctcgctccccttcggggcccccgcccgcctgggaagcagagagaaagccgggcccagcccttcctcacccttcccctccccgcaccgcccggagaggtcgggtaagggggaaggagtgtgcgtgggacggggaacctcgggcctggggatctggctgtccccgtccccgtacctcgcgcggacccgggagttccagccctaggccaggctccggctccctccgccccgcgccatcgcgctcggagtgacgggcccaccccgggcgagcagccagaggctggatctcagggatgccagctccccagcggaagcacaggcgtggaggcttctctcacagatgtttccccaccccgcagacggcgatgaccccccagcccgccggacccccggatgggggctggggctgggtggtggcggccgcagccttcgcgataaacgggctgtcctacgggctgctgcgctcgctgggccttgccttccctgaccttgccgagcactttgaccgaagcgcccaggacactgcgtggatcagcgccctggccctggccgtgcagcaggcagccagccccgtgggcagcgccctgagcacgcgctggggggcccgccccgtggtgatggttgggggcgtcctcgcctcgctgggcttcgtcttctcggctttcgccagcgatctgctgcatctctacctcggcctgggcctcctcgctggctttggttgggccctggtgttcgcccccgccctaggcaccctctcgcgttacttctcccgccgtcgagtcttggcggtggggctggcgctcaccggcaacggggcctcctcgctgctcctggcgcccgccttgcagcttcttctcgatactttcggctggcggggcgctctgctcctcctcggcgcgatcaccctccacctcaccccctgtggcgccctgctgctacccctggtccttcctggagaccccccagccccaccgcgtagtcccctagctgccctcggcctgagtctgttcacacgccgggccttctcaatctttgctctaggcacagccctggttgggggcgggtacttcgttccttacgtgcacttggctccccacgctttagaccggggcctggggggatacggagcagcgctggtggtggccgtggctgcgatgggggatgcgggcgcccggctggtctgcgggtggctggcagaccaaggctgggtgcccctcccgcggctgctggccgtattcggggctctgactgggctggggctgtgggtggtggggctggtgcccgtggtgggcggcgaagagagctgggggggtcccctgctggccgcggctgtggcctatgggctgagcgcggggagttacgccccgctggttttcggtgtactccccgggctggtgggcgtcggaggtgtggtgcaggccacagggctggtgatgatgctgatgagcctcggggggctcctgggccctcccctgtcaggcttcctaagggatgagacaggagacttcaccgcctctttcctcctgtctggttctttgatcctctccggcagcttcatctacatagggttgcccagggcgctgccctcctgtggtccagcctcccctccagc

SEQ ID NO: 30019 - DNA, 251 bp, Homo sapiens
aggtcaaggagaagaaccattagttcgagggaggcaaacagccaatgagaagtgttggagagagtttgggggcccgggggcgtgtcttccgttgactccgccccctttcaggccccgtgggcagcgccctgagcacgcgctggggggcccgccccgtggtgatggttgggggcgtcctcgcctcgctgggcttcgtcttctcggctttcgccagcgatctgctgcatctctacctcggcctgggcctcctc

SEQ ID NO: 30020 - DNA, 310 bp, Homo sapiens
aagtaactcagaaaaggctgggtctaacctggcccttacctaagaaatcctaatttaaagaaatgaagttttctgtaatgtatttttaagccaaataacaggtctctgacatccaaagaatgggaagaaagtgataatcaatgaaatatattaaatacgtacagaaaaccaacctcttctttcaatctcctcacagaaaaaaaaaaaaaatctttttttgctgggaagtatacaatggaaacctctaacttgtatgttaatttgtataactcaattgctcagaaatatttgaaatagctaccagtttaga

SEQ ID NO: 30021 - DNA, 317 bp, Homo sapiens
aataattaaagaagaaaaaattcccaaatgttgcctatttaatggtttatttaaagacaaggtcgaattcagccttaaaaccttgattatctaacaatggttttccaatacactttagcagatgagccctcttttcaagccaaatctcccctaaattctagttacaaaatacagaaaaagcaaagttctgtttgtagttgaggaggaacataggaccacggtctggcttatctccctccatacctgtaactgcattcacaggggcctctagcacttcaacaactcagtagggaagggattatggtgccccagacctt

SEQ ID NO: 30022 - DNA, 325 bp, Homo sapiens
gtctctgcatctctccctcaaattattaattaattgtaaagaaaaattttttggtgaagctaggagatacacctttatcaagagattgaagttagtctaggcaacatggtgaaaccacatctctacaaaaactacaaaaattggcggggtgtggtggcatgcacctatagtcccagctacttggggggctgaggtaggaggattgcttatgactcagaggtcgtggatgcagtgagctgtgttcatgccactgcactccagcctggatgacaaagtgagaccctgtctcaaaaaaataaataaagggattgaagttaataccctc

SEQ ID NO: 30023 - DNA, 413 bp, Homo sapiens
aactagcagaggcaggaagaagccagaaatggtaactaattattttgcatttactcactcttctgatatctgactcattattcaagggctcctccagtgaatttaccttgccagtttccccatattttcatataacattaaagaacacagtaaatgcgggtgatcccttcataatcaacatgcttctaatatgtcaggggtctctaggttacaaccaatatattcactgatttgttttccaaagacaggatgaggttgctgagtaaaacagcttcatgaaaaaaagggagcagctaccctctgagcaggctggtctatccagagtggactcaacacagagctatagatttctagggatttctgagcaggatgtccagaatgagtgtgggacttgaggtcttatctttaggcca

SEQ ID NO: 30024 - DNA, 368 bp, Homo sapiens
acacctttaaatgagttagaagagtaactactattcatagaataaaaatcaaatataactttcaaaccactaaagcgggaaaaaaactggaaaaaaagactgtcaaaccaaaggcagtaaagagaacaggaagcatgatacatagaaaaaaatgagtgagatatatctatgaataagttaagtgttagtattaacagggagaaatctcaaatgagggggacatgtacatgcttttaaaaaacataccgaaaacaaaatagagttaataactgcattagctttatagtcagagaaactcttgcacacgtgtaccaggaaacatgtacaagaaaatttactgtcagcagttggtaacagcaaaaaaaaaa

SEQ ID NO: 30025 - DNA, 83 bp, Homo sapiens
cccaacctcactcctccgaagactctcctggagatcatctgtgatgtgcagatacccagactcactggccccgagactcagat

SEQ ID NO: 30026 - DNA, 316 bp, Homo sapiens
caggggcttagagagatgtttcagtaaagaaacataggaaattaggtaggtagggtcatctataatgagtaaaaagacagcgtacttttgactgtgaacgtctgtagggcaaggacaaaacgctgacaatctttatttctgtctctatagtgctgaattatcacaagggacaaatggcctgaataattgtatgaacccactctattagaaattaccttcacactgatagataatggcctgtgataagaagcaagtcaaaactttttagaatgtagaactgcactgttcaatatagtagccacaagccacatatggc

SEQ ID NO: 30027 - DNA, 532 bp, Homo sapiens
gtgcctttgtagatgagaaagtgcgtaaggtcacactatatttaagtaaaagagacagagctttaacatggctttcttcattccagagttcttattttctgcattccaccatactgcattctgtgttatattagttctctgttagagccctaattatggaccattataagccttagcaaaatccagaatgatggaaataagaatatttgataatattctctaatactaaagtattgctctaggcaaaactgtaaattatttaatcaggatttctgctatttttatccaggtggtacatcatgccttacatacctctgtccttcatatattcaaatctaaataaatgctggtagtttgagtgggaggagggtggattattcatgtcaaatgattctgtgctgatgttgccacaactgtatgtgaaaataaagataattgacatggaatttgcatggagttaaggtaccttttgaaatctgcattctacaatcttttagtactgcatattaaaacattaattattcaggagccc

SEQ ID NO: 30028 - DNA, 604 bp, Homo sapiens
actggactcaattctgaaggtcgccaagaaggagagaacaatgtcttctttacccgtgccatacaaactgcctgtgtctttgtctgttggttcctgcgtgataatcaaagggacaccaatccactcttttatcaatgacccacagctgcaggtggatttctacactgacatggatgaggattcagatattgccttccgtttccgagtgcactttggcaatcatgtggtcatgaacaggcgtgagtttgggatatggatgttggaggagacaacagactacgtgccctttgaggatggcaaacaatttgagctgtgcatctacgtacattacaatgagtatgagataaaggtcaatggcatacgcatttacggctttgtccatcgaatcccgccatcatttgtgaagatggtgcaagtgtcgagagatatctccctgacctcagtgtgtgtctgcaattgagggagatgatcacactcctcattgttgaggaatccctctttctacctgaccatgggattcccagaacctgctaacagaataatccctgctcacattttcccctacactttgtcattaaaacagcacgaaaactcaaaaaaaaaa

SEQ ID NO: 30029 - DNA, 527 bp, Homo sapiens
actggactcaattctgaaggtcgccaagaaggagagaacaatgtcttctttaccccaatgacccacagctgcaggtggatttctacactgacatggatgaggattcagatattgccttccgtttccgagtgcactttggcaatcatgtggtcatgaacaggcgtgagtttgggatatggatgttggaggagacaacagactacgtgccctttgaggatggcaaacaatttgagctgtgcatctacgtacattacaatgagtatgagataaaggtcaatggcatacgcatttacggctttgtccatcgaatcccgccatcatttgtgaagatggtgcaagtgtcgagagatatctccctgacctcagtgtgtgtctgcaattgagggagatgatcacactcctcattgttgaggaatccctctttctacctgaccatgggattcccagaacctgctaacagaataatccctgctcacattttcccctacactttgtcattaaaacagcacgaaaactcaaaaaaaaaa

SEQ ID NO: 30030 - DNA, 359 bp, Homo sapiens
actttgtgacacagagtatagaacttcgctagaggaatgagtggaaacattagaaataaagtcgggtactgtctcaaataggcacaaaacgtcatctgtaaacataagtgtatctaatacgttaacttgtataactaggaattttcttggggaatgttatttgtaccaggacagagtggagaggaggccgaaaacttgtttggtggcatgctttctttctgatgcatttttcctcttgtagataaaggtcaatggcatacgcatttacggctttgtccatcgaatcccgccatcatttgtgaagatggtgcaagtgtcgagagatatctccctgacctcagtgtgtgtctgcaattgag

SEQ ID NO: 30031 - DNA, 887 bp, Homo sapiens
tgaatcaaaagtttgtctcctgtagatagcatatagttggataatttttagttcttttgattggattgtttaattcattcatttttagtgttactattgatatggctggatttgtgtctgcaattttaatttttgttttctatatgtctcgtgtttttgtggctttgcttcttcttctttgctttcttttgcattattttctagtttaacaacttaatttcttaaattatttttaactatatttttacatatttccttaatgaatgcttgatggctcacaatctccttctcagtttatcagaatctacttaagtttatactaacttatgtccagtgagatagaaacacatttcttctttatagctctaggtcctcttcacttgtttttgtgctattattgttatacttactacctctgtatatgttacaagcccaagaatactattctacttatttatataattttatgttttttaaagaacctgagactggaagtgagggaaatagggcgtgcaggaaggaaggaagaggaaggaaaagtgtgtgaaagggggctccacctcctttagtggataccctgagcttatttccaggggcctttgtaaattcccagtgacaactctttggaagatgaaatccccctcttccctgcatcttattagaacagtgtatcctggaggacatcccttgcctttcaccaagtgaccctatactggcggcagaacttctcgattttgcggatttcaaaatggctccacgtactcatagttttcatgacagacttcattgcgatagtcaaatactgttccacttactgcagttgcctacagtctgggttttgttcagttgaaattaaataaattttatgcacaaacctttaaaaaaag

SEQ ID NO: 30032 - DNA, 398 bp, Homo sapiens
gattctttaaatatgagggagaggactcgaagaaatgactgttaaactaggatttgtgaaatgacgtgggttgaagaggaggtgtggcatccctttgccattgggggccttggatggcgtccagtgacaactctttggaagatgaaatccccctcttccctgcatcttattagaacagtgtatcctggaggacatcccttgcctttcaccaagtgaccctatactggcggcagaacttctcgattttgcggatttcaaaatggctccacgtactcatagttttcatgacagacttcattgcgatagtcaaatactgttccacttactgcagttgcctacagtctgggttttgttcagttgaaattaaataaattttatgcacaaacctttaaaaaaag

SEQ ID NO: 30033 - DNA, 363 bp, Homo sapiens
tttgagacagagtttcttttttgttgcccagccttgagtgcaatggtgcaatctcggctcactgcaacttctgcctcccggattcaagcgattctctcgtcttagcctcccgagtagctgggactacaggcacgtgccaccatgcctggctaatttttgtatttttagtagagacagggtttcaccatgttggccaggctggtctcaagctcctgacctcaggtgattcacctaccttggcctcccaaactgctgggattatagcgtgagccaccacgcctggccactccatatgctactataattatttggtgcttatatgaggggaggagatgaatttttctttctttctttctttcttcc

SEQ ID NO: 30034 - DNA, 283 bp, Homo sapiens
actacacacaagtaccaaacacaatactaaatacaggtaccacacacaggtaccacagtaccacacacaagtacagcctcagtgctgtacccacacaggcactgcccacagggaccacacacagtgccaaacacaggtactgcacacaggtaccaagcacagtactgcacacaagtactgcacacagtacgaaacagtactgcacacaggtgtcatgcacagtgccaaacacagtactgcacacagtacacaaacagagtactgcacacaggtacagcctgca

SEQ ID NO: 30035 - DNA, 509 bp, Homo sapiens
tggttcatacttataaaaggaagaatatacaaataattataaaagttatcaacatttgtttaactaataatgtatttttgaactatattaagtaaaaatgaacagaaatcattaaatatgccattggccattttagtacactactctcaaggcagacaaagaatagaaacctttgccatcatactgattctgttttctaagagcattaaattagaaataaaaagtaaggtctggggcggtggctcacgcctgtaaccccagcactttgggaagccaaggcgggtggatcacaaggtcaggagttggagaccagcctggctaacatggtgaaactcatatactgaagactcatactgaagacacaaaaaataagccgtgcgtggtgccacgcaccagtaatcccagctacttgggaagctgaggctgagaatcacttgaacctggaaggcggaggttgtagtgagccgagatcgtgccattgtactccaggctgggcgacagggcgagac

SEQ ID NO: 30036 - DNA, 481 bp, Homo sapiens
acatttcagctggtcgacgtgaagaattaggagaatttaacaggcatgggcttggggaagtggcataaaggatggaggttggagtcactccatgtgtttttgaggaacataggcaattctaatttgtggggataaagtattactgggaaatggaaaacttcatttgatttctgttcaacaagcatggaagcataggctggaatgttaatgttgggctgagcagttcgttcttaatacactaggcattttaggaaacatttaagatactgaagttggaatgtgccaggattgaataagctggtggtgaagctagcagtacttaatagaagggggcaggaacacccacagaagttgcttataatattataaggaagtaggctgggccggttgctcatgcctgtaatcccaatactttttgaggcccgaggaggaaggatcacttgagggccaggagttagagaccagcctggtcaacaaagca

SEQ ID NO: 30037 - DNA, 617 bp, Homo sapiens
tctgtcagggattctgtaaaaggaattcctgtattatttaggtcagaccacacggcctctaaagtcccttctcactcaagaatctcttattctgatgaactctattcccctaccccaaatatctcatttatttcttaaaattaagtgattcaaagtaacaggggtgacaagttcacaacacagataataaaaaaaaacctacttctttgtcattttttgaaatacattgactggcttgcagtacctataaaagacattatccaaaaacctagaaatggagaactgatgataggagagaaaacagaaaaaagaaaagcacatggaaagaagagaaaggggaaaatgaggcaagatgagaatcagctgcagcaacaggggtgtgtggcattagaagtaagggctgggagccccagacactgacagagaagaaaggatggctgagatgttcccagaggccaatactggaaagcactggggcgccagctccatgtgtgtatgcagtcctccatgcggcatggctcctgctgcagggggaattccctttaccaaattaactggtgttcagagtaagaaatcacctctctacattccagtttcccaagtactttctaagggtg

SEQ ID NO: 30038 - DNA, 403 bp, Homo sapiens
aaatctgcagtcttatgaatcttcctccaataaatttgctaacaaaggaaacatttagtattactaggccgtagagactagtaatttaatctttaatttttaaatttatatgaagtaacaagagaacacaatttttcaccgcttattttataacctgattggctcccagattcacaatacctgtaggctccagactaaaaaatgccaaactgttagtggaaagtaaccttaaggcatttttcttgatatccatattagctacaatccttggcctatttctttggagtatgtttacatgttttatgaatataattacataggtgggagaagaaaaacatacaaacataatttcaaaaagatggaaataatgttaataattgcagccacaatttaaacatattgg

SEQ ID NO: 30039 - DNA, 303 bp, Homo sapiens
agcaaaaaggaaaaaaatatgtgtaagatttaaaagaaaaaaaggtgtgagtgtgtgtgcacgctgatcaaggtgctaactttttatttaggggggcatgaaaaagacctgtcatttattacttctactatttcacaagaaaggctctctcacgcatacatgcacacacacacatgcacacatgctgcagaaagcactgttaaattaattcagcaagtatgtactggcacttatgatgtgctaggcactgttctagtcattgcagaatataatagtgacaaaaaaacccaaaaattcttgccc

SEQ ID NO: 30040 - DNA, 408 bp, Homo sapiens
cacccaggcagggctccaggaggggacaggagccccaacatgaagttctcagtgcaaagctttggattctggcttggcaacttgacattttggagggcctaactttgggaaggccagtgtgtgtctggccaggtatattgatcctccaggccacctgagatgcttccaattgactggctattggtattctgtttgttcccatctgtggaaatcatgaatagcagagtatcacttttcagagttcgcaatgcctcaccctcgttcccaaccacccagatccgagagccatgcagctgaaaggcaggtgaacggccctcaagttcccaccattatcctgatgtgccctggaaagtgccaggagtccctaactgataataagacaccaaatccccactcttattaacatgt

SEQ ID NO: 30041 - DNA, 596 bp, Homo sapiens
gcaaggccgcaccgaaaggagccagtggcgggggcggggttagcgggcgtggcgctgccggggacggtcggcctagcttttcgagctgtgtacgtttgcgtaaaggctgggcggcgatagaacgtttccgtggaccagagtcgtggctgttgtctgtgttaacatttgtgtaaaataagatgcccataaaagttgacttgaacactgaggaggaagaactaaatatttaaatttcaactgacatggacacaaacaatggtcaccaagtccctaaacaggttgtgggagccccttgaggcgttcatccagcgctgtttcggagaaatctctatttcagtctactcctatacgtcagttattgaaaaacaacaatcgcaaaaacaagttgacctttttgtgttccttgagcccagtcgcaaagggccctcgtgactgggcctcatgctagacaacatgttacaaaaagatctagggtcccagaccacgccaaaaagcttcatgagacctctcctcgtctgtgcactgacgagtggccggctctggagcccaggtcgttgcttcccagtctggaggtgaatcctccatagtctggtgag

SEQ ID NO: 30042 - DNA, 596 bp, Homo sapiens
aggccagctaaaatccatgaataaattatgtgtgttctgttcacttccacgtacaacgtcttcaagctcaatgaatttataccttaaacaaacccacggagcttcaagtccacctggccccactgctccttttaaaatctaaaagctaagaaaacgagggtggttttcctttgcctgaggcctatccttgccagggcccacaggttgctctgaaaaagggggagggcgcggccgagtcccgggcatttcagagcaggggtagagctgcgcactttgtcccagccagggtgtccccgccctctctgggcaccctgaggcgggaacgccgggctccgtcctgctgagctggggcttctcttgggcagggtttccctacaaagcagcaggggctgccctcctcttcacacagagggggcagggttcccggcctcctcctctcatcaaggattcgcctcccgtaggaaaacagggggagggcggcgggggtgaggggacaaagccctgggaaggggctggatggacggggccggagccaagggggcggctggcatggccggagtatctaggggagaagcgcgatgcctgccggtccctcc

SEQ ID NO: 30043 - DNA, 472 bp, Homo sapiens
gagctgctgggcgagctgtgggctggccggacccgcgtgcctccacagggtctggagctggcagacagggagggccaggatcctggcagatggcctcgaaccacacccccggtccttgaagccacttcccaggtgatgtggaagcccgtgttgctgccagaagccctgaagctggcccctggtgtgagcatgtggaaccggagcacccaggtgttgctcagctctggtgtgcctgaacaagaggacaaagaaggtagcacctttcctcccgttgagcaacatcccatccagacaggtgccccaaagcccaggtgaccgtagcacagctaatgaagaactcagcccccaaagtgtggtcacgctcctctaagcctgctgcctccctctgatccctgagcctctggcagtagtaactggtccctccctctgctagccagaaataaacacctgagttgccttaggaactagaaaa

SEQ ID NO: 30044 - DNA, 4056 bp, Homo sapiens
cgcctcccggccggacgatggatccctgcagatcccagggctgagagcaccgcgcaccgcgccgagcccgggcagaccgagccgaggcgagcgagccagcgagccagcgcgcgcgggcgggcggacagatcggagccgagcggggccgggcggggcgctccctgcagggctctgcgcggcgtgccgcggcggccgcgggctccggccccgggccatgagcccctccgcgactcggcgctgagcccgccaccggtccagcgccccaggacccgccgccggctgccggcttgccgaagccccctcaggatcccctcaacaaggatggaactgaaggccgaggaggaggaggtgggtggcgtccagccggtgagcatccaggccttcgccagcagctccacactgcacggcctggcccacatcttctcctacgagcggctgtctctgaagcgggcactgtgggccctgtgcttcctgggctcgctggctgtgctgctgtgtgtgtgcacggagcgtgtgcagtactacttccactaccaccatgtcaccaagctcgacgaggtggctgcctctcagcttaccttccctgctgtcacgctgtgcaacctcaacgagttccgctttagccaagtctccaagaatgacctgtatcatgctggggagctgctggccctgctcaacaacaggtatgagataccagacacacagatggcagatgaaaagcagctggagatactgcaggacaaagccaacttccgcagcttcaaacccaaacccttcaacatgcgtgagttctacgaccgagctgggcacgacattcgagacatgctgctctcctgccacttccggggggaggtctgcagcgctgaagacttcaaggtggtcttcacacgctatggaaagtgctacacgttcaactcgggccgagatgggcggccgcggctgaagaccatgaagggtgggacgggcaatgggctggaaatcatgctggacatccagcaggacgagtacctgcctgtgtggggggagactgacgagacgtccttcgaagcaggcatcaaagtgcagatccatagtcaggatgaacctcctttcatcgaccagctgggctttggcgtggccccaggcttccagacctttgtggcctgccaggagcagcggctcatctacctgcccccaccctggggcacctgcaaagctgttaccatggactcggatttggatttcttcgactcctacagcatcactgcctgccgcatcgactgtgagacgcgctacctggtggagaactgcaactgccgcatggtgcacatgccaggggatgccccatactgtactccagagcagtacaaggagtgtgcagatcctgctctggacttcctggtggagaaggaccaggagtactgcgtgtgtgaaatgccttgcaacctgacccgctatggcaaagagctgtccatggtcaagatccccagcaaagcctcagccaagtacctggccaagaagttcaacaaatctgagcaatacataggggagaacatcctggtgctggacattttctttgaagtcctcaactatgagaccattgaacagaagaaggcctatgagattgcagggctcctgggtgagctgctgatgacacctgtccccttctcatgccatgggcatggcgtggctccctatcatccaaaagcagggtgctcacttctgtcccatgagggtcctccaccccagaggcccttccccaaaccctgttgtcttggtgacatcgggggccagatggggctgttcatcggggccagcatcctcacggtgctggagctctttgactacgcctacgaggtcattaagcacaagctgtgccgacgaggaaaatgccagaaggaggccaaaaggagcagtgcggacaagggcgtggccctcagcctggacgacgtcaaaagacacaacccgtgcgagagccttcggggccaccctgccgggatgacatacgctgccaacatcctacctcaccatccggcccgaggcacgttcgaggactttacctgctgagccccgcaggccgctgaaccaaaggcctagatggggaggactaggagagcgagggggcccccagctgcctcctcacatctgccctggggactccccacactccggggcagatctttcctcttgtctgtggtaaggaaggagtcttgaccatagagtcctctctctgcctctatcccattctttttacatttaacaaaactaatctaaaaaagaactaaaaagggagaacggggcaagggacctcaggctgcccctctctcctccatgctgcctcccctagctcccagcctgaattctgtctatctagctgtctgccatctgagtgtccatctacattctgctgccaccagtcaccaaaggcccttcccagtgaggggtggaagggatctctggggtctggaatttggccccaaaccagagaatgtaccttaagggggagggctagtgtgggggagggaggcttccccagccttaagagaccctctcagcccagtgactgtccccaaacccaagtctcctggcaggaactaaaacctcagccccactctctcacaccatgtggaatctcgtgggggtcggggatccccttaagaagtggtaatggggacaagatgcggccctggtgctgtaggctacatcctgatacctataagttcacccccaccccacagctgctggagagaaatcccaagaggcagcccttcctcaccatcccattaaagacctggctggttagcgtccagctcagggagaagggcgctagtgcctaacctcactggtccctctcccggaggcccttgtagagggccacgtccataaattttcttatggaactctcccacatcctcttccccaacttcatttgcttctctcaacaacctcatctgcattttctatttctatatgatacagactctatattgctatatctctgtatatactttcccagccctgtctgtctccaccccatcccctcttgtctctgagaaccattctcccaccccaagttccaccttctatgtttctactccctccctggtctctgaatgccttcgcctgtataaagagttggactctctcccctggtgtctgtactgtgtacacacatccctctgagaagcacaaggagacgacacgcgcattgtaacctttgcactgtctcagtggcgacaaaggaagctgtgaatcacaagctctgcctctttctggcctcaccctctcccccaacccgggcaccctcggccctccctgcagccttaacattctcttcccctgctcctcctatcccattgccctctgcccagctgacagtggcatccccagggaaggggttgctgtagagatagcccccacccaggggatggaggtctaccctggacactaagccaagtgtgtcagagacagaagggagctggggattggcgactcctgaagttggggcagtgggatgctgacaggcagaagctgaggtcctcagtcagtggcctttcctccttctgggtgcccagccccctttcctcacctgatacccaagcccaccacttttattttctggtgaggtgggtttgggaggaaagagaggcctagaggaggagttgaaagctctgctgttgtctcaccctatcttaatgagagacaagtgaggtggagggcctgccccccctccctccaccagacactccttccaggcctgagccccaacccctcttcaggccttccttccctagctgtgtcttggtcttcaatcccagaacaggacctgtgagcagctgcattggcctggagctggagagtaaggctgtaggatctttggaatctcttggttcctaagagtttcctcagagatcatacctccccagagggaagcaggaatgaggccaaaaagtgtgcattggataggggaacagcaggcagggctctgggtgacgcatgcctctggtctaataaactgggtttcaaccatcaaaaaaaaaaattttctacacaataatacttattattaatataacc

SEQ ID NO: 30045 - DNA, 3918 bp, Homo sapiens
cgcctcccggccggacgatggatccctgcagatcccagggctgagagcaccgcgcaccgcgccgagcccgggcagaccgagccgaggcgagcgagccagcgagccagcgcgcgcgggcgggcggacagatcggagccgagcggggccgggcggggcgctccctgcagggctctgcgcggcgtgccgcggcggccgcgggctccggccccgggccatgagcccctccgcgactcggcgctgagcccgccaccggtccagcgccccaggacccgccgccggctgccggcttgccgaagccccctcaggatcccctcaacaaggatggaactgaaggccgaggaggaggaggtgggtggcgtccagccggtgagcatccaggccttcgccagcagctccacactgcacggcctggcccacatcttctcctacgagcggctgtctctgaagcgggcactgtgggccctgtgcttcctgggctcgctggctgtgctgctgtgtgtgtgcacggagcgtgtgcagtactacttccactaccaccatgtcaccaagctcgacgaggtggctgcctctcagcttaccttccctgctgtcacgctgtgcaacctcaacgagttccgctttagccaagtctccaagaatgacctgtatcatgctggggagctgctggccctgctcaacaacaggtatgagataccagacacacagatggcagatgaaaagcagctggagatactgcaggacaaagccaacttccgcagcttcaaacccaaacccttcaacatgcgtgagttctacgaccgagctgggcacgacattcgagacatgctgctctcctgccacttccggggggaggtctgcagcgctgaagacttcaaggtggtcttcacacgctatggaaagtgctacacgttcaactcgggccgagatgggcggccgcggctgaagaccatgaagggtgggacgggcaatgggctggaaatcatgctggacatccagcaggacgagtacctgcctgtgtggggggagactgacgagacgtccttcgaagcaggcatcaaagtgcagatccatagtcaggatgaacctcctttcatcgaccagctgggctttggcgtggccccaggcttccagacctttgtggcctgccaggagcagcggctcatctacctgcccccaccctggggcacctgcaaagctgttaccatggactcggatttggatttcttcgactcctacagcatcactgcctgccgcatcgactgtgagacgcgctacctggtggagaactgcaactgccgcatggtgcacatgccaggggatgccccatactgtactccagagcagtacaaggagtgtgcagatcctgctctggacttcctggtggagaaggaccaggagtactgcgtgtgtgaaatgccttgcaacctgacccgctatggcaaagagctgtccatggtcaagatccccagcaaagcctcagccaagtacctggccaagaagttcaacaaatctgagcaatacataggggagaacatcctggtgctggacattttctttgaagtcctcaactatgagaccattgaacagaagaaggcctatgagattgcagggctcctgggtgacatcgggggccagatggggctgttcatcggggccagcatcctcacggtgctggagctctttgactacgcctacgaggtcattaagcacaagctgtgccgacgaggaaaatgccagaaggaggccaaaaggagcagtgcggacaagggcgtggccctcagcctggacgacgtcaaaagacacaacccgtgcgagagccttcggggccaccctgccgggatgacatacgctgccaacatcctacctcaccatccggcccgaggcacgttcgaggactttacctgctgagccccgcaggccgctgaaccaaaggcctagatggggaggactaggagagcgagggggcccccagctgcctcctcacatctgccctggggactccccacactccggggcagatctttcctcttgtctgtggtaaggaaggagtcttgaccatagagtcctctctctgcctctatcccattctttttacatttaacaaaactaatctaaaaaagaactaaaaagggagaacggggcaagggacctcaggctgcccctctctcctccatgctgcctcccctagctcccagcctgaattctgtctatctagctgtctgccatctgagtgtccatctacattctgctgccaccagtcaccaaaggcccttcccagtgaggggtggaagggatctctggggtctggaatttggccccaaaccagagaatgtaccttaagggggagggctagtgtgggggagggaggcttccccagccttaagagaccctctcagcccagtgactgtccccaaacccaagtctcctggcaggaactaaaacctcagccccactctctcacaccatgtggaatctcgtgggggtcggggatccccttaagaagtggtaatggggacaagatgcggccctggtgctgtaggctacatcctgatacctataagttcacccccaccccacagctgctggagagaaatcccaagaggcagcccttcctcaccatcccattaaagacctggctggttagcgtccagctcagggagaagggcgctagtgcctaacctcactggtccctctcccggaggcccttgtagagggccacgtccataaattttcttatggaactctcccacatcctcttccccaacttcatttgcttctctcaacaacctcatctgcattttctatttctatatgatacagactctatattgctatatctctgtatatactttcccagccctgtctgtctccaccccatcccctcttgtctctgagaaccattctcccaccccaagttccaccttctatgtttctactccctccctggtctctgaatgccttcgcctgtataaagagttggactctctcccctggtgtctgtactgtgtacacacatccctctgagaagcacaaggagacgacacgcgcattgtaacctttgcactgtctcagtggcgacaaaggaagctgtgaatcacaagctctgcctctttctggcctcaccctctcccccaacccgggcaccctcggccctccctgcagccttaacattctcttcccctgctcctcctatcccattgccctctgcccagctgacagtggcatccccagggaaggggttgctgtagagatagcccccacccaggggatggaggtctaccctggacactaagccaagtgtgtcagagacagaagggagctggggattggcgactcctgaagttggggcagtgggatgctgacaggcagaagctgaggtcctcagtcagtggcctttcctccttctgggtgcccagccccctttcctcacctgatacccaagcccaccacttttattttctggtgaggtgggtttgggaggaaagagaggcctagaggaggagttgaaagctctgctgttgtctcaccctatcttaatgagagacaagtgaggtggagggcctgccccccctccctccaccagacactccttccaggcctgagccccaacccctcttcaggccttccttccctagctgtgtcttggtcttcaatcccagaacaggacctgtgagcagctgcattggcctggagctggagagtaaggctgtaggatctttggaatctcttggttcctaagagtttcctcagagatcatacctccccagagggaagcaggaatgaggccaaaaagtgtgcattggataggggaacagcaggcagggctctgggtgacgcatgcctctggtctaataaactgggtttcaaccatcaaaaaaaaaaattttctacacaataatacttattattaatataacc

SEQ ID NO: 30046 - DNA, 3124 bp, Homo sapiens
cgcctcccggccggacgatggatccctgcagatcccagggctgagagcaccgcgcaccgcgccgagcccgggcagaccgagccgaggcgagcgagccagcgagccagcgcgcgcgggcgggcggacagatcggagccgagcggggccgggcggggcgctccctgcagggctctgcgcggcgtgccgcggcggccgcgggctccggccccgggccatgagcccctccgcgactcggcgctgagcccgccaccggtccagcgccccaggacccgccgccggctgccggcttgccgaagccccctcaggatcccctcaacaaggatggaactgaaggccgaggaggaggaggtgggtggcgtccagccggtgagcatccaggccttcgccagcagctccacactgcacggcctggcccacatcttctcctacgagcggctgtctctgaagcgggcactgtgggccctgtgcttcctgggctcgctggctgtgctgctgtgtgtgtgcacggagcgtgtgcagtactacttccactaccaccatgtcaccaagctcgacgaggtggctgcctctcagcttaccttccctgctgtcacgctgtgcaacctcaacgagttccgctttagccaagtctccaagaatgacctgtatcatgctggggagctgctggccctgctcaacaacaggtatgagataccagacacacagatggcagatgaaaagcagctggagatactgcaggacaaagccaacttccgcagcttcaaacccaaacccttcaacatgcgtgagttctacgaccgagctgggcacgacattcgagacatgctgctctcctgccacttccggggggaggtctgcagcgctgaagacttcaaggtggtcttcacacgctatggaaagtgctacacgttcaactcgggccgagatgggcggccgcggctgaagaccatgaagggtgggacgggcaatgggctggaaatcatgctggacatccagcaggacgagtacctgcctgtgtggggggagactgacgagacgtccttcgaagcaggcatcaaagtgcagatccatagtcaggatgaacctcctttcatcgaccagctgggctttggcgtggccccaggcttccagacctttgtggcctgccaggagcagcggctcatctacctgcccccaccctggggcacctgcaaagctgttaccatggactcggatttggatttcttcgactcctacagcatcactgcctgccgcatcgactgtgagacgcgctacctggtggagaactgcaactgccgcatggtgcacatgccaggggatgccccatactgtactccagagcagtacaaggagtgtgcagatcctgctctggacttcctggtggagaaggaccaggagtactgcgtgtgtgaaatgccttgcaacctgacccgctatggcaaagagctgtccatggtcaagatccccagcaaagcctcagccaagtacctggccaagaagttcaacaaatctgagcaatacataggggagaacatcctggtgctggacattttctttgaagtcctcaactatgagaccattgaacagaagaaggcctatgagattgcagggctcctgggtgagctgctgatgacacctgtccccttctcatgccatgggcatggcgtggctccctatcatccaaaagcagggtgctcacttctgtcccatgagggtcctccaccccagaggcccttccccaaaccctgttgtcttggtgacatcgggggccagatggggctgttcatcggggccagcatcctcacggtgctggagctctttgactacgcctacgaggtcattaagcacaagctgtgccgacgaggaaaatgccagaaggaggccaaaaggagcagtgcggacaagggcgtggccctcagcctggacgacgtcaaaagacacaacccgtgcgagagccttcggggccaccctgccgggatgacatacgctgccaacatcctacctcaccatccggcccgaggcacgttcgaggactttacctgctgagccccgcaggccgctgaaccaaaggcctagatggggaggactaggagagcgagggggcccccagctgcctcctcacatctgccctggggactccccacactccggggcagatctttcctcttgtctgtggtaaggaaggagtcttgaccatagagtcctctctctgcctctatcccattctttttacatttaacaaaactaatctaaaaaagaactaaaaagggagaacggggcaagggacctcaggctgcccctctctcctccatgctgcctcccctagctcccagcctgaattctgtctatctagctgtctgccatctgagtgtccatctacattctgctgccaccagtcaccaaaggcccttcccagtgaggggtggaagggatctctggggtctggaatttggccccaaaccagagaatgtaccttaagggggagggctagtgtgggggagggaggcttccccagccttaagagaccctctcagcccagtgactgtccccaaacccaagtctcctggcaggaactaaaacctcagccccactctctcacaccatgtggaatctcgtgggggtcggggatccccttaagaagtggtaatggggacaagatgcggccctggtgctgtaggctacatcctgatacctataagttcacccccaccccacagctgctggagagaaatcccaagaggcagcccttcctcaccatcccattaaagacctggctggttagcgtccagctcagggagaagggcgctagtgcctaacctcactggtccctctcccggaggcccttgtagagggccacgtccataaattttcttatggaactctcccacatcctcttccccaacttcatttgcttctctcaacaacctcatctgcattttctatttctatatgatacagactctatattgctatatctctgtatatactttcccagccctgtctgtctccaccccatcccctcttgtctctgagaaccattctcccaccccaagttccaccttctatgtttctactccctccctggtctctgaatgccttcgcctgtataaagagttggactctc

SEQ ID NO: 30047 - DNA, 3396 bp, Homo sapiens
cgcctcccggccggacgatggatccctgcagatcccagggctgagagcaccgcgcaccgcgccgagcccgggcagaccgagccgaggcgagcgagccagcgagccagcgcgcgcgggcgggcggacagatcggagccgagcggggccgggcggggcgctccctgcagggctctgcgcggcgtgccgcggcggccgcgggctccggccccgggccatgagcccctccgcgactcggcgctgagcccgccaccggtccagcgccccaggacccgccgccggctgccggcttgccgaagccccctcaggatcccctcaacaaggatggaactgaaggccgaggaggaggaggtgggtggcgtccagccggtgagcatccaggccttcgccagcagctccacactgcacggcctggcccacatcttctcctacgagcggctgtctctgaagcgggcactgtgggccctgtgcttcctgggctcgctggctgtgctgctgtgtgtgtgcacggagcgtgtgcagtactacttccactaccaccatgtcaccaagctcgacgaggtggctgcctctcagcttaccttccctgctgtcacgctgtgcaacctcaacgagttccgctttagccaagtctccaagaatgacctgtatcatgctggggagctgctggccctgctcaacaacaggtatgagataccagacacacagatggcagatgaaaagcagctggagatactgcaggacaaagccaacttccgcagcttcaaacccaaacccttcaacatgcgtgagttctacgaccgagctgggcacgacattcgagacatgctgctctcctgccacttccggggggaggtctgcagcgctgaagacttcaaggtggtcttcacacgctatggaaagtgctacacgttcaactcgggccgagatgggcggccgcggctgaagaccatgaagggtgggacgggcaatgggctggaaatcatgctggacatccagcaggacgagtacctgcctgtgtggggggagactgacgagacgtccttcgaagcaggcatcaaagtgcagatccatagtcaggatgaacctcctttcatcgaccagctgggctttggcgtggccccaggcttccagacctttgtggcctgccaggagcagcggctcatctacctgcccccaccctggggcacctgcaaagctgttaccatggactcggatttggatttcttcgactcctacagcatcactgcctgccgcatcgactgtgagacgcgctacctggtggagaactgcaactgccgcatggtgcacatgccaggggatgccccatactgtactccagagcagtacaaggagtgtgcagatcctgctctggacttcctggtggagaaggaccaggagtactgcgtgtgtgaaatgccttgcaacctgacccgctatggcaaagagctgtccatggtcaagatccccagcaaagcctcagccaagtacctggccaagaagttcaacaaatctgagcaatacataggggagaacatcctggtgctggacattttctttgaagtcctcaactatgagaccattgaacagaagaaggcctatgagattgcagggctcctgggtgacatcgggggccagatggggctgttcatcggggccagcatcctcacggtgctggagctctttgactacgcctacgaggtcattaagcacaagctgtgccgacgaggaaaatgccagaaggaggccaaaaggagcagtgcggacaagggcgtggccctcagcctggacgacgtcaaaagacacaacccgtgcgagagccttcggggccaccctgccgggatgacatacgctgccaacatcctacctcaccatccggcccgaggcacgttcgaggactttacctgctgagccccgcaggccgctgaaccaaaggcctagatggggaggactaggagagcgagggggcccccagctgcctcctcacatctgccctggggactccccacactccggggcagatctttcctcttgtctgtggtaaggaaggagtcttgaccatagagtcctctctctgcctctatcccattctttttacatttaacaaaactaatctaaaaaagaactaaaaagggagaacggggcaagggacctcaggctgcccctctctcctccatgctgcctcccctagctcccagcctgaattctgtctatctagctgtctgccatctgagtgtccatctacattctgctgccaccagtcaccaaaggcccttcccagtgaggggtggaagggatctctggggtctggaatttggccccaaaccagagaatgtaccttaagggggagggctagtgtgggggagggaggcttccccagccttaagagaccctctcagcccagtgactgtccccaaacccaagtctcctggcaggaactaaaacctcagccccactctctcacaccatgtggaatctcgtgggggtcggggatccccttaagaagtggtaatggggacaagatgcggccctggtgctgtaggctacatcctgatacctataagttcacccccaccccacagctgctggagagaaatcccaagaggcagcccttcctcaccatcccattaaagacctggctggttagcgtccagctcagggagaagggcgctagtgcctaacctcactggtccctctcccggaggcccttgtagagggccacgtccataaattttcttatggaactctcccacatcctcttccccaacttcatttgcttctctcaacaacctcatctgcattttctatttctatatgatacagactctatattgctatatctctgtatatactttcccagccctgtctgtctccaccccatcccctcttgtctctgagaaccattctcccaccccaagttccaccttctatgtttctactccctccctggtctctgaatgccttcgcctgtataaagagttggactctctcccctggtgtctgtactgtgtacacacatccctctgagaagcacaaggagacgacacgcgcattgtaacctttgcactgtctcagtggcgacaaaggaagctgtgaatcacaagctctgcctctttctggcctcaccctctcccccaacccgggcaccctcggccctcctgcattggcctggagctggagagtaaggctgtaggatctttggaatctcttggttcctaagagtttcctcagagatcatacctccccagagggaagcaggaatgaggccaaaaagtgtgcattggataggggaacagcaggcagggctctgggtgacgcatgcctctggtctaataaactgggtttcaaccatcaaaaaaaaaaattttctacacaataatacttattattaatataacc

SEQ ID NO: 30048 - DNA, 2323 bp, Homo sapiens
cggaaagagaaaggggcccagagtttctctgggcagagctaggatgtgcatgtgggaaggtgctggcagaagggcaccactcaactgagacctctcacctggctgagtgcagacttcctggtggagaaggaccaggagtactgcgtgtgtgaaatgccttgcaacctgacccgctatggcaaagagctgtcctgtccccttcccccagaacccgtgcgagagccttcggggccaccctgccgggatgacatacgctgccaacatcctacctcaccatccggcccgaggcacgttcgaggactttacctgctgagccccgcaggccgctgaaccaaaggcctagatggggaggactaggagagcgagggggcccccagctgcctcctcacatctgccctggggactccccacactccggggcagatctttcctcttgtctgtggtaaggaaggagtcttgaccatagagtcctctctctgcctctatcccattctttttacatttaacaaaactaatctaaaaaagaactaaaaagggagaacggggcaagggacctcaggctgcccctctctcctccatgctgcctcccctagctcccagcctgaattctgtctatctagctgtctgccatctgagtgtccatctacattctgctgccaccagtcaccaaaggcccttcccagtgaggggtggaagggatctctggggtctggaatttggccccaaaccagagaatgtaccttaagggggagggctagtgtgggggagggaggcttccccagccttaagagaccctctcagcccagtgactgtccccaaacccaagtctcctggcaggaactaaaacctcagccccactctctcacaccatgtggaatctcgtgggggtcggggatccccttaagaagtggtaatggggacaagatgcggccctggtgctgtaggctacatcctgatacctataagttcacccccaccccacagctgctggagagaaatcccaagaggcagcccttcctcaccatcccattaaagacctggctggttagcgtccagctcagggagaagggcgctagtgcctaacctcactggtccctctcccggaggcccttgtagagggccacgtccataaattttcttatggaactctcccacatcctcttccccaacttcatttgcttctctcaacaacctcatctgcattttctatttctatatgatacagactctatattgctatatctctgtatatactttcccagccctgtctgtctccaccccatcccctcttgtctctgagaaccattctcccaccccaagttccaccttctatgtttctactccctccctggtctctgaatgccttcgcctgtataaagagttggactctctcccctggtgtctgtactgtgtacacacatccctctgagaagcacaaggagacgacacgcgcattgtaacctttgcactgtctcagtggcgacaaaggaagctgtgaatcacaagctctgcctctttctggcctcaccctctcccccaacccgggcaccctcggccctccctgcagccttaacattctcttcccctgctcctcctatcccattgccctctgcccagctgacagtggcatccccagggaaggggttgctgtagagatagcccccacccaggggatggaggtctaccctggacactaagccaagtgtgtcagagacagaagggagctggggattggcgactcctgaagttggggcagtgggatgctgacaggcagaagctgaggtcctcagtcagtggcctttcctccttctgggtgcccagccccctttcctcacctgatacccaagcccaccacttttattttctggtgaggtgggtttgggaggaaagagaggcctagaggaggagttgaaagctctgctgttgtctcaccctatcttaatgagagacaagtgaggtggagggcctgccccccctccctccaccagacactccttccaggcctgagccccaacccctcttcaggccttccttccctagctgtgtcttggtcttcaatcccagaacaggacctgtgagcagctgcattggcctggagctggagagtaaggctgtaggatctttggaatctcttggttcctaagagtttcctcagagatcatacctccccagagggaagcaggaatgaggccaaaaagtgtgcattggataggggaacagcaggcagggctctgggtgacgcatgcctctggtctaataaactgggtttcaaccatcaaaaaaaaaaattttctacacaataatacttattattaatataacc

SEQ ID NO: 30049 - DNA, 2015 bp, Homo sapiens
ctggttgaccctggagggtcctgaggaagtgagatataagagtaagaaatatccatggggaggcttggtgagaattagcacatctgccctggggactccccacactccggggcagatctttcctcttgtctgtggtaaggaaggagtcttgaccatagagtcctctctctgcctctatcccattctttttacatttaacaaaactaatctaaaaaagaactaaaaagggagaacggggcaagggacctcaggctgcccctctctcctccatgctgcctcccctagctcccagcctgaattctgtctatctagctgtctgccatctgagtgtccatctacattctgctgccaccagtcaccaaaggcccttcccagtgaggggtggaagggatctctggggtctggaatttggccccaaaccagagaatgtaccttaagggggagggctagtgtgggggagggaggcttccccagccttaagagaccctctcagcccagtgactgtccccaaacccaagtctcctggcaggaactaaaacctcagccccactctctcacaccatgtggaatctcgtgggggtcggggatccccttaagaagtggtaatggggacaagatgcggccctggtgctgtaggctacatcctgatacctataagttcacccccaccccacagctgctggagagaaatcccaagaggcagcccttcctcaccatcccattaaagacctggctggttagcgtccagctcagggagaagggcgctagtgcctaacctcactggtccctctcccggaggcccttgtagagggccacgtccataaattttcttatggaactctcccacatcctcttccccaacttcatttgcttctctcaacaacctcatctgcattttctatttctatatgatacagactctatattgctatatctctgtatatactttcccagccctgtctgtctccaccccatcccctcttgtctctgagaaccattctcccaccccaagttccaccttctatgtttctactccctccctggtctctgaatgccttcgcctgtataaagagttggactctctcccctggtgtctgtactgtgtacacacatccctctgagaagcacaaggagacgacacgcgcattgtaacctttgcactgtctcagtggcgacaaaggaagctgtgaatcacaagctctgcctctttctggcctcaccctctcccccaacccgggcaccctcggccctccctgcagccttaacattctcttcccctgctcctcctatcccattgccctctgcccagctgacagtggcatccccagggaaggggttgctgtagagatagcccccacccaggggatggaggtctaccctggacactaagccaagtgtgtcagagacagaagggagctggggattggcgactcctgaagttggggcagtgggatgctgacaggcagaagctgaggtcctcagtcagtggcctttcctccttctgggtgcccagccccctttcctcacctgatacccaagcccaccacttttattttctggtgaggtgggtttgggaggaaagagaggcctagaggaggagttgaaagctctgctgttgtctcaccctatcttaatgagagacaagtgaggtggagggcctgccccccctccctccaccagacactccttccaggcctgagccccaacccctcttcaggccttccttccctagctgtgtcttggtcttcaatcccagaacaggacctgtgagcagctgcattggcctggagctggagagtaaggctgtaggatctttggaatctcttggttcctaagagtttcctcagagatcatacctccccagagggaagcaggaatgaggccaaaaagtgtgcattggataggggaacagcaggcagggctctgggtgacgcatgcctctggtctaataaactgggtttcaaccatcaaaaaaaaaaattttctacacaataatacttattattaatataacc

SEQ ID NO: 30050 - DNA, 1541 bp, Homo sapiens
atcttcactgatccattaccattcgatgttcttttattcagagcaatgtttcatgtatcctgaaactggaaactgaaccagttagtttctccatagtcaccaagcatactttcctgggatctagcccaggtctttccatgggatgcggccctggtgctgtaggctacatcctgatacctataagttcacccccaccccacagctgctggagagaaatcccaagaggcagcccttcctcaccatcccattaaagacctggctggttagcgtccagctcagggagaagggcgctagtgcctaacctcactggtccctctcccggaggcccttgtagagggccacgtccataaattttcttatggaactctcccacatcctcttccccaacttcatttgcttctctcaacaacctcatctgcattttctatttctatatgatacagactctatattgctatatctctgtatatactttcccagccctgtctgtctccaccccatcccctcttgtctctgagaaccattctcccaccccaagttccaccttctatgtttctactccctccctggtctctgaatgccttcgcctgtataaagagttggactctctcccctggtgtctgtactgtgtacacacatccctctgagaagcacaaggagacgacacgcgcattgtaacctttgcactgtctcagtggcgacaaaggaagctgtgaatcacaagctctgcctctttctggcctcaccctctcccccaacccgggcaccctcggccctccctgcagccttaacattctcttcccctgctcctcctatcccattgccctctgcccagctgacagtggcatccccagggaaggggttgctgtagagatagcccccacccaggggatggaggtctaccctggacactaagccaagtgtgtcagagacagaagggagctggggattggcgactcctgaagttggggcagtgggatgctgacaggcagaagctgaggtcctcagtcagtggcctttcctccttctgggtgcccagccccctttcctcacctgatacccaagcccaccacttttattttctggtgaggtgggtttgggaggaaagagaggcctagaggaggagttgaaagctctgctgttgtctcaccctatcttaatgagagacaagtgaggtggagggcctgccccccctccctccaccagacactccttccaggcctgagccccaacccctcttcaggccttccttccctagctgtgtcttggtcttcaatcccagaacaggacctgtgagcagctgcattggcctggagctggagagtaaggctgtaggatctttggaatctcttggttcctaagagtttcctcagagatcatacctccccagagggaagcaggaatgaggccaaaaagtgtgcattggataggggaacagcaggcagggctctgggtgacgcatgcctctggtctaataaactgggtttcaaccatcaaaaaaaaaaattttctacacaataatacttattattaatataacc

SEQ ID NO: 30051 - DNA, 1049 bp, Homo sapiens
cgcctcccggccggacgatggatccctgcagatcccagggctgagagcaccgcgcaccgcgccgagcccgggcagaccgagccgaggcgagcgagccagcgagccagcgcgcgcgggcgggcggacagatcggagccgagcggggccgggcggggcgctccctgcagggctctgcgcggcgtgccgcggcggccgcgggctccggccccgggccatgagcccctccgcgactcggcgctgagcccgccaccggtccagcgccccaggacccgccgccggctgccggcttgccgaagccccctcaggatcccctcaacaaggatggaactgaaggccgaggaggaggaggtgggtggcgtccagccggtgagcatccaggccttcgccagcagctccacactgcacggcctggcccacatcttctcctacgagcggctgtctctgaagcgggcactgtgggccctgtgcttcctgggctcgctggctgtgctgctgtgtgtgtgcacggagcgtgtgcagtactacttccactaccaccatgtcaccaagctcgacgaggtggctgcctctcagcttaccttccctgctgtcacgctgtgcaacctcaacgagttccgctttagccaagtctccaagaatgacctgtatcatgctggggagctgctggccctgctcaacaacaggtatgagataccagacacacagatggcagatgaaaagcagctggagatactgcaggacaaagccaacttccgcagcttcaaacccaaacccttcaacatgcgtgagttctacgaccgagctgggcacgacattcgagacatgctgctctcctgccacttccggggggaggtctgcagcgctgaagacttcaaggtgcttcacacgctatggaaagtgctacacgttcttggccaccacaatgggagcagccctggccgagttgtctctgtggtttctatgcagcccttcttggcgaaattcctgcgatcttatagattctaatgagctcttggaagacattgtcataaaagccagtgattttaaga

SEQ ID NO: 30052 - DNA, 592 bp, Homo sapiens
gtcattaagcacaagctgtgccgacgaggaaaatgccagaaggaggccaaaaggagcagtgcggacaagggcgtggccctcagcctggacgacgtcaaaagacacgtgagggagcgagcgagggcgccctccagcccgcctgtgcctccaccgccccaggaaccccgtccacccccgcccacccgcctctgccaccaccttctctcctttgcctcccgaatgccccagcactacctgaagcccttccgagggataacccgtccctgtcctgtccccttcccccagaacccgtgcgagagccttcggggccaccctgccgggatgacatacgctgccaacatcctacctcaccatccggcccgaggcacgttcgaggactttacctgctgagccccgcaggccgctgaaccaaaggcctagatggggaggactaggagagcgagggggcccccagctgcctcctcacatctgccctggggactccccacactccggggcagatctttcctcttgtctgtggtaaggaaggagtcttgaccatagagtcctctctctgcctctatcccattctttttacatttaacaaaactaa

SEQ ID NO: 30053 - DNA, 564 bp, Homo sapiens
agggccatgggaggctggtcctggggtggggtattgaggggtccagatggagtggtgggcaatcagtaatgggaaggacaggtgagcaaggacctgggtggtaatctggctagtcagaagcatgagtgatcgaatgaacaagaatgctctgtaaactctgagacctttggaggctgcagagggagaggggagcagaactccagagatctgcatcttgtcagaggagtccatcaagctgatttggggagaagtccccgcactcccccagctccccggctctcccagcagctcatctacctgcccccaccctggggcacctgcaaagctgttaccatggactcggatttggatttcttcgactcctacagcatcactgcctgccgcatcgactgtgagacgcgctacctggtggagaactgcaactgccgcatggtgcacatgccaggtcaggcctggggctccgagcatactcctggggtccctgggcctttgctgcccttcactagctccccatccatatcaatctcccaaccccagttccagcccaccccatcccacacccac

SEQ ID NO: 30054 - DNA, 3339 bp, Homo sapiens
agtgagcagtactaggaaatcgttatcacttctaggctgaagaagcacaaaagaagacagtgctctgtagggagccctggcaggatctgtaatcatggagggcctaaggcactactagagctacagaggggcgagggctggggaaggattcataccccaatctttcctcctgccttctgagccattaccaatacctcccaactgtcaaccccaactagaagcccatgcaggtggcaaaggagctcaggcgatgcaccctaccaggaacagttttccagggcacacagagggcaagaaagggtcttcacacgctatggaaagtgctacacgttcaactcgggccgagatgggcggccgcggctgaagaccatgaagggtgggacgggcaatgggctggaaatcatgctggacatccagcaggacgagtacctgcctgtgtggggggagactgacgagacgtccttcgaagcaggcatcaaagtgcagatccatagtcaggatgaacctcctttcatcgaccagctgggctttggcgtggccccaggcttccagacctttgtggcctgccaggagcagcggctcatctacctgcccccaccctggggcacctgcaaagctgttaccatggactcggatttggatttcttcgactcctacagcatcactgcctgccgcatcgactgtgagacgcgctacctggtggagaactgcaactgccgcatggtgcacatgccaggggatgccccatactgtactccagagcagtacaaggagtgtgcagatcctgctctggacttcctggtggagaaggaccaggagtactgcgtgtgtgaaatgccttgcaacctgacccgctatggcaaagagctgtccatggtcaagatccccagcaaagcctcagccaagtacctggccaagaagttcaacaaatctgagcaatacataggggagaacatcctggtgctggacattttctttgaagtcctcaactatgagaccattgaacagaagaaggcctatgagattgcagggctcctgggtgacatcgggggccagatggggctgttcatcggggccagcatcctcacggtgctggagctctttgactacgcctacgaggtcattaagcacaagctgtgccgacgaggaaaatgccagaaggaggccaaaaggagcagtgcggacaagggcgtggccctcagcctggacgacgtcaaaagacacaacccgtgcgagagccttcggggccaccctgccgggatgacatacgctgccaacatcctacctcaccatccggcccgaggcacgttcgaggactttacctgctgagccccgcaggccgctgaaccaaaggcctagatggggaggactaggagagcgagggggcccccagctgcctcctcacatctgccctggggactccccacactccggggcagatctttcctcttgtctgtggtaaggaaggagtcttgaccatagagtcctctctctgcctctatcccattctttttacatttaacaaaactaatctaaaaaagaactaaaaagggagaacggggcaagggacctcaggctgcccctctctcctccatgctgcctcccctagctcccagcctgaattctgtctatctagctgtctgccatctgagtgtccatctacattctgctgccaccagtcaccaaaggcccttcccagtgaggggtggaagggatctctggggtctggaatttggccccaaaccagagaatgtaccttaagggggagggctagtgtgggggagggaggcttccccagccttaagagaccctctcagcccagtgactgtccccaaacccaagtctcctggcaggaactaaaacctcagccccactctctcacaccatgtggaatctcgtgggggtcggggatccccttaagaagtggtaatggggacaagatgcggccctggtgctgtaggctacatcctgatacctataagttcacccccaccccacagctgctggagagaaatcccaagaggcagcccttcctcaccatcccattaaagacctggctggttagcgtccagctcagggagaagggcgctagtgcctaacctcactggtccctctcccggaggcccttgtagagggccacgtccataaattttcttatggaactctcccacatcctcttccccaacttcatttgcttctctcaacaacctcatctgcattttctatttctatatgatacagactctatattgctatatctctgtatatactttcccagccctgtctgtctccaccccatcccctcttgtctctgagaaccattctcccaccccaagttccaccttctatgtttctactccctccctggtctctgaatgccttcgcctgtataaagagttggactctctcccctggtgtctgtactgtgtacacacatccctctgagaagcacaaggagacgacacgcgcattgtaacctttgcactgtctcagtggcgacaaaggaagctgtgaatcacaagctctgcctctttctggcctcaccctctcccccaacccgggcaccctcggccctccctgcagccttaacattctcttcccctgctcctcctatcccattgccctctgcccagctgacagtggcatccccagggaaggggttgctgtagagatagcccccacccaggggatggaggtctaccctggacactaagccaagtgtgtcagagacagaagggagctggggattggcgactcctgaagttggggcagtgggatgctgacaggcagaagctgaggtcctcagtcagtggcctttcctccttctgggtgcccagccccctttcctcacctgatacccaagcccaccacttttattttctggtgaggtgggtttgggaggaaagagaggcctagaggaggagttgaaagctctgctgttgtctcaccctatcttaatgagagacaagtgaggtggagggcctgccccccctccctccaccagacactccttccaggcctgagccccaacccctcttcaggccttccttccctagctgtgtcttggtcttcaatcccagaacaggacctgtgagcagctgcattggcctggagctggagagtaaggctgtaggatctttggaatctcttggttcctaagagtttcctcagagatcatacctccccagagggaagcaggaatgaggccaaaaagtgtgcattggataggggaacagcaggcagggctctgggtgacgcatgcctctggtctaataaactgggtttcaaccatcaaaaaaaaaaattttctacacaataatacttattattaatataacc

SEQ ID NO: 30055 - DNA, 2613 bp, Homo sapiens
cgcctcccggccggacgatggatccctgcagatcccagggctgagagcaccgcgcaccgcgccgagcccgggcagaccgagccgaggcgagcgagccagcgagccagcgcgcgcgggcgggcggacagatcggagccgagcggggccgggcggggcgctccctgcagggctctgcgcggcgtgccgcggcggccgcgggctccggccccgggccatgagcccctccgcgactcggcgctgagcccgccaccggtccagcgccccaggacccgccgccggctgccggcttgccgaagccccctcaggatcccctcaacaaggatggaactgaaggccgaggaggaggaggtgggtggcgtccagccggtgagcatccaggccttcgccagcagctccacactgcacggcctggcccacatcttctcctacgagcggctgtctctgaagcgggcactgtgggccctgtgcttcctgggctcgctggctgtgctgctgtgtgtgtgcacggagcgtgtgcagtactacttccactaccaccatgtcaccaagctcgacgaggtggctgcctctcagcttaccttccctgctgtcacgctgtgcaacctcaacgagttccgtgaaccaaaggcctagatggggaggactaggagagcgagggggcccccagctgcctcctcacatctgccctggggactccccacactccggggcagatctttcctcttgtctgtggtaaggaaggagtcttgaccatagagtcctctctctgcctctatcccattctttttacatttaacaaaactaatctaaaaaagaactaaaaagggagaacggggcaagggacctcaggctgcccctctctcctccatgctgcctcccctagctcccagcctgaattctgtctatctagctgtctgccatctgagtgtccatctacattctgctgccaccagtcaccaaaggcccttcccagtgaggggtggaagggatctctggggtctggaatttggccccaaaccagagaatgtaccttaagggggagggctagtgtgggggagggaggcttccccagccttaagagaccctctcagcccagtgactgtccccaaacccaagtctcctggcaggaactaaaacctcagccccactctctcacaccatgtggaatctcgtgggggtcggggatccccttaagaagtggtaatggggacaagatgcggccctggtgctgtaggctacatcctgatacctataagttcacccccaccccacagctgctggagagaaatcccaagaggcagcccttcctcaccatcccattaaagacctggctggttagcgtccagctcagggagaagggcgctagtgcctaacctcactggtccctctcccggaggcccttgtagagggccacgtccataaattttcttatggaactctcccacatcctcttccccaacttcatttgcttctctcaacaacctcatctgcattttctatttctatatgatacagactctatattgctatatctctgtatatactttcccagccctgtctgtctccaccccatcccctcttgtctctgagaaccattctcccaccccaagttccaccttctatgtttctactccctccctggtctctgaatgccttcgcctgtataaagagttggactctctcccctggtgtctgtactgtgtacacacatccctctgagaagcacaaggagacgacacgcgcattgtaacctttgcactgtctcagtggcgacaaaggaagctgtgaatcacaagctctgcctctttctggcctcaccctctcccccaacccgggcaccctcggccctccctgcagccttaacattctcttcccctgctcctcctatcccattgccctctgcccagctgacagtggcatccccagggaaggggttgctgtagagatagcccccacccaggggatggaggtctaccctggacactaagccaagtgtgtcagagacagaagggagctggggattggcgactcctgaagttggggcagtgggatgctgacaggcagaagctgaggtcctcagtcagtggcctttcctccttctgggtgcccagccccctttcctcacctgatacccaagcccaccacttttattttctggtgaggtgggtttgggaggaaagagaggcctagaggaggagttgaaagctctgctgttgtctcaccctatcttaatgagagacaagtgaggtggagggcctgccccccctccctccaccagacactccttccaggcctgagccccaacccctcttcaggccttccttccctagctgtgtcttggtcttcaatcccagaacaggacctgtgagcagctgcattggcctggagctggagagtaaggctgtaggatctttggaatctcttggttcctaagagtttcctcagagatcatacctccccagagggaagcaggaatgaggccaaaaagtgtgcattggataggggaacagcaggcagggctctgggtgacgcatgcctctggtctaataaactgggtttcaaccatcaaaaaaaaaaattttctacacaataatacttattattaatataacc

SEQ ID NO: 30056 - DNA, 438 bp, Homo sapiens
ctggtgctggacattttctttgaagtcctcaactatgagaccattgaacagaagaaggcctatgagattgcagggctcctgggtgagctgctgatgacacctgtccccttctcatgccatgggcatggcgtggctccctatcatccaaaagcagggtgctcacttctgtcccatgagggtcctccaccccagaggcccttccccaaaccctgttgtcttggtaagtggtgagggaagggaactgagccttctcttagggcaaagtggaaaagagaaaagacaggcctgtgggcatgagggaggggtaggcatggaagtggagactatttcatatgcccctaaactaagagggttgtggtattttgtaaacgattatttttcttgaaaaacacctgcttgttttagaaaggtagaaaaacgcagaaaagcatagagaag

SEQ ID NO: 30057 - DNA, 1867 bp, Homo sapiens
gtctgaactcttctgctcaggagcgcctaataccacttgggcatgcttccaaatctgctccgatgaatggccactgctttgcagaaaatggtccatctcaaaagtccagcttgccccctcttcttattcccccaagtgaaaacttgggaccacatgaagaggatcaagttgtatgtggttttaagaaactcacagtgaatggggtttgtgcttccacccctccactgacacccataaaaaactccccttcccttttcccctgtgcccctctttgtgaacggggttctaggcctcttccaccgttgccaatctctgaagccctctctctggatgacacagactgtgaggtggaattcctaactagctcagatacagacttccttttagaagactctacactttctgatttcaaatatgatgttcctggcaggcgaagcttccgtgggtgtggacaaatcaactatgcatattttgataccccagctgtttctgcagcagatctcagctatgtgtctgaccaaaatggaggtgtcccagatccaaatcctcctccacctcagacccaccgaagattaagaaggtctcattcgggaccagctggctcctttaacaagccagccataaggatatccaactgttgtatacacagagcttctcctaactccgatgaagacaaacctgaggttccccccagagttcccatacctcctagaccagtaaagccagattatagaagatggtcagcagaagttacttcgagcacctatagtgatgaagacaggcctcccaaagtaccgccaagagaacctttgtcaccgagtaactcgcgcacaccgagtcccaaaagccttccgtcttacctcaatggggtcatgcccccgacacagagctttgcccctgatcccaagtatgtcagcagcaaagcactgcaaagacagaacagcgaaggatctgccagtaaggttccttgcattctgcccattattgaaaatgggaagaaggttagttcaacacattattacctactacctgaacgaccaccatacctggacaaatatgaaaaattttttagggaagcagaagaaacaaatggaggcgcccaaatccagccattacctgctgactgcggtatatcttcagccacagaaaagccagactcaaaaacaaaaatggatctgggtggccacgtgaagcgtaaacatttatcctatgtggtttctccttagaccttggggtcatggttcagcagaggttacataggagcaaatggttctcaattttccagtttgattgaagtgcagagaaaaatcccttagattgcaaaataaaatagttgaactctctgtcttcatgtggaaggtttagagcagttgtgagatgctgttatgctgagaaaccctgactttgttagtgttggaaaaaagtcttacaagtctataatttaaagatgtgatggtggggaggggaggatggggaagctttttatatatgcatacattacatacctatatataaacttgtggtataaccatagaccatagctgcaggttaaccaattagttactatcgtagagtaatatatattcagaataataaactcaagctggagaaatgagtcctgatagactgaaaattgagcaaatggaagaagatacagtattgtttagatcagaatcattaaaaaatatttttgtttagtaagtttgaagatttctggcttttaggccttttctattttgttccatttatttttgcaggcaatcttttccatggagggcagggtatccattctttaccatgggtgtacctgcttaggttaaaaatcataccaaggcctcatacttccaggtttcatgttgcgtcttgt

SEQ ID NO: 30058 - DNA, 1458 bp, Homo sapiens
cactaagggaatcactggttttttggtttttgtttcttttttttttggagatggagtctcgctctgtcacccaggctggaggagtgtagtggcgcgatcttggctcactacaagctccgccccccaggttcacaccattctcccgcctcagacccaccgaagattaagaaggtctcattcgggaccagctggctcctttaacaagccagccataaggatatccaactgttgtatacacagagcttctcctaactccgatgaagacaaacctgaggttccccccagagttcccatacctcctagaccagtaaagccagattatagaagatggtcagcagaagttacttcgagcacctatagtgatgaagacaggcctcccaaagtaccgccaagagaacctttgtcaccgagtaactcgcgcacaccgagtcccaaaagccttccgtcttacctcaatggggtcatgcccccgacacagagctttgcccctgatcccaagtatgtcagcagcaaagcactgcaaagacagaacagcgaaggatctgccagtaaggttccttgcattctgcccattattgaaaatgggaagaaggttagttcaacacattattacctactacctgaacgaccaccatacctggacaaatatgaaaaattttttagggaagcagaagaaacaaatggaggcgcccaaatccagccattacctgctgactgcggtatatcttcagccacagaaaagccagactcaaaaacaaaaatggatctgggtggccacgtgaagcgtaaacatttatcctatgtggtttctccttagaccttggggtcatggttcagcagaggttacataggagcaaatggttctcaattttccagtttgattgaagtgcagagaaaaatcccttagattgcaaaataaaatagttgaactctctgtcttcatgtggaaggtttagagcagttgtgagatgctgttatgctgagaaaccctgactttgttagtgttggaaaaaagtcttacaagtctataatttaaagatgtgatggtggggaggggaggatggggaagctttttatatatgcatacattacatacctatatataaacttgtggtataaccatagaccatagctgcaggttaaccaattagttactatcgtagagtaatatatattcagaataataaactcaagctggagaaatgagtcctgatagactgaaaattgagcaaatggaagaagatacagtattgtttagatcagaatcattaaaaaatatttttgtttagtaagtttgaagatttctggcttttaggccttttctattttgttccatttatttttgcaggcaatcttttccatggagggcagggtatccattctttaccatgggtgtacctgcttaggttaaaaatcataccaaggcctcatacttccaggtttcatgttgcgtcttgt

SEQ ID NO: 30059 - DNA, 1083 bp, Homo sapiens
  misc_feature (17)..(17): n is a, c, g, or t
  misc_feature (241)..(241): n is a, c, g, or t
atgagcatccaaaagangtatctggagggagattttgtctttcctgtgagcagcagcagcttcctacggaccctgctggagccccagctcggatcagcccttctgacagcaatgaatgcttcgtgctgcctgccctctgttcagccaacactgcctaatggctcggagcacctccaagcccctttcttcagcaaccagagcagcagcgccttctgtgagcaggtcttcatcaagcccgagnttttcctgtctctgggcatcgtcagtctgctggaaaacatcctggttatcctggccgtggtcaggaacggcaacctgcactccccgatgtacttctttctctgcagcctggcggtggccgacatgctggtaagtgtgtccaatgccctggagaccatcatgatcgccatcgtccacagcgactacctgaccttcgaggaccagtttatccagcacatggacaacatcttcgactccatgatctgcatctccctggtggcctccatctgcaacctcctggccatcgccgtcgacaggtacgtcaccatcttttacgcgctccgctaccacagcatcatgaccgtgaggaaggccctcaccttgatcgtggccatctgggtctgctgcggcgtctgtggcgtggtgttcatcgtctactcggagagcaaaatggtcattgtgtgcctcatcaccatgttcttcgccatgatgctcctcatgggcaccctctacgtgcacatgttcctctttgcgcggctgcacgtcaagcgcatagcagcactgccacctgccgacggggtggccccacagcaacactcatgcatgaagggggcagtcaccatcaccattctcctgggcgtgttcatcttctgctgggcccccttcttcctccacctggtcctcatcatcacctgccccaccaacccctactgcatctgctacactgcccacttcaacacctacctggtcctcatcatgtgcaactccgtcatcgacccactcatctacgctttccggagcctggaattgcgcaacacctttagggagattctctgtggctgcaacggcatgaacttgggatag

SEQ ID NO: 30060 - DNA, 294 bp, Homo sapiens
taaggatactttataactgaaagggatgactttagtttggtaaaatttgaagcaaaagagaagctgaggcaccaatcataccctatacagacagctaagcacattgtgtaaggcagatgttgcccaccactcagcccattagagagctcatgcaccatcaaagccagaataaagcaataagcccaatggtgatccaaccctttgctggtgttaattttttttttttttagacagcgtcttgctctgtcgccaggtgggagtgcagtggtacaatctcagctcactgcaacctcc

SEQ ID NO: 30061 - DNA, 137 bp, Homo sapiens
ccatctcatccccaaaagtacaaaaactaaataaacaaaacaaaaacaaaaccatactactattattatgaggcctgagataatttttaaggttgcctgaaacaacataaaacctcccctcatgggccaggcgcggt

SEQ ID NO: 30062 - DNA, 933 bp, Homo sapiens
  misc_feature (833)..(833): n is a, c, g, or t
  misc_feature (843)..(843): n is a, c, g, or t
  misc_feature (856)..(856): n is a, c, g, or t
  misc_feature (858)..(858): n is a, c, g, or t
  misc_feature (900)..(900): n is a, c, g, or t
aagagaccatatttgttcgcagaggaagccgttgctttctgggatctggctacgccagaaaagacatcggctccaacaggggtgttccacagggtagctgggagttggaagagccaagaacgcctccgagctctggatttgagcttctctgcccatgggtgaagcgcccatgctcagcttgtgagcttcttcccgggagagcagccatggcactgaggaatgtgccctttcgctcagaggtcctgggctgggaccccgacagccttgctgactatttcaagaagctcaactataaggactgtgagaaggcagtgaagaagtaccacatcgatggggctcgcttcttgaacctgacagaaaatgacatccagaagttccccaagctccgggtgccgattctcagtaagttaagtcaggaaatcaacaagaacgaagagaggaggagcatcttcacacgcaaaccccaagtcccgcggtttcctgaagagacagaaagccacgaagaggacaatgggggctggtcgtcctttgaagaagacgattatgaaagtcccaatgatgaccaggatggggaggatgatggagactatgagtcccccaatgaggaggaagaggcacccgtggaagatgacgcggattatgagccgccaccctccaatgacgaggaagctctgcagaactccatcctgcctgccaagcctttccccaactccaactccatgtacatcgaccggcccccctctgggaaaaccccccagcagcctcctgtgcccccccagagaccgatggccgccctcccgcccccaccagccggccggaatcactcgccactnccccacccanaccaaccacgaananccagcagaagcagaaccacaaacggcaaaccccctgctcccncaaaagacagagcacgaaaccccccagaacgtc

SEQ ID NO: 30063 - DNA, 906 bp, Homo sapiens
  misc_feature (24)..(24): n is a, c, g, or t
  misc_feature (51)..(51): n is a, c, g, or t
  misc_feature (806)..(806): n is a, c, g, or t
  misc_feature (816)..(816): n is a, c, g, or t
  misc_feature (829)..(829): n is a, c, g, or t
  misc_feature (831)..(831): n is a, c, g, or t
  misc_feature (873)..(873): n is a, c, g, or t
atgccttattaagggctgaacacnttaatttagaaacccaacgcttgtggnttgtaaaactaaagcgtgtacgtcgatcggaggatgaagcaacgcctccgagctctggatttgagcttctctgcccatgggtgaagcgcccatgctcagcttgtgagcttcttcccgggagagcagccatggcactgaggaatgtgccctttcgctcagaggtcctgggctgggaccccgacagccttgctgactatttcaagaagctcaactataaggactgtgagaaggcagtgaagaagtaccacatcgatggggctcgcttcttgaacctgacagaaaatgacatccagaagttccccaagctccgggtgccgattctcagtaagttaagtcaggaaatcaacaagaacgaagagaggaggagcatcttcacacgcaaaccccaagtcccgcggtttcctgaagagacagaaagccacgaagaggacaatgggggctggtcgtcctttgaagaagacgattatgaaagtcccaatgatgaccaggatggggaggatgatggagactatgagtcccccaatgaggaggaagaggcacccgtggaagatgacgcggattatgagccgccaccctccaatgacgaggaagctctgcagaactccatcctgcctgccaagcctttccccaactccaactccatgtacatcgaccggcccccctctgggaaaaccccccagcagcctcctgtgcccccccagagaccgatggccgccctcccgcccccaccagccggccggaatcactcgccactnccccacccanaccaaccacgaananccagcagaagcagaaccacaaacggcaaaccccctgctcccncaaaagacagagcacgaaaccccccagaacgtc

SEQ ID NO: 30064 - DNA, 303 bp, Homo sapiens
aaacacacagcctccttcactggcaacactccacacgagagtagtcgattttttacaattgatgaacctacatcgacacatcattggctggatgtggtggctcacgcctgtaatcccagcactttgggaggctaaggtgggtggatcacctcaggtcaggagttcgagaccagcctgtccaacatggcaaaacctcgtctctactaaaaatacaaatattagccaagtgtgatggcaggcacctgtaattccaattacttgggaggtgagagaattgcttgaacctgggaggcagaggttgca

SEQ ID NO: 30065 - DNA, 293 bp, Homo sapiens
gagagctcaaaagaaagcatcaaaaatgaagcacagaaaacaacaaacagaaaatgcagatgaggctcagaaacagagacaggttgagaaatacaaatactactgtgttatagttgcctacagtattcagtacagaaacatgctgcacgggttttcagcctaggagcaacaggttataccgtatagcctaggtgtgtagtagactccactgtctcgctctacaatgtttgcacagcaacgaaatcacctaatgacacatttcttagaatgtttccctgtcattaagtaacaca

SEQ ID NO: 30066 - DNA, 889 bp, Homo sapiens
gggattacaggtgtgagccaccgtgcccagccatgagcggtcttgaaaatgaaaaatggtcttggcccacagaaaccaggtatgagggagtggttggaatggtataaagtcatcactgttagggaaacagtaactttaaatgcattttaacagtgggtctttaaaaatgaatgtcatttggttaaagagttttgctgggcattgagataatctgacagcatctccacttcctgttttttttcttaatctccactttttttttttctatgatgagcgcccctaaaatgctggtaagcttctttccaacaaaattgcggtcaaagtaggatgctggggaatgctgattttagcaaaagcttgtagaaaagagtggcctggcacatgagcttaaaaaaaagaaaaaaagctggctcttgaattttggcacagtgcaacctgttccataccagacaaatgaacaggcttaatctggtaccaattctttttctctcttactcctcagaagtgaagggactgcagatcttgttgttttggggacactttcatggaactgtatgtaggtttttttgaatggtgagaaatctgaataattggtaaggggaagggaatccctcatttcagcttttcttgatgttgttactaataactatgaaaaaacttctgagagaacaatgtgaactgaagatgactcagcagttaagacaatgctaagttctgaaaccacaggtaaatgaagggctaattaatgtgtggtatacttggacaaaatgaagtactcatttgcactggattactgtgtaatgataacgaacactgttcaagaacgatttatatttccataagatttgtactaaattttataaaagtaaaacaactttttataaaccca

SEQ ID NO: 30067 - DNA, 400 bp, Homo sapiens
acccgggaggcggaggttgcagtgagccgagatcacaccattgcactctggcctgggcaacaagagctctgtctcaaaaaaaaaaaaaaaaaaaaaaaaaaaagaaatgtacttcttggattccactccagacccagagaatcagaaactgcaggataaggcccagctctctcctggtgattctgatgttcacccaggtgggagaaccactgctccagaccctgtatttcaatgagtgaacggcactatacaaaaagcatagaaacgtcttcattctcaacctagcttcatgtccttctctggaaaatggaatgataccaccttaccagctggattgtaactgtctgttggtcagatacagtattttgatgatttcagtcaataactctgcaagccttgg

SEQ ID NO: 30068 - DNA, 513 bp, Homo sapiens
atctgttgacacgtcgacccttcttccacaagaccagaagctcatatccaatctaatgtcacttacccttctgagaatctgatgaaaatggcgtgccttatgtgcctagatgcttttgcacacagtctaaggtgacttatggactccaggtccagcagccacacccagtcctgggtctccgcacagggagggacccgtctcacacacctgtctcacgttctagcatgggcctgctcagcggtctcaggctgtgagtaaatgggatgtgagcttggatcgccccacactgttgcccccgggggctggccagctgccacttgaatgcctcctctgccaggaagctcactgcattcagtggctatccacgagttcagcttaggcagttttcactgatccctttggcactgtttagccagtgataacccactctgggaaatgtgttttgcatcatttcccggtccctggcaagtgtctagtcatcctggggtgatttttaccttctgtgggagagct

SEQ ID NO: 30069 - DNA, 455 bp, Homo sapiens
atgttcatatgtttttcaagaaatattgattgactagtatgtgttttgcggatatagcagtgaacaggatagacaaaggctttgcattcatagagtttatttgtacagtagtgtcacaggcaaactataaccaaatgaagaagtgaataaggaatacattatcaattccttttatgaagaaaatacaccggctgttgagagtgagaataagtgagggttactttagaccagccactttagaaaggctggttaggagcctggccagtgtggtgaaaccctgtctctaccaaaaaatataaaaatgagccaggcatggtggcacctgcttgtaatcccagctactcgggaggctgaggcatgagaatcacttgaaccagagaggcagaggttgcagcagtgagccaagatcccaccactgcactccagcctgagcaacagagtgagaccctgtctga

SEQ ID NO: 30070 - DNA, 346 bp, Homo sapiens
gcccaagcccatctctgccattttcagtgacagctggctggccaatgagcctgagcactgggaatgcccagcagcgacatctagggggctgctttatatttggagctagcaggtctcttttctagggctttccaggaaagatttagaattaaacattggatggattttgtgtgttcatttctttttccatcactgtgcctttattttcttggggctttcattaaaagcagaaaaacagataatggtagaaacatctatagcatgcatacaaagaagtaaaagatttttataattttttgccttaaaatatatctaatgctgtggcctctgagccattctcagttgg

SEQ ID NO: 30071 - DNA, 436 bp, Homo sapiens
gctgatgcattctgtgagttagaagaaaacttccaaagagccattttttccaccctgtctactgtataaaattgcttctcaaacatgtgctgcattgcagaggattaccattgttttgctaaccagcgtctggtctttcttatgtggcgctgcaattactagtgtcaaaccctgttggtaatacccagaggacagtgtctgaagtccttattcagtattcacatttggccgggtgtggtggctcacacctgtaatcccagcactttgggaagcagaggcaggtggatcacttgaggtcaggagttcaagaccagcctggccaacatggtgaaaccccatctctactaaaaatacaaaaattagccgggcgtggtgtcaggtgcctgtaatctcagctacttgggaggctgagacaggagaatcacttgaacccagg

SEQ ID NO: 30072 - DNA, 253 bp, Homo sapiens
gactttggcttcagtacaacattcagagaggggcagatgctgacagctttttgtggcatgtacccctacgtggccccagaacgctccctgggccaggcatgccagtgacccgccagggacatacaaagcctcagtgtcatactgtatttcaggaatacagtaggtagaagggccaggactttgcccttttactcagggaagcctccaaacttcaagaaaaaattctcacaggaagataccatgccccaccact

SEQ ID NO: 30073 - DNA, 1008 bp, Homo sapiens
catgttgtatcatgtgccagaagttccttcctttgtatgactgaatatattcctattgtgtgtgtgtttgtggttgtttgtatgtacatactttgcttatccattcatctgccaatggacactaaaagctcccaccttttatgtatttatttataacctaggaagtgaagaagcttctgccaaattctaaattttatggaggaaaacaaatcatggctgattagataactagtgtttactttagatagaatattaattttaggtctactttatggcatatagaatttttttaaatcaatatttgcattatatttatgcccattttatagggttgggataatttacttatttattttactttattttattttatttattttattttgagatggaatcttgctctgtcacccaggctagagtgcagtggtacagtctcggctcactgcaacctccgcctcccaggttcaagtgattttcctttctcagcttcctgagtatctgggattacagacatgtgctgccacacccagctaatttttgtatttttagtagagatggggttttgccatgttagccaggctggtcttgaactcaagtgatccgcctgcctcagcctcctaaagtgttgggattacaggcatgaaccaccacgtctggcctgtaattttaatctagtgatttatagttgtatctttacatttataacattagtgttatatttgtgtcatacctatgatttatttgattttctaacccaggggtcaggaagctatggcctattgttcaacctgcctgtttttctatgtctttcaagttaagaatagattttacaggtgaacatttgtacccaatttcattatggggtactaactttgaatctcaattaagcaaacgcccaagaaaaaaaaagtttattcttctcattaattatacattacaaaaaattatactcagttatttttatgacattttgaatttcctcaatgcaaaaaatgtgactctgaaatg

SEQ ID NO: 30074 - DNA, 418 bp, Homo sapiens
ggataaccagagaactcgagggacaagtaatcttttaaaaaagcaaagacacataaagatgcacataaaagaatgtttatcacaacatggtttctaatagtagaagatgtatacaacttaaatgtctaagaataaaggaacattttaataagttatagtatataattatagtggaataccgtgcagccattcaaagcgaggtggtagatgctggtgtggtggtgtgtgcccatagctggactatagtgccagctactctggaggctgaggtgggaggattgcttgagcccaggagtttgagaccagcctgggcaacagagccagaccctattgcttaaaaaaaagatgtgatagaaatgaatttatacaaatggggccaggtgtggtggctcacgtctatagtttcagcactttggga

SEQ ID NO: 30075 - DNA, 634 bp, Homo sapiens
gccaagccacgtgtgcaagcctaattgcacggaagccctcaactcctaactccaggccttccctgcctatcctattcccatttgaaaaggggcagagtgagtttagaatcacatgttgccaggcactctcagatactgttggtggaactgtaacttaactgtaacatttctaaaagcattttggtgataagtgtcaagaatcctgatatttttatgcccctttgactcagtaattccacacttctgtaattctccaaagcagttaatgtgaaatatagtaaagcgttatatgtcacagaaaatagttttctagaaaaaaacaaactatctaaataaacaagtgttaaagtaaatgttggtaccggtacaacatgggatattgttttgctgttaaaaatgttcacaatgtttggccgggtgtggtggctcacgcctgtaatcccagcactttgggaggtcgaggcaggcggatcacctgaagtcaggaattcgagaccagcctggccaacatgctgaaaccccgtctctactaaaaatacaaaaattagccgggtgtggtggtgtatgcctgtagtcccagctactcaggaggctgaggtaggagaatcacttgaacctgggaggtggaggttgc

SEQ ID NO: 30076 - DNA, 559 bp, Homo sapiens
gggaccttccccccacccccaatgccacgaacaaaaagggaactaaaagccagagcagcaagtgtgtgagcttatatcccaggaactctggagatgttactggaccctaaaataatggttgggtgcttgagtattaatacagagactggatatgagacttgggtagatgtgaggtggggatcaagcctttgcagaactgcaatttcagtgaaactgggactcaaacaattgcatccaccagaacaggaaaaaaggaagctggtctccatgtgggactcccatgagagattagaattccaggctttccccttataaagggatctgaatttaccctatcagtgtgatgcaggaaatcctaagctgaaaaaaacataaagattggtctcaggttgctggaacccctggagcaacaagcacaatttctctagagggacagtttcaccaccaaggccaaaagaggtttttttttttttttttaaataaacaaaactctgaagttcttttcttttcaagtttcagttaaaattataacataagaaaattataagtgagatgcaat

SEQ ID NO: 30077 - DNA, 2125 bp, Homo sapiens
gtgttgtcaacaacggtgaatgtggatggacacgtcctggctgtttctgacaacatgtttgttcataacaactccaagcatggacggagagcaagaagactcgatccatcggaagctaccccctgcatcaaagccattagcccgagtgaaggctggaccacaggaggagccatggtcatcatcatcggggacaacttctttgatggtctccaagtggtgtttgggactatgcttgtatggagcgagctaataacccctcatgccatcagagtacagactcctccccggcacatcccaggcgtggtagaggtgacattatcttataaatctaaacagttctgcaaaggagccccaggaaggttcatttacacagcattaaatgaacccaccatagactatggcttccagagactgcagaaggtcatccctaggcatcctggagatcctgagagattagctaaggagatgctgttgaaaagagctgcagatctagtggaagctctttatggcacaccacacaataaccaggacatcattttgaagcgagccgcagacattgctgaagctctctacagcgtccccaggaatcccagccagcttccagccctctctagctccccagcgcacagtggcatgatgggaatcaactcctatggcagccagcttggggtcagcatctcagagtcaacacaaggaaataatcaagggtacatccgcaacacaagcagcatctctccgcggggatactcttccagctccacgcctcaacagtctaattacagtacctccagcaacagtatgaatggctacagcaatgtccccatggccaacttgggtgttccaggttcaccaggatttctaaatggctcacccaccggctctccttatggaatcatgtcattaagtcccaccgttgggtcttccagcacatcctccatcctcccattttcctcttcagtttttcctgctgtcaaacagaagagtgcctttgcccctgtcatcaggccccaaggctccccttcacctgcctgctccagcggcaatggaaatggattcagagccatgaccggacttgttgtacccccgatgtaaagaagaactgctttcttatagcacaaaactacttactctgatggaccaataatgaagaaagcactaggagctcttttgggggtgtagtggtgcccccacatgaacatgatggacacccttgggtctgcaaggagccagcatcttacttggtcccacgtcctcctatagctctgatggtggctacacaaactgaccctcttgggacaaggacaaaagatgtcattgacgtagtcagtgctaagagcagaaatgcaattctttgttatgaacattatgaaaaccaccttcctatgtttgtaaaatatttaagaaaaaattggcaaacaattaatgcttaatattttggatactatttgtttttctttgtaggaaaaaaaagttgaaagtttctattttctatgaagcctttcagataccaatttagtttatgcagaaaaaaattgaacaaaacagggtaccagcacggaagactttcttaaaacgcaacctgaattgaatgatgaaatgttgtatgtgtgtttgcttatagcttaatctctttaaaaaatgaacaaaaaaagggaaaaattttaaaatgttttacaattatttaaataaataaatgtgtaacttattgtaagtagaggtagaaattaagacctttttttggaagagagagggatttctcttcctgatgtaaaatgaaaatgatgcaaacatgtagtaacaagttttaaaggtgtgtgattattactgcagttacttactagattcttatcccctgtcctgcaccccctccttttccatcactttattgacccaagggcaagaacatgtagattcccacagaacaccctaatgcagaaacagacactctagcacatgcacaaatactccaacccatcaattcattcccagctccgtctgatttctaaatagtccacactcttgtgaatactttttaaaattcctattattagctttcaacgttctcccctgagcagtccagagaattcccatgtttgagtctgtctcaggctttcagcatcccaag

SEQ ID NO: 30078 - DNA, 859 bp, Homo sapiens
gtgttgtcaacaacggtgaatgtggatggacacgtcctggctgtttctgacaacatgtttgttcataacaactccaagcatggacggagagcaagaagactcgatccatcggaaggtagggctgcctgcgctcagcatagcagacacatgaaattctccacgaatttccttgttcgaacttcaaatttatgtcttggagtcagagcagagaaagtacacagaacaatgtgggtttttttttttttaaacgaagttgtaaacacagactccagcctgctccactgtaaggcccacacgtctaccagcccgtgccaagtcctcatgcctcccactctcttccatcctgttctgtgttttcctttttgtgagacgggcatttcaggcaaacataggcctatgacatcttagttaaacaggaacattgcagtgccagacatgtatgaataagtgtcacatgtgcccttaaacagattgtaggcaaaacaaaacaatgctcagaatgaaactgacactaattgatttttgtttgcttggacaagaagaaatcatggtctgttctgggtagttttccaagtgcattaaagtaattagaaataccggtaactgttaaatttcaagttgtccaaaaaattaaagtatatcgatgaagataactgacaaatctaagtaaattccattttaattattccccttctgtctgcactccccaactcactggtatagaaagaccttataatacagaatgttggtcaaactaggctactattttagtgtgatgttttgttatatactaccacccaacccccacctcccaccctaactcagccctgaaaatgtatcttgtatcattgtaaacagg

SEQ ID NO: 30079 - DNA, 1127 bp, Homo sapiens
ggcacgagaatggggaaaatggggaattctttcgatatagaagggtgtggaaaagagcagagagaacagatctcccctttcccatcttagatctccatttttatgttcctgttgtcgagtggtttgtcatggtaaagaaaaaatgcttttaaatgtgagtgtatatatatcatctatatgttgcaaaatgtcctccttcgtgattcagcaacctgatcttacttcagtgctactccttcctgtgtaattaagcctcagctccagctctctgtattgcactcactagtcatcaggttggaaggtcctgggttcctgtgtcctgttgggcaaccgcatgatagaactttaatgctacttcctggcatagcaggagatgaaagagcagggggaagaaacatcaatctaaccacgaattttatttccttgtgtttctgatgctaaaaatggagaggaagtcaaactagacaagagggaagtctccatgaagtgtggaaaacaagctccttgattgtggatgtgcagagctgcctgttgagtctgaggagtctggcatgtgacacactgcagacctgagacaagaagccttgttgctatgggtgacttttagtgacctataaattttgcaggcgcgccacggcactctattattgctttctttctctgagtcactaattagatcctgatgatttccatgtgaaaccatgaggactgggagatgcaaaatggttttgctgtgtagattcatgaatgctggactgttggaggatatctgagtgtgctttgcatacttggcttaatttgtttttttttaactaaaagtagttgtaggtgaaatgattacttaggtaattgttttggtaaatggcttgaagttgaaccacagcagttttgctatttggaaaaaaaatgaaaaaaataccattctaatttcagtttatttggtttactgacccagttttggctaggggttattgaatctagtgagaattattttaagcaccccccaaagaaggaaagatatgaagtcaagagaaggataattatattgtaaaaataaaaatttaatgatgtttaatttttcaaaattgtaatttttattaaaaagtaattcagtaattaaaaaaaaa

SEQ ID NO: 30080 - DNA, 585 bp, Homo sapiens
tctaaataagtataaccaattacatggtatgatgacccttacttgtgacactagtgtctccctagaatagctttttgtctgtggatagagccaaagatgctagataaagttcaaattagggaaaataataaactcattcataaatcagaatcaaacttgtctctctgtgctaggttaagcattgctaatttaaataaaatctgcattaattgaaatatgctgaaaattttaagatatatttgcatttattatgatgcattttgcatcagagatattctattcttgatcaatatttctcaaatattggccaggcgcagtgactcatgcctgtaatcctagcactttgggaggccgaggcaggtggctcacttgaggtcaggagtttgaggccagcgtggccaacatggcgaaaccccatctctactaaaaatccaaaaattagccggatgtggtgatgcatgcctgtaatcccagctacttgggaggttgaggcaggagaatcccttgaacctgggaggcggagcagtgagccaagatcacatcactgcactccagcttgggcaaaggagtgagactccatctcaa

SEQ ID NO: 30081 - DNA, 135 bp, Homo sapiens
gaaccatgaattaagcaaagggttaaatttgatggactttggttgacactggtagaggtacaataacaagactatgtacatactaagcagatgttcttaaactttgatgtgaatcagaatcatctgagaaactta

SEQ ID NO: 30082 - DNA, 192 bp, Homo sapiens
agcgcacttgagacagaggtaatgatggggacgaagtgagaacagagacccagaaggagaatcaatggaccatatttgtaagagctttgaaagccagcctgagaattggaggatttattcataagaaagtgtagagaccctgtgtatttcagagctggatactgccattaccacagatgaaagttgcaatga

SEQ ID NO: 30083 - DNA, 428 bp, Homo sapiens
ctgggttacaggcgtgagccaccacacctggccgcaactccctttctgagtcaagttttccattgttgtaatgacaattgttatacccacctcaaagagccctgcttaagattcctttccttgactcctgcttggcatctggacaatggggcccatagcaagttctctgcagtgactgtttgcagtttccacagtgcctagcccagagctgagctgcaagtaggacaatattaaaggtcattggttaatatagagccaactgtgcagaagtagaggcagctatgatgtaacagaaaaaggccttggcttggagtcagaattcctgggttacaatgtcagttctgttcactgtgaggcccttggatgagtcactaaccctccctgagccttttctttatctgttaatattaaaaatatgattaataata

SEQ ID NO: 30084 - DNA, 244 bp, Homo sapiens
gcatttaagtagcacaggaaaatcatagaaattggtctgtttcatggccacagagatgggaaccataaagactggagattccaaaagagagaagaaacaagaaggagaccaagggtagaaaaactacctattgggtgctacgttcactacttaggcaacatgatcattagaagcccaaaccacagcatcatgcaatatacctctggtacaaacctgcacatctattcccctgaatctaaaattg

SEQ ID NO: 30085 - DNA, 441 bp, Homo sapiens
ttcactagacctagagattttctgattatataaatcagataattcttagtagactgcccgtctagtttgtcctagggccactatgaatagtgagccaatagcaaaggtctctgtatgctacgacgttccgcttgctgctccattatgaccattacggcaactgtgcccaccttgctcctggataagagctgccacctggttctgcccctccaggaacccatcatccattaaaatcaagaagtcttttaatgaagaggtcttctctcagtggggtctcttaagaagccccaacaagacagttggcttgaaacatgtgccaactctggagaaacctgaccacattaatgccaatcaagaaagagcttttctgctcttaccactctatctccctacattccctacatcctggaagggccagaaactgtggcgtgcctgagtttc

SEQ ID NO: 30086 - DNA, 948 bp, Homo sapiens
tacacatagaagtgagtttattagggagaactggctcacatgattacgagcagaaatcccacaacaggctcttggcaagctggggaaagacagaagcccgtagtgtgactcagtccaagtctaaaagcctcaaaaccagagaagccgactgcgtaggtctcggtcttaggatgaagccctgtaatcctccaggaggccgctggtgcaagtcccagagtccaaaggccaaagaccaggaagtctgatgtccaagggcaggaggagaggaaggaagcatccagcacgggaagacagagagagtgatgagcaagctgctcacccttttctcttctgcttgctttgttctggcctcactggcagctgatgggatggtactgcccacattcagggtgtgtcttcttctcttagttcacggacccaaatgtcaatctcctttgacaacaccctcacagacacgcccagaaacaatcctttaccagccatctaggcattcctccgtctagtgatgttcacacctcatattaaccatcacaatacactttgtgtatagccagaaggtggtctaggcagcaatagatgtaatgttttaattacatacattaattgtaatgtgaactcttggtaactcttatttttattgaagaatctaggaggtaaacagttttaattatgcaccagatgcgtatcccaggatgaagggcaatgcctggggttagtccaaaggcttgattctcaagacacataggtttacagatgagataagcaagctttaaaagtattacagaagcaaacttttttatcctaatacatctagcagacaatagtatctgacctgcttgactaattcagcccagatatctaaattaagttttgaagacatttctattttaccaataatttttaaactgtctctagcaaagattattaaagtcacatgaagtgaatgct

SEQ ID NO: 30087 - DNA, 1836 bp, Homo sapiens
aggatggcggagagggctgagggcgggtcgcttccggcggcttttcccgcagctcctgcgtaaaggagcatgagagcgtgggagttttgcagtggccgtggcgttcttcgtcgcgtctcggtcgggcgtcgctttctgcagctcctgtcagggagcgcgaggcctgttattaaccgcggagcgctttgtcacgaagtccctgtggcgtcttgaagaaggcattccccacccgccaaatggcgtccatgcccccgacgcccgaggcccagggaccaatactctttgaggatctggctgtgtatttttctcaagaggagtgcgtgactctgcaccctgcccagaggtccctcagcaaagatggtacaaaagagtctttggaggatgcggctttgatgggagaggaaggcaagcctgagattaatcagcagttaagcctagagtctatggaacttgacgagcttgccttagaaaagtaccccattgctgcaccccttgtcccttacccagaaaaatcctctgaggatggagttggaaaccctgaagcgaaaatattaagtggaactcccacttacaagagaagggtcatcagccttttagttaccattgaaaaccacaccccattagtagaactctctgaatatttaggaaccaacacactttctgaaattcttgattctccctgggaaggagccaaaaatgtgtacaaatgtcctgagtgtgaccaaaacttcagcgatcattcatacctagttttgcatcagaaaattcattcaggagagaaaaaacataaatgtggtgactgtggaaagatcttcaatcatagagccaacctgaggacacacaggagaatccatactggtgagaaaccttataagtgtgccaagtgcagtgccagctttcgccagcactctcatctatcccgacacatgaatagccacgtaaaggagaagccctatacatgtagcatatgtggtagaggttttatgtggctcccaggattggcacagcatcagaaaagccacagtgctgaaaacacctacgaatctactaactgtgataaacattttaatgagaaaccaaatcttgctttgcctgaggaaacattcgtatcaggcccccagtaccagcacactaagtgcatgaagagcttcaggcagtccttatatcctgccctttccgagaagagccacgacgaggactctgaacgctgcagcgatgatggggacaatttcttctcattctcaaaattcaagcccttacagtgtcctgactgtgacatgacctttccttgtttctctgagcttatttcccatcagaacattcatacagaggaaaggccccataagtgcaaaacatgcgaggaaagttttgctttggactcagaacttgcatgccaccagaagagccacatgctagcggaaccttttaaatgtaccgtgtgtgggaaaactttcaagtcgaatttgcatctcattactcataagcgaactcacataaaaaacaccacgtaaagtaaatataacaaattgttattagtgattgggcttttcagtatctgtatggtgggaagcagttactgtatatgtcccaggcaatgtgctaagcactttacacacattcccatgtaatacttaattctcagcacaaccttgatttaggcagtatcatttccattttataagtagggatgcaaaatccgtgtcactaaactagtgaatgaacccaggatttgaactcagttactgtacaactgtgagccagaagaagatacacaacttttgtttaaattcaattttcattaaaatgaaggctcttgctaaagttattttaattttg

SEQ ID NO: 30088 - DNA, 239 bp, Homo sapiens
tcctgtcagggagcgcgaggcctgttattaaccgcggagcggtaagtgggcccctttcgaggccgggccaagaggaggagcagtcggcgtaggtttttaggggggggttcggggggaatcgagggaggctaggggtagtggaggaacttggcagcggaatgggtccctttaagaactgttctctccccccgcagctttgtcacgaagtccctgtggcgtcttgaagaaggcattcccca

SEQ ID NO: 30089 - DNA, 405 bp, Homo sapiens
gaggctgggaggcatcctggggaggggaggtcacgttggatcggggtttccaggcgagatttggaaaagcaaggggagggtgagcccagtggagggctaaacctggccgaaagcccagagataagaaagagctcagccttggtttcaagcaccaacggcctaaaaaggaaacccagttatttaacagaatccattctcttttaaggctcagtgtgtatctgagacaggaccatttcccctctccagtgcaagcttcttcatggactttgttcagatttcaattttataatagctttttctattctcctcgtcagtatactttttttttgttccaactgataaattattcttgctacttagttttaaaaacattattcaagagtattgccttattaaaataacttg

SEQ ID NO: 30090 - DNA, 496 bp, Homo sapiens
aaaaatgcgtgtatacgtacccctacgtgtggaaaactggctaccgcatgcttaacaaaataacttgggaatgaattactcatggtgaggcttccgatcagtgtctaaccctggtagcgtctgccagtagccacaccgaaagggtctaccaagggtacactatggacatttttcatttaaaggtgaaagattttttaaaatgcattgctaagaaacatccctggccgggcgtggtggcgcacacctgtaattccagcactttgggaggctgaggcaggtggatcacttgaggtcaggagtttgagaccagcctggccaatgtggtaaaacctcgtttctactaaaaacacaaaaattagtcgggcgtagtggggcacgcctgtaatcccagctactcgggtggctgaggcaggagaatcacttgaactcagaaggtgaagattgtagtgagctgagatcacgccactgcactccagcctgggcaacagagtgagac

SEQ ID NO: 30091 - DNA, 481 bp, Homo sapiens
tctcagatggtttaggtgccagtggcttccgaataaaacagcattcttgaagtgaacagctgatgaggacatgaaatattatgccaaagctggcatcacactgttctttttcctggatgaaaatctctctgagaagcatttgctcttaactttggtgtcctggggactgctgccttatcccaggaagccacccagagtcttggatgtgtgggatccttaggacttcatggtaaacctgctctagtccctcgggttagtaaaatgaagcccaggacatctgagagcccccagcacttccatagaaatggaccaaaatcccttctcccagggggagaaacctggaataagctcaagaggacagacggctaaattttcaagaatcgtgtgagctgctgttaaacaagccattattaaaactttaattgtgtaaacttacaattaggtcagttatattaaaagtaaaagtgatacataccccaaa

SEQ ID NO: 30092 - DNA, 1308 bp, Homo sapiens
  misc_feature (102)..(102): n is a, c, g, or t
  misc_feature (123)..(123): n is a, c, g, or t
  misc_feature (309)..(309): n is a, c, g, or t
  misc_feature (429)..(429): n is a, c, g, or t
  misc_feature (642)..(642): n is a, c, g, or t
  misc_feature (666)..(666): n is a, c, g, or t
  misc_feature (807)..(807): n is a, c, g, or t
  misc_feature (895)..(895): n is a, c, g, or t
atgggcgactggagctttctgggaagactcttagaaaatgcacaggagcactccacggtcatcggcaaggtttggctgaccgtgctgttcatcttccgcatnttggtgctgggggccgcggcngaggacgtgtggggcgatgagcagtcagacttcacctgcaacacccagcagccgggctgcgagaacgtctgctacgacagggccttccccatctcccacatccgcttctgggcgctgcagatcatcttcgtgtccacgcccaccctcatctacctgggccacgtgctgcacatcgtgcgcatggangagaagaagaaagagagggaggaggaggagcagctgaagagagagagccccagccccaaggagccaccgcaggacaatccctcgtcgcgggacgaccgcggcagggtgcgcatggccggngcgctgctgcggacctacgtcttcaacatcatcttcaagacgctgttcgaggtgggcttcatcgccggccagtactttctgtacggcttcgagctgaagccgctctaccgctgcgaccgctggccctgccccaacacggtggactgcttcatctccaggcccacggagaagaccatcttcatcatcttcatgctggcggtggcctgcgcgtcnctgctgctcaacatgctggagatntaccacctgggctggaagaagctcaagcagggcgtgaccagccgcctcggcccggacgcctccgaggccccgctggggacagccgatcccccgcccctgccccccagctcccggccgcccgccgttgccatcgggttcccnccctactatgcgcacaccgctgcgcccctgggacaggcccgcgccgtgggctaccccggggccccgccaccagccgcggacttcaaantgctagccctgaccgaggcgcgcggaaagggccagtccgccaagctctacaacggccaccaccacctgctgatgactgagcagaactgggccaaccaggcggccgagcggcagcccccggcgctcaaggcttacccggcagcgtccacgcctgcagcccccagccccgtcggcagcagctccccgccactcgcgcacgaggctgaggcgggcgcggcgcccctgctgctggatgggagcggcagcagtctggaggggagcgccctggcagggacccccgaggaggaggagcaggccgtgaccaccgcggcccagatgcaccagccgcccttgcccctcggagacccaggtcgggccagcaaggccagcagggccagcagcgggcgggccagaccggaggacttggccatctag

SEQ ID NO: 30093 - DNA, 267 bp, Homo sapiens
tcttttctcttcctgcctgtttctgtcttgctcttgcattcctgggtctctttcttcttactaaccccttctgcctcccgggtcaggcttcacctcctgccttcctccccttctcttgccttccctctctgacaaagcactttcctgtcagttatactgcttggattcagggcacttagcacctagattcagggcccactgtgaagccctcctttgttcacttgatgaaataattgcagtaacaagactaaaatttaatgaacactt

SEQ ID NO: 30094 - DNA, 660 bp, Homo sapiens
tgtgtgttttcaaactcatgggcaaattcaagttcagatggtgcacttttcattgattaatgttatagcaaatgtcagtttgttttcttcagtttctgctgatggttttaactggcacagaaagtatttattcaaccttacaaaactgtgttaagttgtattgtgatacagtttattgacttgtacagtattgtcattacaacccattcaggtatgcatgaatctgaagcagaacaccatttaagactggtgctgtataatataattcctacagatgtgggtccagggaatagaactgagcctgtcttttttttaatgttaagcaggttacccccagtggggcttctactagacatctctccatttggtctcttcttacactccaacccagcaggaacagttaataattggatgtttataaaatgggggtaaaagggtttactgtgatggatcctggctatccctctaggaggagacctttgcttcagcaatggtgtcttcatcctcgcagcctgaagctgcttcatttccttaggtctgttgtgttttctgtaaagtgttaggaattctggatatttttgtaaaagaatcaagatttgtataaaatgttgtttacagatcttttaatgaataaatacataaaccccccacagaaaaatt

SEQ ID NO: 30095 - DNA, 295 bp, Homo sapiens
ctattagctctcttgtccgtttgccatatgtcatttccttttagctatctaggaagaagagcttacagggtaaacttcccatttaactatcccctttccattttctcactcactttgttacagtcctctctgtgtttttggtggcatctgcttttcctgtgatactttccattttctcttctcctctgtgctgctttaatttttctcttccacgtatttcctgggttttgccagctctttctctctctcttttttgagacagagtctcactctgtcacccaggctggaatgcagt

SEQ ID NO: 30096 - DNA, 1124 bp, Homo sapiens
aaaccatatctcaggtaaggggttcataccaataatatgtaaggaactcaacccagaaatgagaaaacaagcttactaaaaaataagtaaaggagttgaatagacattttctaaaaacagacatacaaaaggccagatttttatcaaaaatgttgataaaaaacatcaacattcctaattatcagagaaatagatgtcaaaaccatgaagatattatctcacagatgttactgaggttattataaaaaagatgtggcggggcacggtggctcacacctgaaatctcagcactttgggagtccaaggcaggtggattgcctgaggtcaggagttttagaccagcctggccaacatggtgaatccccgtctctactaaaaatacaaaaaattagttgggcgtggtggcatgcacctgtaattccagctacttgggagggtgaggcagaagaattgcttgaacctgggaggtagaggttgcagtgagccaagattgcgccactgcactccagcctgggtgacagagcaagacttcatctcagtaaataaataaataaataattaaaaaatgatggaagataactattgattagaatgtggagaaaacggttgtacactgttggtcggaattgaaattattaccaccatcttggaaaatagtatgaagctttctcaagaaattataaatatatttacattatgattcatcaatgcctcttctggatatacgtctaaagaacttaaaatcagtatgtcaaagagacatctgcaatttcatgttcattgcagagttattcataatagctgtgatttagaaacaacctaagtgtttatcaactgaagaatggattaaaaatatgtgaaaatttgaaacccttatacactgctgatgagagtttaaaacagtctggcagttcttcaaaaggataagtatagaattaccatatgactcagtaaattaactcctatgtatacaccaaaaagaaatgaaaacaaatgtctactcaaaaggtagcatacaagtacttacagcaacaaaaagtgggaagcaacagaaatgtccatgaattgcagagtggattaataaaatgtggtctgtccatgaaatacaatagtatttggcaata

SEQ ID NO: 30097 - DNA, 438 bp, Homo sapiens
tacacataaaaagtctggaaggatatgcaccaagtttaatcatggttgcctctggggattaggatttcagtacagaagagagaaagagatgatcacctccacacacctgtgtggcttaattttttattagtatgttgggctttactttttattttttatttattattttttttgagattgcctatatatataatacagttacattaaaagagcagattatacggccaggcatggtggctcacgcctgtaatcccagcactttgggagaccaaggccggcaggtatcttgaggccaggagttcgagaccagcctggccaacatggtgaaccccatgtctactaaaaatacaaaaattagctgggcgtggtggtgcacacctgtaatcccagctactcgggtagctgaggcacaagaatcgcttaaaccttggaggcaga

SEQ ID NO: 30098 - DNA, 1193 bp, Homo sapiens
tctcttccatacaacggctggcctctaccaagttaactgcttcgtggggggaaaatattgcctttcctttggtctgcatgttttaagggaaataccaaatacacctacaggagtttatcaataatagacaaggctgatttcaaactctttcaggagataaactggaggggaagacgaatggcaggagggtgaagaggaaactgaattactgtgcaaacacccgccactcaaatccgggtggttactgcagagtgaataacgataggtactatttcgtgtaaggcaaagtcctttgaaagggctcctagagcgtcaaggcctccacctgatgaatgaatgagtcaggcaggcccagctccacttcacggatgggaaaactgaggtacgaggcctcgctgaaagatgcgaggcagagcggagaaccagaagcaccacttctctcaggctgatgctctaatctcggctccccccgcccctacaatggcgtagacggcctccgccgcccgactcacacacaccctcccccgggaacggcaagtctcctcgggttccaaggacagggtcaaaagacagggtcaaaagacaagaggcccgaggcgctcccgccgtgatttgcagccagataccgttgggagcgcagccagagagcgttgggagcgtgcgtacccccagcccaacatggcggcggcagcggccgcccccgaccccaagccctccctcagggcccgaggcttctcctcagggccttccggtgggcgggaagacagcgcaaccccgccaggcctttctcgtcgctgcgcctgctcgctgaaggagtcacctacccgacgagactaacggctgcggcgcggaagccccacagcccgccgagaaccaggaatacgagagccaggcggcgcggcggcgggacctgtactgagcaagaaagaagatttcaaagtaatttattgttatgagatccgtgcttttatcttgtctcagactcccaatgataggcacatactctcctctgtacatttaatgaaactactaaaatatttcgatttaaatcttccacctatttgttttctgtgtatcctacctgttcccgaccttgacattttcaaagaatacaggttacttattttgttttttggtggtggtgagtttttttggggttttgttttttggtttttggttttatttttggagac

SEQ ID NO: 30099 - DNA, 1170 bp, Homo sapiens
cgagccaaaggattcttggctccaagcctggtcctggctgttagtttggaactcatgcacccagatgctaactcgccctcagaatgcagaggggatgaaacactgaccggacaattcaatctgtatatgggagataaactggaggggaagacgaatggcaggagggtgaagaggaaactgaattactgtgcaaacacccgccactcaaatccgggtggttactgcagagtgaataacgataggtactatttcgtgtaaggcaaagtcctttgaaagggctcctagagcgtcaaggcctccacctgatgaatgaatgagtcaggcaggcccagctccacttcacggatgggaaaactgaggtacgaggcctcgctgaaagatgcgaggcagagcggagaaccagaagcaccacttctctcaggctgatgctctaatctcggctccccccgcccctacaatggcgtagacggcctccgccgcccgactcacacacaccctcccccgggaacggcaagtctcctcgggttccaaggacagggtcaaaagacagggtcaaaagacaagaggcccgaggcgctcccgccgtgatttgcagccagataccgttgggagcgcagccagagagcgttgggagcgtgcgtacccccagcccaacatggcggcggcagcggccgcccccgaccccaagccctccctcagggcccgaggcttctcctcagggccttccggtgggcgggaagacagcgcaaccccgccaggcctttctcgtcgctgcgcctgctcgctgaaggagtcacctacccgacgagactaacggctgcggcgcggaagccccacagcccgccgagaaccaggaatacgagagccaggcggcgcggcggcgggacctgtactgagcaagaaagaagatttcaaagtaatttattgttatgagatccgtgcttttatcttgtctcagactcccaatgataggcacatactctcctctgtacatttaatgaaactactaaaatatttcgatttaaatcttccacctatttgttttctgtgtatcctacctgttcccgaccttgacattttcaaagaatacaggttacttattttgttttttggtggtggtgagtttttttggggttttgttttttggtttttggttttatttttggagac

SEQ ID NO: 30100 - DNA, 1847 bp, Homo sapiens
tatttctaaggtggttcccatgatggcatttcttgataagcccactttgagccgtttaatgttttgtaggtgtttctgtgagtctgataataccagcactaaaaacagttcagtatatagacatttacaagaggtcttaggcctcttcagaattcagttaatgtctttctctttgaggctgctgaatgttaggtaagaattcagggcaagcattcccgaccatcatcaaattggagacttggagtttctattggctggaagaaagttgacccacaggcaaaaccagatgtaaaccaagtttgtcttgggtacttttcaaattcttttcacagcatccttttctcatccctcatggtggcctctggccctggaaaatcctcatgatagcaacttatcaggcctgtttcctctgatagatctggacttttccccttaagtgctttcctgttgggcttctcagactatggagaactgctcatagttgagatctaagagacaaattaccctatggtgttcaagaatggccgtatttagtatactgcctgtcctggaagtgttcacatttaaaaaggcatgactttccaatgggcaaatatcagacacctacatgcatagataagggaaatatgttttacttaagcaaacttctaggcattgaatctcagtgtttaggtgcagagatggaattcctataagcaatgcagtcattcaccacatcaggaaggccaaaaaatgaacactctcgtaattttgttattatctggaaagttctgatatgataatgaacctaaaatactgaatagatagtgaacatcctaaaattccactgaccagaatccattcccatggtcatcatctgtagagggcatgatacaatgacaggcctgaggtatgattataattctggagtaatttaaagcctatatttgttaaactttaacagatggacacacattctctgattttctacttggctctttcctgtactagaaatgcgcatttaactaaaccttcccagcttttctgttcagtgcctgacttacactactcccttaggcaggaggacagtgggtgtctggggaataaaagccaagagctccaaacagaggattttggatacaaagggcagccaccaggaaatagctttgtgagagggacagactatctgattcccatttgtacaaacatgtccaaagcaaaagcacagcattctaaagtggatgcagaaattagtatacaatggcagttctggccagtgcagcccagcatttttctgttgtgcatggaaagaacacagtgaaaaggcaggcagggcatccggtgcaaagtgcaacagacatagacacacaaatccagttttcctgatgagagagggagctatctcttcataagtgatgcaatgcaatgcaggcatgtacaagtacaaggaaagatttatttttaaaaaatcatagtgtaactggatgaataccagcaacagcacctgctaaagcaaacagcctgttcattaaaaactggacttgagggaatggagaaagaatctgaggagcctgcagtcagcatgcttgcagagaccttatggctacagaagacgatgattaacccatagaggttcaatgtagttttcaagaagagggtgggaaagcataagatggggactaagactttgcctttaaccttcatgacatgaagaattgaatgactctttgttggaaaaaatggcagttatgagataattggatccatgttaattatatatatttctgtatatatagtaagtggttattgatgtgcctttgttaaccatttcactatttaataaatgtgtgtgtagtttaaaaaaaaaa

SEQ ID NO: 30101 - DNA, 741 bp, Homo sapiens
tatttctaaggtggttcccatgatggcatttcttgataagcccactttgagccgtttaatgttttgtaggtgtttctgtgagtctgataataccagcactaaaaacagttcagtatatagacatttacaagaggtcttaggcctcttcagaattcagttaatgtctttctctttgaggctgctgaatgttaggtaagaattcagggcaagcattcccgaccatcatcaaattggagacttggagtttctattggctggaagaaagttgacccacaggcaaaaccagatgtaaaccaagtttgtcttgggtacttttcaaattcttttcacagcatccttttctcatccctcatggtggcctctggccctggaaaatcctcatgatagcaacttatcaggcctgtttcctctgatagatctggacttttccccttaagtgctttcctgcagtcagcatgcttgcagagaccttatggctacagaagacgatgattaacccatagaggttcaatgtagttttcaagaagagggtgggaaagcataagatggggactaagactttgcctttaaccttcatgacatgaagaattgaatgactctttgttggaaaaaatggcagttatgagataattggatccatgttaattatatatatttctgtatatatagtaagtggttattgatgtgcctttgttaaccatttcactatttaataaatgtgtgtgtagtttaaaaaaaaaa

SEQ ID NO: 30102 - DNA, 374 bp, Homo sapiens
ggtaatagtctacttttttattattaaacttttgttatagtaatagagaaataaaattattaacaggatagtatcaaacaaccagttttctaatagtagtattgaggtaataagcagtcctacttacaaatggcctataatctaaaggcatttttagcctgttggtttaaatcaaaactcgaaatgctttcttcatagaaacagctctggccactgtattcctaagcaaactcattaaagagtcatttgacctattttgcacccccaaaattatacttacaataatacttctatggcaaaatgtgctcagaattttaatagatgataactactgaagctttgacaacaagcattaagagtcttctttcttctgc

SEQ ID NO: 30103 - DNA, 418 bp, Homo sapiens
tctttttttttttttttttttgagacagggtctcattctgtcgcctaggctggagtgcagtggcgcgatctcggctcactgcaagctccgcctcccgggttcacgccattctcctgcctcagcctcccaagtacctgggactacaggtgcccaccaccacactcggctaattttttgtatttttagtagaggcagggtttcaccatgttagccaggatggtcttgatctcctgaccttgtgatccgcctgcctcggcctcccaaagtgctgggattacaggcgtgaccaccgcgcccagcccactcaattgttcttgaaagggcacacctgagttaattttcctgacaaagatgtgctgaccttccagttactctttttttctttatttttatttttgagacggggtcttggtcgacg

SEQ ID NO: 30104 - DNA, 434 bp, Homo sapiens
gcagcatttatttgagtgtatgaatggaatgatgatcactgtgctataatgtactgaaaccaccatattacagaaatatttactacatattttccatctgtagtttctcagaagggctatggattagtttgaactgtcaaatccttgcatacttctgtgacacccctgcccattttctgtctttaattaaccaaggtgttaggtgttactgtcacaactgttatgttttccagtaaactagaagtacgatatttgatatttcaccacctaaatgtaatgttgattcctcaagaatgaaatgaaggcactacattgaaatatgttttgtataaatttgtcatgttgaacaacattttagcatggtaagttcccttagctatatgaattttggcatgtttcagagagatcagtaaataaaatattagataaaatat

SEQ ID NO: 30105 - DNA, 264 bp, Homo sapiens
gcagcatttatttgagtgtatgaatggaatgatgatcactgtgctataatgtactgaaaccaccatattacagaaatatttactacatattttccatctgtagtttctcagaagggctatggattagtttgaactgtcaaatccttgcatacttctgtgacacccctgcccattttctgtctttaattaaccaaggtgttaagagtggtatacgggtggtatacggggtacctgagctacgaacttcgtacatcatgggtcact

SEQ ID NO: 30106 - DNA, 225 bp, Homo sapiens
gtcagaatttgagactaaatacagattggagtattcacttgggaattcaacagagatccatcttaaggaacattccaaatacacaatcagaaagaaagcatttgtgtgcttttctgctcctaggaaaatgcagagagaaagaaaaggttactgtttcatgtgaactgatttctcccttctctgtggtaggcagagaacacatcatcccacctggaacgtgagtca

SEQ ID NO: 30107 - DNA, 619 bp, Homo sapiens
aagtcttttaaaaattttttttttttaatccttttaaaaaattctttgagcttttattattagttccactttacagctgagaaaactaatgtttaaggacattaagaaacttccctctggaagagttagaggtgagattcttagccacttcaaccttgtgcctcttataaacatgcatgaataaacttgagtggaaagaaacttcctggcatgcaagactattggttagaattgagatgtttctcctcagaaatgatcagagtctagacattgaagtcaagtttgctaaaaagcaaggttatagatagaaaagaaaatgaaggccaaatgcggtggctcatgcctgtaatcccaacaatttgggaggctgaggtgggaggactgcttgagccaaagagttcaagaccagcctggacagcatagaaagaccccatcttgacaaaataacaataataataatttagtcaggtatagtgatgtgcacctgtggttccagttactcaggagggtgagggaggaggatcacttgaggctgggagggaaaggctgcagtggtgagccatgattgtaccactgcactccagcttgggcaacagagtgagaccctgtctccaagaat

SEQ ID NO: 30108 - DNA, 487 bp, Homo sapiens
atcttccctctctcacgactaaactgtttttaattaacaggtatttcagcaaaaagtaaataatctgaaagactaatagtatcaatagaggtagtacaaccactaggaaaaaaagttcaaccttttgtttctattgatatgttctccatatttagatcctcaaaactgcagatatatacagtcattcatgacactatgtaaatagcagataacaggaaaaacaattcaatacttaaccaagttcactggagcacaaagtaatcgccactcaagaatgctgacacaaaaacctgaaggaccgatctcaagttccaatagcacgcagataagctgagcccctatgcagttactcatctgaacagaagtggaagattaacctaccctcactcatttcacacactaacctgacaaggcagcaggcagtctcttcggagcttgttcatcattcagtctgttccagaagtaaccgattccgttaggatctgtg

SEQ ID NO: 30109 - DNA, 425 bp, Homo sapiens
gctcgacgagatagggtctcactatgtggcccaggctgtagtgcagtggtgtgatcacagctcactgcagcctcgaccccctgggctcaggtgatcctcaaaactgcagatatatacagtcattcatgacactatgtaaatagcagataacaggaaaaacaattcaatacttaaccaagttcactggagcacaaagtaatcgccactcaagaatgctgacacaaaaacctgaaggaccgatctcaagttccaatagcacgcagataagctgagcccctatgcagttactcatctgaacagaagtggaagattaacctaccctcactcatttcacacactaacctgacaaggcagcaggcagtctcttcggagcttgttcatcattcagtctgttccagaagtaaccgattccgttaggatctgtg

SEQ ID NO: 30110 - DNA, 966 bp, Homo sapiens
atgtccttacagaaactcatggagccagaagctgggaccaataggaccgctgttgctgagttcattctactgggcctagtgcaaacagaagagatgcagccagttgtctttgtgctcctcctctttgcctatctggtcacaattgggggcaacctcagcatcctggcagccgtcttggtggagcccaaactccacgcccccatgtacttcttcctggggaacctatcagtgctggatgtcggatgtatcactgtcactgttcctgcaatgttgggtcgtctcttgtcccacaagtccacaatttcctatgacgcctgcctctcccagctcttcttcttccaccttctggctgggatggactgcttcctgctgaccgccatggcctatgaccgactcctggccatctgccagcccctcacctacagcacccgcatgagtcagacagtccagaggatgttggtggctgcgtcctgggcttgtgccttcaccaacgcactgacccacactgtggccatgtccacgctcaacttctgtggccccaatgaggtcaatcacttctactgtgacctcccacagctcttccagctctcctgctccagcacccaactcaatgagctgctgctctttgtagcagcagccttcatggctgtggcacccttggtcttcatcagtgtgtcctatgcccatgtggtagctgctgtgctgcaaatccgctctgctgagggcagaaagaaggccttctccacatgtggctcccacctcactgtggtgggcatcttctatgggacaggtgtcttcagctacatgaggctgggttcagtggaatcttcagacaaggataagggggttggggttttcatgactgtgatcaaccccatgctgaacccacttatctacagcctcagaaatactgatgttcagggcgctctgtgtcagctacttgtgggggagcgatcactgacctga

SEQ ID NO: 30111 - DNA, 909 bp, Homo sapiens
tgtagggctacttctctgagaacctatcaattaggcataaaggctatacgttagtttttactgctttgtgtttttttgtttatttgtttgtttgttttttttgagacggagtcttgcttttgttgtccaggctggagtgcaatggcatgatctcagctcactgcaacctctgcctcctgggttcaagtgattgttctgtcaaagcctcctgagtagctgggattacaggcatccgcctctgtgcccagctaatttttgtatttttagtagagatggggttttgccatgttggccaggctggtctcaaactcctgacgttgtgatccgcccgcctcggcctcccaacgtgctggggttacaggggtgagccaccatgcctggcctgctttgtgttttaacagagtaagaaaatagacttttcctttgctctagtttcaatcttcttaatataggtaggactttttcagataaatttatgattaattacaaggaaaaggatagtatggatgatttcaggtaagttataggcataatttcaagaaacaaaaaatgtttttattgtgatagagcatctcaaacacctttagaatctacctctttttcctgttccccccgttatttctttgtttcaggcccttaacatctctcatatacactggtatttcttgcctctggccttgccgtctattctgtcttcacactgcttttttctttacacagctcttttcacagccccctcagttagagtacagattggattgtgtgtctccctgctacccacagaataaaacttcaaatgtgatgattttggtcttttgttttattataaaatattcaaacatggaagtatatacagtagaaaataagttttctccctgattgatttgtattagtaccatctctgctatt

SEQ ID NO: 30112 - DNA, 523 bp, Homo sapiens
  misc_feature (387)..(387): n is a, c, g, or t
  misc_feature (398)..(398): n is a, c, g, or t
  misc_feature (410)..(410): n is a, c, g, or t
  misc_feature (452)..(452): n is a, c, g, or t
  misc_feature (459)..(459): n is a, c, g, or t
  misc_feature (479)..(479): n is a, c, g, or t
  misc_feature (484)..(484): n is a, c, g, or t
  misc_feature (505)..(505): n is a, c, g, or t
  misc_feature (518)..(518): n is a, c, g, or t
tcaacttgcaactcaaaaaattacataagtacttttcctcaaaacaaccatcatattttggtatgcctaaaaagggctttatgcatacttcctatttcatcaaacagaacacacacatatacacgaatagacatcaaactcaatgctttatttgtaaatttagtgtttttttatttctactgtcaaatgatgtgcaaaaccttttactggttgcatggaaatcagccaagttttataatccttaaatcttaatgttcctcaaagcttgggattaaatacatatgggatgttactctcttggcaccaaattatcttgatacattccaaatttgtctgggttaaaaatagggtggtgggtattgagggccaggattttggcaaattacnggaggcttccnggcacttaaggnggtttttttgggattagggtttggcctacctaccccggtggnacctttnccgggatttttttttccccncaggnccagttggtttccccttgggntttttggcccgtntgggt

SEQ ID NO: 30113 - DNA, 404 bp, Homo sapiens
ggtttggtcagagtgtgaggaaaggagaaatgagaccacagataagaaccagagtgtgaaggatcttgcacttgatatgaaaagagttttgcctttttcctgagggcatcagaaagtcattaaggtgggtgtggtggttcacgcctataatcccagcactttgggaggccaaggccagtggatcacctgaggtcaggagttcaagaccagcctaatcaacatggtgaaaccctgtctgtactaaaaatacaaaaagtaactgggcgtggtggcgcgtgcttgtagttccagctgttcaggaggccgaggcaggagaattgcttgaacctgggatgcagaggttgcagtgagccgagatcacaccgctgcactcccagctgggcgacagagtgagactctgtctc

SEQ ID NO: 30114 - DNA, 378 bp, Homo sapiens
ccaaattcacacaattagtaaggggtggggaggcatgacgaacacaggtggtcacaacgttaaacctttcctagaagctccaattattccccgataaccctgagagccctaacatttcatttccattcagaccagcctcagtctctctgcccatcctctctccaccccacactcagcctatctgtctcatttctcaacctcagcaggcgccagaagcccatcttctccccatctctgattctggcatcttttcctcttgccttcaaatgccctgtggactggattctttttaatttttgtttacttacttatttgagacatagactcactgtcgccaaggctggagtacagtggcaccatcacagctcactgcagcct

SEQ ID NO: 30115 - DNA, 459 bp, Homo sapiens
gaccacatgaggtcacatgaggtcaggtgtagaattttctacttgtggcatcatgtcaatgctcaaaaagtttcagattttggagcatgtccgatcttcaggttagagatgctcaacctgtattgatgatacttgttcttctgtcagttaggaaaatatacttgtgggcctggcacagtggctcagcccgtaatcctaacatggaggcctaggcgggaggatcgctcgagcccaggcgttcaagaccagcctgggcaacacagaccctgtctctacaaaatactttaaaaattagctgagggtggtgcgtgcctgtagtcctagttactcaggtggctgaggtgggaggatcacttaagcccagcaggtcaagtctgcagtgagctgtgatggtaccattacattctacactctagcctgggcaacagagtgagaccatgtctgggaaattaaaaaaaa

SEQ ID NO: 30116 - DNA, 322 bp, Homo sapiens
aaaaggtgacattaaaaggaaatattatgaaaatttgacaccaataattttgaaaacttagatgaaacaaacaaattcataggaaaacataactcaccaaaactgacttaataagtagaaaacctgaataggtctgaaaccattcaagaaattgaatcagtggtttaaatattcccacaaggaaagcaccaggtccacatagaaagacctacaagcaaatcctaccaaaacactcaaagaagtcaaaactccaatccaacacaaactcttcctgagaactgaaaaaatagaactcatcctctaacttaatttataagaacag

SEQ ID NO: 30117 - DNA, 165 bp, Homo sapiens
ttggtttttcagcccctttccattcttctttcctcagttttccccatgtcagtaagcaaggccaccacccatgcagtagctcaagccaaatgcctggaagtcatccttctttcctctcagtccacatctctcagttcacaagtctgcttactctacctgcacaat

SEQ ID NO: 30118 - DNA, 718 bp, Homo sapiens
cagcctgattctctgtattaatttaggataaaattcagttattaattagacctgatctttctttgtcaataatttagaagcatatgtcctcggcacataatgttggctgactgtttggttaataatatgttcttgaagacatacttctggaaatctgaaattgataagtgaagaggaactttcttactattcataaataaggttgtattcagctattctgactctagtagggttaattgctaacatttgacctacattattttattttttcaatttctcaaaaactctgaaaagtataggccaggggccttggctcatgcctgtaatgccagtgctttgggacgccatggtggagggattgcttgaggccaggagttcgagaccagccttagcaacatggtaagacccccatatctacaaaaaataaatttgcctggcttgatgatatgtgcctgtagttctagttacttgtgagggtgaggagagagggtcacttgagtgcaggagttcaaggctgcagtgagctatgatgatgccaccatactccaggatggtgacagagactctgtctcttaaaaaacaacaacaaaacaaacctctgacaaatacagaaaataacagcatacacctgatagtcccattttataggcaagtgacatctagtattttcatagtaaaatatcatgtagtgtcatctgatactttcttctttttacta

SEQ ID NO: 30119 - DNA, 473 bp, Homo sapiens
ctctgtgttagtgagaaacaaacttgtgttaagccatcatgattttaaagttgttagcagtcagcttgctccaataggatgaacactaataaacatagcggtaacaacctgctgggtagtatcattattctcactttgttggtgaggaacttgaggcccaaaatggtcagaaagttagcagatggcagagctggtatttcaagtctattttttaatccctatcttgcactccttggtcacgtaaaccttgtgtgaatatgtttgatgctttaatggagcaaagaggagaatattaaaataccaggtttcttgggtgggatgtggagtgaggaggaagaacacaaaacggaaaggctccacgcatcagaagccaagctttgggcactccacagttttgctaaagacttccctgtctgctcacatctggtctgttccccagtatcctcactgtattaaagttgtttctttgtcat

SEQ ID NO: 30120 - DNA, 615 bp, Homo sapiens
aaggcctacaggcagtgggccaatgctaaaagaagaaaaaaaaatgttaaccaagacttgtatgcagtaaaactgtctttcaaagataagggtgaaattaagacattcccagataaacaaaagctgaagaagttttttagcactagacctgccttgcaagtaatggtcaagagaggtaatggagagaagtcttgtaggttgaaatgaaaggataccatacagtcactacaagttgtatgaagaagaaagatctcaaagtaaatacatggtcagctataaaagtttgtattgttgtaaccgtggtttataactccatttgtttgtttgttgtctgcatgattgaagagacgtacatttagggctgggcatggtggctcacgcctgtaattccagcgctttgggaggctgagatgggtggatcaccaggtcaggagatcgagatcatcctggttaacacggtgaaaccccatctctactaaaaatacaaaaaaattagccgggcgtggtggcaggcgcctgtaatcccagctactagggaggctgaggcaggagaatggcgtgaacccgggaggcggaacttgcagtgagccaagatcgtgccagtgcactccagcc

SEQ ID NO: 30121 - DNA, 394 bp, Homo sapiens
gaccaagaaaaaggaagcaatatggaatataggattgagaaaggtattccagttcttttgaagagctaaaagatttgaaatgcaacatcccaaatgactgttacaatcacccataattgtaacaacatttgagaagcaaaggatgattacgcactgagtatcaaagtctccagtgaatgtcagggttgtaactgggaccttggaagtctaattgatccttaaacaatgtctaaaataatttttctcctttgtgccctacaacttcaaaaaagttacatcataattttgtgtaatatcaatatgtggctatcatcatttgaaaagtgagctttttgcaatgtataaactcatatcttttagctcttcaaaagaactggaatacctttctcaatag

SEQ ID NO: 30122 - DNA, 1547 bp, Homo sapiens
attgttattccaataggaaaagcattttatctcttcactttagcctttgctgagtattgtacaaaaagaatgatgctgcactaaataatgaacttctttttgaagaatttaacaactagatgcattttgccttcctggaatccttttgtctgtctctttgcatcgttgactcttgcttatccagagatctcagcttaaatatttccttaaaggtacctttcctgagattccagctggaattgagtccccttagtatactctgccatatcacctcttgcagtttataattacccagctgtttgtatgaatgttatgtctgtgtctcacatcacactttgaatttcagagagagcagtggccatgtctgtttcggtcactgctctataactccagtgtctctcataacagtctgggaaataataagtactaattaagtatttgttaagtggaaatactgctgttagagcttctcctaattagagtgttaaaaatgagataatgtgtgcatgggggaaggggaaggagagggagaggaagtagataaacttgtgatattaccgtgagataatcctcaagtaagtcctctcacctccagggcctttgtttcaccttgtctgtaaaataggacagactgggttcaagatgccattaatatcctatattttgattccagtaacaatgatgacagattatgtaagctcatttgaatggaatatgtgacagctagctccccaaaagaatatttgacaagttctaaataaacatattagaaatgcttgccaactagatgatattatttagagcctcgtacccctgttagaaacaagcatatataattggtatatagtttgtaaattaataagatgtactcttctttcagttttctaattgaagcgtaaagacaaaattaagcagcatatcaaggttcatgtaagttacagttattaggtttaatatttagttttaatatttttcacccaacatcttgttgcatcttccagagtaaatctggggtccataaaccaaaccaggagagggaaaatggaaagagtgggcagaaatctgacagctcttaggtttcttctatttgtgttaatactgagacttttaaaaatcatttttatatgtagtgtttattatgaatagttgtaatttgttctgataaattagttgtattaaacactgttatttggctaatattactaggtataataaaatgatatttagtgggaagacattcatcaaagtagaagtagttaatttgggccaggtgcagtggctcacgcctgtaatcccagcactttgggaggccgagatgggcggatcacttgaggtcaggagttccagaccagcctggccaacatgatgaaaccccgtctctactaaaaatccaaaaatgagccaggtatggtgatgtgcacctgtaatcccagctactggggcggctgaggcacaagaatcgcttgaacccgggaggcggaggctgcaatcagtcaagatcgcgccactgtactccagcctaggcaacagagcaagtctctgtctca

SEQ ID NO: 30123 - DNA, 557 bp, Homo sapiens
cctcaagctgttaaacaagcttggatcccttttctctaaagaaatcatgttcagtgttcgaccacctaagaaaagttggaaaaagatcttcaacctttcgggaggagagaaaacacttagttcattggctttagtatttgctcttcaccactacaagcccactcccctttacttcatggatgagattgatgcagcccttgattttaaaaatgtgtccattgttgcattttatatatatgaacaaacaaaaaatgcacagttcataataatttctcttcgaaataatatgtttgagatttcggatagacttattggaatttacaagacatacaacataacaaaaagtgttgctgtaaatccaaaagaaattgcatctaagggactttgttgaactttatgctgaagattcttcaagttgattcagtgtattactgatttttttctatttgtaaaggattatgagttgtataaaatacatactccctaaactagatcatgaaactggtttctgttttatgcagttgtcatttgtaaagtctaataaaatattctctata

SEQ ID NO: 30124 - DNA, 431 bp, Homo sapiens
ttttttgggggggggggtgtgtttgtttgtgggggggggtttttttttattgcggagttggctgaaaaacatagctatcgaatttcttaccttggaaaatgaaatatttagaaaaaagaatcatgtttgtcaatattatatttatgagttgcagaaacgaattgctgaaatggaaactcaaaaggaaaaaattcatgaagataccaaagaaattaatgagaagagcaatatactatcaaatgaaatgaaagctaagaataaagatgtaaaagatacagaaaagtaataatattttgggaagtactaaaagtatttagataattgtattacatgtgtatttatatataaagttacttctagcacattgtgagtgtaagacatttgccagcatatcaagtggtggcccccttagtgaaaaaaaaaaacttgcc

SEQ ID NO: 30125 - DNA, 5957 bp, Homo sapiens
ggtggtgtgcgtggtattccggggttgccggggattgtggcgggtgcccatgatgtggcggtgtcagggggctgaggccgggtgatcccttggaccccggatgtggagggttgcagtgggttggggtcacgaccgtgtggctcccgcctgggttgcccgggtgagactctggtctccgggaggtgcagttaagcttcttgttaagatcctactaaagtagacctaactgctttttaagtatttaagtatagtacttaagtagagtaagcaaaacgtcagtaagaattttcaaataagatttatagccaacggttcactttggagaattacttaccacacatgatcttaaatactttaaaaccatttaggtaaacagccactaaaggaatgaaaaaaaaaaatctattcttcaactaggatataaaatagagaaacttttaacaatactataattaagaaaatccaataagatttataagcattaaaaggatatgctttggttcttttaaaagagatatctttagtctcatgactccacttccagccaaaatttaagatgccacttgattgtatttacaggttgtctttccaaatatttttaataatagtgctgctgctgtagaccacagagaaaagaatccctcgctcttccttttcacttagtagaaacttctaccgcgtaggtcccgccaggagttcgcgcatgcgcaggagcgacaataagatggcggtgataatcgccgcactttttttcaaattagtggatcccagaaatcattgcgcgcatttgtaacgaatttccgttcgagtttgtattttaggcgccattttcgagtgaaggacccggagccgaaacaccggtaggagcggggaggtgggtactacacaaccgtctccagccttggtctgagtggactgtcctgcagcgaccatgccccgtaaaggcacccagccctccactgcccggcgcagagaggaagggccgccgccgccgtcccctgacggcgccagcagcgacgcggagcctgagccgccgtccggccgcacggagagcccagccaccgccgcagagactgcaagtgaggaacttgataatagaagtttagaagagattttgaacagcattcctcctcccccgcctccagcaatgaccaatgaagctggagctcctcggcttatgataactcatattgtaaaccagaacttcaaatcctatgctggggagaaaattctgggacctttccataagcgcttttcctgtattatcgggccaaatggcagtggcaaatccaatgttattgattctatgctttttgtgtttggctatcgagcacaaaaaataagatctaaaaaactctcagtattaatacataattctgatgaacacaaggacattcagagttgtacagtagaagttcattttcaaaagataattgataaggaaggggatgattatgaagtcattcctaacagtaatttctatgtatccagaacggcctgcagagataatacttctgtctatcacataagtggaaagaaaaagacatttaaggatgttggaaatcttcttcgaagccatggaattgacttggaccataatagatttttaattttacagggtgaagttgaacaaattgctatgatgaaaccaaaaggccagactgaacacgatgagggtatgcttgaatatttagaagatataattggttgtggacggctaaatgaacctattaaagtcttgtgtcggagagttgaaatattaaatgaacacagaggagagaagttaaacagggtaaagatggtggaaaaggaaaaggatgccttagaaggagagaaaaacatagctatcgaatttcttaccttggaaaatgaaatatttagaaaaaagaatcatgtttgtcaatattatatttatgagttgcagaaacgaattgctgaaatggaaactcaaaaggaaaaaattcatgaagataccaaagaaattaatgagaagagcaatatactatcaaatgaaatgaaagctaagaataaagatgtaaaagatacagaaaagaaactgaataaaattacaaaatttattgaggagaataaagaaaaatttacacagctagatttggaagatgttcaagttagagaaaagttaaaacatgccacgagtaaagccaaaaaactggagaaacaacttcaaaaagataaagaaaaggttgaagaatttaaaagtatacctgccaagagtaacaatatcattaatgaaacaacaaccagaaacaatgccctcgagaaggaaaaagagaaagaagaaaaaaaattaaaggaagttatggatagccttaaacaggaaacacaagggcttcagaaagaaaaagaaagtcgagagaaagaacttatgggtttcagcaaatcggtaaatgaagcacgttcaaagatggatgtagcccagtcagaacttgatatctatctcagtcgtcataatactgcagtgtctcaattaactaaggctaaggaagctctaattgcagcttctgagactctcaaagaaaggaaagctgcaatcagagatatagaaggaaaactccctcaaactgaacaagaattaaaggagaaagaaaaagaacttcaaaaacttacacaagaagaaacaaactttaaaagtttggttcatgatctctttcaaaaagttgaagaagcaaagagctcattagcaatgaatcgaagtagggggaaagtccttgatgcaataattcaagaaaaaaaatctggcaggattccaggaatatatggaagattgggggacttaggagccattgatgaaaaatacgacgtggctatatcatcctgttgtcatgcactggactacattgttgttgattctattgatatagcccaagaatgtgtaaacttccttaaaagacaaaatattggagttgcaacctttataggtttagataagatggctgtatgggcgaaaaagatgaccgaaattcaaactcctgaaaatactcctcgtttatttgatttagtaaaagtaaaagatgagaaaattcgccaagctttttattttgctttacgagataccttagtagctgacaacttggatcaagccacaagagtagcatatcaaaaagatagaagatggagagtggtaactttacagggacaaatcatagaacagtcaggtacaatgactggtggtggaagcaaagtaatgaaaggaagaatgggttcctcacttgttattgaaatctctgaagaagaggtaaacaaaatggaatcacagttgcaaaacgactctaaaaaagcaatgcaaatccaagaacagaaagtacaacttgaagaaagagtagttaagttacggcatagtgaacgagaaatgaggaacacactagaaaaatttactgcaagcatccagcgtttaatagagcaagaagaatatttgaatgtccaagttaaggaacttgaagctaatgtacttgctacagcccctgacaaaaaaaagcagaaattgctagaagaaaacgttagtgctttcaaaacagaatatgatgctgtggctgagaaagctggtaaagtagaagctgaggttaaacgcttacacaataccatcgtagaaatcaataatcataaactcaaggcccaacaagacaaacttgataaaataaataagcaattagatgaatgtgcttctgctattactaaagcccaagtagcaatcaagactgctgacagaaaccttcaaaaggcacaagactctgtcttgcgtacagagaaagaaataaaagatactgagaaagaggtggatgacctaacagcagagctgaaaagtcttgaggacaaagcagcagaggtcgtaaagaatacaaatgctgcagaggaatccttaccagagatccagaaagaacatcgcaatctgcttcaagaattaaaagttattcaagaaaatgaacatgctcttcaaaaagatgcacttagtattaagttgaaacttgaacaaatagatggtcacattgctgaacataattctaaaataaaatattggcacaaagagatttcaaaaatatcactgcatcctatagaagataatcctattgaagagatttcggttctaagcccagaggatcttgaagcgatcaagaatccagattctataacaaatcaaattgcacttttggaagcccggtgtcatgaaatgaaaccaaacctcggtgccatcgcagagtataaaaagaaggaagaattgtatttgcaacgggtagcagaattggacaaaattacttatgaaagagacagttttagacaggcatatgaagatcttcggaaacaaaggcttaatgaatttatggcaggtttttatataataacaaataaattaaaggaaaattaccaaatgcttactttgggaggggacgccgaactcgagcttgtagacagcttggatcctttctctgaaggaatcatgttcagtgttcgaccacctaagaaaagttggaaaaagatcttcaacctttcgggaggagagaaaacacttagttcattggctttagtatttgctcttcaccactacaagcccactcccctttacttcatggatgagattgatgcagcccttgattttaaaaatgtgtccattgttgcattttatatatatgaacaaacaaaaaatgcacagttcataataatttctcttcgaaataatatgtttgagatttcggatagacttattggaatttacaagacatacaacataacaaaaagtgttgctgtaaatccaaaagaaattgcatctaagggactttgttgaactttatgctgaagattcttcaagttgattcagtgtattactgatttttttctatttgtaaaggattatgagttgtataaaatacatactccctaaactagatcatgaaactggtttctgttttatgcagttgtcatttgtaaagtctaataaaatattctctataattgcttctagattacaaaaatatgacaatcttgtaagtagcagactatggagaaaaatgagttacctggagggtcaggtaacttgccaaactaaaaagtatgttagttgaggcaaagtcctaagcaaggttgtgctatcaaggctcagcataccttcgtgggcctttgatttaccaacactggaaatgcctgccaactaatcttggatagattctttaaggcattccacttagcttgccagttgagacaatcaccacagttattacccaaatactatgaacatatttttgtaaaccagtcattctgaattatagtgatgagaatttaaatatatgcttttctagaatttgatgtttgaccatttatgacttaattaccagagagccagtaaattaggacagtgtttcaacaagcctaggctatctcgtaagttgaaaaatatcccactatagttgcttcatgagtatgaagtaagatggcctctgatttacactggttcaatttacaaattttcaactttatgataggtttatcagggtactaaatgcatttcaacttgatagtttcaacttatgataggtttaccaggatgtagtcccactgttgaggagcatctatttaggggttaattactttagtaataagtggaaagtaagataccttgagtaatgtttgcctataaaattgtcagcgtatttttacactattggctcaagaatgttataatgctaagggacataagttggcaaccacttggtttttggaaggactttcggtattgtattagaagtctgccctagctgttaaatttctgggtatttatcctaaggaattaattaaagagttaattgttcctttcttcagtgggccattgttttagatatttaaaaaatccaacagtttctatcataatgtaactgtaaaaatgtaaacacattattagcatggacttttaaataaagatttaaagaaagcaagatcggaaattcaag

SEQ ID NO: 30126 - DNA, 7030 bp, Homo sapiens
ggtggtgtgcgtggtattccggggttgccggggattgtggcgggtgcccatgatgtggcggtgtcagggggctgaggccgggtgatcccttggaccccggatgtggagggttgcagtgggttggggtcacgaccgtgtggctcccgcctgggttgcccgggtgagactctggtctccgggaggtgcagttaagcttcttgttaagatcctactaaagtagacctaactgctttttaagtatttaagtatagtacttaagtagagtaagcaaaacgtcagtaagaattttcaaataagatttatagccaacggttcactttggagaattacttaccacacatgatcttaaatactttaaaaccatttaggtaaacagccactaaaggaatgaaaaaaaaaaatctattcttcaactaggatataaaatagagaaacttttaacaatactataattaagaaaatccaataagatttataagcattaaaaggatatgctttggttcttttaaaagagatatctttagtctcatgactccacttccagccaaaatttaagatgccacttgattgtatttacaggttgtctttccaaatatttttaataatagtgctgctgctgtagaccacagagaaaagaatccctcgctcttccttttcacttagtagaaacttctaccgcgtaggtcccgccaggagttcgcgcatgcgcaggagcgacaataagatggcggtgataatcgccgcactttttttcaaattagtggatcccagaaatcattgcgcgcatttgtaacgaatttccgttcgagtttgtattttaggcgccattttcgagtgaaggacccggagccgaaacaccggtaggagcggggaggtgggtactacacaaccgtctccagccttggtctgagtggactgtcctgcaggtaaagtacttctcttcctggtcaggttgtcacgctcttacttcctgccttgtccgcgagcgcctggaaaatagaggccttgagcccgagcggcgaagtccgggcttgaagctgccgctgggagatttctcttgctgtcacccctcccccctcggccgctccccggcggcccgggctcccgcgcgcagctcccgggcgccacttttccaagctactcaaatgtctcggggaggccctgagcctcgcagatcttttctttaaaaaatcctagtctctatctggaaaagggcgtctccccctacccctcttccttctgccaacggactagtcaccgggtctcagccttcgctggtgacctttcatggtttactgtccaacgggactccgcctggggagctggagagacaaactcttgccactccaaaattagcaagcgctgccagcgtccgacttgaagttgctagtggttagtcccagccttcgcccttcgcggtccgaccgctgagaggagggagacttcgttatgccccgggccgtcaacggcgccaggagctaaagggcgggcagacgaaagcgggcggcgagtcgccagttagtcttcaccgctctggagagagttgctagccacgggatcctgacccggacacgaactcgtttctccacgtcggtgcgcgcttgcatccctggccccgaaagcgtgggaatgtccggaaatgctggcgtatgggagttccttaattagaaatgcgttagcgaatattatacgcttatactatgggcggacgggtggagagccttaaaaacaacaacaacaaactaagcagttgctcaatcgttgattgatcctcaggcacgtctagattttcccacttacataggtcttgttaagaaaccagtcctgccttcttgccactcgtgtctttcgatggctcccttcccgaagtcccgctgcctctaagcggagtgttaagcggggctctcggaagccggtggaccgagatttcccctgggtggggcgggcgcggtgtagcggcccgcgggctgacttgctcccggctgtcccccggccccagcgaccatgccccgtaaaggcacccagccctccactgcccggcgcagagaggaagggccgccgccgccgtcccctgacggcgccagcagcgacgcggagcctgagccgccgtccggccgcacggagagcccagccaccgccgcagagactgcaagtgaggaacttgataatagaagtttagaagagattttgaacagcattcctcctcccccgcctccagcaatgaccaatgaagctggagctcctcggcttatgataactcatattgtaaaccagaacttcaaatcctatgctggggagaaaattctgggacctttccataagcgcttttcctgtattatcgggccaaatggcagtggcaaatccaatgttattgattctatgctttttgtgtttggctatcgagcacaaaaaataagatctaaaaaactctcagtattaatacataattctgatgaacacaaggacattcagagttgtacagtagaagttcattttcaaaagataattgataaggaaggggatgattatgaagtcattcctaacagtaatttctatgtatccagaacggcctgcagagataatacttctgtctatcacataagtggaaagaaaaagacatttaaggatgttggaaatcttcttcgaagccatggaattgacttggaccataatagatttttaattttacagggtgaagttgaacaaattgctatgatgaaaccaaaaggccagactgaacacgatgagggtatgcttgaatatttagaagatataattggttgtggacggctaaatgaacctattaaagtcttgtgtcggagagttgaaatattaaatgaacacagaggagagaagttaaacagggtaaagatggtggaaaaggaaaaggatgccttagaaggagagaaaaacatagctatcgaatttcttaccttggaaaatgaaatatttagaaaaaagaatcatgtttgtcaatattatatttatgagttgcagaaacgaattgctgaaatggaaactcaaaaggaaaaaattcatgaagataccaaagaaattaatgagaagagcaatatactatcaaatgaaatgaaagctaagaataaagatgtaaaagatacagaaaagaaactgaataaaattacaaaatttattgaggagaataaagaaaaatttacacagctagatttggaagatgttcaagttagagaaaagttaaaacatgccacgagtaaagccaaaaaactggagaaacaacttcaaaaagataaagaaaaggttgaagaatttaaaagtatacctgccaagagtaacaatatcattaatgaaacaacaaccagaaacaatgccctcgagaaggaaaaagagaaagaagaaaaaaaattaaaggaagttatggatagccttaaacaggaaacacaagggcttcagaaagaaaaagaaagtcgagagaaagaacttatgggtttcagcaaatcggtaaatgaagcacgttcaaagatggatgtagcccagtcagaacttgatatctatctcagtcgtcataatactgcagtgtctcaattaactaaggctaaggaagctctaattgcagcttctgagactctcaaagaaaggaaagctgcaatcagagatatagaaggaaaactccctcaaactgaacaagaattaaaggagaaagaaaaagaacttcaaaaacttacacaagaagaaacaaactttaaaagtttggttcatgatctctttcaaaaagttgaagaagcaaagagctcattagcaatgaatcgaagtagggggaaagtccttgatgcaataattcaagaaaaaaaatctggcaggattccaggaatatatggaagattgggggacttaggagccattgatgaaaaatacgacgtggctatatcatcctgttgtcatgcactggactacattgttgttgattctattgatatagcccaagaatgtgtaaacttccttaaaagacaaaatattggagttgcaacctttataggtttagataagatggctgtatgggcgaaaaagatgaccgaaattcaaactcctgaaaatactcctcgtttatttgatttagtaaaagtaaaagatgagaaaattcgccaagctttttattttgctttacgagataccttagtagctgacaacttggatcaagccacaagagtagcatatcaaaaagatagaagatggagagtggtaactttacagggacaaatcatagaacagtcaggtacaatgactggtggtggaagcaaagtaatgaaaggaagaatgggttcctcacttgttattgaaatctctgaagaagaggtaaacaaaatggaatcacagttgcaaaacgactctaaaaaagcaatgcaaatccaagaacagaaagtacaacttgaagaaagagtagttaagttacggcatagtgaacgagaaatgaggaacacactagaaaaatttactgcaagcatccagcgtttaatagagcaagaagaatatttgaatgtccaagttaaggaacttgaagctaatgtacttgctacagcccctgacaaaaaaaagcagaaattgctagaagaaaacgttagtgctttcaaaacagaatatgatgctgtggctgagaaagctggtaaagtagaagctgaggttaaacgcttacacaataccatcgtagaaatcaataatcataaactcaaggcccaacaagacaaacttgataaaataaataagcaattagatgaatgtgcttctgctattactaaagcccaagtagcaatcaagactgctgacagaaaccttcaaaaggcacaagactctgtcttgcgtacagagaaagaaataaaagatactgagaaagaggtggatgacctaacagcagagctgaaaagtcttgaggacaaagcagcagaggtcgtaaagaatacaaatgctgcagaggaatccttaccagagatccagaaagaacatcgcaatctgcttcaagaattaaaagttattcaagaaaatgaacatgctcttcaaaaagatgcacttagtattaagttgaaacttgaacaaatagatggtcacattgctgaacataattctaaaataaaatattggcacaaagagatttcaaaaatatcactgcatcctatagaagataatcctattgaagagatttcggttctaagcccagaggatcttgaagcgatcaagaatccagattctataacaaatcaaattgcacttttggaagcccggtgtcatgaaatgaaaccaaacctcggtgccatcgcagagtataaaaagaaggaagaattgtatttgcaacgggtagcagaattggacaaaattacttatgaaagagacagttttagacaggcatatgaagatcttcggaaacaaaggcttaatgaatttatggcaggtttttatataataacaaataaattaaaggaaaattaccaaatgcttactttgggaggggacgccgaactcgagcttgtagacagcttggatcctttctctgaaggaatcatgttcagtgttcgaccacctaagaaaagttggaaaaagatcttcaacctttcgggaggagagaaaacacttagttcattggctttagtatttgctcttcaccactacaagcccactcccctttacttcatggatgagattgatgcagcccttgattttaaaaatgtgtccattgttgcattttatatatatgaacaaacaaaaaatgcacagttcataataatttctcttcgaaataatatgtttgagatttcggatagacttattggaatttacaagacatacaacataacaaaaagtgttgctgtaaatccaaaagaaattgcatctaagggactttgttgaactttatgctgaagattcttcaagttgattcagtgtattactgatttttttctatttgtaaaggattatgagttgtataaaatacatactccctaaactagatcatgaaactggtttctgttttatgcagttgtcatttgtaaagtctaataaaatattctctataattgcttctagattacaaaaatatgacaatcttgtaagtagcagactatggagaaaaatgagttacctggagggtcaggtaacttgccaaactaaaaagtatgttagttgaggcaaagtcctaagcaaggttgtgctatcaaggctcagcataccttcgtgggcctttgatttaccaacactggaaatgcctgccaactaatcttggatagattctttaaggcattccacttagcttgccagttgagacaatcaccacagttattacccaaatactatgaacatatttttgtaaaccagtcattctgaattatagtgatgagaatttaaatatatgcttttctagaatttgatgtttgaccatttatgacttaattaccagagagccagtaaattaggacagtgtttcaacaagcctaggctatctcgtaagttgaaaaatatcccactatagttgcttcatgagtatgaagtaagatggcctctgatttacactggttcaatttacaaattttcaactttatgataggtttatcagggtactaaatgcatttcaacttgatagtttcaacttatgataggtttaccaggatgtagtcccactgttgaggagcatctatttaggggttaattactttagtaataagtggaaagtaagataccttgagtaatgtttgcctataaaattgtcagcgtatttttacactattggctcaagaatgttataatgctaagggacataagttggcaaccacttggtttttggaaggactttcggtattgtattagaagtctgccctagctgttaaatttctgggtatttatcctaaggaattaattaaagagttaattgttcctttcttcagtgggccattgttttagatatttaaaaaatccaacagtttctatcataatgtaactgtaaaaatgtaaacacattattagcatggacttttaaataaagatttaaagaaagcaagatcggaaattcaag

SEQ ID NO: 30127 - DNA, 5937 bp, Homo sapiens
ggtggtgtgcgtggtattccggggttgccggggattgtggcgggtgcccatgatgtggcggtgtcagggggctgaggccgggtgatcccttggaccccggatgtggagggttgcagtgggttggggtcacgaccgtgtggctcccgcctgggttgcccgggtgagactctggtctccgggaggtgcagttaagcttcttgttaagatcctactaaagtagacctaactgctttttaagtatttaagtatagtacttaagtagagtaagcaaaacgtcagtaagaattttcaaataagatttatagccaacggttcactttggagaattacttaccacacatgatcttaaatactttaaaaccatttaggtaaacagccactaaaggaatgaaaaaaaaaaatctattcttcaactaggatataaaatagagaaacttttaacaatactataattaagaaaatccaataagatttataagcattaaaaggatatgctttggttcttttaaaagagatatctttagtctcatgactccacttccagccaaaatttaagatgccacttgattgtatttacaggttgtctttccaaatatttttaataatagtgctgctgctgtagaccacagagaaaagaatccctcgctcttccttttcacttagtagaaacttctaccgcgtaggtcccgccaggagttcgcgcatgcgcaggagcgacaataagatggcggtgataatcgccgcactttttttcaaattagtggatcccagaaatcattgcgcgcatttgtaacgaatttccgttcgagtttgtattttaggcgccattttcgagtgaaggacccggagccgaaacaccggtaggagcggggaggtgggtactacacaaccgtctccagccttggtctgagtggactgtcctgcagcgaccatgccccgtaaaggcacccagccctccactgcccggcgcagagaggaagggccgccgccgccgtcccctgacggcgccagcagcgacgcggagcctgagccgccgtccggccgcacggagagcccagccaccgccgcagagactgcaagtgaggaacttgataatagaagtttagaagagattttgaacagcattcctcctcccccgcctccagcaatgaccaatgaagctggagctcctcggcttatgataactcatattgtaaaccagaacttcaaatcctatgctggggagaaaattctgggacctttccataagcgcttttcctgtattatcgggccaaatggcagtggcaaatccaatgttattgattctatgctttttgtgtttggctatcgagcacaaaaaataagatctaaaaaactctcagtattaatacataattctgatgaacacaaggacattcagagttgtacagtagaagttcattttcaaaagataattgataaggaaggggatgattatgaagtcattcctaacagtaatttctatgtatccagaacggcctgcagagataatacttctgtctatcacataagtggaaagaaaaagacatttaaggatgttggaaatcttcttcgaagccatggaattgacttggaccataatagatttttaattttacagggtgaagttgaacaaattgctatgatgaaaccaaaaggccagactgaacacgatgagggtatgcttgaatatttagaagatataattggttgtggacggctaaatgaacctattaaagtcttgtgtcggagagttgaaatattaaatgaacacagaggagagaagttaaacagggtaaagatggtggaaaaggaaaaggatgccttagaaggagagaaaaacatagctatcgaatttcttaccttggaaaatgaaatatttagaaaaaagaatcatgtttgtcaatattatatttatgagttgcagaaacgaattgctgaaatggaaactcaaaaggaaaaaattcatgaagataccaaagaaattaatgagaagagcaatatactatcaaatgaaatgaaagctaagaataaagatgtaaaagatacagaaaagaaactgaataaaattacaaaatttattgaggagaataaagaaaaatttacacagctagatttggaagatgttcaagttagagaaaagttaaaacatgccacgagtaaagccaaaaaactggagaaacaacttcaaaaagataaagaaaaggttgaagaatttaaaagtatacctgccaagagtaacaatatcattaatgaaacaacaaccagaaacaatgccctcgagaaggaaaaagagaaagaagaaaaaaaattaaaggaagttatggatagccttaaacaggaaacacaagggcttcagaaagaaaaagaaagtcgagagaaagaacttatgggtttcagcaaatcggtaaatgaagcacgttcaaagatggatgtagcccagtcagaacttgatatctatctcagtcgtcataatactgcagtgtctcaattaactaaggctaaggaagctctaattgcagcttctgagactctcaaagaaaggaaagctgcaatcagagatatagaaggaaaactccctcaaactgaacaagaattaaaggagaaagaaaaagaacttcaaaaacttacacaagaagaaacaaactttaaaagtttggttcatgatctctttcaaaaagttgaagaagcaaagagctcattagcaatgaatcgaagtagggggaaagtccttgatgcaataattcaagaaaaaaaatctggcaggattccaggaatatatggaagattgggggacttaggagccattgatgaaaaatacgacgtggctatatcatcctgttgtcatgcactggactacattgttgttgattctattgatatagcccaagaatgtgtaaacttccttaaaagacaaaatattggagttgcaacctttataggtttagataagatggctgtatgggcgaaaaagatgaccgaaattcaaactcctgaaaatactcctcgtttatttgatttagtaaaagtaaaagatgagaaaattcgccaagctttttattttgctttacgagataccttagtagctgacaacttggatcaagccacaagagtagcatatcaaaaagatagaagatggagagtggtaactttacagggacaaatcatagaacagtcaggtacaatgactggtggtggaagcaaagtaatgaaaggaagaatgggttcctcacttgttattgaaatctctgaagaagaggtaaacaaaatggaatcacagttgcaaaacgactctaaaaaagcaatgcaaatccaagaacagaaagtacaacttgaagaaagagtagttaagttacggcatagtgaacgagaaatgaggaacacactagaaaaatttactgcaagcatccagcgtttaatagagcaagaagaatatttgaatgtccaagttaaggaacttgaagctaatgtacttgctacagcccctgacaaaaaaaagcagaaattgctagaagaaaacgttagtgctttcaaaacagaatatgatgctgtggctgagaaagctggtaaagtagaagctgaggttaaacgcttacacaataccatcgtagaaatcaataatcataaactcaaggcccaacaagacaaacttgataaaataaataagcaattagatgaatgtgcttctgctattactaaagcccaagtagcaatcaagactgctgacagaaaccttcaaaaggcacaagactctgtcttgcgtacagagaaagaaataaaagatactgagaaagaggtggatgacctaacagcagagctgaaaagtcttgaggacaaagcagcagaggtcgtaaagaatacaaatgctgcagaggaatccttaccagagatccagaaagaacatcgcaatctgcttcaagaattaaaagttattcaagaaaatgaacatgctcttcaaaaagatgcacttagtattaagttgaaacttgaacaaatagatggtcacattgctgaacataattctaaaataaaatattggcacaaagagatttcaaaaatatcactgcatcctatagaagataatcctattgaagagatttcggttctaagcccagaggatcttgaagcgatcaagaatccagattctataacaaatcaaattgcacttttggaagcccggtgtcatgaaatgaaaccaaacctcggtgccatcgcagagtataaaaagaaggaagaattgtatttgcaacgggtagcagaattggacaaaattacttatgaaagagacagttttagacaggcatatgaagatcttcggaaacaaaggcttaatgaatttatggcaggtttttatataataacaaataaattaaaggaaaattaccaaatgcttactttgggaggggacgccgaactcgagcttgtagacagcttggatcctttctctgaaggaatcatgttcagtgttcgaccacctaagaaaagttggaaaaagatcttcaacctttcgggaggagagaaaacacttagttcattggctttagtatttgctcttcaccactacaagcccactcccctttacttcatggatgagattgatgcagcccttgattttaaaaatgtgtccattgttgcattttatatatatgaacaaacaaaaaatgcacagttcataataatttctcttcgaaataatatgtttgagatttcggatagacttattggaatttacaagacatacaacataacaaaaagtgttgctgtaaatccaaaagaaattgcatctaagggactttgttgaactttatgctgaagattcttcaagttgattcagtgtattactgatttttttctatttgtaaaggattatgagttgtataaaatacatactccctaaactagatcatgaaactggtttctgttttatgcagttgtcatttgtaaagtctaataaaatattctctataattgcttctagattacaaaaatatgacaatcttgtaagtagcagactatggagaaaaatgagttacctggagggtcaggtaacttgccaaactaaaaagtatgttagttgaggcaaagtcctaagcaaggttgtgctatcaaggctcagcataccttcgtgggcctttgatttaccaacactggaaatgcctgccaactaatcttggatagattctttaaggcattccacttagcttgccagttgagacaatcaccacagttattacccaaatactatgaacatatttttgtaaaccagtcattctgaattatatgcttttctagaatttgatgtttgaccatttatgacttaattaccagagagccagtaaattaggacagtgtttcaacaagcctaggctatctcgtaagttgaaaaatatcccactatagttgcttcatgagtatgaagtaagatggcctctgatttacactggttcaatttacaaattttcaactttatgataggtttatcagggtactaaatgcatttcaacttgatagtttcaacttatgataggtttaccaggatgtagtcccactgttgaggagcatctatttaggggttaattactttagtaataagtggaaagtaagataccttgagtaatgtttgcctataaaattgtcagcgtatttttacactattggctcaagaatgttataatgctaagggacataagttggcaaccacttggtttttggaaggactttcggtattgtattagaagtctgccctagctgttaaatttctgggtatttatcctaaggaattaattaaagagttaattgttcctttcttcagtgggccattgttttagatatttaaaaaatccaacagtttctatcataatgtaactgtaaaaatgtaaacacattattagcatggacttttaaataaagatttaaagaaagcaagatcggaaattcaag

SEQ ID NO: 30128 - DNA, 5922 bp, Homo sapiens
ggtggtgtgcgtggtattccggggttgccggggattgtggcgggtgcccatgatgtggcggtgtcagggggctgaggccgggtgatcccttggaccccggatgtggagggttgcagtgggttggggtcacgaccgtgtggctcccgcctgggttgcccgggtgagactctggtctccgggaggtgcagttaagcttcttgttaagatcctactaaagtagacctaactgctttttaagtatttaagtatagtacttaagtagagtaagcaaaacgtcagtaagaattttcaaataagatttatagccaacggttcactttggagaattacttaccacacatgatcttaaatactttaaaaccatttaggtaaacagccactaaaggaatgaaaaaaaaaaatctattcttcaactaggatataaaatagagaaacttttaacaatactataattaagaaaatccaataagatttataagcattaaaaggatatgctttggttcttttaaaagagatatctttagtctcatgactccacttccagccaaaatttaagatgccacttgattgtatttacaggttgtctttccaaatatttttaataatagtgctgctgctgtagaccacagagaaaagaatccctcgctcttccttttcacttagtagaaacttctaccgcgtaggtcccgccaggagttcgcgcatgcgcaggagcgacaataagatggcggtgataatcgccgcactttttttcaaattagtggatcccagaaatcattgcgcgcatttgtaacgaatttccgttcgagtttgtattttaggcgccattttcgagtgaaggacccggagccgaaacaccggtaggagcggggaggtgggtactacacaaccgtctccagccttggtctgagtggactgtcctgcagcgaccatgccccgtaaaggcacccagccctccactgcccggcgcagagaggaagggccgccgccgccgtcccctgacggcgccagcagcgacgcggagcctgagccgccgtccggccgcacggagagcccagccaccgccgcagagactgcaagtgaggaacttgataatagaagtttagaagagattttgaacagcattcctcctcccccgcctccagcaatgaccaatgaagctggagctcctcggcttatgataactcatattgtaaaccagaacttcaaatcctatgctggggagaaaattctgggacctttccataagcgcttttcctgtattatcgggccaaatggcagtggcaaatccaatgttattgattctatgctttttgtgtttggctatcgagcacaaaaaataagatctaaaaaactctcagtattaatacataattctgatgaacacaaggacattcagagttgtacagtagaagttcattttcaaaagataattgataaggaaggggatgattatgaagtcattcctaacagtaatttctatgtatccagaacggcctgcagagataatacttctgtctatcacataagtggaaagaaaaagacatttaaggatgttggaaatcttcttcgaagccatggaattgacttggaccataatagatttttaattttacagggtgaagttgaacaaattgctatgatgaaaccaaaaggccagactgaacacgatgagggtatgcttgaatatttagaagatataattggttgtggacggctaaatgaacctattaaagtcttgtgtcggagagttgaaatattaaatgaacacagaggagagaagttaaacagggtaaagatggtggaaaaggaaaaggatgccttagaaggagagaaaaacatagctatcgaatttcttaccttggaaaatgaaatatttagaaaaaagaatcatgtttgtcaatattatatttatgagttgcagaaacgaattgctgaaatggaaactcaaaaggaaaaaattcatgaagataccaaagaaattaatgagaagagcaatatactatcaaatgaaatgaaagctaagaataaagatgtaaaagatacagaaaagaaactgaataaaattacaaaatttattgaggagaataaagaaaaatttacacagctagatttggaagatgttcaagttagagaaaagttaaaacatgccacgagtaaagccaaaaaactggagaaacaacttcaaaaagataaagaaaaggttgaagaatttaaaagtatacctgccaagagtaacaatatcattaatgaaacaacaaccagaaacaatgccctcgagaaggaaaaagagaaagaagaaaaaaaattaaaggaagttatggatagccttaaacaggaaacacaagggcttcagaaagaaaaagaaagtcgagagaaagaacttatgggtttcagcaaatcggtaaatgaagcacgttcaaagatggatgtagcccagtcagaacttgatatctatctcagtcgtcataatactgcagtgtctcaattaactaaggctaaggaagctctaattgcagcttctgagactctcaaagaaaggaaagctgcaatcagagatatagaaggaaaactccctcaaactgaacaagaattaaaggagaaagaaaaagaacttcaaaaacttacacaagaagaaacaaactttaaaagtttggttcatgatctctttcaaaaagttgaagaagcaaagagctcattagcaatgaatcgaagtagggggaaagtccttgatgcaataattcaagaaaaaaaatctggcaggattccaggaatatatggaagattgggggacttaggagccattgatgaaaaatacgacgtggctatatcatcctgttgtcatgcactggactacattgttgttgattctattgatatagcccaagaatgtgtaaacttccttaaaagacaaaatattggagttgcaacctttataggtttagataagatggctgtatgggcgaaaaagatgaccgaaattcaaactcctgaaaatactcctcgtttatttgatttagtaaaagtaaaagatgagaaaattcgccaagctttttattttgctttacgagataccttagtagctgacaacttggatcaagccacaagagtagcatatcaaaaagatagaagatggagagtggtaactttacagggacaaatcatagaacagtcaggtacaatgactggtggtggaagcaaagtaatgaaaggaagaatgggttcctcacttgttattgaaatctctgaagaagaggtaaacaaaatggaatcacagttgcaaaacgactctaaaaaagcaatgcaaatccaagaacagaaagtacaacttgaagaaagagtagttaagttacggcatagtgaacgagaaatgaggaacacactagaaaaatttactgcaagcatccagcgtttaatagagcaagaagaatatttgaatgtccaagttaaggaacttgaagctaatgtacttgctacagcccctgacaaaaaaaagcagaaattgctagaagaaaacgttagtgctttcaaaacagaatatgatgctgtggctgagaaagctggtaaagtagaagctgaggttaaacgcttacacaataccatcgtagaaatcaataatcataaactcaaggcccaacaagacaaacttgataaaataaataagcaattagatgaatgtgcttctgctattactaaagcccaagtagcaatcaagactgctgacagaaaccttcaaaaggcacaagactctgtcttgcgtacagagaaagaaataaaagatactgagaaagaggtggatgacctaacagcagagctgaaaagtcttgaggacaaagcagcagaggtcgtaaagaatacaaatgctgcagaggaatccttaccagagatccagaaagaacatcgcaatctgcttcaagaattaaaagttattcaagaaaatgaacatgctcttcaaaaagatgcacttagtattaagttgaaacttgaacaaatagatggtcacattgctgaacataattctaaaataaaatattggcacaaagagatttcaaaaatatcactgcatcctatagaagataatcctattgaagagatttcggttctaagcccagaggatcttgaagcgatcaagaatccagattctataacaaatcaaattgcacttttggaagcccggtgtcatgaaatgaaaccaaacctcggtgccatcgcagagtataaaaagaaggaagaattgtatttgcaacgggtagcagaattggacaaaattacttatgaaagagacagttttagacaggcatatgaagatcttcggaaacaaaggcttaatgaatttatggcaggtttttatataataacaaataaattaaaggaaaattaccaaatgcttactttgggaggggacgccgaactcgagcttgtagacagcttggatcctttctctgaaggaatcatgttcagtgttcgaccacctaagaaaagttggaaaaagatcttcaacctttcgggaggagagaaaacacttagttcattggctttagtatttgctcttcaccactacaagcccactcccctttacttcatggatgagattgatgcagcccttgattttaaaaatgtgtccattgttgcattttatatatatgaacaaacaaaaaatgcacagttcataataatttctcttcgaaataatatgtttgagatttcggatagacttattggaatttacaagacatacaacataacaaaaagtgttgctgtaaatccaaaagaaattgcatctaagggactttgttgaactttatgctgaagattcttcaagttgattcagtgtattactgatttttttctatttgtaaaggattatgagttgtataaaatacatactccctaaactagatcatgaaactggtttctgttttatgcagttgtcatttgtaaagtctaataaaatattctctataattgcttctagattacaaaaatatgacaatcttgtaagtagcagactatggagaaaaatgagttacctggagggtcaggtaacttgccaaactaaaaagtatgttagttgaggcaaagtcctaagcaaggttgtgctatcaaggctcagcataccttcgtgggcctttgatttaccaacactggaaatgcctgccaactaatcttggatagattctttaaggcattccacttagcttgccagttgagacaatcaccacagttattacccaaatactatgaacatatttttgtaaaccagtcattctgaattatagtgatgagaatttaaatatatgcttttctagaatttgatgtttgaccatttatgacttaattaccagagagccagtaaattaggacagtgtttcaacaagcctaggctatctcgtaagttgaaaaatatcccactatagttgcttcatgagtatgaagtaagatggcctctgatttacactggttcaatttacaaattttcaactttatgataggtttatcagggtactaaatgcatttcaacttgatagtttcaacttatgataggtttaccaggatgtagtcccactgttgaggagcatctatttaggggttaattactttagtaataagtggaaagtaagataccttgagtaatgtttgcctataaaattgtcagcgtatttttacactattggctcaagaatgttataatgctaagggacataagttggcaaccacttggtttttggaaggactttcggtattgtattagaagtctgccctagctgttaaatttctgggtattatctaggatataagagttatgtcttctcagtggcatgtttagatattaaatcaagtttatcatatgatgtaatgaactttagatggttaatagattagaagagaaaaaaaaaattggggggcaaaattaaaatgtgg

SEQ ID NO: 30129 - DNA, 5813 bp, Homo sapiens
ggtggtgtgcgtggtattccggggttgccggggattgtggcgggtgcccatgatgtggcggtgtcagggggctgaggccgggtgatcccttggaccccggatgtggagggttgcagtgggttggggtcacgaccgtgtggctcccgcctgggttgcccgggtgagactctggtctccgggaggtgcagttaagcttcttgttaagatcctactaaagtagacctaactgctttttaagtatttaagtatagtacttaagtagagtaagcaaaacgtcagtaagaattttcaaataagatttatagccaacggttcactttggagaattacttaccacacatgatcttaaatactttaaaaccatttaggtaaacagccactaaaggaatgaaaaaaaaaaatctattcttcaactaggatataaaatagagaaacttttaacaatactataattaagaaaatccaataagatttataagcattaaaaggatatgctttggttcttttaaaagagatatctttagtctcatgactccacttccagccaaaatttaagatgccacttgattgtatttacaggttgtctttccaaatatttttaataatagtgctgctgctgtagaccacagagaaaagaatccctcgctcttccttttcacttagtagaaacttctaccgcgtaggtcccgccaggagttcgcgcatgcgcaggagcgacaataagatggcggtgataatcgccgcactttttttcaaattagtggatcccagaaatcattgcgcgcatttgtaacgaatttccgttcgagtttgtattttaggcgccattttcgagtgaaggacccggagccgaaacaccggtaggagcggggaggtgggtactacacaaccgtctccagccttggtctgagtggactgtcctgcagagactgcaagtgaggaacttgataatagaagtttagaagagattttgaacagcattcctcctcccccgcctccagcaatgaccaatgaagctggagctcctcggcttatgataactcatattgtaaaccagaacttcaaatcctatgctggggagaaaattctgggacctttccataagcgcttttcctgtattatcgggccaaatggcagtggcaaatccaatgttattgattctatgctttttgtgtttggctatcgagcacaaaaaataagatctaaaaaactctcagtattaatacataattctgatgaacacaaggacattcagagttgtacagtagaagttcattttcaaaagataattgataaggaaggggatgattatgaagtcattcctaacagtaatttctatgtatccagaacggcctgcagagataatacttctgtctatcacataagtggaaagaaaaagacatttaaggatgttggaaatcttcttcgaagccatggaattgacttggaccataatagatttttaattttacagggtgaagttgaacaaattgctatgatgaaaccaaaaggccagactgaacacgatgagggtatgcttgaatatttagaagatataattggttgtggacggctaaatgaacctattaaagtcttgtgtcggagagttgaaatattaaatgaacacagaggagagaagttaaacagggtaaagatggtggaaaaggaaaaggatgccttagaaggagagaaaaacatagctatcgaatttcttaccttggaaaatgaaatatttagaaaaaagaatcatgtttgtcaatattatatttatgagttgcagaaacgaattgctgaaatggaaactcaaaaggaaaaaattcatgaagataccaaagaaattaatgagaagagcaatatactatcaaatgaaatgaaagctaagaataaagatgtaaaagatacagaaaagaaactgaataaaattacaaaatttattgaggagaataaagaaaaatttacacagctagatttggaagatgttcaagttagagaaaagttaaaacatgccacgagtaaagccaaaaaactggagaaacaacttcaaaaagataaagaaaaggttgaagaatttaaaagtatacctgccaagagtaacaatatcattaatgaaacaacaaccagaaacaatgccctcgagaaggaaaaagagaaagaagaaaaaaaattaaaggaagttatggatagccttaaacaggaaacacaagggcttcagaaagaaaaagaaagtcgagagaaagaacttatgggtttcagcaaatcggtaaatgaagcacgttcaaagatggatgtagcccagtcagaacttgatatctatctcagtcgtcataatactgcagtgtctcaattaactaaggctaaggaagctctaattgcagcttctgagactctcaaagaaaggaaagctgcaatcagagatatagaaggaaaactccctcaaactgaacaagaattaaaggagaaagaaaaagaacttcaaaaacttacacaagaagaaacaaactttaaaagtttggttcatgatctctttcaaaaagttgaagaagcaaagagctcattagcaatgaatcgaagtagggggaaagtccttgatgcaataattcaagaaaaaaaatctggcaggattccaggaatatatggaagattgggggacttaggagccattgatgaaaaatacgacgtggctatatcatcctgttgtcatgcactggactacattgttgttgattctattgatatagcccaagaatgtgtaaacttccttaaaagacaaaatattggagttgcaacctttataggtttagataagatggctgtatgggcgaaaaagatgaccgaaattcaaactcctgaaaatactcctcgtttatttgatttagtaaaagtaaaagatgagaaaattcgccaagctttttattttgctttacgagataccttagtagctgacaacttggatcaagccacaagagtagcatatcaaaaagatagaagatggagagtggtaactttacagggacaaatcatagaacagtcaggtacaatgactggtggtggaagcaaagtaatgaaaggaagaatgggttcctcacttgttattgaaatctctgaagaagaggtaaacaaaatggaatcacagttgcaaaacgactctaaaaaagcaatgcaaatccaagaacagaaagtacaacttgaagaaagagtagttaagttacggcatagtgaacgagaaatgaggaacacactagaaaaatttactgcaagcatccagcgtttaatagagcaagaagaatatttgaatgtccaagttaaggaacttgaagctaatgtacttgctacagcccctgacaaaaaaaagcagaaattgctagaagaaaacgttagtgctttcaaaacagaatatgatgctgtggctgagaaagctggtaaagtagaagctgaggttaaacgcttacacaataccatcgtagaaatcaataatcataaactcaaggcccaacaagacaaacttgataaaataaataagcaattagatgaatgtgcttctgctattactaaagcccaagtagcaatcaagactgctgacagaaaccttcaaaaggcacaagactctgtcttgcgtacagagaaagaaataaaagatactgagaaagaggtggatgacctaacagcagagctgaaaagtcttgaggacaaagcagcagaggtcgtaaagaatacaaatgctgcagaggaatccttaccagagatccagaaagaacatcgcaatctgcttcaagaattaaaagttattcaagaaaatgaacatgctcttcaaaaagatgcacttagtattaagttgaaacttgaacaaatagatggtcacattgctgaacataattctaaaataaaatattggcacaaagagatttcaaaaatatcactgcatcctatagaagataatcctattgaagagatttcggttctaagcccagaggatcttgaagcgatcaagaatccagattctataacaaatcaaattgcacttttggaagcccggtgtcatgaaatgaaaccaaacctcggtgccatcgcagagtataaaaagaaggaagaattgtatttgcaacgggtagcagaattggacaaaattacttatgaaagagacagttttagacaggcatatgaagatcttcggaaacaaaggcttaatgaatttatggcaggtttttatataataacaaataaattaaaggaaaattaccaaatgcttactttgggaggggacgccgaactcgagcttgtagacagcttggatcctttctctgaaggaatcatgttcagtgttcgaccacctaagaaaagttggaaaaagatcttcaacctttcgggaggagagaaaacacttagttcattggctttagtatttgctcttcaccactacaagcccactcccctttacttcatggatgagattgatgcagcccttgattttaaaaatgtgtccattgttgcattttatatatatgaacaaacaaaaaatgcacagttcataataatttctcttcgaaataatatgtttgagatttcggatagacttattggaatttacaagacatacaacataacaaaaagtgttgctgtaaatccaaaagaaattgcatctaagggactttgttgaactttatgctgaagattcttcaagttgattcagtgtattactgatttttttctatttgtaaaggattatgagttgtataaaatacatactccctaaactagatcatgaaactggtttctgttttatgcagttgtcatttgtaaagtctaataaaatattctctataattgcttctagattacaaaaatatgacaatcttgtaagtagcagactatggagaaaaatgagttacctggagggtcaggtaacttgccaaactaaaaagtatgttagttgaggcaaagtcctaagcaaggttgtgctatcaaggctcagcataccttcgtgggcctttgatttaccaacactggaaatgcctgccaactaatcttggatagattctttaaggcattccacttagcttgccagttgagacaatcaccacagttattacccaaatactatgaacatatttttgtaaaccagtcattctgaattatagtgatgagaatttaaatatatgcttttctagaatttgatgtttgaccatttatgacttaattaccagagagccagtaaattaggacagtgtttcaacaagcctaggctatctcgtaagttgaaaaatatcccactatagttgcttcatgagtatgaagtaagatggcctctgatttacactggttcaatttacaaattttcaactttatgataggtttatcagggtactaaatgcatttcaacttgatagtttcaacttatgataggtttaccaggatgtagtcccactgttgaggagcatctatttaggggttaattactttagtaataagtggaaagtaagataccttgagtaatgtttgcctataaaattgtcagcgtatttttacactattggctcaagaatgttataatgctaagggacataagttggcaaccacttggtttttggaaggactttcggtattgtattagaagtctgccctagctgttaaatttctgggtatttatcctaaggaattaattaaagagttaattgttcctttcttcagtgggccattgttttagatatttaaaaaatccaacagtttctatcataatgtaactgtaaaaatgtaaacacattattagcatggacttttaaataaagatttaaagaaagcaagatcggaaattcaag

SEQ ID NO: 30130 - DNA, 5255 bp, Homo sapiens
ggtggtgtgcgtggtattccggggttgccggggattgtggcgggtgcccatgatgtggcggtgtcagggggctgaggccgggtgatcccttggaccccggatgtggagggttgcagtgggttggggtcacgaccgtgtggctcccgcctgggttgcccgggtgagactctggtctccgggaggtgcagttaagcttcttgttaagatcctactaaagtagacctaactgctttttaagtatttaagtatagtacttaagtagagtaagcaaaacgtcagtaagaattttcaaataagatttatagccaacggttcactttggagaattacttaccacacatgatcttaaatactttaaaaccatttaggtaaacagccactaaaggaatgaaaaaaaaaaatctattcttcaactaggatataaaatagagaaacttttaacaatactataattaagaaaatccaataagatttataagcattaaaaggatatgctttggttcttttaaaagagatatctttagtctcatgactccacttccagccaaaatttaagatgccacttgattgtatttacaggttgtctttccaaatatttttaataatagtgctgctgctgtagaccacagagaaaagaatccctcgctcttccttttcacttagtagaaacttctaccgcgtaggtcccgccaggagttcgcgcatgcgcaggagcgacaataagatggcggtgataatcgccgcactttttttcaaattagtggatcccagaaatcattgcgcgcatttgtaacgaatttccgttcgagtttgtattttaggcgccattttcgagtgaaggacccggagccgaaacaccggtaggagcggggaggtgggtactacacaaccgtctccagccttggtctgagtggactgtcctgcagcgaccatgccccgtaaaggcacccagccctccactgcccggcgcagagaggaagggccgccgccgccgtcccctgacggcgccagcagcgacgcggagcctgagccgccgtccggccgcacggagagcccagccaccgccgcagagactgcaagtgaggaacttgataatagaagtttagaagagattttgaacagcattcctcctcccccgcctccagcaatgaccaatgaagctggagctcctcggcttatgataactcatattgtaaaccagaacttcaaatcctatgctggggagaaaattctgggacctttccataagcgcttttcctgtattatcgggccaaatggcagtggcaaatccaatgttattgattctatgctttttgtgtttggctatcgagcacaaaaaataagatctaaaaaactctcagtattaatacataattctgatgaacacaaggacattcagagttgtacagtagaagttcattttcaaaagataattgataaggaaggggatgattatgaagtcattcctaacagtaatttctatgtatccagaacggcctgcagagataatacttctgtctatcacataagtggaaagaaaaagacatttaaggatgttggaaatcttcttcgaagccatggaattgacttggaccataatagatttttaattttacagggtgaagttgaacaaattgctatgatgaaaccaaaaggccagactgaacacgatgagggtatgcttgaatatttagaagatataattggttgtggacggctaaatgaacctattaaagtcttgtgtcggagagttgaaatattaaatgaacacagaggagagaagttaaacagggtaaagatggtggaaaaggaaaaggatgccttagaaggagagaaaaacatagctatcgaatttcttaccttggaaaatgaaatatttagaaaaaagaatcatgtttgtcaatattatatttatgagttgcagaaacgaattgctgaaatggaaactcaaaaggaaaaaattcatgaagataccaaagaaattaatgagaagagcaatatactatcaaatgaaatgaaagctaagaataaagatgtaaaagatacagaaaagaaactgaataaaattacaaaatttattgaggagaataaagaaaaatttacacagctagatttggaagatgttcaagttagagaaaagttaaaacatgccacgagtaaagccaaaaaactggagaaacaacttcaaaaagataaagaaaaggttgaagaatttaaaagtatacctgccaagagtaacaatatcattaatgaaacaacaaccagaaacaatgccctcgagaaggaaaaagagaaagaagaaaaaaaattaaaggaagttatggatagccttaaacaggaaacacaagggcttcagaaagaaaaagaaagtcgagagaaagaacttatgggtttcagcaaatcggtaaatgaagcacgttcaaagatggatgtagcccagtcagaacttgatatctatctcagtcgtcataatactgcagtgtctcaattaactaaggctaaggaagctctaattgcagcttctgagactctcaaagaaaggaaagctgcaatcagagatatagaaggaaaactccctcaaactgaacaagaattaaaggagaaagaaaaagaacttcaaaaacttacacaagaagaaacaaactttaaaagtttggttcatgatctctttcaaaaagttgaagaagcaaagagctcattagcaatgaatcgaagtagggggaaagtccttgatgcaataattcaagaaaaaaaatctggcaggattccaggaatatatggaagattgggggacttaggagccattgatgaaaaatacgacgtggctatatcatcctgttgtcatgcactggactacattgttgttgattctattgatatagcccaagaatgtgtaaacttccttaaaagacaaaatattggagttgcaacctttataggtttagataagatggctgtatgggcgaaaaagatgaccgaaattcaaactcctgaaaatactcctcgtttatttgatttagtaaaagtaaaagatgagaaaattcgccaagctttttattttgctttacgagataccttagtagctgacaacttggatcaagccacaagagtagcatatcaaaaagatagaagatggagagtggtaactttacagggacaaatcatagaacagtcaggtacaatgactggtggtggaagcaaagtaatgaaaggaagaatgggttcctcacttgttattgaaatctctgaagaagaggtaaacaaaatggaatcacagttgcaaaacgactctaaaaaagcaatgcaaatccaagaacagaaagtacaacttgaagaaagagtagttaagttacggcatagtgaacgagaaatgaggaacacactagaaaaatttactgcaagcatccagcgtttaatagagcaagaagaatatttgaatgtccaagttaaggaacttgaagctaatgtacttgctacagcccctgacaaaaaaaagcagaaattgctagaagaaaacgttagtgctttcaaaacagaatatgatgctgtggctgagaaagctggtaaagtagaagctgaggttaaacgcttacacaataccatcgtagaaatcaataatcataaactcaaggcccaacaagacaaacttgataaaataaataagcaattagatgaatgtgcttctgctattactaaagcccaagtagcaatcaagactgctgacagaaaccttcaaaaggcacaagactctgtcttgcgtacagagaaagaaataaaagatactgagaaagaggtggatgacctaacagcagagctgaaaagtcttgaggacaaagcagcagaggtcgtaaagaatacaaatgctgcagaggaatccttaccagagatccagaaagaacatcgcaatctgcttcaagaattaaaagttattcaagaaaatgaacatgctcttcaaaaagatgcacttagtattaagttgaaacttgaacaaatagatggtcacattgctgaacataattctaaaataaaatattggcacaaagagatttcaaaaatatcactgcatcctatagaagataatcctattgaagagatttcggttctaagcccagaggatcttgaagcgatcaagaatccagattctataacaaatcaaattgcacttttggaagcccggtgtcatgaaatgaaaccaaacctcggtgccatcgcagagtataaaaagaaggaagaattgtatttgcaacgggtagcagaattggacaaaattacttatgaaagagacagttttagacaggcatatgaagatcttcggaaacaaaggcttaatgaatttatggcaggtttttatataataacaaataaattaaaggaaaattaccaaatgcttactttgggaggggacgccgaactcgagcttgtagacagcttggatcctttctctgaaggaatcatgttcagtgttcgaccacctaagaaaagttggaaaaagatcttcaacctttcgggaggagagaaaacacttagttcattggctttagtatttgctcttcaccactacaagcccactcccctttacttcatggatgagattgatgcagcccttgattttaaaaatgtgtccattgttgcattttatatatatgaacaaacaaaaaatgcacagttcataataatttctcttcgaaataatatgtttgagatttcggatagacttattggaatttacaagacatacaacataacaaaaagtgttgctgtaaatccaaaagaaattgcatctaagggactttgttgaactttatgctgaagattcttcaagttgattcagtgtattactgatttttttctatttgtaaaggattatgagttgtataaaatacatactccctaaactagatcatgaaactggtttctgttttatgcagttgtcatttgtaaagtctaataaaatattctctataattgcttctagattacaaaaatatgacaatcttgtaagtagcagactatggagaaaaatgagttacctggagggtcaggtaacttgccaaagctcagcataccttcgtgggcctttgatttaccaacactggaaatgcctgccaactaatcttggatagattctttaaggcattccacttagcttgccagttgagacaatcaccacagttattacccaaatactatgaacatatttttgtaaaccagtcattctgaattactgtgccattaatattggcttcacataggtt

SEQ ID NO: 30131 - DNA, 5711 bp, Homo sapiens
ggtggtgtgcgtggtattccggggttgccggggattgtggcgggtgcccatgatgtggcggtgtcagggggctgaggccgggtgatcccttggaccccggatgtggagggttgcagtgggttggggtcacgaccgtgtggctcccgcctgggttgcccgggtgagactctggtctccgggaggtgcagttaagcttcttgttaagatcctactaaagtagacctaactgctttttaagtatttaagtatagtacttaagtagagtaagcaaaacgtcagtaagaattttcaaataagatttatagccaacggttcactttggagaattacttaccacacatgatcttaaatactttaaaaccatttaggtaaacagccactaaaggaatgaaaaaaaaaaatctattcttcaactaggatataaaatagagaaacttttaacaatactataattaagaaaatccaataagatttataagcattaaaaggatatgctttggttcttttaaaagagatatctttagtctcatgactccacttccagccaaaatttaagatgccacttgattgtatttacaggttgtctttccaaatatttttaataatagtgctgctgctgtagaccacagagaaaagaatccctcgctcttccttttcacttagtagaaacttctaccgcgtaggtcccgccaggagttcgcgcatgcgcaggagcgacaataagatggcggtgataatcgccgcactttttttcaaattagtggatcccagaaatcattgcgcgcatttgtaacgaatttccgttcgagtttgtattttaggcgccattttcgagtgaaggacccggagccgaaacaccggtaggagcggggaggtgggtactacacaaccgtctccagcaatgaccaatgaagctggagctcctcggcttatgataactcatattgtaaaccagaacttcaaatcctatgctggggagaaaattctgggacctttccataagcgcttttcctgtattatcgggccaaatggcagtggcaaatccaatgttattgattctatgctttttgtgtttggctatcgagcacaaaaaataagatctaaaaaactctcagtattaatacataattctgatgaacacaaggacattcagagttgtacagtagaagttcattttcaaaagataattgataaggaaggggatgattatgaagtcattcctaacagtaatttctatgtatccagaacggcctgcagagataatacttctgtctatcacataagtggaaagaaaaagacatttaaggatgttggaaatcttcttcgaagccatggaattgacttggaccataatagatttttaattttacagggtgaagttgaacaaattgctatgatgaaaccaaaaggccagactgaacacgatgagggtatgcttgaatatttagaagatataattggttgtggacggctaaatgaacctattaaagtcttgtgtcggagagttgaaatattaaatgaacacagaggagagaagttaaacagggtaaagatggtggaaaaggaaaaggatgccttagaaggagagaaaaacatagctatcgaatttcttaccttggaaaatgaaatatttagaaaaaagaatcatgtttgtcaatattatatttatgagttgcagaaacgaattgctgaaatggaaactcaaaaggaaaaaattcatgaagataccaaagaaattaatgagaagagcaatatactatcaaatgaaatgaaagctaagaataaagatgtaaaagatacagaaaagaaactgaataaaattacaaaatttattgaggagaataaagaaaaatttacacagctagatttggaagatgttcaagttagagaaaagttaaaacatgccacgagtaaagccaaaaaactggagaaacaacttcaaaaagataaagaaaaggttgaagaatttaaaagtatacctgccaagagtaacaatatcattaatgaaacaacaaccagaaacaatgccctcgagaaggaaaaagagaaagaagaaaaaaaattaaaggaagttatggatagccttaaacaggaaacacaagggcttcagaaagaaaaagaaagtcgagagaaagaacttatgggtttcagcaaatcggtaaatgaagcacgttcaaagatggatgtagcccagtcagaacttgatatctatctcagtcgtcataatactgcagtgtctcaattaactaaggctaaggaagctctaattgcagcttctgagactctcaaagaaaggaaagctgcaatcagagatatagaaggaaaactccctcaaactgaacaagaattaaaggagaaagaaaaagaacttcaaaaacttacacaagaagaaacaaactttaaaagtttggttcatgatctctttcaaaaagttgaagaagcaaagagctcattagcaatgaatcgaagtagggggaaagtccttgatgcaataattcaagaaaaaaaatctggcaggattccaggaatatatggaagattgggggacttaggagccattgatgaaaaatacgacgtggctatatcatcctgttgtcatgcactggactacattgttgttgattctattgatatagcccaagaatgtgtaaacttccttaaaagacaaaatattggagttgcaacctttataggtttagataagatggctgtatgggcgaaaaagatgaccgaaattcaaactcctgaaaatactcctcgtttatttgatttagtaaaagtaaaagatgagaaaattcgccaagctttttattttgctttacgagataccttagtagctgacaacttggatcaagccacaagagtagcatatcaaaaagatagaagatggagagtggtaactttacagggacaaatcatagaacagtcaggtacaatgactggtggtggaagcaaagtaatgaaaggaagaatgggttcctcacttgttattgaaatctctgaagaagaggtaaacaaaatggaatcacagttgcaaaacgactctaaaaaagcaatgcaaatccaagaacagaaagtacaacttgaagaaagagtagttaagttacggcatagtgaacgagaaatgaggaacacactagaaaaatttactgcaagcatccagcgtttaatagagcaagaagaatatttgaatgtccaagttaaggaacttgaagctaatgtacttgctacagcccctgacaaaaaaaagcagaaattgctagaagaaaacgttagtgctttcaaaacagaatatgatgctgtggctgagaaagctggtaaagtagaagctgaggttaaacgcttacacaataccatcgtagaaatcaataatcataaactcaaggcccaacaagacaaacttgataaaataaataagcaattagatgaatgtgcttctgctattactaaagcccaagtagcaatcaagactgctgacagaaaccttcaaaaggcacaagactctgtcttgcgtacagagaaagaaataaaagatactgagaaagaggtggatgacctaacagcagagctgaaaagtcttgaggacaaagcagcagaggtcgtaaagaatacaaatgctgcagaggaatccttaccagagatccagaaagaacatcgcaatctgcttcaagaattaaaagttattcaagaaaatgaacatgctcttcaaaaagatgcacttagtattaagttgaaacttgaacaaatagatggtcacattgctgaacataattctaaaataaaatattggcacaaagagatttcaaaaatatcactgcatcctatagaagataatcctattgaagagatttcggttctaagcccagaggatcttgaagcgatcaagaatccagattctataacaaatcaaattgcacttttggaagcccggtgtcatgaaatgaaaccaaacctcggtgccatcgcagagtataaaaagaaggaagaattgtatttgcaacgggtagcagaattggacaaaattacttatgaaagagacagttttagacaggcatatgaagatcttcggaaacaaaggcttaatgaatttatggcaggtttttatataataacaaataaattaaaggaaaattaccaaatgcttactttgggaggggacgccgaactcgagcttgtagacagcttggatcctttctctgaaggaatcatgttcagtgttcgaccacctaagaaaagttggaaaaagatcttcaacctttcgggaggagagaaaacacttagttcattggctttagtatttgctcttcaccactacaagcccactcccctttacttcatggatgagattgatgcagcccttgattttaaaaatgtgtccattgttgcattttatatatatgaacaaacaaaaaatgcacagttcataataatttctcttcgaaataatatgtttgagatttcggatagacttattggaatttacaagacatacaacataacaaaaagtgttgctgtaaatccaaaagaaattgcatctaagggactttgttgaactttatgctgaagattcttcaagttgattcagtgtattactgatttttttctatttgtaaaggattatgagttgtataaaatacatactccctaaactagatcatgaaactggtttctgttttatgcagttgtcatttgtaaagtctaataaaatattctctataattgcttctagattacaaaaatatgacaatcttgtaagtagcagactatggagaaaaatgagttacctggagggtcaggtaacttgccaaactaaaaagtatgttagttgaggcaaagtcctaagcaaggttgtgctatcaaggctcagcataccttcgtgggcctttgatttaccaacactggaaatgcctgccaactaatcttggatagattctttaaggcattccacttagcttgccagttgagacaatcaccacagttattacccaaatactatgaacatatttttgtaaaccagtcattctgaattatagtgatgagaatttaaatatatgcttttctagaatttgatgtttgaccatttatgacttaattaccagagagccagtaaattaggacagtgtttcaacaagcctaggctatctcgtaagttgaaaaatatcccactatagttgcttcatgagtatgaagtaagatggcctctgatttacactggttcaatttacaaattttcaactttatgataggtttatcagggtactaaatgcatttcaacttgatagtttcaacttatgataggtttaccaggatgtagtcccactgttgaggagcatctatttaggggttaattactttagtaataagtggaaagtaagataccttgagtaatgtttgcctataaaattgtcagcgtatttttacactattggctcaagaatgttataatgctaagggacataagttggcaaccacttggtttttggaaggactttcggtattgtattagaagtctgccctagctgttaaatttctgggtatttatcctaaggaattaattaaagagttaattgttcctttcttcagtgggccattgttttagatatttaaaaaatccaacagtttctatcataatgtaactgtaaaaatgtaaacacattattagcatggacttttaaataaagatttaaagaaagcaagatcggaaattcaag

SEQ ID NO: 30132 - DNA, 6353 bp, Homo sapiens
  misc_feature (2086)..(2086): n is a, c, g, or t
  misc_feature (2138)..(2138): n is a, c, g, or t
ggtggtgtgcgtggtattccggggttgccggggattgtggcgggtgcccatgatgtggcggtgtcagggggctgaggccgggtgatcccttggaccccggatgtggagggttgcagtgggttggggtcacgaccgtgtggctcccgcctgggttgcccgggtgagactctggtctccgggaggtgcagttaagcttcttgttaagatcctactaaagtagacctaactgctttttaagtatttaagtatagtacttaagtagagtaagcaaaacgtcagtaagaattttcaaataagatttatagccaacggttcactttggagaattacttaccacacatgatcttaaatactttaaaaccatttaggtaaacagccactaaaggaatgaaaaaaaaaaatctattcttcaactaggatataaaatagagaaacttttaacaatactataattaagaaaatccaataagatttataagcattaaaaggatatgctttggttcttttaaaagagatatctttagtctcatgactccacttccagccaaaatttaagatgccacttgattgtatttacaggttgtctttccaaatatttttaataatagtgctgctgctgtagaccacagagaaaagaatccctcgctcttccttttcacttagtagaaacttctaccgcgtaggtcccgccaggagttcgcgcatgcgcaggagcgacaataagatggcggtgataatcgccgcactttttttcaaattagtggatcccagaaatcattgcgcgcatttgtaacgaatttccgttcgagtttgtattttaggcgccattttcgagtgaaggacccggagccgaaacaccggtaggagcggggaggtgggtactacacaaccgtctccagccttggtctgagtggactgtcctgcagcgaccatgccccgtaaaggcacccagccctccactgcccggcgcagagaggaagggccgccgccgccgtcccctgacggcgccagcagcgacgcggagcctgagccgccgtccggccgcacggagagcccagccaccgccgcagagactgcaagtgaggaacttgataatagaagtttagaagagattttgaacagcattcctcctcccccgcctccagcaatgaccaatgaagctggagctcctcggcttatgataactcatattgtaaaccagaacttcaaatcctatgctggggagaaaattctgggacctttccataagcgcttttcctgtattatcgggccaaatggcagtggcaaatccaatgttattgattctatgctttttgtgtttggctatcgagcacaaaaaataagatctaaaaaactctcagtattaatacataattctgatgaacacaaggacattcagagttgtacagtagaagttcattttcaaaagataattgataaggaaggggatgattatgaagtcattcctaacagtaatttctatgtatccagaacggcctgcagagataatacttctgtctatcacataagtggaaagaaaaagacatttaaggatgttggaaatcttcttcgaagccatggaattgacttggaccataatagatttttaattttacagggtgaagttgaacaaattgctatgatgaaaccaaaaggccagactgaacacgatgagggtatgcttgaatatttagaagatataattggttgtggacggctaaatgaacctattaaagtcttgtgtcggagagttgaaatattaaatgaacacagaggagagaagttaaacagggtaaagatggtggaaaaggaaaaggatgccttagaaggagagaaaaacatagctatcgaatttcttaccttggaaaatgaaatatttagaaaaaagaatcatgtttgtcaatattatatgtaagtgccttgattgatattaccaatttttatattagtttttaaccattaagtcaaagcccttctcttttcctagagaaacatgaagactgaagtgaaaaaaaatctctaaatattgttttgtgtgactgaatgtgttagctcatgcctgtaattccagcactttgggaggctnaggcaggaggatcacttgaggctgggagttcaagaccagcctgggcaacatngcaagaccccatctctacaaaaaaaggaattatgtggtgaacttatccaatgtgaggactatctggctgtgacacctgtcatcccgttgatcaccagggttgaatttattaaattaggcatattaattcattgaagttgactttttagtatcctgctttaagttgggagttatgagttgcagaaacgaattgctgaaatggaaactcaaaaggaaaaaattcatgaagataccaaagaaattaatgagaagagcaatatactatcaaatgaaatgaaagctaagaataaagatgtaaaagatacagaaaagaaactgaataaaattacaaaatttattgaggagaataaagaaaaatttacacagctagatttggaagatgttcaagttagagaaaagttaaaacatgccacgagtaaagccaaaaaactggagaaacaacttcaaaaagataaagaaaaggttgaagaatttaaaagtatacctgccaagagtaacaatatcattaatgaaacaacaaccagaaacaatgccctcgagaaggaaaaagagaaagaagaaaaaaaattaaaggaagttatggatagccttaaacaggaaacacaagggcttcagaaagaaaaagaaagtcgagagaaagaacttatgggtttcagcaaatcggtaaatgaagcacgttcaaagatggatgtagcccagtcagaacttgatatctatctcagtcgtcataatactgcagtgtctcaattaactaaggctaaggaagctctaattgcagcttctgagactctcaaagaaaggaaagctgcaatcagagatatagaaggaaaactccctcaaactgaacaagaattaaaggagaaagaaaaagaacttcaaaaacttacacaagaagaaacaaactttaaaagtttggttcatgatctctttcaaaaagttgaagaagcaaagagctcattagcaatgaatcgaagtagggggaaagtccttgatgcaataattcaagaaaaaaaatctggcaggattccaggaatatatggaagattgggggacttaggagccattgatgaaaaatacgacgtggctatatcatcctgttgtcatgcactggactacattgttgttgattctattgatatagcccaagaatgtgtaaacttccttaaaagacaaaatattggagttgcaacctttataggtttagataagatggctgtatgggcgaaaaagatgaccgaaattcaaactcctgaaaatactcctcgtttatttgatttagtaaaagtaaaagatgagaaaattcgccaagctttttattttgctttacgagataccttagtagctgacaacttggatcaagccacaagagtagcatatcaaaaagatagaagatggagagtggtaactttacagggacaaatcatagaacagtcaggtacaatgactggtggtggaagcaaagtaatgaaaggaagaatgggttcctcacttgttattgaaatctctgaagaagaggtaaacaaaatggaatcacagttgcaaaacgactctaaaaaagcaatgcaaatccaagaacagaaagtacaacttgaagaaagagtagttaagttacggcatagtgaacgagaaatgaggaacacactagaaaaatttactgcaagcatccagcgtttaatagagcaagaagaatatttgaatgtccaagttaaggaacttgaagctaatgtacttgctacagcccctgacaaaaaaaagcagaaattgctagaagaaaacgttagtgctttcaaaacagaatatgatgctgtggctgagaaagctggtaaagtagaagctgaggttaaacgcttacacaataccatcgtagaaatcaataatcataaactcaaggcccaacaagacaaacttgataaaataaataagcaattagatgaatgtgcttctgctattactaaagcccaagtagcaatcaagactgctgacagaaaccttcaaaaggcacaagactctgtcttgcgtacagagaaagaaataaaagatactgagaaagaggtggatgacctaacagcagagctgaaaagtcttgaggacaaagcagcagaggtcgtaaagaatacaaatgctgcagaggaatccttaccagagatccagaaagaacatcgcaatctgcttcaagaattaaaagttattcaagaaaatgaacatgctcttcaaaaagatgcacttagtattaagttgaaacttgaacaaatagatggtcacattgctgaacataattctaaaataaaatattggcacaaagagatttcaaaaatatcactgcatcctatagaagataatcctattgaagagatttcggttctaagcccagaggatcttgaagcgatcaagaatccagattctataacaaatcaaattgcacttttggaagcccggtgtcatgaaatgaaaccaaacctcggtgccatcgcagagtataaaaagaaggaagaattgtatttgcaacgggtagcagaattggacaaaattacttatgaaagagacagttttagacaggcatatgaagatcttcggaaacaaaggcttaatgaatttatggcaggtttttatataataacaaataaattaaaggaaaattaccaaatgcttactttgggaggggacgccgaactcgagcttgtagacagcttggatcctttctctgaaggaatcatgttcagtgttcgaccacctaagaaaagttggaaaaagatcttcaacctttcgggaggagagaaaacacttagttcattggctttagtatttgctcttcaccactacaagcccactcccctttacttcatggatgagattgatgcagcccttgattttaaaaatgtgtccattgttgcattttatatatatgaacaaacaaaaaatgcacagttcataataatttctcttcgaaataatatgtttgagatttcggatagacttattggaatttacaagacatacaacataacaaaaagtgttgctgtaaatccaaaagaaattgcatctaagggactttgttgaactttatgctgaagattcttcaagttgattcagtgtattactgatttttttctatttgtaaaggattatgagttgtataaaatacatactccctaaactagatcatgaaactggtttctgttttatgcagttgtcatttgtaaagtctaataaaatattctctataattgcttctagattacaaaaatatgacaatcttgtaagtagcagactatggagaaaaatgagttacctggagggtcaggtaacttgccaaactaaaaagtatgttagttgaggcaaagtcctaagcaaggttgtgctatcaaggctcagcataccttcgtgggcctttgatttaccaacactggaaatgcctgccaactaatcttggatagattctttaaggcattccacttagcttgccagttgagacaatcaccacagttattacccaaatactatgaacatatttttgtaaaccagtcattctgaattatagtgatgagaatttaaatatatgcttttctagaatttgatgtttgaccatttatgacttaattaccagagagccagtaaattaggacagtgtttcaacaagcctaggctatctcgtaagttgaaaaatatcccactatagttgcttcatgagtatgaagtaagatggcctctgatttacactggttcaatttacaaattttcaactttatgataggtttatcagggtactaaatgcatttcaacttgatagtttcaacttatgataggtttaccaggatgtagtcccactgttgaggagcatctatttaggggttaattactttagtaataagtggaaagtaagataccttgagtaatgtttgcctataaaattgtcagcgtatttttacactattggctcaagaatgttataatgctaagggacataagttggcaaccacttggtttttggaaggactttcggtattgtattagaagtctgccctagctgttaaatttctgggtatttatcctaaggaattaattaaagagttaattgttcctttcttcagtgggccattgttttagatatttaaaaaatccaacagtttctatcataatgtaactgtaaaaatgtaaacacattattagcatggacttttaaataaagatttaaagaaagcaagatcggaaattcaag

SEQ ID NO: 30133 - DNA, 5793 bp, Homo sapiens
ggtggtgtgcgtggtattccggggttgccggggattgtggcgggtgcccatgatgtggcggtgtcagggggctgaggccgggtgatcccttggaccccggatgtggagggttgcagtgggttggggtcacgaccgtgtggctcccgcctgggttgcccgggtgagactctggtctccgggaggtgcagttaagcttcttgttaagatcctactaaagtagacctaactgctttttaagtatttaagtatagtacttaagtagagtaagcaaaacgtcagtaagaattttcaaataagatttatagccaacggttcactttggagaattacttaccacacatgatcttaaatactttaaaaccatttaggtaaacagccactaaaggaatgaaaaaaaaaaatctattcttcaactaggatataaaatagagaaacttttaacaatactataattaagaaaatccaataagatttataagcattaaaaggatatgctttggttcttttaaaagagatatctttagtctcatgactccacttccagccaaaatttaagatgccacttgattgtatttacaggttgtctttccaaatatttttaataatagtgctgctgctgtagaccacagagaaaagaatccctcgctcttccttttcacttagtagaaacttctaccgcgtaggtcccgccaggagttcgcgcatgcgcaggagcgacaataagatggcggtgataatcgccgcactttttttcaaattagtggatcccagaaatcattgcgcgcatttgtaacgaatttccgttcgagtttgtattttaggcgccattttcgagtgaaggacccggagccgaaacaccggtaggagcggggaggtgggtactacacaaccgtctccagccttggtctgagtggactgtcctgcagcgaccatgccccgtaaaggcacccagccctccactgcccggcgcagagaggaagggccgccgccgccgtcccctgacggcgccagcagcgacgcggagcctgagccgccgtccggccgcacggagagcccagccaccgccgcagagactgcaagtgaggaacttgataatagaagtttagaagagattttgaacagcattcctcctcccccgcctccagcaatgaccaatgaagctggagctcctcggcttatgataactcatattgtaaaccagaacttcaaatcctatgctggggagaaaattctgggacctttccataagcgcttttcctgtattatcgggccaaatggcagtggcaaatccaatgttattgattctatgctttttgtgtttggctatcgagcacaaaaaataagatctaaaaaactctcagtattaatacataattctgatgaacacaaggacattcagagttgtacagtagaagttcattttcaaaagataattgataaggaaggggatgattatgaagtcattcctaacagtaatttctatgtatccagaacggcctgcagagataatacttctgtctatcacataagtggaaagaaaaagacatttaaggatgttggaaatcttcttcgaagccatggaattgacttggaccataatagatttttaattttacagggtgaagttgaacaaattgctatgatgaaaccaaaaggccagactgaacacgatgagggtatgcttgaatatttagaagatataattggttgtggacggctaaatgaacctattaaagtcttgtgtcggagagttgaaatattaaatgaacacagaggagagaagttaaacagggtaaagatggtggaaaaggaaaaggatgccttagaaggagagaaaaacatagctatcgaatttcttaccttggaaaatgaaatatttagaaaaaagaatcatgtttgtcaatattatatttatgagttgcagaaacgaattgctgaaatggaaactcaaaaggaaaaaattcatgaagataccaaagaaattaatgagaagagcaatatactatcaaatgaaatgaaagctaagaataaagatgtaaaagatacagaaaagaaactgaataaaattacaaaatttattgaggagaataaagaaaaatttacacagctagatttggaagatgttcaagttagagaaaagttaaaacatgccacgagtaaagccaaaaaactggagaaacaacttcaaaaagataaagaaaaggttgaagaatttaaaagtatacctgccaagagtaacaatatcattaatgaaacaacaaccagaaacaatgccctcgagaaggaaaaagagaaagaagaaaaaaaattaaaggaagttatggatagccttaaacaggaaacacaagggcttcagaaagaaaaagaaagtcgagagaaagaacttatgggtttcagcaaatcggtaaatgaagcacgttcaaagatggatgtagcccagtcagaacttgatatctatctcagtcgtcataatactgcagtgtctcaattaactaaggctaaggaagctctaattgcagcttctgagactctcaaagaaaggaaagctgcaatcagagatatagaaggaaaactccctcaaactgaacaagaattaaaggagaaagaaaaagaacttcaaaaacttacacaagaagaaacaaactttaaaagtttggttcatgatctctttcaaaaagttgaagaagcaaagagctcattagcaatgaatcgaagtagggggaaagtccttgatgcaataattcaagaaaaaaaatctggcaggattccaggaatatatggaagattgggggacttaggagccattgatgaaaaatacgacgtggctatatcatcctgttgtcatgcactggactacattgttgttgattctattgatatagcccaagaatgtgtaaacttccttaaaagacaaaatattggagttgcaacctttataggtttagataagatggctgtatgggcgaaaaagatgaccgaaattcaaactcctgaaaatactcctcgtttatttgatttagtaaaagtaaaagatgagaaaattcgccaagctttttattttgctttacgagataccttagtagctgacaacttggatcaagccacaagagtagcatatcaaaaagatagaagatggagagtggtaactttacagggacaaatcatagaacagtcaggtacaatgactggtggtggaagcaaagtaatgaaaggaagaatgggttcctcacttgttattgaaatctctgaagaagaggtaaacaaaatggaatcacagttgcaaaacgactctaaaaaagcaatgcaaatccaagaacagaaagtacaacttgaagaaagagtagttaagttacggcatagtgaacgagaaatgaggaacacactagaaaaatttactgcaagcatccagcgtttaatagagcaagaagaatatttgaatgtccaagttaaggaacttgaagctaatgtacttgctacagcccctgacaaaaaaaagcagaaattgctagaagaaaacgttagtgctttcaaaacagaatatgatgctgtggctgagaaagctggtaaagtagaagctgaggttaaacgcttacacaataccatcgtagaaatcaataatcataaactcaaggcccaacaagacaaacttgataaaataaataagcaattagatgaatgtgcttctgctattactaaagcccaagtagcaatcaagactgctgacagaaaccttcaaaaggcacaagactctgtcttgcgtacagagaaagaaataaaagatactgagaaagaggtggatgacctaacagcagagctgaaaagtcttgaggacaaagcagcagaggtcgtaaagaatacaaatgctgcagaggaatccttaccagagatccagaaagaacatcgcaatctgcttcaagaattaaaagttattcaagaaaatgaacatgctcttcaaaaagatgcacttagtattaagttgaaacttaaatcaaattgcacttttggaagcccggtgtcatgaaatgaaaccaaacctcggtgccatcgcagagtataaaaagaaggaagaattgtatttgcaacgggtagcagaattggacaaaattacttatgaaagagacagttttagacaggcatatgaagatcttcggaaacaaaggcttaatgaatttatggcaggtttttatataataacaaataaattaaaggaaaattaccaaatgcttactttgggaggggacgccgaactcgagcttgtagacagcttggatcctttctctgaaggaatcatgttcagtgttcgaccacctaagaaaagttggaaaaagatcttcaacctttcgggaggagagaaaacacttagttcattggctttagtatttgctcttcaccactacaagcccactcccctttacttcatggatgagattgatgcagcccttgattttaaaaatgtgtccattgttgcattttatatatatgaacaaacaaaaaatgcacagttcataataatttctcttcgaaataatatgtttgagatttcggatagacttattggaatttacaagacatacaacataacaaaaagtgttgctgtaaatccaaaagaaattgcatctaagggactttgttgaactttatgctgaagattcttcaagttgattcagtgtattactgatttttttctatttgtaaaggattatgagttgtataaaatacatactccctaaactagatcatgaaactggtttctgttttatgcagttgtcatttgtaaagtctaataaaatattctctataattgcttctagattacaaaaatatgacaatcttgtaagtagcagactatggagaaaaatgagttacctggagggtcaggtaacttgccaaactaaaaagtatgttagttgaggcaaagtcctaagcaaggttgtgctatcaaggctcagcataccttcgtgggcctttgatttaccaacactggaaatgcctgccaactaatcttggatagattctttaaggcattccacttagcttgccagttgagacaatcaccacagttattacccaaatactatgaacatatttttgtaaaccagtcattctgaattatagtgatgagaatttaaatatatgcttttctagaatttgatgtttgaccatttatgacttaattaccagagagccagtaaattaggacagtgtttcaacaagcctaggctatctcgtaagttgaaaaatatcccactatagttgcttcatgagtatgaagtaagatggcctctgatttacactggttcaatttacaaattttcaactttatgataggtttatcagggtactaaatgcatttcaacttgatagtttcaacttatgataggtttaccaggatgtagtcccactgttgaggagcatctatttaggggttaattactttagtaataagtggaaagtaagataccttgagtaatgtttgcctataaaattgtcagcgtatttttacactattggctcaagaatgttataatgctaagggacataagttggcaaccacttggtttttggaaggactttcggtattgtattagaagtctgccctagctgttaaatttctgggtatttatcctaaggaattaattaaagagttaattgttcctttcttcagtgggccattgttttagatatttaaaaaatccaacagtttctatcataatgtaactgtaaaaatgtaaacacattattagcatggacttttaaataaagatttaaagaaagcaagatcggaaattcaag

SEQ ID NO: 30134 - DNA, 4964 bp, Homo sapiens
ggtggtgtgcgtggtattccggggttgccggggattgtggcgggtgcccatgatgtggcggtgtcagggggctgaggccgggtgatcccttggaccccggatgtggagggttgcagtgggttggggtcacgaccgtgtggctcccgcctgggttgcccgggtgagactctggtctccgggaggtgcagttaagcttcttgttaagatcctactaaagtagacctaactgctttttaagtatttaagtatagtacttaagtagagtaagcaaaacgtcagtaagaattttcaaataagatttatagccaacggttcactttggagaattacttaccacacatgatcttaaatactttaaaaccatttaggtaaacagccactaaaggaatgaaaaaaaaaaatctattcttcaactaggatataaaatagagaaacttttaacaatactataattaagaaaatccaataagatttataagcattaaaaggatatgctttggttcttttaaaagagatatctttagtctcatgactccacttccagccaaaatttaagatgccacttgattgtatttacaggttgtctttccaaatatttttaataatagtgctgctgctgtagaccacagagaaaagaatccctcgctcttccttttcacttagtagaaacttctaccgcgtaggtcccgccaggagttcgcgcatgcgcaggagcgacaataagatggcggtgataatcgccgcactttttttcaaattagtggatcccagaaatcattgcgcgcatttgtaacgaatttccgttcgagtttgtattttaggcgccattttcgagtgaaggacccggagccgaaacaccggtaggagcggggaggtgggtactacacaaccgtctccagccttggtctgagtggactgtcctgcagcgaccatgccccgtaaaggcacccagccctccactgcccggcgcagagaggaagggccgccgccgccgtcccctgacggcgccagcagcgacgcggagcctgagccgccgtccggccgcacggagagcccagccaccgccgcagagactgcaagtgaggaacttgataatagaagtttagaagagattttgaacagcattcctcctcccccgcctccagcaatgaccaatgaagctggagctcctcggcttatgataactcatattgtaaaccagaacttcaaatcctatgctggggagaaaattctgggacctttccataagcgcttttcctgtattatcgggccaaatggcagtggcaaatccaatgttattgattctatgctttttgtgtttggctatcgagcacaaaaaataagatctaaaaaactctcagtattaatacataattctgatgaacacaaggacattcagagttgtacagtagaagttcattttcaaaagataattgataaggaaggggatgattatgaagtcattcctaacagtaatttctatgtatccagaacggcctgcagagataatacttctgtctatcacataagtggaaagaaaaagacatttaaggatgttggaaatcttcttcgaagccatggaattgacttggaccataatagatttttaattttacagggtgaagttgaacaaattgctatgatgaaaccaaaaggccagactgaacacgatgagggtatgcttgaatatttagaagatataattggttgtggacggctaaatgaacctattaaagtcttgtgtcggagagttgaaatattaaatgaacacagaggagagaagttaaacagggtaaagatggtggaaaaggaaaaggatgccttagaaggagagaaaaacatagctatcgaatttcttaccttggaaaatgaaatatttagaaaaaagaatcatgtttgtcaatattatatttatgagttgcagaaacgaattgctgaaatggaaactcaaaaggaaaaaattcatgaagataccaaagaaattaatgagaagagcaatatactatcaaatgaaatgaaagctaagaataaagatgtaaaagatacagaaaagaaactgaataaaattacaaaatttattgaggagaataaagaaaaatttacacagctagatttggaagatgttcaagttagagaaaagttaaaacatgccacgagtaaagccaaaaaactggagaaacaacttcaaaaagataaagaaaaggttgaagaatttaaaagtatacctgccaagagtaacaatatcattaatgaaacaacaaccagaaacaatgccctcgagaaggaaaaagagaaagaagaaaaaaaattaaaggaagttatggatagccttaaacaggaaacacaagggcttcagaaagaaaaagaaagtcgagagaaagaacttatgggtttcagcaaatcggtaaatgaagcacgttcaaagatggatgtagcccagtcagaacttgatatctatctcagtcgtcataatactgcagtgtctcaattaactaaggctaaggaagctctaattgcagcttctgagactctcaaagaaaggaaagctgcaatcagagatatagaaggaaaactccctcaaactgaacaagaattaaaggagaaagaaaaagaacttcaaaaacttacacaagaagaaacaaactttaaaagtttggttcatgatctctttcaaaaagttgaagaagcaaagagctcattagcaatgaatcgaagtagggggaaagtccttgatgcaataattcaagaaaaaaaatctggcaggattccaggaatatatggaagattgggggacttaggagccattgatgaaaaatacgacgtggctatatcatcctgttgtcatgcactggactacattgttgttgattctattgatatagcccaagaatgtgtaaacttccttaaaagacaaaatattggagttgcaacctttataggtttagataagatggctgtatgggcgaaaaagatgaccgaaattcaaactcctgaaaatactcctcgtttatttgatttagtaaaagtaaaagatgagaaaattcgccaagctttttattttgctttacgagataccttagtagctgacaacttggatcaagccacaagagtagcatatcaaaaagatagaagatggagagtggtaactttacagggacaaatcatagaacagtcaggtacaatgactggtggtggaagcaaagtaatgaaaggaagaatgggttcctcacttgttattgaaatctctgaagaagaggtaaacaaaatggaatcacagttgcaaaacgactctaaaaaagcaatgcaaatccaagaacagaaagtacaacttgaagaaagagtagttaagttacggcatagtgaacgagaaatgaggaacacactagaaaaatttactgcaagcatccagcgtttaatagagcaagaagaatatttgaatgtccaagttaaggaacttgaagctaatgtacttgctacagcccctgacaaaaaaaagcagaaattgctagaagaaaacgttagtgctttcaaaacagaatatgatgctgtggctgagaaagctggtaaagtagaagctgaggttaaacgcttacacaataccatcgtagaaatcaataatcataaactcaaggcccaacaagacaaacttgataaaataaataagcaattagatgaatgtgcttctgctattactaaagcccaagtagcaatcaagactgctgacagaaaccttcaaaaggcacaagactctgtcttgcgtacagagaaagaaataaaagatactgagaaagaggtggatgacctaacagcagagctgaaaagtcttgaggacaaagcagcagaggtcgtaaagaatacaaatgctgcagaggaatccttaccagagatccagaaagaacatcgcaatctgcttcaagaattaaaagttattcaagaaaatgaacatgctcttcaaaaagatgcacttagtattaagttgaaacttgaacaaatagatggtcacattgctgaacataattctaaaataaaatattggcacaaagagatttcaaaaatatcactgcatcctatagaagataatcctattgaagagatttcggttctaagcccagaggatcttgaagcgatcaagaatccagattctataacaaatcaaattgcacttttggaagcccggtgtcatgaaatgaaaccaaacctcggtgccatcgcagagtataaaaagaaggaagaattgtatttgcaacgggtagcagaattggacaaaattacttatgaaagagacagttttagacaggcatatgaagatcttcggaaacaaaggcttaatgaatttatggcaggtttttatataataacaaataaattaaaggaaaattaccaaatgcttactttgggaggggacgccgaactcgagcttgtagacagcttggatcctttctctgaaggaatcatgttcagtgttcgaccacctaagaaaagttggaaaaagatcttcaacctttcgggaggagagaaaacacttagttcattggctttagtatttgctcttcaccactacaagcccactcccctttacttcatggatgagattgatgcagcccttgattttaaaaatgtgtccattgttgcattttatatatatgaacaaacaaaaaatgcacagttcataataatttctcttcgaaataatatgtttgagatttcggatagacttattggaatttacaagacatacaacataacaaaaagtgttgctgtaaatccaaaagaaattgcatctaagggactttgttgaactttatgctgaagattcttcaagttgattcagtgtattactgatttttttctatttgtaaaggattatgagttgtataaaatacatactccctaaactagatcatgaaactggtttctgttttatgcagttgtcatttgtaaagtctaataaaatattctctata

SEQ ID NO: 30135 - DNA, 5477 bp, Homo sapiens
ggtggtgtgcgtggtattccggggttgccggggattgtggcgggtgcccatgatgtggcggtgtcagggggctgaggccgggtgatcccttggaccccggatgtggagggttgcagtgggttggggtcacgaccgtgtggctcccgcctgggttgcccgggtgagactctggtctccgggaggtgcagttaagcttcttgttaagatcctactaaagtagacctaactgctttttaagtatttaagtatagtacttaagtagagtaagcaaaacgtcagtaagaattttcaaataagatttatagccaacggttcactttggagaattacttaccacacatgatcttaaatactttaaaaccatttaggtaaacagccactaaaggaatgaaaaaaaaaaatctattcttcaactaggatataaaatagagaaacttttaacaatactataattaagaaaatccaataagatttataagcattaaaaggatatgctttggttcttttaaaagagatatctttagtctcatgactccacttccagccaaaatttaagatgccacttgattgtatttacaggttgtctttccaaatatttttaataatagtgctgctgctgtagaccacagagaaaagaatccctcgctcttccttttcacttagtagaaacttctaccgcgtaggtcccgccaggagttcgcgcatgcgcaggagcgacaataagatggcggtgataatcgccgcactttttttcaaattagtggatcccagaaatcattgcgcgcatttgtaacgaatttccgttcgagtttgtattttaggcgccattttcgagtgaaggacccggagccgaaacaccggtaggagcggggaggtgggtactacacaaccgtctccagccttggtctgagtggactgtcctgcagcgaccatgccccgtaaaggcacccagccctccactgcccggcgcagagaggaagggccgccgccgccgtcccctgacggcgccagcagcgacgcggagcctgagccgccgtccggccgcacggagagcccagccaccgccgcagagactgcaagtgaggaacttgataatagaagtttagaagagattttgaacagcattcctcctcccccgcctccagcaatgaccaatgaagctggagctcctcggcttatgataactcatattgtaaaccagaacttcaaatcctatgctggggagaaaattctgggacctttccataagcgcttttcctgtattatcgggccaaatggcagtggcaaatccaatgttattgattctatgctttttgtgtttggctatcgagcacaaaaaataagatctaaaaaactctcagtattaatacataattctgatgaacacaaggacattcagagttgtacagtagaagttcattttcaaaagataattgataaggaaggggatgattatgaagtcattcctaacagtaatttctatgtatccagaacggcctgcagagataatacttctgtctatcacataagtggaaagaaaaagacatttaaggatgttggaaatcttcttcgaagccatggaattgacttggaccataatagatttttaattttacagggtgaagttgaacaaattgctatgatgaaaccaaaaggccagactgaacacgatgagggtatgcttgaatatttagaagatataattggttgtggacggctaaatgaacctattaaagtcttgtgtcggagagttgaaatattaaatgaacacagaggagagaagttaaacagggtaaagatggtggaaaaggaaaaggatgccttagaaggagagaaaaacatagctatcgaatttcttaccttggaaaatgaaatatttagaaaaaagaatcatgtttgtcaatattatatttatgagttgcagaaacgaattgctgaaatggaaactcaaaaggaaaaaattcatgaagataccaaagaaattaatgagaagagcaatatactatcaaatgaaatgaaagctaagaataaagatgtaaaagatacagaaaagaaactgaataaaattacaaaatttattgaggagaataaagaaaaatttacacagctagatttggaagatgttcaagttagagaaaagttaaaacatgccacgagtaaagccaaaaaactggagaaacaacttcaaaaagataaagaaaaggttgaagaatttaaaagtatacctgccaagagtaacaatatcattaatgaaacaacaaccagaaacaatgccctcgagaaggaaaaagagaaagaagaaaaaaaattaaaggaagttatggatagccttaaacaggaaacacaagggcttcagaaagaaaaagaaagtcgagagaaagaacttatgggtttcagcaaatcggtaaatgaagcacgttcaaagatggatgtagcccagtcagaacttgatatctatctcagtcgtcataatactgcagtgtctcaattaactaaggctaaggaagctctaattgcagcttctgagactctcaaagaaaggaaagctgcaatcagagatatagaaggaaaactccctcaaactgaacaagaattaaaggagaaagaaaaagaacttcaaaaacttacacaagaagaaacaaactttaaaagtttggttcatgatctctttcaaaaagttgaagaagcaaagagctcattagcaatgaatcgaagtagggggaaagtccttgatgcaataattcaagaaaaaaaatctggcaggattccaggaatatatggaagattgggggacttaggagccattgatgaaaaatacgacgtggctatatcatcctgttgtcatgcactggactacattgttgttgattctattgatatagcccaagaatgtgtaaacttccttaaaagacaaaatattggagttgcaacctttataggtttagataagatggctgtatgggcgaaaaagatgaccgaaattcaaactcctgaaaatactcctcgtttatttgatttagtaaaagtaaaagatgagaaaattcgccaagctttttattttgctttacgagataccttagtagctgacaacttggatcaagccacaagagtagcatatcaaaaagatagaagatggagagtggtaactttacagggacaaatcatagaacagtcaggtacaatgactggtggtggaagcaaagtaatgaaaggaagaatgggttcctcacttgttattgaaatctctgaagaagaggtaaacaaaatggaatcacagttgcaaaacgactctaaaaaagcaatgcaaatccaagaacagaaagtacaacttgaagaaagagtagttaagttacggcatagtgaacgagaaatgaggaacacactagaaaaatttactgcaagcatccagcgtttaatagagcaagaagaatatttgaatgtccaagttaaggaacttgaagctaatgtacttgctacagcccctgacaaaaaaaagcagaaattgctagaagaaaacgttagtgctttcaaaacagaatatgatgctgtggctgagaaagctggtaaagtagaagctgaggttaaacgcttacacaataccatcgtagaaatcaataatcataaactcaaggcccaacaagacaaacttgataaaataaataagcaattagatgaatgtgcttctgctattactaaagcccaagtagcaatcaagactgctgacagaaaccttcaaaaggcacaagactctgtcttgcgtacagagaaagaaataaaagatactgagaaagaggtggatgacctaacagcagagctgaaaagtcttgaggacaaagcagcagaggtcgtaaagaatacaaatgctgcagaggaatccttaccagagatccagaaagaacatcgcaatctgcttcaagaattaaaagttattcaagaaaatgaacatgctcttcaaaaagatgcacttagtattaagttgaaacttgaacaaatagatggtcacattgctgaacataattctaaaataaaatattggcacaaagagatttcaaaaatatcactgcatcctatagaagataatcctattgaagagatttcggttctaagcccagaggatcttgaagcgatcaagaatccagattctataacaaatcaaattgcacttttggaagcccggtgtcatgaaatgaaaccaaacctcggtgccatcgcagagtataaaaagaaggaagaattgtatttgcaacgggtagcagaattggacaaaattacttatgaaagagacagttttagacaggcatatgaagatcttcggaaacaaaggcttaatgaatttatggcaggtttttatataataacaaataaattaaaggaaaattaccaaatgcttactttgggaggggacgccgaactcgagcttgtagacagcttggatcctttctctgaaggaatcatgttcagtgttcgaccacctaagaaaagttggaaaaagatcttcaacctttcgggaggagagaaaacacttagttcattggctttagtatttgctcttcaccactacaagcccactcccctttacttcatggatgagattgatgcagcccttgattttaaaaatgtgtccattgttgcattttatatatatgaacaaacaaaaaatgcacagttcataataatttctcttcgaaataatatgtttgagatttcggatagacttattggaatttacaagacatacaacataacaaaaagtgttgctgtaaatccaaaagaaattgcatctaagggactttgttgaactttatgctgaagattcttcaagttgattcagtgtattactgatttttttctatttgtaaaggattatgagttgtataaaatacatactccctaaactagataaaaaaaaaaaaaaaaaaaaaaaaaaaaaaaaaaaaaaaaaaaacaaaaaaaaaaaacaaaaaaacaaagagagcaagacaaaagacaaaccacaaaacgagcacaaacaccaccaaccaaagagtaaacaagcacacacacggacgccaaacacacgggcgacaacacacccaaaaaaaaaaaagaagaaaaaaacaaatacagcgagagggagacacaaatcgagaacaccaccgcgacaacaaccgcaacccacgcagcacgtaagacaagaaacaacacccgactaataagagtaaacgaatcccgggactacaacgagcatccagagcacaaatcgatcactcggaaccaaacataggacagccaaatagacgaatgaggcaaccgagacggcgacacgagcactaccagatggaaaaacaacaaacagagccaacagaccaagaaagaaacagaagaaagacaagaaaatcaaacagacgagaacgcactgcagaagacagaagagaagaagcgagcccagccagcagaaaggagaaagaaccaacggacaacagcaaccgcaacataca

SEQ ID NO: 30136 - DNA, 5100 bp, Homo sapiens
ggtggtgtgcgtggtattccggggttgccggggattgtggcgggtgcccatgatgtggcggtgtcagggggctgaggccgggtgatcccttggaccccggatgtggagggttgcagtgggttggggtcacgaccgtgtggctcccgcctgggttgcccgggtgagactctggtctccgggaggtgcagttaagcttcttgttaagatcctactaaagtagacctaactgctttttaagtatttaagtatagtacttaagtagagtaagcaaaacgtcagtaagaattttcaaataagatttatagccaacggttcactttggagaattacttaccacacatgatcttaaatactttaaaaccatttaggtaaacagccactaaaggaatgaaaaaaaaaaatctattcttcaactaggatataaaatagagaaacttttaacaatactataattaagaaaatccaataagatttataagcattaaaaggatatgctttggttcttttaaaagagatatctttagtctcatgactccacttccagccaaaatttaagatgccacttgattgtatttacaggttgtctttccaaatatttttaataatagtgctgctgctgtagaccacagagaaaagaatccctcgctcttccttttcacttagtagaaacttctaccgcgtaggtcccgccaggagttcgcgcatgcgcaggagcgacaataagatggcggtgataatcgccgcactttttttcaaattagtggatcccagaaatcattgcgcgcatttgtaacgaatttccgttcgagtttgtattttaggcgccattttcgagtgaaggacccggagccgaaacaccggtaggagcggggaggtgggtactacacaaccgtctccagccttggtctgagtggactgtcctgcagcgaccatgccccgtaaaggcacccagccctccactgcccggcgcagagaggaagggccgccgccgccgtcccctgacggcgccagcagcgacgcggagcctgagccgccgtccggccgcacggagagcccagccaccgccgcagagactgcaagtgaggaacttgataatagaagtttagaagagattttgaacagcattcctcctcccccgcctccagcaatgaccaatgaagctggagctcctcggcttatgataactcatattgtaaaccagaacttcaaatcctatgctggggagaaaattctgggacctttccataagcgcttttcctgtattatcgggccaaatggcagtggcaaatccaatgttattgattctatgctttttgtgtttggctatcgagcacaaaaaataagatctaaaaaactctcagtattaatacataattctgatgaacacaaggacattcagagttgtacagtagaagttcattttcaaaagataattgataaggaaggggatgattatgaagtcattcctaacagtaatttctatgtatccagaacggcctgcagagataatacttctgtctatcacataagtggaaagaaaaagacatttaaggatgttggaaatcttcttcgaagccatggaattgacttggaccataatagatttttaattttacagggtgaagttgaacaaattgctatgatgaaaccaaaaggccagactgaacacgatgagggtatgcttgaatatttagaagatataattggttgtggacggctaaatgaacctattaaagtcttgtgtcggagagttgaaatattaaatgaacacagaggagagaagttaaacagggtaaagatggtggaaaaggaaaaggatgccttagaaggagagaaaaacatagctatcgaatttcttaccttggaaaatgaaatatttagaaaaaagaatcatgtttgtcaatattatatttatgagttgcagaaacgaattgctgaaatggaaactcaaaaggaaaaaattcatgaagataccaaagaaattaatgagaagagcaatatactatcaaatgaaatgaaagctaagaataaagatgtaaaagatacagaaaagaaactgaataaaattacaaaatttattgaggagaataaagaaaaatttacacagctagatttggaagatgttcaagttagagaaaagttaaaacatgccacgagtaaagccaaaaaactggagaaacaacttcaaaaagataaagaaaaggttgaagaatttaaaagtatacctgccaagagtaacaatatcattaatgaaacaacaaccagaaacaatgccctcgagaaggaaaaagagaaagaagaaaaaaaattaaaggaagttatggatagccttaaacaggaaacacaagggcttcagaaagaaaaagaaagtcgagagaaagaacttatgggtttcagcaaatcggtaaatgaagcacgttcaaagatggatgtagcccagtcagaacttgatatctatctcagtcgtcataatactgcagtgtctcaattaactaaggctaaggaagctctaattgcagcttctgagactctcaaagaaaggaaagctgcaatcagagatatagaaggaaaactccctcaaactgaacaagaattaaaggagaaagaaaaagaacttcaaaaacttacacaagaagaaacaaactttaaaagtttggttcatgatctctttcaaaaagttgaagaagcaaagagctcattagcaatgaatcgaagtagggggaaagtccttgatgcaataattcaagaaaaaaaatctggcaggattccaggaatatatggaagattgggggacttaggagccattgatgaaaaatacgacgtggctatatcatcctgttgtcatgcactggactacattgttgttgattctattgatatagcccaagaatgtgtaaacttccttaaaagacaaaatattggagttgcaacctttataggtttagataagatggctgtatgggcgaaaaagatgaccgaaattcaaactcctgaaaatactcctcgtttatttgatttagtaaaagtaaaagatgagaaaattcgccaagctttttattttgctttacgagataccttagtagctgacaacttggatcaagccacaagagtagcatatcaaaaagatagaagatggagagtggtaactttacagggacaaatcatagaacagtcaggtacaatgactggtggtggaagcaaagtaatgaaaggaagaatgggttcctcacttgttattgaaatctctgaagaagaggtaaacaaaatggaatcacagttgcaaaacgactctaaaaaagcaatgcaaatccaagaacagaaagtacaacttgaagaaagagtagttaagttacggcatagtgaacgagaaatgaggaacacactagaaaaatttactgcaagcatccagcgtttaatagagcaagaagaatatttgaatgtccaagttaaggaacttgaagctaatgtacttgctacagcccctgacaaaaaaaagcagaaattgctagaagaaaacgttagtgctttcaaaacagaatatgatgctgtggctgagaaagctggtaaagtagaagctgaggttaaacgcttacacaataccatcgtagaaatcaataatcataaactcaaggcccaacaagacaaacttgataaaataaataagcaattagatgaatgtgcttctgctattactaaagcccaagtagcaatcaagactgctgacagaaaccttcaaaaggcacaagactctgtcttgcgtacagagaaagaaataaaagatactgagaaagaggtggatgacctaacagcagagctgaaaagtcttgaggacaaagcagcagaggtcgtaaagaatacaaatgctgcagaggaatccttaccagagatccagaaagaacatcgcaatctgcttcaagaattaaaagttattcaagaaaatgaacatgctcttcaaaaagatgcacttagtattaagttgaaacttgaacaaatagatggtcacattgctgaacataattctaaaataaaatattggcacaaagagatttcaaaaatatcactgcatcctatagaagataatcctattgaagagatttcggttctaagcccagaggatcttgaagcgatcaagaatccagattctataacaaatcaaattgcacttttggaagcccggtgtcatgaaatgaaaccaaacctcggtgccatcgcagagtataaaaagaaggaagaattgtatttgcaacgggtagcagaattggacaaaattacttatgaaagagacagttttagacaggcatatgaagatcttcggaaacaaaggcttaatgaatttatggcaggtttttatataataacaaataaattaaaggaaaattaccaaatgcttactttgggaggggacgccgaactcgagcttgtagacagcttggatcctttctctgaaggaatcatgttcagtgttcgaccacctaagaaaagttggaaaaagatcttcaacctttcgggaggagagaaaacacttagttcattggctttagtatttgctcttcaccactacaagcccactcccctttacttcatggatgagattgatgcagcccttgattttaaaaatgtgtccattgttgcattttatatatatgaacaaacaaaaaatgcacagttcataataatttctcttcgaaataatatgtttgagatttcggatagacttattggaatttacaagacatacaacataacaaaaagtgttgctgtaaatccaaaagaaattgcatctaagggactttgttgaactttatgctgaagattcttcaagttgattcagtgtattactgatttttttctatttgtaaaggattatgagttgtataaaatacatactccctaaactagattagaaaaaaaaaaaaaggggggggccaaaaaacctcgagggccagttagcgtacccgttgtttgtaaaaggggcctaagaggagggtttaaagaaaggaggcgggtaaacgtgcgggaagtctgggttcggagagccactgtggggtatggggccaaagaagccgaaaatagtgggaagcatggggagtagtaaaaaac

SEQ ID NO: 30137 - DNA, 6993 bp, Homo sapiens
ggtggtgtgcgtggtattccggggttgccggggattgtggcgggtgcccatgatgtggcggtgtcagggggctgaggccgggtgatcccttggaccccggatgtggagggttgcagtgggttggggtcacgaccgtgtggctcccgcctgggttgcccgggtgagactctggtctccgggaggtgcagttaagcttcttgttaagatcctactaaagtagacctaactgctttttaagtatttaagtatagtacttaagtagagtaagcaaaacgtcagtaagaattttcaaataagatttatagccaacggttcactttggagaattacttaccacacatgatcttaaatactttaaaaccatttaggtaaacagccactaaaggaatgaaaaaaaaaaatctattcttcaactaggatataaaatagagaaacttttaacaatactataattaagaaaatccaataagatttataagcattaaaaggatatgctttggttcttttaaaagagatatctttagtctcatgactccacttccagccaaaatttaagatgccacttgattgtatttacaggttgtctttccaaatatttttaataatagtgctgctgctgtagaccacagagaaaagaatccctcgctcttccttttcacttagtagaaacttctaccgcgtaggtcccgccaggagttcgcgcatgcgcaggagcgacaataagatggcggtgataatcgccgcactttttttcaaattagtggatcccagaaatcattgcgcgcatttgtaacgaatttccgttcgagtttgtattttaggcgccattttcgagtgaaggacccggagccgaaacaccggtaggagcggggaggtgggtactacacaaccgtctccagccttggtctgagtggactgtcctgcaggtaaagtacttctcttcctggtcaggttgtcacgctcttacttcctgccttgtccgcgagcgcctggaaaatagaggccttgagcccgagcggcgaagtccgggcttgaagctgccgctgggagatttctcttgctgtcacccctcccccctcggccgctccccggcggcccgggctcccgcgcgcagctcccgggcgccacttttccaagctactcaaatgtctcggggaggccctgagcctcgcagatcttttctttaaaaaatcctagtctctatctggaaaagggcgtctccccctacccctcttccttctgccaacggactagtcaccgggtctcagccttcgctggtgacctttcatggtttactgtccaacgggactccgcctggggagctggagagacaaactcttgccactccaaaattagcaagcgctgccagcgtccgacttgaagttgctagtggttagtcccagccttcgcccttcgcggtccgaccgctgagaggagggagacttcgttatgccccgggccgtcaacggcgccaggagctaaagggcgggcagacgaaagcgggcggcgagtcgccagttagtcttcaccgctctggagagagttgctagccacgggatcctgacccggacacgaactcgtttctccacgtcggtgcgcgcttgcatccctggccccgaaagcgtgggaatgtccggaaatgctggcgtatgggagttccttaattagaaatgcgttagcgaatattatacgcttatactatgggcggacgggtggagagccttaaaaacaacaacaacaaactaagcagttgctcaatcgttgattgatcctcaggcacgtctagattttcccacttacataggtcttgttaagaaaccagtcctgccttcttgccactcgtgtctttcgatggctcccttcccgaagtcccgctgcctctaagcggagtgttaagcggggctctcggaagccggtggaccgagatttcccctgggtggggcgggcgcggtgtagcggcccgcgggctgacttgctcccggctgtcccccggccccagcgaccatgccccgtaaaggcacccagccctccactgcccggcgcagagaggaagggccgccgccgccgtcccctgacggcgccagcagcgacgcggagcctgagccgccgtccggccgcacggagagcccagccaccgccgcagagactgcaagtgaggaacttgataatagaagtttagaagagattttgaacagcattcctcctcccccgcctccagcaatgaccaatgaagctggagctcctcggcttatgataactcatattgtaaaccagaacttcaaatcctatgctggggagaaaattctgggacctttccataagcgcttttcctgtattatcgggccaaatggcagtggcaaatccaatgttattgattctatgctttttgtgtttggctatcgagcacaaaaaataagatctaaaaaactctcagtattaatacataattctgatgaacacaaggacattcagagttgtacagtagaagttcattttcaaaagataattgataagtctatgtatccagaacggcctgcagagataatacttctgtctatcacataagtggaaagaaaaagacatttaaggatgttggaaatcttcttcgaagccatggaattgacttggaccataatagatttttaattttacagggtgaagttgaacaaattgctatgatgaaaccaaaaggccagactgaacacgatgagggtatgcttgaatatttagaagatataattggttgtggacggctaaatgaacctattaaagtcttgtgtcggagagttgaaatattaaatgaacacagaggagagaagttaaacagggtaaagatggtggaaaaggaaaaggatgccttagaaggagagaaaaacatagctatcgaatttcttaccttggaaaatgaaatatttagaaaaaagaatcatgtttgtcaatattatatttatgagttgcagaaacgaattgctgaaatggaaactcaaaaggaaaaaattcatgaagataccaaagaaattaatgagaagagcaatatactatcaaatgaaatgaaagctaagaataaagatgtaaaagatacagaaaagaaactgaataaaattacaaaatttattgaggagaataaagaaaaatttacacagctagatttggaagatgttcaagttagagaaaagttaaaacatgccacgagtaaagccaaaaaactggagaaacaacttcaaaaagataaagaaaaggttgaagaatttaaaagtatacctgccaagagtaacaatatcattaatgaaacaacaaccagaaacaatgccctcgagaaggaaaaagagaaagaagaaaaaaaattaaaggaagttatggatagccttaaacaggaaacacaagggcttcagaaagaaaaagaaagtcgagagaaagaacttatgggtttcagcaaatcggtaaatgaagcacgttcaaagatggatgtagcccagtcagaacttgatatctatctcagtcgtcataatactgcagtgtctcaattaactaaggctaaggaagctctaattgcagcttctgagactctcaaagaaaggaaagctgcaatcagagatatagaaggaaaactccctcaaactgaacaagaattaaaggagaaagaaaaagaacttcaaaaacttacacaagaagaaacaaactttaaaagtttggttcatgatctctttcaaaaagttgaagaagcaaagagctcattagcaatgaatcgaagtagggggaaagtccttgatgcaataattcaagaaaaaaaatctggcaggattccaggaatatatggaagattgggggacttaggagccattgatgaaaaatacgacgtggctatatcatcctgttgtcatgcactggactacattgttgttgattctattgatatagcccaagaatgtgtaaacttccttaaaagacaaaatattggagttgcaacctttataggtttagataagatggctgtatgggcgaaaaagatgaccgaaattcaaactcctgaaaatactcctcgtttatttgatttagtaaaagtaaaagatgagaaaattcgccaagctttttattttgctttacgagataccttagtagctgacaacttggatcaagccacaagagtagcatatcaaaaagatagaagatggagagtggtaactttacagggacaaatcatagaacagtcaggtacaatgactggtggtggaagcaaagtaatgaaaggaagaatgggttcctcacttgttattgaaatctctgaagaagaggtaaacaaaatggaatcacagttgcaaaacgactctaaaaaagcaatgcaaatccaagaacagaaagtacaacttgaagaaagagtagttaagttacggcatagtgaacgagaaatgaggaacacactagaaaaatttactgcaagcatccagcgtttaatagagcaagaagaatatttgaatgtccaagttaaggaacttgaagctaatgtacttgctacagcccctgacaaaaaaaagcagaaattgctagaagaaaacgttagtgctttcaaaacagaatatgatgctgtggctgagaaagctggtaaagtagaagctgaggttaaacgcttacacaataccatcgtagaaatcaataatcataaactcaaggcccaacaagacaaacttgataaaataaataagcaattagatgaatgtgcttctgctattactaaagcccaagtagcaatcaagactgctgacagaaaccttcaaaaggcacaagactctgtcttgcgtacagagaaagaaataaaagatactgagaaagaggtggatgacctaacagcagagctgaaaagtcttgaggacaaagcagcagaggtcgtaaagaatacaaatgctgcagaggaatccttaccagagatccagaaagaacatcgcaatctgcttcaagaattaaaagttattcaagaaaatgaacatgctcttcaaaaagatgcacttagtattaagttgaaacttgaacaaatagatggtcacattgctgaacataattctaaaataaaatattggcacaaagagatttcaaaaatatcactgcatcctatagaagataatcctattgaagagatttcggttctaagcccagaggatcttgaagcgatcaagaatccagattctataacaaatcaaattgcacttttggaagcccggtgtcatgaaatgaaaccaaacctcggtgccatcgcagagtataaaaagaaggaagaattgtatttgcaacgggtagcagaattggacaaaattacttatgaaagagacagttttagacaggcatatgaagatcttcggaaacaaaggcttaatgaatttatggcaggtttttatataataacaaataaattaaaggaaaattaccaaatgcttactttgggaggggacgccgaactcgagcttgtagacagcttggatcctttctctgaaggaatcatgttcagtgttcgaccacctaagaaaagttggaaaaagatcttcaacctttcgggaggagagaaaacacttagttcattggctttagtatttgctcttcaccactacaagcccactcccctttacttcatggatgagattgatgcagcccttgattttaaaaatgtgtccattgttgcattttatatatatgaacaaacaaaaaatgcacagttcataataatttctcttcgaaataatatgtttgagatttcggatagacttattggaatttacaagacatacaacataacaaaaagtgttgctgtaaatccaaaagaaattgcatctaagggactttgttgaactttatgctgaagattcttcaagttgattcagtgtattactgatttttttctatttgtaaaggattatgagttgtataaaatacatactccctaaactagatcatgaaactggtttctgttttatgcagttgtcatttgtaaagtctaataaaatattctctataattgcttctagattacaaaaatatgacaatcttgtaagtagcagactatggagaaaaatgagttacctggagggtcaggtaacttgccaaactaaaaagtatgttagttgaggcaaagtcctaagcaaggttgtgctatcaaggctcagcataccttcgtgggcctttgatttaccaacactggaaatgcctgccaactaatcttggatagattctttaaggcattccacttagcttgccagttgagacaatcaccacagttattacccaaatactatgaacatatttttgtaaaccagtcattctgaattatagtgatgagaatttaaatatatgcttttctagaatttgatgtttgaccatttatgacttaattaccagagagccagtaaattaggacagtgtttcaacaagcctaggctatctcgtaagttgaaaaatatcccactatagttgcttcatgagtatgaagtaagatggcctctgatttacactggttcaatttacaaattttcaactttatgataggtttatcagggtactaaatgcatttcaacttgatagtttcaacttatgataggtttaccaggatgtagtcccactgttgaggagcatctatttaggggttaattactttagtaataagtggaaagtaagataccttgagtaatgtttgcctataaaattgtcagcgtatttttacactattggctcaagaatgttataatgctaagggacataagttggcaaccacttggtttttggaaggactttcggtattgtattagaagtctgccctagctgttaaatttctgggtatttatcctaaggaattaattaaagagttaattgttcctttcttcagtgggccattgttttagatatttaaaaaatccaacagtttctatcataatgtaactgtaaaaatgtaaacacattattagcatggacttttaaataaagatttaaagaaagcaagatcggaaattcaag

SEQ ID NO: 30138 - DNA, 4849 bp, Homo sapiens
aacagcgaacatacttactaaagtgtgttaataaataaatgcttgtagcacataataataacagtgaaatgtctgcacagccgctttccacacagacatcataacaaaaatttccagaaaattctgggacctttccataagcgcttttcctgtattatcgggccaaatggcagtggcaaatccaatgttattgattctatgctttttgtgtttggctatcgagcacaaaaaataagatctaaaaaactctcagtattaatacataattctgatgaacacaaggacattcagagttgtacagtagaagttcattttcaaaagataattgataaggaaggggatgattatgaagtcattcctaacagtaatttctatgtatccagaacggcctgcagagataatacttctgtctatcacataagtggaaagaaaaagacatttaaggatgttggaaatcttcttcgaagccatggaattgacttggaccataatagatttttaattttacagggtgaagttgaacaaattgctatgatgaaaccaaaaggccagactgaacacgatgagggtatgcttgaatatttagaagatataattggttgtggacggctaaatgaacctattaaagtcttgtgtcggagagttgaaatattaaatgaacacagaggagagaagttaaacagggtaaagatggtggaaaaggaaaaggatgccttagaaggagagaaaaacatagctatcgaatttcttaccttggaaaatgaaatatttagaaaaaagaatcatgtttgtcaatattatatttatgagttgcagaaacgaattgctgaaatggaaactcaaaaggaaaaaattcatgaagataccaaagaaattaatgagaagagcaatatactatcaaatgaaatgaaagctaagaataaagatgtaaaagatacagaaaagaaactgaataaaattacaaaatttattgaggagaataaagaaaaatttacacagctagatttggaagatgttcaagttagagaaaagttaaaacatgccacgagtaaagccaaaaaactggagaaacaacttcaaaaagataaagaaaaggttgaagaatttaaaagtatacctgccaagagtaacaatatcattaatgaaacaacaaccagaaacaatgccctcgagaaggaaaaagagaaagaagaaaaaaaattaaaggaagttatggatagccttaaacaggaaacacaagggcttcagaaagaaaaagaaagtcgagagaaagaacttatgggtttcagcaaatcggtaaatgaagcacgttcaaagatggatgtagcccagtcagaacttgatatctatctcagtcgtcataatactgcagtgtctcaattaactaaggctaaggaagctctaattgcagcttctgagactctcaaagaaaggaaagctgcaatcagagatatagaaggaaaactccctcaaactgaacaagaattaaaggagaaagaaaaagaacttcaaaaacttacacaagaagaaacaaactttaaaagtttggttcatgatctctttcaaaaagttgaagaagcaaagagctcattagcaatgaatcgaagtagggggaaagtccttgatgcaataattcaagaaaaaaaatctggcaggattccaggaatatatggaagattgggggacttaggagccattgatgaaaaatacgacgtggctatatcatcctgttgtcatgcactggactacattgttgttgattctattgatatagcccaagaatgtgtaaacttccttaaaagacaaaatattggagttgcaacctttataggtttagataagatggctgtatgggcgaaaaagatgaccgaaattcaaactcctgaaaatactcctcgtttatttgatttagtaaaagtaaaagatgagaaaattcgccaagctttttattttgctttacgagataccttagtagctgacaacttggatcaagccacaagagtagcatatcaaaaagatagaagatggagagtggtaactttacagggacaaatcatagaacagtcaggtacaatgactggtggtggaagcaaagtaatgaaaggaagaatgggttcctcacttgttattgaaatctctgaagaagaggtaaacaaaatggaatcacagttgcaaaacgactctaaaaaagcaatgcaaatccaagaacagaaagtacaacttgaagaaagagtagttaagttacggcatagtgaacgagaaatgaggaacacactagaaaaatttactgcaagcatccagcgtttaatagagcaagaagaatatttgaatgtccaagttaaggaacttgaagctaatgtacttgctacagcccctgacaaaaaaaagcagaaattgctagaagaaaacgttagtgctttcaaaacagaatatgatgctgtggctgagaaagctggtaaagtagaagctgaggttaaacgcttacacaataccatcgtagaaatcaataatcataaactcaaggcccaacaagacaaacttgataaaataaataagcaattagatgaatgtgcttctgctattactaaagcccaagtagcaatcaagactgctgacagaaaccttcaaaaggcacaagactctgtcttgcgtacagagaaagaaataaaagatactgagaaagaggtggatgacctaacagcagagctgaaaagtcttgaggacaaagcagcagaggtcgtaaagaatacaaatgctgcagaggaatccttaccagagatccagaaagaacatcgcaatctgcttcaagaattaaaagttattcaagaaaatgaacatgctcttcaaaaagatgcacttagtattaagttgaaacttgaacaaatagatggtcacattgctgaacataattctaaaataaaatattggcacaaagagatttcaaaaatatcactgcatcctatagaagataatcctattgaagagatttcggttctaagcccagaggatcttgaagcgatcaagaatccagattctataacaaatcaaattgcacttttggaagcccggtgtcatgaaatgaaaccaaacctcggtgccatcgcagagtataaaaagaaggaagaattgtatttgcaacgggtagcagaattggacaaaattacttatgaaagagacagttttagacaggcatatgaagatcttcggaaacaaaggcttaatgaatttatggcaggtttttatataataacaaataaattaaaggaaaattaccaaatgcttactttgggaggggacgccgaactcgagcttgtagacagcttggatcctttctctgaaggaatcatgttcagtgttcgaccacctaagaaaagttggaaaaagatcttcaacctttcgggaggagagaaaacacttagttcattggctttagtatttgctcttcaccactacaagcccactcccctttacttcatggatgagattgatgcagcccttgattttaaaaatgtgtccattgttgcattttatatatatgaacaaacaaaaaatgcacagttcataataatttctcttcgaaataatatgtttgagatttcggatagacttattggaatttacaagacatacaacataacaaaaagtgttgctgtaaatccaaaagaaattgcatctaagggactttgttgaactttatgctgaagattcttcaagttgattcagtgtattactgatttttttctatttgtaaaggattatgagttgtataaaatacatactccctaaactagatcatgaaactggtttctgttttatgcagttgtcatttgtaaagtctaataaaatattctctataattgcttctagattacaaaaatatgacaatcttgtaagtagcagactatggagaaaaatgagttacctggagggtcaggtaacttgccaaactaaaaagtatgttagttgaggcaaagtcctaagcaaggttgtgctatcaaggctcagcataccttcgtgggcctttgatttaccaacactggaaatgcctgccaactaatcttggatagattctttaaggcattccacttagcttgccagttgagacaatcaccacagttattacccaaatactatgaacatatttttgtaaaccagtcattctgaattatagtgatgagaatttaaatatatgcttttctagaatttgatgtttgaccatttatgacttaattaccagagagccagtaaattaggacagtgtttcaacaagcctaggctatctcgtaagttgaaaaatatcccactatagttgcttcatgagtatgaagtaagatggcctctgatttacactggttcaatttacaaattttcaactttatgataggtttatcagggtactaaatgcatttcaacttgatagtttcaacttatgataggtttaccaggatgtagtcccactgttgaggagcatctatttaggggttaattactttagtaataagtggaaagtaagataccttgagtaatgtttgcctataaaattgtcagcgtatttttacactattggctcaagaatgttataatgctaagggacataagttggcaaccacttggtttttggaaggactttcggtattgtattagaagtctgccctagctgttaaatttctgggtatttatcctaaggaattaattaaagagttaattgttcctttcttcagtgggccattgttttagatatttaaaaaatccaacagtttctatcataatgtaactgtaaaaatgtaaacacattattagcatggacttttaaataaagatttaaagaaagcaagatcggaaattcaag

SEQ ID NO: 30139 - DNA, 5850 bp, Homo sapiens
ggtggtgtgcgtggtattccggggttgccggggattgtggcgggtgcccatgatgtggcggtgtcagggggctgaggccgggtgatcccttggaccccggatgtggagggttgcagtgggttggggtcacgaccgtgtggctcccgcctgggttgcccgggtgagactctggtctccgggaggtgcagttaagcttcttgttaagatcctactaaagtagacctaactgctttttaagtatttaagtatagtacttaagtagagtaagcaaaacgtcagtaagaattttcaaataagatttatagccaacggttcactttggagaattacttaccacacatgatcttaaatactttaaaaccatttaggtaaacagccactaaaggaatgaaaaaaaaaaatctattcttcaactaggatataaaatagagaaacttttaacaatactataattaagaaaatccaataagatttataagcattaaaaggatatgctttggttcttttaaaagagatatctttagtctcatgactccacttccagccaaaatttaagatgccacttgattgtatttacaggttgtctttccaaatatttttaataatagtgctgctgctgtagaccacagagaaaagaatccctcgctcttccttttcacttagtagaaacttctaccgcgtaggtcccgccaggagttcgcgcatgcgcaggagcgacaataagatggcggtgataatcgccgcactttttttcaaattagtggatcccagaaatcattgcgcgcatttgtaacgaatttccgttcgagtttgtattttaggcgccattttcgagtgaaggacccggagccgaaacaccggtaggagcggggaggtgggtactacacaaccgtctccagccttggtctgagtggactgtcctgcagcgaccatgccccgtaaaggcacccagccctccactgcccggcgcagagaggaagggccgccgccgccgtcccctgacggcgccagcagcgacgcggagcctgagccgccgtccggccgcacggagagcccagccaccgccgcagagactgcaagtgaggaacttgataatagaagtttagaagagattttgaacagcattcctcctcccccgcctccagcaatgaccaatgaagctggagctcctcggcttatgataactcatattgtaaaccagaacttcaaatcctatgctggggagaaaattctgggacctttccataagcgcttttcctgtattatcgggccaaatggcagtggcaaatccaatgttattgattctatgctttttgtgtttggctatcgagcacaaaaaataagatctaaaaaactctcagtattaatacataattctgatgaacacaaggacattcagagttgtacagtagaagttcattttcaaaagataattgataaggaaggggatgattatgaagtcattcctaacagtaatttctatgtatccagaacggcctgcagagataatacttctgtctatcacataagtggaaagaaaaagacatttaaggatgttggaaatcttcttcgaagccatggaattgacttggaccataatagatttttaattttacagggtgaagttgaacaaattgctatgatgaaaccaaaaggccagactgaacacgatgaggttaaacagggtaaagatggtggaaaaggaaaaggatgccttagaaggagagaaaaacatagctatcgaatttcttaccttggaaaatgaaatatttagaaaaaagaatcatgtttgtcaatattatatttatgagttgcagaaacgaattgctgaaatggaaactcaaaaggaaaaaattcatgaagataccaaagaaattaatgagaagagcaatatactatcaaatgaaatgaaagctaagaataaagatgtaaaagatacagaaaagaaactgaataaaattacaaaatttattgaggagaataaagaaaaatttacacagctagatttggaagatgttcaagttagagaaaagttaaaacatgccacgagtaaagccaaaaaactggagaaacaacttcaaaaagataaagaaaaggttgaagaatttaaaagtatacctgccaagagtaacaatatcattaatgaaacaacaaccagaaacaatgccctcgagaaggaaaaagagaaagaagaaaaaaaattaaaggaagttatggatagccttaaacaggaaacacaagggcttcagaaagaaaaagaaagtcgagagaaagaacttatgggtttcagcaaatcggtaaatgaagcacgttcaaagatggatgtagcccagtcagaacttgatatctatctcagtcgtcataatactgcagtgtctcaattaactaaggctaaggaagctctaattgcagcttctgagactctcaaagaaaggaaagctgcaatcagagatatagaaggaaaactccctcaaactgaacaagaattaaaggagaaagaaaaagaacttcaaaaacttacacaagaagaaacaaactttaaaagtttggttcatgatctctttcaaaaagttgaagaagcaaagagctcattagcaatgaatcgaagtagggggaaagtccttgatgcaataattcaagaaaaaaaatctggcaggattccaggaatatatggaagattgggggacttaggagccattgatgaaaaatacgacgtggctatatcatcctgttgtcatgcactggactacattgttgttgattctattgatatagcccaagaatgtgtaaacttccttaaaagacaaaatattggagttgcaacctttataggtttagataagatggctgtatgggcgaaaaagatgaccgaaattcaaactcctgaaaatactcctcgtttatttgatttagtaaaagtaaaagatgagaaaattcgccaagctttttattttgctttacgagataccttagtagctgacaacttggatcaagccacaagagtagcatatcaaaaagatagaagatggagagtggtaactttacagggacaaatcatagaacagtcaggtacaatgactggtggtggaagcaaagtaatgaaaggaagaatgggttcctcacttgttattgaaatctctgaagaagaggtaaacaaaatggaatcacagttgcaaaacgactctaaaaaagcaatgcaaatccaagaacagaaagtacaacttgaagaaagagtagttaagttacggcatagtgaacgagaaatgaggaacacactagaaaaatttactgcaagcatccagcgtttaatagagcaagaagaatatttgaatgtccaagttaaggaacttgaagctaatgtacttgctacagcccctgacaaaaaaaagcagaaattgctagaagaaaacgttagtgctttcaaaacagaatatgatgctgtggctgagaaagctggtaaagtagaagctgaggttaaacgcttacacaataccatcgtagaaatcaataatcataaactcaaggcccaacaagacaaacttgataaaataaataagcaattagatgaatgtgcttctgctattactaaagcccaagtagcaatcaagactgctgacagaaaccttcaaaaggcacaagactctgtcttgcgtacagagaaagaaataaaagatactgagaaagaggtggatgacctaacagcagagctgaaaagtcttgaggacaaagcagcagaggtcgtaaagaatacaaatgctgcagaggaatccttaccagagatccagaaagaacatcgcaatctgcttcaagaattaaaagttattcaagaaaatgaacatgctcttcaaaaagatgcacttagtattaagttgaaacttgaacaaatagatggtcacattgctgaacataattctaaaataaaatattggcacaaagagatttcaaaaatatcactgcatcctatagaagataatcctattgaagagatttcggttctaagcccagaggatcttgaagcgatcaagaatccagattctataacaaatcaaattgcacttttggaagcccggtgtcatgaaatgaaaccaaacctcggtgccatcgcagagtataaaaagaaggaagaattgtatttgcaacgggtagcagaattggacaaaattacttatgaaagagacagttttagacaggcatatgaagatcttcggaaacaaaggcttaatgaatttatggcaggtttttatataataacaaataaattaaaggaaaattaccaaatgcttactttgggaggggacgccgaactcgagcttgtagacagcttggatcctttctctgaaggaatcatgttcagtgttcgaccacctaagaaaagttggaaaaagatcttcaacctttcgggaggagagaaaacacttagttcattggctttagtatttgctcttcaccactacaagcccactcccctttacttcatggatgagattgatgcagcccttgattttaaaaatgtgtccattgttgcattttatatatatgaacaaacaaaaaatgcacagttcataataatttctcttcgaaataatatgtttgagatttcggatagacttattggaatttacaagacatacaacataacaaaaagtgttgctgtaaatccaaaagaaattgcatctaagggactttgttgaactttatgctgaagattcttcaagttgattcagtgtattactgatttttttctatttgtaaaggattatgagttgtataaaatacatactccctaaactagatcatgaaactggtttctgttttatgcagttgtcatttgtaaagtctaataaaatattctctataattgcttctagattacaaaaatatgacaatcttgtaagtagcagactatggagaaaaatgagttacctggagggtcaggtaacttgccaaactaaaaagtatgttagttgaggcaaagtcctaagcaaggttgtgctatcaaggctcagcataccttcgtgggcctttgatttaccaacactggaaatgcctgccaactaatcttggatagattctttaaggcattccacttagcttgccagttgagacaatcaccacagttattacccaaatactatgaacatatttttgtaaaccagtcattctgaattatagtgatgagaatttaaatatatgcttttctagaatttgatgtttgaccatttatgacttaattaccagagagccagtaaattaggacagtgtttcaacaagcctaggctatctcgtaagttgaaaaatatcccactatagttgcttcatgagtatgaagtaagatggcctctgatttacactggttcaatttacaaattttcaactttatgataggtttatcagggtactaaatgcatttcaacttgatagtttcaacttatgataggtttaccaggatgtagtcccactgttgaggagcatctatttaggggttaattactttagtaataagtggaaagtaagataccttgagtaatgtttgcctataaaattgtcagcgtatttttacactattggctcaagaatgttataatgctaagggacataagttggcaaccacttggtttttggaaggactttcggtattgtattagaagtctgccctagctgttaaatttctgggtatttatcctaaggaattaattaaagagttaattgttcctttcttcagtgggccattgttttagatatttaaaaaatccaacagtttctatcataatgtaactgtaaaaatgtaaacacattattagcatggacttttaaataaagatttaaagaaagcaagatcggaaattcaag

SEQ ID NO: 30140 - DNA, 5199 bp, Homo sapiens
ggtggtgtgcgtggtattccggggttgccggggattgtggcgggtgcccatgatgtggcggtgtcagggggctgaggccgggtgatcccttggaccccggatgtggagggttgcagtgggttggggtcacgaccgtgtggctcccgcctgggttgcccgggtgagactctggtctccgggaggtgcagttaagcttcttgttaagatcctactaaagtagacctaactgctttttaagtatttaagtatagtacttaagtagagtaagcaaaacgtcagtaagaattttcaaataagatttatagccaacggttcactttggagaattacttaccacacatgatcttaaatactttaaaaccatttaggtaaacagccactaaaggaatgaaaaaaaaaaatctattcttcaactaggatataaaatagagaaacttttaacaatactataattaagaaaatccaataagatttataagcattaaaaggatatgctttggttcttttaaaagagatatctttagtctcatgactccacttccagccaaaatttaagatgccacttgattgtatttacaggttgtctttccaaatatttttaataatagtgctgctgctgtagaccacagagaaaagaatccctcgctcttccttttcacttagtagaaacttctaccgcgtaggtcccgccaggagttcgcgcatgcgcaggagcgacaataagatggcggtgataatcgccgcactttttttcaaattagtggatcccagaaatcattgcgcgcatttgtaacgaatttccgttcgagtttgtattttaggcgccattttcgagtgaaggacccggagccgaaacaccgggtgaagttgaacaaattgctatgatgaaaccaaaaggccagactgaacacgatgagggtatgcttgaatatttagaagatataattggttgtggacggctaaatgaacctattaaagtcttgtgtcggagagttgaaatattaaatgaacacagaggagagaagttaaacagggtaaagatggtggaaaaggaaaaggatgccttagaaggagagaaaaacatagctatcgaatttcttaccttggaaaatgaaatatttagaaaaaagaatcatgtttgtcaatattatatttatgagttgcagaaacgaattgctgaaatggaaactcaaaaggaaaaaattcatgaagataccaaagaaattaatgagaagagcaatatactatcaaatgaaatgaaagctaagaataaagatgtaaaagatacagaaaagaaactgaataaaattacaaaatttattgaggagaataaagaaaaatttacacagctagatttggaagatgttcaagttagagaaaagttaaaacatgccacgagtaaagccaaaaaactggagaaacaacttcaaaaagataaagaaaaggttgaagaatttaaaagtatacctgccaagagtaacaatatcattaatgaaacaacaaccagaaacaatgccctcgagaaggaaaaagagaaagaagaaaaaaaattaaaggaagttatggatagccttaaacaggaaacacaagggcttcagaaagaaaaagaaagtcgagagaaagaacttatgggtttcagcaaatcggtaaatgaagcacgttcaaagatggatgtagcccagtcagaacttgatatctatctcagtcgtcataatactgcagtgtctcaattaactaaggctaaggaagctctaattgcagcttctgagactctcaaagaaaggaaagctgcaatcagagatatagaaggaaaactccctcaaactgaacaagaattaaaggagaaagaaaaagaacttcaaaaacttacacaagaagaaacaaactttaaaagtttggttcatgatctctttcaaaaagttgaagaagcaaagagctcattagcaatgaatcgaagtagggggaaagtccttgatgcaataattcaagaaaaaaaatctggcaggattccaggaatatatggaagattgggggacttaggagccattgatgaaaaatacgacgtggctatatcatcctgttgtcatgcactggactacattgttgttgattctattgatatagcccaagaatgtgtaaacttccttaaaagacaaaatattggagttgcaacctttataggtttagataagatggctgtatgggcgaaaaagatgaccgaaattcaaactcctgaaaatactcctcgtttatttgatttagtaaaagtaaaagatgagaaaattcgccaagctttttattttgctttacgagataccttagtagctgacaacttggatcaagccacaagagtagcatatcaaaaagatagaagatggagagtggtaactttacagggacaaatcatagaacagtcaggtacaatgactggtggtggaagcaaagtaatgaaaggaagaatgggttcctcacttgttattgaaatctctgaagaagaggtaaacaaaatggaatcacagttgcaaaacgactctaaaaaagcaatgcaaatccaagaacagaaagtacaacttgaagaaagagtagttaagttacggcatagtgaacgagaaatgaggaacacactagaaaaatttactgcaagcatccagcgtttaatagagcaagaagaatatttgaatgtccaagttaaggaacttgaagctaatgtacttgctacagcccctgacaaaaaaaagcagaaattgctagaagaaaacgttagtgctttcaaaacagaatatgatgctgtggctgagaaagctggtaaagtagaagctgaggttaaacgcttacacaataccatcgtagaaatcaataatcataaactcaaggcccaacaagacaaacttgataaaataaataagcaattagatgaatgtgcttctgctattactaaagcccaagtagcaatcaagactgctgacagaaaccttcaaaaggcacaagactctgtcttgcgtacagagaaagaaataaaagatactgagaaagaggtggatgacctaacagcagagctgaaaagtcttgaggacaaagcagcagaggtcgtaaagaatacaaatgctgcagaggaatccttaccagagatccagaaagaacatcgcaatctgcttcaagaattaaaagttattcaagaaaatgaacatgctcttcaaaaagatgcacttagtattaagttgaaacttgaacaaatagatggtcacattgctgaacataattctaaaataaaatattggcacaaagagatttcaaaaatatcactgcatcctatagaagataatcctattgaagagatttcggttctaagcccagaggatcttgaagcgatcaagaatccagattctataacaaatcaaattgcacttttggaagcccggtgtcatgaaatgaaaccaaacctcggtgccatcgcagagtataaaaagaaggaagaattgtatttgcaacgggtagcagaattggacaaaattacttatgaaagagacagttttagacaggcatatgaagatcttcggaaacaaaggcttaatgaatttatggcaggtttttatataataacaaataaattaaaggaaaattaccaaatgcttactttgggaggggacgccgaactcgagcttgtagacagcttggatcctttctctgaaggaatcatgttcagtgttcgaccacctaagaaaagttggaaaaagatcttcaacctttcgggaggagagaaaacacttagttcattggctttagtatttgctcttcaccactacaagcccactcccctttacttcatggatgagattgatgcagcccttgattttaaaaatgtgtccattgttgcattttatatatatgaacaaacaaaaaatgcacagttcataataatttctcttcgaaataatatgtttgagatttcggatagacttattggaatttacaagacatacaacataacaaaaagtgttgctgtaaatccaaaagaaattgcatctaagggactttgttgaactttatgctgaagattcttcaagttgattcagtgtattactgatttttttctatttgtaaaggattatgagttgtataaaatacatactccctaaactagatcatgaaactggtttctgttttatgcagttgtcatttgtaaagtctaataaaatattctctataattgcttctagattacaaaaatatgacaatcttgtaagtagcagactatggagaaaaatgagttacctggagggtcaggtaacttgccaaactaaaaagtatgttagttgaggcaaagtcctaagcaaggttgtgctatcaaggctcagcataccttcgtgggcctttgatttaccaacactggaaatgcctgccaactaatcttggatagattctttaaggcattccacttagcttgccagttgagacaatcaccacagttattacccaaatactatgaacatatttttgtaaaccagtcattctgaattatagtgatgagaatttaaatatatgcttttctagaatttgatgtttgaccatttatgacttaattaccagagagccagtaaattaggacagtgtttcaacaagcctaggctatctcgtaagttgaaaaatatcccactatagttgcttcatgagtatgaagtaagatggcctctgatttacactggttcaatttacaaattttcaactttatgataggtttatcagggtactaaatgcatttcaacttgatagtttcaacttatgataggtttaccaggatgtagtcccactgttgaggagcatctatttaggggttaattactttagtaataagtggaaagtaagataccttgagtaatgtttgcctataaaattgtcagcgtatttttacactattggctcaagaatgttataatgctaagggacataagttggcaaccacttggtttttggaaggactttcggtattgtattagaagtctgccctagctgttaaatttctgggtatttatcctaaggaattaattaaagagttaattgttcctttcttcagtgggccattgttttagatatttaaaaaatccaacagtttctatcataatgtaactgtaaaaatgtaaacacattattagcatggacttttaaataaagatttaaagaaagcaagatcggaaattcaag

SEQ ID NO: 30141 - DNA, 4432 bp, Homo sapiens
gtaaaaatttgtgtaaaatcttacgatcgagaccaaatggacaagctggctttttttgaagaaagtaatacgactgaattactagcatcattgggtgaagttgaacaaattgctatgatgaaaccaaaaggccagactgaacacgatgagggtatgcttgaatatttagaagatataattggttgtggacggctaaatgaacctattaaagtcttgtgtcggagagttgaaatattaaatgaacacagaggagagaagttaaacagggtaaagatggtggaaaaggaaaaggatgccttagaaggagagaaaaacatagctatcgaatttcttaccttggaaaatgaaatatttagaaaaaagaatcatgtttgtcaatattatatttatgagttgcagaaacgaattgctgaaatggaaactcaaaaggaaaaaattcatgaagataccaaagaaattaatgagaagagcaatatactatcaaatgaaatgaaagctaagaataaagatgtaaaagatacagaaaagaaactgaataaaattacaaaatttattgaggagaataaagaaaaatttacacagctagatttggaagatgttcaagttagagaaaagttaaaacatgccacgagtaaagccaaaaaactggagaaacaacttcaaaaagataaagaaaaggttgaagaatttaaaagtatacctgccaagagtaacaatatcattaatgaaacaacaaccagaaacaatgccctcgagaaggaaaaagagaaagaagaaaaaaaattaaaggaagttatggatagccttaaacaggaaacacaagggcttcagaaagaaaaagaaagtcgagagaaagaacttatgggtttcagcaaatcggtaaatgaagcacgttcaaagatggatgtagcccagtcagaacttgatatctatctcagtcgtcataatactgcagtgtctcaattaactaaggctaaggaagctctaattgcagcttctgagactctcaaagaaaggaaagctgcaatcagagatatagaaggaaaactccctcaaactgaacaagaattaaaggagaaagaaaaagaacttcaaaaacttacacaagaagaaacaaactttaaaagtttggttcatgatctctttcaaaaagttgaagaagcaaagagctcattagcaatgaatcgaagtagggggaaagtccttgatgcaataattcaagaaaaaaaatctggcaggattccaggaatatatggaagattgggggacttaggagccattgatgaaaaatacgacgtggctatatcatcctgttgtcatgcactggactacattgttgttgattctattgatatagcccaagaatgtgtaaacttccttaaaagacaaaatattggagttgcaacctttataggtttagataagatggctgtatgggcgaaaaagatgaccgaaattcaaactcctgaaaatactcctcgtttatttgatttagtaaaagtaaaagatgagaaaattcgccaagctttttattttgctttacgagataccttagtagctgacaacttggatcaagccacaagagtagcatatcaaaaagatagaagatggagagtggtaactttacagggacaaatcatagaacagtcaggtacaatgactggtggtggaagcaaagtaatgaaaggaagaatgggttcctcacttgttattgaaatctctgaagaagaggtaaacaaaatggaatcacagttgcaaaacgactctaaaaaagcaatgcaaatccaagaacagaaagtacaacttgaagaaagagtagttaagttacggcatagtgaacgagaaatgaggaacacactagaaaaatttactgcaagcatccagcgtttaatagagcaagaagaatatttgaatgtccaagttaaggaacttgaagctaatgtacttgctacagcccctgacaaaaaaaagcagaaattgctagaagaaaacgttagtgctttcaaaacagaatatgatgctgtggctgagaaagctggtaaagtagaagctgaggttaaacgcttacacaataccatcgtagaaatcaataatcataaactcaaggcccaacaagacaaacttgataaaataaataagcaattagatgaatgtgcttctgctattactaaagcccaagtagcaatcaagactgctgacagaaaccttcaaaaggcacaagactctgtcttgcgtacagagaaagaaataaaagatactgagaaagaggtggatgacctaacagcagagctgaaaagtcttgaggacaaagcagcagaggtcgtaaagaatacaaatgctgcagaggaatccttaccagagatccagaaagaacatcgcaatctgcttcaagaattaaaagttattcaagaaaatgaacatgctcttcaaaaagatgcacttagtattaagttgaaacttgaacaaatagatggtcacattgctgaacataattctaaaataaaatattggcacaaagagatttcaaaaatatcactgcatcctatagaagataatcctattgaagagatttcggttctaagcccagaggatcttgaagcgatcaagaatccagattctataacaaatcaaattgcacttttggaagcccggtgtcatgaaatgaaaccaaacctcggtgccatcgcagagtataaaaagaaggaagaattgtatttgcaacgggtagcagaattggacaaaattacttatgaaagagacagttttagacaggcatatgaagatcttcggaaacaaaggcttaatgaatttatggcaggtttttatataataacaaataaattaaaggaaaattaccaaatgcttactttgggaggggacgccgaactcgagcttgtagacagcttggatcctttctctgaaggaatcatgttcagtgttcgaccacctaagaaaagttggaaaaagatcttcaacctttcgggaggagagaaaacacttagttcattggctttagtatttgctcttcaccactacaagcccactcccctttacttcatggatgagattgatgcagcccttgattttaaaaatgtgtccattgttgcattttatatatatgaacaaacaaaaaatgcacagttcataataatttctcttcgaaataatatgtttgagatttcggatagacttattggaatttacaagacatacaacataacaaaaagtgttgctgtaaatccaaaagaaattgcatctaagggactttgttgaactttatgctgaagattcttcaagttgattcagtgtattactgatttttttctatttgtaaaggattatgagttgtataaaatacatactccctaaactagatcatgaaactggtttctgttttatgcagttgtcatttgtaaagtctaataaaatattctctataattgcttctagattacaaaaatatgacaatcttgtaagtagcagactatggagaaaaatgagttacctggagggtcaggtaacttgccaaactaaaaagtatgttagttgaggcaaagtcctaagcaaggttgtgctatcaaggctcagcataccttcgtgggcctttgatttaccaacactggaaatgcctgccaactaatcttggatagattctttaaggcattccacttagcttgccagttgagacaatcaccacagttattacccaaatactatgaacatatttttgtaaaccagtcattctgaattatagtgatgagaatttaaatatatgcttttctagaatttgatgtttgaccatttatgacttaattaccagagagccagtaaattaggacagtgtttcaacaagcctaggctatctcgtaagttgaaaaatatcccactatagttgcttcatgagtatgaagtaagatggcctctgatttacactggttcaatttacaaattttcaactttatgataggtttatcagggtactaaatgcatttcaacttgatagtttcaacttatgataggtttaccaggatgtagtcccactgttgaggagcatctatttaggggttaattactttagtaataagtggaaagtaagataccttgagtaatgtttgcctataaaattgtcagcgtatttttacactattggctcaagaatgttataatgctaagggacataagttggcaaccacttggtttttggaaggactttcggtattgtattagaagtctgccctagctgttaaatttctgggtatttatcctaaggaattaattaaagagttaattgttcctttcttcagtgggccattgttttagatatttaaaaaatccaacagtttctatcataatgtaactgtaaaaatgtaaacacattattagcatggacttttaaataaagatttaaagaaagcaagatcggaaattcaag

SEQ ID NO: 30142 - DNA, 4577 bp, Homo sapiens
tgtgcttatagaatctcctttcttaaatcgaatataaaatgtatggtttcatttcagtgtaggtttgaaagtaaatatctgtccagatttaatgaactcatattttaacagagtcgagagaaagaacttatgggtttcagcaaatcggtaaatgaaggcacgttcaaagatggatgtagcccagtcagaacttgatatctatctcagtcgtcataatactgcagtgtctcaattaactaaggctaaggaagctctaattgcagcttctgagactctcaaagaaaggaaagctgcaatcagagatatagaaggaaaactccctcaaactgaacaagaattaaaggagaaagaaaaagaacttcaaaaacttacacaagaagaaacaaactttaaaagtttggttcatgatctctttcaaaaagttgaagaagcaaagagctcattagcaatgaatcgaagtagggggaaagtccttgatgcaataattcaagaaaaaaaatctggcaggattccaggaatatatggaagatgttatgagttgcagaaacgaattgctgaaatggaaactcaaaaggaaaaaattcatgaagataccaaagaaattaatgagaagagcaatatactatcaaatgaaatgaaagctaagaataaagatgtaaaagatacagaaaagaaactgaataaaattacaaaatttattgaggagaataaagaaaaatttacacagctagatttggaagatgttcaagttagagaaaagttaaaacatgccacgagtaaagccaaaaaactggagaaacaacttcaaaaagataaagaaaaggttgaagaatttaaaagtatacctgccaagagtaacaatatcattaatgaaacaacaaccagaaacaatgccctcgagaaggaaaaagagaaagaagaaaaaaaattaaaggaagttatggatagccttaaacaggaaacacaagggcttcagaaagaaaaagaaagtcgagagaaagaacttatgggtttcagcaaatcggtaaatgaagcacgttcaaagatggatgtagcccagtcagaacttgatatctatctcagtcgtcataatactgcagtgtctcaattaactaaggctaaggaagctctaattgcagcttctgagactctcaaagaaaggaaagctgcaatcagagatatagaaggaaaactccctcaaactgaacaagaattaaaggagaaagaaaaagaacttcaaaaacttacacaagaagaaacaaactttaaaagtttggttcatgatctctttcaaaaagttgaagaagcaaagagctcattagcaatgaatcgaagtagggggaaagtccttgatgcaataattcaagaaaaaaaatctggcaggattccaggaatatatggaagattgggggacttaggagccattgatgaaaaatacgacgtggctatatcatcctgttgtcatgcactggactacattgttgttgattctattgatatagcccaagaatgtgtaaacttccttaaaagacaaaatattggagttgcaacctttataggtttagataagatggctgtatgggcgaaaaagatgaccgaaattcaaactcctgaaaatactcctcgtttatttgatttagtaaaagtaaaagatgagaaaattcgccaagctttttattttgctttacgagataccttagtagctgacaacttggatcaagccacaagagtagcatatcaaaaagatagaagatggagagtggtaactttacagggacaaatcatagaacagtcaggtacaatgactggtggtggaagcaaagtaatgaaaggaagaatgggttcctcacttgttattgaaatctctgaagaagaggtaaacaaaatggaatcacagttgcaaaacgactctaaaaaagcaatgcaaatccaagaacagaaagtacaacttgaagaaagagtagttaagttacggcatagtgaacgagaaatgaggaacacactagaaaaatttactgcaagcatccagcgtttaatagagcaagaagaatatttgaatgtccaagttaaggaacttgaagctaatgtacttgctacagcccctgacaaaaaaaagcagaaattgctagaagaaaacgttagtgctttcaaaacagaatatgatgctgtggctgagaaagctggtaaagtagaagctgaggttaaacgcttacacaataccatcgtagaaatcaataatcataaactcaaggcccaacaagacaaacttgataaaataaataagcaattagatgaatgtgcttctgctattactaaagcccaagtagcaatcaagactgctgacagaaaccttcaaaaggcacaagactctgtcttgcgtacagagaaagaaataaaagatactgagaaagaggtggatgacctaacagcagagctgaaaagtcttgaggacaaagcagcagaggtcgtaaagaatacaaatgctgcagaggaatccttaccagagatccagaaagaacatcgcaatctgcttcaagaattaaaagttattcaagaaaatgaacatgctcttcaaaaagatgcacttagtattaagttgaaacttgaacaaatagatggtcacattgctgaacataattctaaaataaaatattggcacaaagagatttcaaaaatatcactgcatcctatagaagataatcctattgaagagatttcggttctaagcccagaggatcttgaagcgatcaagaatccagattctataacaaatcaaattgcacttttggaagcccggtgtcatgaaatgaaaccaaacctcggtgccatcgcagagtataaaaagaaggaagaattgtatttgcaacgggtagcagaattggacaaaattacttatgaaagagacagttttagacaggcatatgaagatcttcggaaacaaaggcttaatgaatttatggcaggtttttatataataacaaataaattaaaggaaaattaccaaatgcttactttgggaggggacgccgaactcgagcttgtagacagcttggatcctttctctgaaggaatcatgttcagtgttcgaccacctaagaaaagttggaaaaagatcttcaacctttcgggaggagagaaaacacttagttcattggctttagtatttgctcttcaccactacaagcccactcccctttacttcatggatgagattgatgcagcccttgattttaaaaatgtgtccattgttgcattttatatatatgaacaaacaaaaaatgcacagttcataataatttctcttcgaaataatatgtttgagatttcggatagacttattggaatttacaagacatacaacataacaaaaagtgttgctgtaaatccaaaagaaattgcatctaagggactttgttgaactttatgctgaagattcttcaagttgattcagtgtattactgatttttttctatttgtaaaggattatgagttgtataaaatacatactccctaaactagatcatgaaactggtttctgttttatgcagttgtcatttgtaaagtctaataaaatattctctataattgcttctagattacaaaaatatgacaatcttgtaagtagcagactatggagaaaaatgagttacctggagggtcaggtaacttgccaaactaaaaagtatgttagttgaggcaaagtcctaagcaaggttgtgctatcaaggctcagcataccttcgtgggcctttgatttaccaacactggaaatgcctgccaactaatcttggatagattctttaaggcattccacttagcttgccagttgagacaatcaccacagttattacccaaatactatgaacatatttttgtaaaccagtcattctgaattatagtgatgagaatttaaatatatgcttttctagaatttgatgtttgaccatttatgacttaattaccagagagccagtaaattaggacagtgtttcaacaagcctaggctatctcgtaagttgaaaaatatcccactatagttgcttcatgagtatgaagtaagatggcctctgatttacactggttcaatttacaaattttcaactttatgataggtttatcagggtactaaatgcatttcaacttgatagtttcaacttatgataggtttaccaggatgtagtcccactgttgaggagcatctatttaggggttaattactttagtaataagtggaaagtaagataccttgagtaatgtttgcctataaaattgtcagcgtatttttacactattggctcaagaatgttataatgctaagggacataagttggcaaccacttggtttttggaaggactttcggtattgtattagaagtctgccctagctgttaaatttctgggtatttatcctaaggaattaattaaagagttaattgttcctttcttcagtgggccattgttttagatatttaaaaaatccaacagtttctatcataatgtaactgtaaaaatgtaaacacattattagcatggacttttaaataaagatttaaagaaagcaagatcggaaattcaag

SEQ ID NO: 30143 - DNA, 4478 bp, Homo sapiens
ccctactctgaagtcttagaaccgtggggatgctaccccctagtggcgtagcacagtaacaaacaataagcatttggcttcacaggttaatcttttagtagtccacaaatctgatagagggataggatttgggtttttctagatagatttttaagggttttatcatgtccctacttgatgccatttttcaatgacactagtatctctaattatttttaaataaaaaaatttgtatagtaagtttattgtatagtaacttgtaagtatattcgtaaaaggtaaaaccaaaattttactcctatggtaaaatttttatatacctagacattgtagtcactggaaaatgtgttattttccctccaacttagaaaggcaaaatagctgtcataatcaaaaatacaggtgcttcttcaactatggggagagggatcatcttggaataaggagagttttaggatcctgccttattaagagcctggacatatttatagaggaagtgttccaggtaggaaatgtggttttaaaatatgtgcacattcaaaataatgacttacaatatacttgctttgctaggaaactgaataaaattacaaaatttattgaggagaataaagaaaaatttacacagctagatttggaagatgttcaagttagagaaaagttaaaacatgccacgagtaaagccaaaaaactggagaaacaacttcaaaaagataaagaaaaggttgaagaatttaaaagtatacctgccaagagtaacaatatcattaatgaaacaacaaccagaaacaatgccctcgagaaggaaaaagagaaagaagaaaaaaaattaaaggaagttatggatagccttaaacaggaaacacaagggcttcagaaagaaaaagaaagtcgagagaaagaacttatgggtttcagcaaatcggtaaatgaagcacgttcaaagatggatgtagcccagtcagaacttgatatctatctcagtcgtcataatactgcagtgtctcaattaactaaggctaaggaagctctaattgcagcttctgagactctcaaagaaaggaaagctgcaatcagagatatagaaggaaaactccctcaaactgaacaagaattaaaggagaaagaaaaagaacttcaaaaacttacacaagaagaaacaaactttaaaagtttggttcatgatctctttcaaaaagttgaagaagcaaagagctcattagcaatgaatcgaagtagggggaaagtccttgatgcaataattcaagaaaaaaaatctggcaggattccaggaatatatggaagattgggggacttaggagccattgatgaaaaatacgacgtggctatatcatcctgttgtcatgcactggactacattgttgttgattctattgatatagcccaagaatgtgtaaacttccttaaaagacaaaatattggagttgcaacctttataggtttagataagatggctgtatgggcgaaaaagatgaccgaaattcaaactcctgaaaatactcctcgtttatttgatttagtaaaagtaaaagatgagaaaattcgccaagctttttattttgctttacgagataccttagtagctgacaacttggatcaagccacaagagtagcatatcaaaaagatagaagatggagagtggtaactttacagggacaaatcatagaacagtcaggtacaatgactggtggtggaagcaaagtaatgaaaggaagaatgggttcctcacttgttattgaaatctctgaagaagaggtaaacaaaatggaatcacagttgcaaaacgactctaaaaaagcaatgcaaatccaagaacagaaagtacaacttgaagaaagagtagttaagttacggcatagtgaacgagaaatgaggaacacactagaaaaatttactgcaagcatccagcgtttaatagagcaagaagaatatttgaatgtccaagttaaggaacttgaagctaatgtacttgctacagcccctgacaaaaaaaagcagaaattgctagaagaaaacgttagtgctttcaaaacagaatatgatgctgtggctgagaaagctggtaaagtagaagctgaggttaaacgcttacacaataccatcgtagaaatcaataatcataaactcaaggcccaacaagacaaacttgataaaataaataagcaattagatgaatgtgcttctgctattactaaagcccaagtagcaatcaagactgctgacagaaaccttcaaaaggcacaagactctgtcttgcgtacagagaaagaaataaaagatactgagaaagaggtggatgacctaacagcagagctgaaaagtcttgaggacaaagcagcagaggtcgtaaagaatacaaatgctgcagaggaatccttaccagagatccagaaagaacatcgcaatctgcttcaagaattaaaagttattcaagaaaatgaacatgctcttcaaaaagatgcacttagtattaagttgaaacttgaacaaatagatggtcacattgctgaacataattctaaaataaaatattggcacaaagagatttcaaaaatatcactgcatcctatagaagataatcctattgaagagatttcggttctaagcccagaggatcttgaagcgatcaagaatccagattctataacaaatcaaattgcacttttggaagcccggtgtcatgaaatgaaaccaaacctcggtgccatcgcagagtataaaaagaaggaagaattgtatttgcaacgggtagcagaattggacaaaattacttatgaaagagacagttttagacaggcatatgaagatcttcggaaacaaaggcttaatgaatttatggcaggtttttatataataacaaataaattaaaggaaaattaccaaatgcttactttgggaggggacgccgaactcgagcttgtagacagcttggatcctttctctgaaggaatcatgttcagtgttcgaccacctaagaaaagttggaaaaagatcttcaacctttcgggaggagagaaaacacttagttcattggctttagtatttgctcttcaccactacaagcccactcccctttacttcatggatgagattgatgcagcccttgattttaaaaatgtgtccattgttgcattttatatatatgaacaaacaaaaaatgcacagttcataataatttctcttcgaaataatatgtttgagatttcggatagacttattggaatttacaagacatacaacataacaaaaagtgttgctgtaaatccaaaagaaattgcatctaagggactttgttgaactttatgctgaagattcttcaagttgattcagtgtattactgatttttttctatttgtaaaggattatgagttgtataaaatacatactccctaaactagatcatgaaactggtttctgttttatgcagttgtcatttgtaaagtctaataaaatattctctataattgcttctagattacaaaaatatgacaatcttgtaagtagcagactatggagaaaaatgagttacctggagggtcaggtaacttgccaaactaaaaagtatgttagttgaggcaaagtcctaagcaaggttgtgctatcaaggctcagcataccttcgtgggcctttgatttaccaacactggaaatgcctgccaactaatcttggatagattctttaaggcattccacttagcttgccagttgagacaatcaccacagttattacccaaatactatgaacatatttttgtaaaccagtcattctgaattatagtgatgagaatttaaatatatgcttttctagaatttgatgtttgaccatttatgacttaattaccagagagccagtaaattaggacagtgtttcaacaagcctaggctatctcgtaagttgaaaaatatcccactatagttgcttcatgagtatgaagtaagatggcctctgatttacactggttcaatttacaaattttcaactttatgataggtttatcagggtactaaatgcatttcaacttgatagtttcaacttatgataggtttaccaggatgtagtcccactgttgaggagcatctatttaggggttaattactttagtaataagtggaaagtaagataccttgagtaatgtttgcctataaaattgtcagcgtatttttacactattggctcaagaatgttataatgctaagggacataagttggcaaccacttggtttttggaaggactttcggtattgtattagaagtctgccctagctgttaaatttctgggtatttatcctaaggaattaattaaagagttaattgttcctttcttcagtgggccattgttttagatatttaaaaaatccaacagtttctatcataatgtaactgtaaaaatgtaaacacattattagcatggacttttaaataaagatttaaagaaagcaagatcggaaattcaag

SEQ ID NO: 30144 - DNA, 3985 bp, Homo sapiens
ttggaacgatacagagaagattagcatggcccctgcgcaaggatgacacgcaaattcgtgaagcgttccatatttttaaagaaactgaataaaattacaaaatttattgaggagaataaagaaaaatttacacagctagatttggaagatgttcaagttagagaaaagttaaaacatgccacgagtaaagccaaaaaactggagaaacaacttcaaaaagataaagaaaaggttgaagaatttaaaagtatacctgccaagagtaacaatatcattaatgaaacaacaaccagaaacaatgccctcgagaaggaaaaagagaaagaagaaaaaaaattaaaggaagttatggatagccttaaacaggaaacacaagggcttcagaaagaaaaagaaagtcgagagaaagaacttatgggtttcagcaaatcggtaaatgaagcacgttcaaagatggatgtagcccagtcagaacttgatatctatctcagtcgtcataatactgcagtgtctcaattaactaaggctaaggaagctctaattgcagcttctgagactctcaaagaaaggaaagctgcaatcagagatatagaaggaaaactccctcaaactgaacaagaattaaaggagaaagaaaaagaacttcaaaaacttacacaagaagaaacaaactttaaaagtttggttcatgatctctttcaaaaagttgaagaagcaaagagctcattagcaatgaatcgaagtagggggaaagtccttgatgcaataattcaagaaaaaaaatctggcaggattccaggaatatatggaagattgggggacttaggagccattgatgaaaaatacgacgtggctatatcatcctgttgtcatgcactggactacattgttgttgattctattgatatagcccaagaatgtgtaaacttccttaaaagacaaaatattggagttgcaacctttataggtttagataagatggctgtatgggcgaaaaagatgaccgaaattcaaactcctgaaaatactcctcgtttatttgatttagtaaaagtaaaagatgagaaaattcgccaagctttttattttgctttacgagataccttagtagctgacaacttggatcaagccacaagagtagcatatcaaaaagatagaagatggagagtggtaactttacagggacaaatcatagaacagtcaggtacaatgactggtggtggaagcaaagtaatgaaaggaagaatgggttcctcacttgttattgaaatctctgaagaagaggtaaacaaaatggaatcacagttgcaaaacgactctaaaaaagcaatgcaaatccaagaacagaaagtacaacttgaagaaagagtagttaagttacggcatagtgaacgagaaatgaggaacacactagaaaaatttactgcaagcatccagcgtttaatagagcaagaagaatatttgaatgtccaagttaaggaacttgaagctaatgtacttgctacagcccctgacaaaaaaaagcagaaattgctagaagaaaacgttagtgctttcaaaacagaatatgatgctgtggctgagaaagctggtaaagtagaagctgaggttaaacgcttacacaataccatcgtagaaatcaataatcataaactcaaggcccaacaagacaaacttgataaaataaataagcaattagatgaatgtgcttctgctattactaaagcccaagtagcaatcaagactgctgacagaaaccttcaaaaggcacaagactctgtcttgcgtacagagaaagaaataaaagatactgagaaagaggtggatgacctaacagcagagctgaaaagtcttgaggacaaagcagcagaggtcgtaaagaatacaaatgctgcagaggaatccttaccagagatccagaaagaacatcgcaatctgcttcaagaattaaaagttattcaagaaaatgaacatgctcttcaaaaagatgcacttagtattaagttgaaacttgaacaaatagatggtcacattgctgaacataattctaaaataaaatattggcacaaagagatttcaaaaatatcactgcatcctatagaagataatcctattgaagagatttcggttctaagcccagaggatcttgaagcgatcaagaatccagattctataacaaatcaaattgcacttttggaagcccggtgtcatgaaatgaaaccaaacctcggtgccatcgcagagtataaaaagaaggaagaattgtatttgcaacgggtagcagaattggacaaaattacttatgaaagagacagttttagacaggcatatgaagatcttcggaaacaaaggcttaatgaatttatggcaggtttttatataataacaaataaattaaaggaaaattaccaaatgcttactttgggaggggacgccgaactcgagcttgtagacagcttggatcctttctctgaaggaatcatgttcagtgttcgaccacctaagaaaagttggaaaaagatcttcaacctttcgggaggagagaaaacacttagttcattggctttagtatttgctcttcaccactacaagcccactcccctttacttcatggatgagattgatgcagcccttgattttaaaaatgtgtccattgttgcattttatatatatgaacaaacaaaaaatgcacagttcataataatttctcttcgaaataatatgtttgagatttcggatagacttattggaatttacaagacatacaacataacaaaaagtgttgctgtaaatccaaaagaaattgcatctaagggactttgttgaactttatgctgaagattcttcaagttgattcagtgtattactgatttttttctatttgtaaaggattatgagttgtataaaatacatactccctaaactagatcatgaaactggtttctgttttatgcagttgtcatttgtaaagtctaataaaatattctctataattgcttctagattacaaaaatatgacaatcttgtaagtagcagactatggagaaaaatgagttacctggagggtcaggtaacttgccaaactaaaaagtatgttagttgaggcaaagtcctaagcaaggttgtgctatcaaggctcagcataccttcgtgggcctttgatttaccaacactggaaatgcctgccaactaatcttggatagattctttaaggcattccacttagcttgccagttgagacaatcaccacagttattacccaaatactatgaacatatttttgtaaaccagtcattctgaattatagtgatgagaatttaaatatatgcttttctagaatttgatgtttgaccatttatgacttaattaccagagagccagtaaattaggacagtgtttcaacaagcctaggctatctcgtaagttgaaaaatatcccactatagttgcttcatgagtatgaagtaagatggcctctgatttacactggttcaatttacaaattttcaactttatgataggtttatcagggtactaaatgcatttcaacttgatagtttcaacttatgataggtttaccaggatgtagtcccactgttgaggagcatctatttaggggttaattactttagtaataagtggaaagtaagataccttgagtaatgtttgcctataaaattgtcagcgtatttttacactattggctcaagaatgttataatgctaagggacataagttggcaaccacttggtttttggaaggactttcggtattgtattagaagtctgccctagctgttaaatttctgggtatttatcctaaggaattaattaaagagttaattgttcctttcttcagtgggccattgttttagatatttaaaaaatccaacagtttctatcataatgtaactgtaaaaatgtaaacacattattagcatggacttttaaataaagatttaaagaaagcaagatcggaaattcaag

SEQ ID NO: 30145 - DNA, 4107 bp, Homo sapiens
caggaaggatagtttagaaaattccgtgtagtcagagcatatttatagctaaagaagaataattacaacctgaaatcaggagagaaggatgacagacctgaggccctgccagagacagttttccttcataagaggtcaggtgtttgtagaagtagttttactattagattgagagaatatagaaattacagtgaatagtcgggaaaatacttgttaaagctagctaatttaactctgattataaagaaaagaagaactagaggaccctgagaaatgcctttaaatatgtcaaatattgatagtattgggtaacataaagatgtatgctcctataacttgttttataatctcaggttgaagaatttaaaagtatacctgccaagagtaacaatatcattaatgaaacaacaaccagaaacaatgccctcgagaaggaaaaagagaaagaagaaaaaaaattaaaggaagttatggatagccttaaacaggaaacacaagggcttcagaaagaaaaagaaagtcgagagaaagaacttatgggtttcagcaaatcggtaaatgaagcacgttcaaagatggatgtagcccagtcagaacttgatatctatctcagtcgtcataatactgcagtgtctcaattaactaaggctaaggaagctctaattgcagcttctgagactctcaaagaaaggaaagctgcaatcagagatatagaaggaaaactccctcaaactgaacaagaattaaaggagaaagaaaaagaacttcaaaaacttacacaagaagaaacaaactttaaaagtttggttcatgatctctttcaaaaagttgaagaagcaaagagctcattagcaatgaatcgaagtagggggaaagtccttgatgcaataattcaagaaaaaaaatctggcaggattccaggaatatatggaagattgggggacttaggagccattgatgaaaaatacgacgtggctatatcatcctgttgtcatgcactggactacattgttgttgattctattgatatagcccaagaatgtgtaaacttccttaaaagacaaaatattggagttgcaacctttataggtttagataagatggctgtatgggcgaaaaagatgaccgaaattcaaactcctgaaaatactcctcgtttatttgatttagtaaaagtaaaagatgagaaaattcgccaagctttttattttgctttacgagataccttagtagctgacaacttggatcaagccacaagagtagcatatcaaaaagatagaagatggagagtggtaactttacagggacaaatcatagaacagtcaggtacaatgactggtggtggaagcaaagtaatgaaaggaagaatgggttcctcacttgttattgaaatctctgaagaagaggtaaacaaaatggaatcacagttgcaaaacgactctaaaaaagcaatgcaaatccaagaacagaaagtacaacttgaagaaagagtagttaagttacggcatagtgaacgagaaatgaggaacacactagaaaaatttactgcaagcatccagcgtttaatagagcaagaagaatatttgaatgtccaagttaaggaacttgaagctaatgtacttgctacagcccctgacaaaaaaaagcagaaattgctagaagaaaacgttagtgctttcaaaacagaatatgatgctgtggctgagaaagctggtaaagtagaagctgaggttaaacgcttacacaataccatcgtagaaatcaataatcataaactcaaggcccaacaagacaaacttgataaaataaataagcaattagatgaatgtgcttctgctattactaaagcccaagtagcaatcaagactgctgacagaaaccttcaaaaggcacaagactctgtcttgcgtacagagaaagaaataaaagatactgagaaagaggtggatgacctaacagcagagctgaaaagtcttgaggacaaagcagcagaggtcgtaaagaatacaaatgctgcagaggaatccttaccagagatccagaaagaacatcgcaatctgcttcaagaattaaaagttattcaagaaaatgaacatgctcttcaaaaagatgcacttagtattaagttgaaacttgaacaaatagatggtcacattgctgaacataattctaaaataaaatattggcacaaagagatttcaaaaatatcactgcatcctatagaagataatcctattgaagagatttcggttctaagcccagaggatcttgaagcgatcaagaatccagattctataacaaatcaaattgcacttttggaagcccggtgtcatgaaatgaaaccaaacctcggtgccatcgcagagtataaaaagaaggaagaattgtatttgcaacgggtagcagaattggacaaaattacttatgaaagagacagttttagacaggcatatgaagatcttcggaaacaaaggcttaatgaatttatggcaggtttttatataataacaaataaattaaaggaaaattaccaaatgcttactttgggaggggacgccgaactcgagcttgtagacagcttggatcctttctctgaaggaatcatgttcagtgttcgaccacctaagaaaagttggaaaaagatcttcaacctttcgggaggagagaaaacacttagttcattggctttagtatttgctcttcaccactacaagcccactcccctttacttcatggatgagattgatgcagcccttgattttaaaaatgtgtccattgttgcattttatatatatgaacaaacaaaaaatgcacagttcataataatttctcttcgaaataatatgtttgagatttcggatagacttattggaatttacaagacatacaacataacaaaaagtgttgctgtaaatccaaaagaaattgcatctaagggactttgttgaactttatgctgaagattcttcaagttgattcagtgtattactgatttttttctatttgtaaaggattatgagttgtataaaatacatactccctaaactagatcatgaaactggtttctgttttatgcagttgtcatttgtaaagtctaataaaatattctctataattgcttctagattacaaaaatatgacaatcttgtaagtagcagactatggagaaaaatgagttacctggagggtcaggtaacttgccaaactaaaaagtatgttagttgaggcaaagtcctaagcaaggttgtgctatcaaggctcagcataccttcgtgggcctttgatttaccaacactggaaatgcctgccaactaatcttggatagattctttaaggcattccacttagcttgccagttgagacaatcaccacagttattacccaaatactatgaacatatttttgtaaaccagtcattctgaattatagtgatgagaatttaaatatatgcttttctagaatttgatgtttgaccatttatgacttaattaccagagagccagtaaattaggacagtgtttcaacaagcctaggctatctcgtaagttgaaaaatatcccactatagttgcttcatgagtatgaagtaagatggcctctgatttacactggttcaatttacaaattttcaactttatgataggtttatcagggtactaaatgcatttcaacttgatagtttcaacttatgataggtttaccaggatgtagtcccactgttgaggagcatctatttaggggttaattactttagtaataagtggaaagtaagataccttgagtaatgtttgcctataaaattgtcagcgtatttttacactattggctcaagaatgttataatgctaagggacataagttggcaaccacttggtttttggaaggactttcggtattgtattagaagtctgccctagctgttaaatttctgggtatttatcctaaggaattaattaaagagttaattgttcctttcttcagtgggccattgttttagatatttaaaaaatccaacagtttctatcataatgtaactgtaaaaatgtaaacacattattagcatggacttttaaataaagatttaaagaaagcaagatcggaaattcaag

SEQ ID NO: 30146 - DNA, 3917 bp, Homo sapiens
tgtgcttatagaatctcctttcttaaatcgaatataaaatgtatggtttcatttcagtgtaggtttgaaagtaaatatctgtccagatttaatgaactcatattttaacagagtcgagagaaagaacttatgggtttcagcaaatcggtaaatgaaggcacgtgttgaagaatttaaaagtatacctgccaagagtaacaatatcattaatgaaacaacaaccagaaacaatgccctcgagaaggaaaaagagaaagaagaaaaaaaattaaaggaagttatggatagccttaaacaggaaacacaagggcttcagaaagaaaaagaaagtcgagagaaagaacttatgggtttcagcaaatcggtaaatgaagcacgttcaaagatggatgtagcccagtcagaacttgatatctatctcagtcgtcataatactgcagtgtctcaattaactaaggctaaggaagctctaattgcagcttctgagactctcaaagaaaggaaagctgcaatcagagatatagaaggaaaactccctcaaactgaacaagaattaaaggagaaagaaaaagaacttcaaaaacttacacaagaagaaacaaactttaaaagtttggttcatgatctctttcaaaaagttgaagaagcaaagagctcattagcaatgaatcgaagtagggggaaagtccttgatgcaataattcaagaaaaaaaatctggcaggattccaggaatatatggaagattgggggacttaggagccattgatgaaaaatacgacgtggctatatcatcctgttgtcatgcactggactacattgttgttgattctattgatatagcccaagaatgtgtaaacttccttaaaagacaaaatattggagttgcaacctttataggtttagataagatggctgtatgggcgaaaaagatgaccgaaattcaaactcctgaaaatactcctcgtttatttgatttagtaaaagtaaaagatgagaaaattcgccaagctttttattttgctttacgagataccttagtagctgacaacttggatcaagccacaagagtagcatatcaaaaagatagaagatggagagtggtaactttacagggacaaatcatagaacagtcaggtacaatgactggtggtggaagcaaagtaatgaaaggaagaatgggttcctcacttgttattgaaatctctgaagaagaggtaaacaaaatggaatcacagttgcaaaacgactctaaaaaagcaatgcaaatccaagaacagaaagtacaacttgaagaaagagtagttaagttacggcatagtgaacgagaaatgaggaacacactagaaaaatttactgcaagcatccagcgtttaatagagcaagaagaatatttgaatgtccaagttaaggaacttgaagctaatgtacttgctacagcccctgacaaaaaaaagcagaaattgctagaagaaaacgttagtgctttcaaaacagaatatgatgctgtggctgagaaagctggtaaagtagaagctgaggttaaacgcttacacaataccatcgtagaaatcaataatcataaactcaaggcccaacaagacaaacttgataaaataaataagcaattagatgaatgtgcttctgctattactaaagcccaagtagcaatcaagactgctgacagaaaccttcaaaaggcacaagactctgtcttgcgtacagagaaagaaataaaagatactgagaaagaggtggatgacctaacagcagagctgaaaagtcttgaggacaaagcagcagaggtcgtaaagaatacaaatgctgcagaggaatccttaccagagatccagaaagaacatcgcaatctgcttcaagaattaaaagttattcaagaaaatgaacatgctcttcaaaaagatgcacttagtattaagttgaaacttgaacaaatagatggtcacattgctgaacataattctaaaataaaatattggcacaaagagatttcaaaaatatcactgcatcctatagaagataatcctattgaagagatttcggttctaagcccagaggatcttgaagcgatcaagaatccagattctataacaaatcaaattgcacttttggaagcccggtgtcatgaaatgaaaccaaacctcggtgccatcgcagagtataaaaagaaggaagaattgtatttgcaacgggtagcagaattggacaaaattacttatgaaagagacagttttagacaggcatatgaagatcttcggaaacaaaggcttaatgaatttatggcaggtttttatataataacaaataaattaaaggaaaattaccaaatgcttactttgggaggggacgccgaactcgagcttgtagacagcttggatcctttctctgaaggaatcatgttcagtgttcgaccacctaagaaaagttggaaaaagatcttcaacctttcgggaggagagaaaacacttagttcattggctttagtatttgctcttcaccactacaagcccactcccctttacttcatggatgagattgatgcagcccttgattttaaaaatgtgtccattgttgcattttatatatatgaacaaacaaaaaatgcacagttcataataatttctcttcgaaataatatgtttgagatttcggatagacttattggaatttacaagacatacaacataacaaaaagtgttgctgtaaatccaaaagaaattgcatctaagggactttgttgaactttatgctgaagattcttcaagttgattcagtgtattactgatttttttctatttgtaaaggattatgagttgtataaaatacatactccctaaactagatcatgaaactggtttctgttttatgcagttgtcatttgtaaagtctaataaaatattctctataattgcttctagattacaaaaatatgacaatcttgtaagtagcagactatggagaaaaatgagttacctggagggtcaggtaacttgccaaactaaaaagtatgttagttgaggcaaagtcctaagcaaggttgtgctatcaaggctcagcataccttcgtgggcctttgatttaccaacactggaaatgcctgccaactaatcttggatagattctttaaggcattccacttagcttgccagttgagacaatcaccacagttattacccaaatactatgaacatatttttgtaaaccagtcattctgaattatagtgatgagaatttaaatatatgcttttctagaatttgatgtttgaccatttatgacttaattaccagagagccagtaaattaggacagtgtttcaacaagcctaggctatctcgtaagttgaaaaatatcccactatagttgcttcatgagtatgaagtaagatggcctctgatttacactggttcaatttacaaattttcaactttatgataggtttatcagggtactaaatgcatttcaacttgatagtttcaacttatgataggtttaccaggatgtagtcccactgttgaggagcatctatttaggggttaattactttagtaataagtggaaagtaagataccttgagtaatgtttgcctataaaattgtcagcgtatttttacactattggctcaagaatgttataatgctaagggacataagttggcaaccacttggtttttggaaggactttcggtattgtattagaagtctgccctagctgttaaatttctgggtatttatcctaaggaattaattaaagagttaattgttcctttcttcagtgggccattgttttagatatttaaaaaatccaacagtttctatcataatgtaactgtaaaaatgtaaacacattattagcatggacttttaaataaagatttaaagaaagcaagatcggaaattcaag

SEQ ID NO: 30147 - DNA, 3802 bp, Homo sapiens
ggtaccgtggctcagaaagaaaagaaagtcgagagaaagaacttatgggtttcagcaaatcggtaaatgaaggcacgtagtaacaatatcattaatgaaacaacaaccagaaacaatgccctcgagaaggaaaaagagaaagaagaaaaaaaattaaaggaagttatggatagccttaaacaggaaacacaagggcttcagaaagaaaaagaaagtcgagagaaagaacttatgggtttcagcaaatcggtaaatgaagcacgttcaaagatggatgtagcccagtcagaacttgatatctatctcagtcgtcataatactgcagtgtctcaattaactaaggctaaggaagctctaattgcagcttctgagactctcaaagaaaggaaagctgcaatcagagatatagaaggaaaactccctcaaactgaacaagaattaaaggagaaagaaaaagaacttcaaaaacttacacaagaagaaacaaactttaaaagtttggttcatgatctctttcaaaaagttgaagaagcaaagagctcattagcaatgaatcgaagtagggggaaagtccttgatgcaataattcaagaaaaaaaatctggcaggattccaggaatatatggaagattgggggacttaggagccattgatgaaaaatacgacgtggctatatcatcctgttgtcatgcactggactacattgttgttgattctattgatatagcccaagaatgtgtaaacttccttaaaagacaaaatattggagttgcaacctttataggtttagataagatggctgtatgggcgaaaaagatgaccgaaattcaaactcctgaaaatactcctcgtttatttgatttagtaaaagtaaaagatgagaaaattcgccaagctttttattttgctttacgagataccttagtagctgacaacttggatcaagccacaagagtagcatatcaaaaagatagaagatggagagtggtaactttacagggacaaatcatagaacagtcaggtacaatgactggtggtggaagcaaagtaatgaaaggaagaatgggttcctcacttgttattgaaatctctgaagaagaggtaaacaaaatggaatcacagttgcaaaacgactctaaaaaagcaatgcaaatccaagaacagaaagtacaacttgaagaaagagtagttaagttacggcatagtgaacgagaaatgaggaacacactagaaaaatttactgcaagcatccagcgtttaatagagcaagaagaatatttgaatgtccaagttaaggaacttgaagctaatgtacttgctacagcccctgacaaaaaaaagcagaaattgctagaagaaaacgttagtgctttcaaaacagaatatgatgctgtggctgagaaagctggtaaagtagaagctgaggttaaacgcttacacaataccatcgtagaaatcaataatcataaactcaaggcccaacaagacaaacttgataaaataaataagcaattagatgaatgtgcttctgctattactaaagcccaagtagcaatcaagactgctgacagaaaccttcaaaaggcacaagactctgtcttgcgtacagagaaagaaataaaagatactgagaaagaggtggatgacctaacagcagagctgaaaagtcttgaggacaaagcagcagaggtcgtaaagaatacaaatgctgcagaggaatccttaccagagatccagaaagaacatcgcaatctgcttcaagaattaaaagttattcaagaaaatgaacatgctcttcaaaaagatgcacttagtattaagttgaaacttgaacaaatagatggtcacattgctgaacataattctaaaataaaatattggcacaaagagatttcaaaaatatcactgcatcctatagaagataatcctattgaagagatttcggttctaagcccagaggatcttgaagcgatcaagaatccagattctataacaaatcaaattgcacttttggaagcccggtgtcatgaaatgaaaccaaacctcggtgccatcgcagagtataaaaagaaggaagaattgtatttgcaacgggtagcagaattggacaaaattacttatgaaagagacagttttagacaggcatatgaagatcttcggaaacaaaggcttaatgaatttatggcaggtttttatataataacaaataaattaaaggaaaattaccaaatgcttactttgggaggggacgccgaactcgagcttgtagacagcttggatcctttctctgaaggaatcatgttcagtgttcgaccacctaagaaaagttggaaaaagatcttcaacctttcgggaggagagaaaacacttagttcattggctttagtatttgctcttcaccactacaagcccactcccctttacttcatggatgagattgatgcagcccttgattttaaaaatgtgtccattgttgcattttatatatatgaacaaacaaaaaatgcacagttcataataatttctcttcgaaataatatgtttgagatttcggatagacttattggaatttacaagacatacaacataacaaaaagtgttgctgtaaatccaaaagaaattgcatctaagggactttgttgaactttatgctgaagattcttcaagttgattcagtgtattactgatttttttctatttgtaaaggattatgagttgtataaaatacatactccctaaactagatcatgaaactggtttctgttttatgcagttgtcatttgtaaagtctaataaaatattctctataattgcttctagattacaaaaatatgacaatcttgtaagtagcagactatggagaaaaatgagttacctggagggtcaggtaacttgccaaactaaaaagtatgttagttgaggcaaagtcctaagcaaggttgtgctatcaaggctcagcataccttcgtgggcctttgatttaccaacactggaaatgcctgccaactaatcttggatagattctttaaggcattccacttagcttgccagttgagacaatcaccacagttattacccaaatactatgaacatatttttgtaaaccagtcattctgaattatagtgatgagaatttaaatatatgcttttctagaatttgatgtttgaccatttatgacttaattaccagagagccagtaaattaggacagtgtttcaacaagcctaggctatctcgtaagttgaaaaatatcccactatagttgcttcatgagtatgaagtaagatggcctctgatttacactggttcaatttacaaattttcaactttatgataggtttatcagggtactaaatgcatttcaacttgatagtttcaacttatgataggtttaccaggatgtagtcccactgttgaggagcatctatttaggggttaattactttagtaataagtggaaagtaagataccttgagtaatgtttgcctataaaattgtcagcgtatttttacactattggctcaagaatgttataatgctaagggacataagttggcaaccacttggtttttggaaggactttcggtattgtattagaagtctgccctagctgttaaatttctgggtatttatcctaaggaattaattaaagagttaattgttcctttcttcagtgggccattgttttagatatttaaaaaatccaacagtttctatcataatgtaactgtaaaaatgtaaacacattattagcatggacttttaaataaagatttaaagaaagcaagatcggaaattcaag

SEQ ID NO: 30148 - DNA, 1427 bp, Homo sapiens
tcctcccacaccacccaaaacacaaacccactcccccctttactcaagtgatagatgaatgcaggcccttgattttaaaaaatggtgtcccattgttggcattttaataatatatgaacaaacaaaaaatgcacagttcataataatttctcttcgaaataatatgtttgagatttcggatagacttattggaatttacaagacatacaacataacaaaaagtgttgctgtaaatccaaaagaaattgcatctaagggactttgttgaactttatgctgaagattcttcaagttgattcagtgtattactgatttttttctatttgtaaaggattatgagttgtataaaatacatactccctaaactagatcatgaaactggtttctgttttatgcagttgtcatttgtaaagtctaataaaatattctctataattgcttctagattacaaaaatatgacaatcttgtaagtagcagactatggagaaaaatgagttacctggagggtcaggtaacttgccaaactaaaaagtatgttagttgaggcaaagtcctaagcaaggttgtgctatcaaggctcagcataccttcgtgggcctttgatttaccaacactggaaatgcctgccaactaatcttggatagattctttaaggcattccacttagcttgccagttgagacaatcaccacagttattacccaaatactatgaacatatttttgtaaaccagtcattctgaattatagtgatgagaatttaaatatatgcttttctagaatttgatgtttgaccatttatgacttaattaccagagagccagtaaattaggacagtgtttcaacaagcctaggctatctcgtaagttgaaaaatatcccactatagttgcttcatgagtatgaagtaagatggcctctgatttacactggttcaatttacaaattttcaactttatgataggtttatcagggtactaaatgcatttcaacttgatagtttcaacttatgataggtttaccaggatgtagtcccactgttgaggagcatctatttaggggttaattactttagtaataagtggaaagtaagataccttgagtaatgtttgcctataaaattgtcagcgtatttttacactattggctcaagaatgttataatgctaagggacataagttggcaaccacttggtttttggaaggactttcggtattgtattagaagtctgccctagctgttaaatttctgggtatttatcctaaggaattaattaaagagttaattgttcctttcttcagtgggccattgttttagatatttaaaaaatccaacagtttctatcataatgtaactgtaaaaatgtaaacacattattagcatggacttttaaataaagatttaaagaaagcaagatcggaaattcaag

SEQ ID NO: 30149 - DNA, 3114 bp, Homo sapiens
ggtggtgtgcgtggtattccggggttgccggggattgtggcgggtgcccatgatgtggcggtgtcagggggctgaggccgggtgatcccttggaccccggatgtggagggttgcagtgggttggggtcacgaccgtgtggctcccgcctgggttgcccgggtgagactctggtctccgggaggtgcagttaagcttcttgttaagatcctactaaagtagacctaactgctttttaagtatttaagtatagtacttaagtagagtaagcaaaacgtcagtaagaattttcaaataagatttatagccaacggttcactttggagaattacttaccacacatgatcttaaatactttaaaaccatttaggtaaacagccactaaaggaatgaaaaaaaaaaatctattcttcaactaggatataaaatagagaaacttttaacaatactataattaagaaaatccaataagatttataagcattaaaaggatatgctttggttcttttaaaagagatatctttagtctcatgactccacttccagccaaaatttaagatgccacttgattgtatttacaggttgtctttccaaatatttttaataatagtgctgctgctgtagaccacagagaaaagaatccctcgctcttccttttcacttagtagaaacttctaccgcgtaggtcccgccaggagttcgcgcatgcgcaggagcgacaataagatggcggtgataatcgccgcactttttttcaaattagtggatcccagaaatcattgcgcgcatttgtaacgaatttccgttcgagtttgtattttaggcgccattttcgagtgaaggacccggagccgaaacaccggtaggagcggggaggtgggtactacacaaccgtctccagccttggtctgagtggactgtcctgcagcgaccatgccccgtaaaggcacccagccctccactgcccggcgcagagaggaagggccgccgccgccgtcccctgacggcgccagcagcgacgcggagcctgagccgccgtccggccgcacggagagcccagccaccgccgcagagactgcaagtgaggaacttgataatagaagtttagaagagattttgaacagcattcctcctcccccgcctccagcaatgaccaatgaagctggagctcctcggcttatgataactcatattgtaaaccagaacttcaaatcctatgctggggagaaaattctgggacctttccataagcgcttttcctgtattatcgggccaaatggcagtggcaaatccaatgttattgattctatgctttttgtgtttggctatcgagcacaaaaaataagatctaaaaaactctcagtattaatacataattctgatgaacacaaggacattcagagttgtacagtagaagttcattttcaaaagataattgataaggaaggggatgattatgaagtcattcctaacagtaatttctatgtatccagaacggcctgcagagataatacttctgtctatcacataagtggaaagaaaaagacatttaaggatgttggaaatcttcttcgaagccatggaattgacttggaccataatagatttttaattttacagggtgaagttgaacaaattgctatgatgaaaccaaaaggccagactgaacacgatgagggtatgcttgaatatttagaagatataattggttgtggacggctaaatgaacctattaaagtcttgtgtcggagagttgaaatattaaatgaacacagaggagagaagttaaacagggtaaagatggtggaaaaggaaaaggatgccttagaaggagagaaaaacatagctatcgaatttcttaccttggaaaatgaaatatttagaaaaaagaatcatgtttgtcaatattatatttatgagttgcagaaacgaattgctgaaatggaaactcaaaaggaaaaaattcatgaagataccaaagaaattaatgagaagagcaatatactatcaaatgaaatgaaagctaagaataaagatgtaaaagatacagaaaagaaactgaataaaattacaaaatttattgaggagaataaagaaaaatttacacagctagatttggaagatgttcaagttagagaaaagttaaaacatgccacgagtaaagccaaaaaactggagaaacaacttcaaaaagataaagaaaaggttgaagaatttaaaagtatacctgccaagagtaacaatatcattaatgaaacaacaaccagaaacaatgccctcgagaaggaaaaagagaaagaagaaaaaaaattaaaggaagttatggatagccttaaacaggaaacacaagggcttcagaaagaaaaagaaagtcgagagaaagaacttatgggtttcagcaaatcggtaaatgaagcacgttcaaagatggatgtagcccagtcagaacttgatatctatctcagtcgtcataatactgcagtgtctcaattaactaaggctaaggaagctctaattgcagcttctgagactctcaaagaaaggaaagctgcaatcagagatatagaaggaaaactccctcaaactgaacaagaattaaaggagaaagaaaaagaacttcaaaaacttacacaagaagaaacaaactttaaaagtttggttcatgatctctttcaaaaagttgaagaagcaaagagctcattagcaatgaatcgaagtagggggaaagtccttgatgcaataattcaagaaaaaaaatctggcaggattccaggaatatatggaagattggtaaagtagatttttggggggcatggctttactttttttttttaagaaagtgtaacttatttttttgccttgacaaccatatttcaagtgtcactgtatataaaataagattcattttgtttgttttaaggcacatttatttttaaacattttgcccttacagtttcttgtttacttagctttagataaatacaattatttcatacatatcaagaaaaatactagtaatgtcacacaaacttaaaaccattttatccttttttttaaaagagagactttagccaggcacaatggtgtgtgcctgtagtcccagctgttggagaggc

SEQ ID NO: 30150 - DNA, 2688 bp, Homo sapiens
ggtggtgtgcgtggtattccggggttgccggggattgtggcgggtgcccatgatgtggcggtgtcagggggctgaggccgggtgatcccttggaccccggatgtggagggttgcagtgggttggggtcacgaccgtgtggctcccgcctgggttgcccgggtgagactctggtctccgggaggtgcagttaagcttcttgttaagatcctactaaagtagacctaactgctttttaagtatttaagtatagtacttaagtagagtaagcaaaacgtcagtaagaattttcaaataagatttatagccaacggttcactttggagaattacttaccacacatgatcttaaatactttaaaaccatttaggtaaacagccactaaaggaatgaaaaaaaaaaatctattcttcaactaggatataaaatagagaaacttttaacaatactataattaagaaaatccaataagatttataagcattaaaaggatatgctttggttcttttaaaagagatatctttagtctcatgactccacttccagccaaaatttaagatgccacttgattgtatttacaggttgtctttccaaatatttttaataatagtgctgctgctgtagaccacagagaaaagaatccctcgctcttccttttcacttagtagaaacttctaccgcgtaggtcccgccaggagttcgcgcatgcgcaggagcgacaataagatggcggtgataatcgccgcactttttttcaaattagtggatcccagaaatcattgcgcgcatttgtaacgaatttccgttcgagtttgtattttaggcgccattttcgagtgaaggacccggagccgaaacaccggtaggagcggggaggtgggtactacacaaccgtctccagccttggtctgagtggactgtcctgcagcgaccatgccccgtaaaggcacccagccctccactgcccggcgcagagaggaagggccgccgccgccgtcccctgacggcgccagcagcgacgcggagcctgagccgccgtccggccgcacggagagcccagccaccgccgcagagactgcaagtgaggaacttgataatagaagtttagaagagattttgaacagcattcctcctcccccgcctccagcaatgaccaatgaagctggagctcctcggcttatgataactcatattgtaaaccagaacttcaaatcctatgctggggagaaaattctgggacctttccataagcgcttttcctgtattatcgggccaaatggcagtggcaaatccaatgttattgattctatgctttttgtgtttggctatcgagcacaaaaaataagatctaaaaaactctcagtattaatacataattctgatgaacacaaggacattcagagttgtacagtagaagttcattttcaaaagataattgataaggaaggggatgattatgaagtcattcctaacagtaatttctatgtatccagaacggcctgcagagataatacttctgtctatcacataagtggaaagaaaaagacatttaaggatgttggaaatcttcttcgaagccatggaattgacttggaccataatagatttttaattttacagggtgaagttgaacaaattgctatgatgaaaccaaaaggccagactgaacacgatgagggtatgcttgaatatttagaagatataattggttgtggacggctaaatgaacctattaaagtcttgtgtcggagagttgaaatattaaatgaacacagaggagagaagttaaacagggtaaagatggtggaaaaggaaaaggatgccttagaaggagagaaaaacatagctatcgaatttcttaccttggaaaatgaaatatttagaaaaaagaatcatgtttgtcaatattatatttatgagttgcagaaacgaattgctgaaatggaaactcaaaaggaaaaaattcatgaagataccaaagaaattaatgagaagagcaatatactatcaaatgaaatgaaagctaagaataaagatgtaaaagatacagaaaagaaactgaataaaattacaaaatttattgaggagaataaagaaaaatttacacagctagatttggaagatgttcaagttagagaaaagttaaaacatgccacgagtaaagccaaaaaactggagaaacaacttcaaaaagataaagaaaaggttgaagaatttaaaagtatacctgccaagagtaacaatatcattaatgaaacaacaaccagaaacaatgccctcgagaaggaaaaagagaaagaagaaaaaaaattaaaggaagttatggatagccttaaacaggaaacacaagggcttcagaaagaaaaagaaagtcgagagaaagaacttatgggtttcagcaaatcggtaaatgaagcacgttcaaagatggatgtagcccagtcagaacttgatatctatctcagtcgtcataatactgcagtgtctcaattaactaaggctaaggaagctctaattgcagcttctgagactctcaaagaaaggaaagctgcaatcagagatatagaaggaaaactccctcaaactgaacaagaattaaaggagaaagaaaaacaaaaaattaaaggaagttatggatagccttaaccggatacaccagggcttcagaaagaaaaagaaagtcgagagac

SEQ ID NO: 30151 - DNA, 2580 bp, Homo sapiens
ggtggtgtgcgtggtattccggggttgccggggattgtggcgggtgcccatgatgtggcggtgtcagggggctgaggccgggtgatcccttggaccccggatgtggagggttgcagtgggttggggtcacgaccgtgtggctcccgcctgggttgcccgggtgagactctggtctccgggaggtgcagttaagcttcttgttaagatcctactaaagtagacctaactgctttttaagtatttaagtatagtacttaagtagagtaagcaaaacgtcagtaagaattttcaaataagatttatagccaacggttcactttggagaattacttaccacacatgatcttaaatactttaaaaccatttaggtaaacagccactaaaggaatgaaaaaaaaaaatctattcttcaactaggatataaaatagagaaacttttaacaatactataattaagaaaatccaataagatttataagcattaaaaggatatgctttggttcttttaaaagagatatctttagtctcatgactccacttccagccaaaatttaagatgccacttgattgtatttacaggttgtctttccaaatatttttaataatagtgctgctgctgtagaccacagagaaaagaatccctcgctcttccttttcacttagtagaaacttctaccgcgtaggtcccgccaggagttcgcgcatgcgcaggagcgacaataagatggcggtgataatcgccgcactttttttcaaattagtggatcccagaaatcattgcgcgcatttgtaacgaatttccgttcgagtttgtattttaggcgccattttcgagtgaaggacccggagccgaaacaccggtaggagcggggaggtgggtactacacaaccgtctccagccttggtctgagtggactgtcctgcagcgaccatgccccgtaaaggcacccagccctccactgcccggcgcagagaggaagggccgccgccgccgtcccctgacggcgccagcagcgacgcggagcctgagccgccgtccggccgcacggagagcccagccaccgccgcagagactgcaagtgaggaacttgataatagaagtttagaagagattttgaacagcattcctcctcccccgcctccagcaatgaccaatgaagctggagctcctcggcttatgataactcatattgtaaaccagaacttcaaatcctatgctggggagaaaattctgggacctttccataagcgcttttcctgtattatcgggccaaatggcagtggcaaatccaatgttattgattctatgctttttgtgtttggctatcgagcacaaaaaataagatctaaaaaactctcagtattaatacataattctgatgaacacaaggacattcagagttgtacagtagaagttcattttcaaaagataattgataaggaaggggatgattatgaagtcattcctaacagtaatttctatgtatccagaacggcctgcagagataatacttctgtctatcacataagtggaaagaaaaagacatttaaggatgttggaaatcttcttcgaagccatggaattgacttggaccataatagatttttaattttacagggtgaagttgaacaaattgctatgatgaaaccaaaaggccagactgaacacgatgagggtatgcttgaatatttagaagatataattggttgtggacggctaaatgaacctattaaagtcttgtgtcggagagttgaaatattaaatgaacacagaggagagaagttaaacagggtaaagatggtggaaaaggaaaaggatgccttagaaggagagaaaaacatagctatcgaatttcttaccttggaaaatgaaatatttagaaaaaagaatcatgtttgtcaatattatatttatgagttgcagaaacgaattgctgaaatggaaactcaaaaggaaaaaattcatgaagataccaaagaaattaatgagaagagcaatatactatcaaatgaaatgaaagctaagaataaagatgtaaaagatacagaaaagaaactgaataaaattacaaaatttattgaggagaataaagaaaaatttacacagctagatttggaagatgttcaagttagagaaaagttaaaacatgccacgagtaaagccaaaaaactggagaaacaacttcaaaaagataaagaaaaggttgaagaatttaaaagtatacctgccaagagtaacaatatcattaatgaaacaacaaccagaaacaatgccctcgagaaggaaaaagagaaagaagaaaaaaaattaaaggaagttatggatagccttaaacaggaaacacaagggcttcagaaagaaaaagaagtaagttttttttttttatcagtgtttattttggtggcttttttttttttaacttaaagattattttttcaaaaatactgaaacctgaactggtaagtttggacttttaatgtccaacattcctaaaactagtcaacctagacttagatgactattcttttaattcctgctgacatgttttttaaaaagtttactaaatgagagtttgtagt

SEQ ID NO: 30152 - DNA, 2713 bp, Homo sapiens
ggtggtgtgcgtggtattccggggttgccggggattgtggcgggtgcccatgatgtggcggtgtcagggggctgaggccgggtgatcccttggaccccggatgtggagggttgcagtgggttggggtcacgaccgtgtggctcccgcctgggttgcccgggtgagactctggtctccgggaggtgcagttaagcttcttgttaagatcctactaaagtagacctaactgctttttaagtatttaagtatagtacttaagtagagtaagcaaaacgtcagtaagaattttcaaataagatttatagccaacggttcactttggagaattacttaccacacatgatcttaaatactttaaaaccatttaggtaaacagccactaaaggaatgaaaaaaaaaaatctattcttcaactaggatataaaatagagaaacttttaacaatactataattaagaaaatccaataagatttataagcattaaaaggatatgctttggttcttttaaaagagatatctttagtctcatgactccacttccagccaaaatttaagatgccacttgattgtatttacaggttgtctttccaaatatttttaataatagtgctgctgctgtagaccacagagaaaagaatccctcgctcttccttttcacttagtagaaacttctaccgcgtaggtcccgccaggagttcgcgcatgcgcaggagcgacaataagatggcggtgataatcgccgcactttttttcaaattagtggatcccagaaatcattgcgcgcatttgtaacgaatttccgttcgagtttgtattttaggcgccattttcgagtgaaggacccggagccgaaacaccggtaggagcggggaggtgggtactacacaaccgtctccagccttggtctgagtggactgtcctgcagcgaccatgccccgtaaaggcacccagccctccactgcccggcgcagagaggaagggccgccgccgccgtcccctgacggcgccagcagcgacgcggagcctgagccgccgtccggccgcacggagagcccagccaccgccgcagagactgcaagtgaggaacttgataatagaagtttagaagagattttgaacagcattcctcctcccccgcctccagcaatgaccaatgaagctggagctcctcggcttatgataactcatattgtaaaccagaacttcaaatcctatgctggggagaaaattctgggacctttccataagcgcttttcctgtattatcgggccaaatggcagtggcaaatccaatgttattgattctatgctttttgtgtttggctatcgagcacaaaaaataagatctaaaaaactctcagtattaatacataattctgatgaacacaaggacattcagagttgtacagtagaagttcattttcaaaagataattgataaggaaggggatgattatgaagtcattcctaacagtaatttctatgtatccagaacggcctgcagagataatacttctgtctatcacataagtggaaagaaaaagacatttaaggatgttggaaatcttcttcgaagccatggaattgacttggaccataatagatttttaattttacagggtgaagttgaacaaattgctatgatgaaaccaaaaggccagactgaacacgatgagggtatgcttgaatatttagaagatataattggttgtggacggctaaatgaacctattaaagtcttgtgtcggagagttgaaatattaaatgaacacagaggagagaagttaaacagggtaaagatggtggaaaaggaaaaggatgccttagaaggagagaaaaacatagctatcgaatttcttaccttggaaaatgaaatatttagaaaaaagaatcatgtttgtcaatattatatttatgagttgcagaaacgaattgctgaaatggaaactcaaaaggaaaaaattcatgaagataccaaagaaattaatgagaagagcaatatactatcaaatgaaatgaaagctaagaataaagatgtaaaagatacagaaaagaaactgaataaaattacaaaatttattgaggagaataaagaaaaatttacacagctagatttggaagatgttcaagttagagaaaagttaaaacatgccacgagtaaagccaaaaaactggagaaacaacttcaaaaagataaagaaaaggttgaagaatttaaaagtatacctgccaagagtaacaatatcattaatgaaacaacaaccagaaacaatgccctcgagaaggaaaaagagaaagaagaaaaaaaaaaaatttttgggggagcatgggccctgagaaaacggttttgtaaaccacatatggtaggggaacggggagcccaagaaggagtagggacacaggggaaagggggtccaaagagagaacgggggcagaacacaaggagggtgggctctctaccaagtaaaaaacgccggggggaaacagagaggttggtaacaaaactcgagagtgacatatcggggagggccaaaaacgaggggactacaacaaaagaggggatctcaaggggaaggccaatatctaaaaatagcccgggcaggggagaaagcagacagcaacagcaagagttagatacacaacatgaacaaaagcactagagagaagagacgagacgagagatgaaacaaaagaacgactaacgaaagaagtga

SEQ ID NO: 30153 - DNA, 2307 bp, Homo sapiens
ggtggtgtgcgtggtattccggggttgccggggattgtggcgggtgcccatgatgtggcggtgtcagggggctgaggccgggtgatcccttggaccccggatgtggagggttgcagtgggttggggtcacgaccgtgtggctcccgcctgggttgcccgggtgagactctggtctccgggaggtgcagttaagcttcttgttaagatcctactaaagtagacctaactgctttttaagtatttaagtatagtacttaagtagagtaagcaaaacgtcagtaagaattttcaaataagatttatagccaacggttcactttggagaattacttaccacacatgatcttaaatactttaaaaccatttaggtaaacagccactaaaggaatgaaaaaaaaaaatctattcttcaactaggatataaaatagagaaacttttaacaatactataattaagaaaatccaataagatttataagcattaaaaggatatgctttggttcttttaaaagagatatctttagtctcatgactccacttccagccaaaatttaagatgccacttgattgtatttacaggttgtctttccaaatatttttaataatagtgctgctgctgtagaccacagagaaaagaatccctcgctcttccttttcacttagtagaaacttctaccgcgtaggtcccgccaggagttcgcgcatgcgcaggagcgacaataagatggcggtgataatcgccgcactttttttcaaattagtggatcccagaaatcattgcgcgcatttgtaacgaatttccgttcgagtttgtattttaggcgccattttcgagtgaaggacccggagccgaaacaccggtaggagcggggaggtgggtactacacaaccgtctccagccttggtctgagtggactgtcctgcagcgaccatgccccgtaaaggcacccagccctccactgcccggcgcagagaggaagggccgccgccgccgtcccctgacggcgccagcagcgacgcggagcctgagccgccgtccggccgcacggagagcccagccaccgccgcagagactgcaagtgaggaacttgataatagaagtttagaagagattttgaacagcattcctcctcccccgcctccagcaatgaccaatgaagctggagctcctcggcttatgataactcatattgtaaaccagaacttcaaatcctatgctggggagaaaattctgggacctttccataagcgcttttcctgtattatcgggccaaatggcagtggcaaatccaatgttattgattctatgctttttgtgtttggctatcgagcacaaaaaataagatctaaaaaactctcagtattaatacataattctgatgaacacaaggacattcagagttgtacagtagaagttcattttcaaaagataattgataaggaaggggatgattatgaagtcattcctaacagtaatttctatgtatccagaacggcctgcagagataatacttctgtctatcacataagtggaaagaaaaagacatttaaggatgttggaaatcttcttcgaagccatggaattgacttggaccataatagatttttaattttacagggtgaagttgaacaaattgctatgatgaaaccaaaaggccagactgaacacgatgagggtatgcttgaatatttagaagatataattggttgtggacggctaaatgaacctattaaagtcttgtgtcggagagttgaaatattaaatgaacacagaggagagaagttaaacagggtaaagatggtggaaaaggaaaaggatgccttagaaggagagaaaaacatagctatcgaatttcttaccttggaaaatgaaatatttagaaaaaagaatcatgtttgtcaatattatatttatgagttgcagaaacgaattgctgaaatggaaactcaaaaggaaaaaattcatgaagataccaaagaaattaatgagaagagcaatatactatcaaatgaaatgaaagctaagaataaagatgtaaaagatacagaaaagaaactgaataaaattacaaaatttattgaggagaataaagaaaaatttacacagctagatttggaagatgttcaagttagagaaaagttaaaacatgccacgagtaaagccaaaaaactggagaaacaacttcaaaaagataaagaaaagttgagatttaagttactgccagagtacaattcttatgaaccaaccgaaaagccctcggaggaaaggaagggaacaattaggagttggtgcttaagaacaggttc

SEQ ID NO: 30154 - DNA, 2201 bp, Homo sapiens
ggtggtgtgcgtggtattccggggttgccggggattgtggcgggtgcccatgatgtggcggtgtcagggggctgaggccgggtgatcccttggaccccggatgtggagggttgcagtgggttggggtcacgaccgtgtggctcccgcctgggttgcccgggtgagactctggtctccgggaggtgcagttaagcttcttgttaagatcctactaaagtagacctaactgctttttaagtatttaagtatagtacttaagtagagtaagcaaaacgtcagtaagaattttcaaataagatttatagccaacggttcactttggagaattacttaccacacatgatcttaaatactttaaaaccatttaggtaaacagccactaaaggaatgaaaaaaaaaaatctattcttcaactaggatataaaatagagaaacttttaacaatactataattaagaaaatccaataagatttataagcattaaaaggatatgctttggttcttttaaaagagatatctttagtctcatgactccacttccagccaaaatttaagatgccacttgattgtatttacaggttgtctttccaaatatttttaataatagtgctgctgctgtagaccacagagaaaagaatccctcgctcttccttttcacttagtagaaacttctaccgcgtaggtcccgccaggagttcgcgcatgcgcaggagcgacaataagatggcggtgataatcgccgcactttttttcaaattagtggatcccagaaatcattgcgcgcatttgtaacgaatttccgttcgagtttgtattttaggcgccattttcgagtgaaggacccggagccgaaacaccggtaggagcggggaggtgggtactacacaaccgtctccagccttggtctgagtggactgtcctgcagcgaccatgccccgtaaaggcacccagccctccactgcccggcgcagagaggaagggccgccgccgccgtcccctgacggcgccagcagcgacgcggagcctgagccgccgtccggccgcacggagagcccagccaccgccgcagagactgcaagtgaggaacttgataatagaagtttagaagagattttgaacagcattcctcctcccccgcctccagcaatgaccaatgaagctggagctcctcggcttatgataactcatattgtaaaccagaacttcaaatcctatgctggggagaaaattctgggacctttccataagcgcttttcctgtattatcgggccaaatggcagtggcaaatccaatgttattgattctatgctttttgtgtttggctatcgagcacaaaaaataagatctaaaaaactctcagtattaatacataattctgatgaacacaaggacattcagagttgtacagtagaagttcattttcaaaagataattgataaggaaggggatgattatgaagtcattcctaacagtaatttctatgtatccagaacggcctgcagagataatacttctgtctatcacataagtggaaagaaaaagacatttaaggatgttggaaatcttcttcgaagccatggaattgacttggaccataatagatttttaattttacagggtgaagttgaacaaattgctatgatgaaaccaaaaggccagactgaacacgatgagggtatgcttgaatatttagaagatataattggttgtggacggctaaatgaacctattaaagtcttgtgtcggagagttgaaatattaaatgaacacagaggagagaagttaaacagggtaaagatggtggaaaaggaaaaggatgccttagaaggagagaaaaacatagctatcgaatttcttaccttggaaaatgaaatatttagaaaaaagaatcatgtttgtcaatattatatttatgagttgcagaaacgaattgctgaaatggaaactcaaaaggaaaaaattcatgaagataccaaagaaattaatgagaagagcaatatactatcaaatgaaatgaaagctaagaataaagatgtaaaagatacagaaaagtaataatattttgggaagtactaaaagtatttagataattgtattacatgtgtatttatatataaagttacttctagcacattgtgagtgtaagacatttgccagcatatcaagtggtggcccccttagtgaaaaaaaaaaacttgcc

SEQ ID NO: 30155 - DNA, 1657 bp, Homo sapiens
ggtggtgtgcgtggtattccggggttgccggggattgtggcgggtgcccatgatgtggcggtgtcagggggctgaggccgggtgatcccttggaccccggatgtggagggttgcagtgggttggggtcacgaccgtgtggctcccgcctgggttgcccgggtgagactctggtctccgggaggtgcagttaagcttcttgttaagatcctactaaagtagacctaactgctttttaagtatttaagtatagtacttaagtagagtaagcaaaacgtcagtaagaattttcaaataagatttatagccaacggttcactttggagaattacttaccacacatgatcttaaatactttaaaaccatttaggtaaacagccactaaaggaatgaaaaaaaaaaatctattcttcaactaggatataaaatagagaaacttttaacaatactataattaagaaaatccaataagatttataagcattaaaaggatatgctttggttcttttaaaagagatatctttagtctcatgactccacttccagccaaaatttaagatgccacttgattgtatttacaggttgtctttccaaatatttttaataatagtgctgctgctgtagaccacagagaaaagaatccctcgctcttccttttcacttagtagaaacttctaccgcgtaggtcccgccaggagttcgcgcatgcgcaggagcgacaataagatggcggtgataatcgccgcactttttttcaaattagtggatcccagaaatcattgcgcgcatttgtaacgaatttccgttcgagtttgtattttaggcgccattttcgagtgaaggacccggagccgaaacaccggtaggagcggggaggtgggtactacacaaccgtctccagccttggtctgagtggactgtcctgcagcgaccatgccccgtaaaggcacccagccctccactgcccggcgcagagaggaagggccgccgccgccgtcccctgacggcgccagcagcgacgcggagcctgagccgccgtccggccgcacggagagcccagccaccgccgcagagactgcaagtgaggaacttgataatagaagtttagaagagattttgaacagcattcctcctcccccgcctccagcaatgaccaatgaagctggagctcctcggcttatgataactcatattgtaaaccagaacttcaaatcctatgctggggagaaaattctgggacctttccataagcgcttttcctgtattatcgggccaaatggcagtggcaaatccaatgttattgattctatgctttttgtgtttggctatcgagcacaaaaaataagatctaaaaaactctcagtattaatacataattctgatgaacacaaggacattcagagttgtacagtagaagttcattttcaaaagataattgataaggaaggggatgattatgaagtcattcctaacagtaatttctatgtatccagaacggcctgcagagataatacttctgtctatcacataagtggaaagaaaaagacatttaaggatgttggaaatcttcttcgaagccatggaattgacttggaccataatagatttttaattttacaggaacaaatgttgatgaacaaagcagatgacaagaggttg

SEQ ID NO: 30156 - DNA, 1572 bp, Homo sapiens
ggtggtgtgcgtggtattccggggttgccggggattgtggcgggtgcccatgatgtggcggtgtcagggggctgaggccgggtgatcccttggaccccggatgtggagggttgcagtgggttggggtcacgaccgtgtggctcccgcctgggttgcccgggtgagactctggtctccgggaggtgcagttaagcttcttgttaagatcctactaaagtagacctaactgctttttaagtatttaagtatagtacttaagtagagtaagcaaaacgtcagtaagaattttcaaataagatttatagccaacggttcactttggagaattacttaccacacatgatcttaaatactttaaaaccatttaggtaaacagccactaaaggaatgaaaaaaaaaaatctattcttcaactaggatataaaatagagaaacttttaacaatactataattaagaaaatccaataagatttataagcattaaaaggatatgctttggttcttttaaaagagatatctttagtctcatgactccacttccagccaaaatttaagatgccacttgattgtatttacaggttgtctttccaaatatttttaataatagtgctgctgctgtagaccacagagaaaagaatccctcgctcttccttttcacttagtagaaacttctaccgcgtaggtcccgccaggagttcgcgcatgcgcaggagcgacaataagatggcggtgataatcgccgcactttttttcaaattagtggatcccagaaatcattgcgcgcatttgtaacgaatttccgttcgagtttgtattttaggcgccattttcgagtgaaggacccggagccgaaacaccggtaggagcggggaggtgggtactacacaaccgtctccagccttggtctgagtggactgtcctgcagcgaccatgccccgtaaaggcacccagccctccactgcccggcgcagagaggaagggccgccgccgccgtcccctgacggcgccagcagcgacgcggagcctgagccgccgtccggccgcacggagagcccagccaccgccgcagagactgcaagtgaggaacttgataatagaagtttagaagagattttgaacagcattcctcctcccccgcctccagcaatgaccaatgaagctggagctcctcggcttatgataactcatattgtaaaccagaacttcaaatcctatgctggggagaaaattctgggacctttccataagcgcttttcctgtattatcgggccaaatggcagtggcaaatccaatgttattgattctatgctttttgtgtttggctatcgagcacaaaaaataagatctaaaaaactctcagtattaatacataattctgatgaacacaaggacattcagagttgtacagtagaagttcattttcaaaagataattgataaggaaggggatgattatgaagtcattcctaacagtaatttctatgtatccagaacggcctgcagagataatacttctgtctatcacataagtggaaagagaccataataagattttattttacaggggtgaag

SEQ ID NO: 30157 - DNA, 2581 bp, Homo sapiens
ggtggtgtgcgtggtattccggggttgccggggattgtggcgggtgcccatgatgtggcggtgtcagggggctgaggccgggtgatcccttggaccccggatgtggagggttgcagtgggttggggtcacgaccgtgtggctcccgcctgggttgcccgggtgagactctggtctccgggaggtgcagttaagcttcttgttaagatcctactaaagtagacctaactgctttttaagtatttaagtatagtacttaagtagagtaagcaaaacgtcagtaagaattttcaaataagatttatagccaacggttcactttggagaattacttaccacacatgatcttaaatactttaaaaccatttaggtaaacagccactaaaggaatgaaaaaaaaaaatctattcttcaactaggatataaaatagagaaacttttaacaatactataattaagaaaatccaataagatttataagcattaaaaggatatgctttggttcttttaaaagagatatctttagtctcatgactccacttccagccaaaatttaagatgccacttgattgtatttacaggttgtctttccaaatatttttaataatagtgctgctgctgtagaccacagagaaaagaatccctcgctcttccttttcacttagtagaaacttctaccgcgtaggtcccgccaggagttcgcgcatgcgcaggagcgacaataagatggcggtgataatcgccgcactttttttcaaattagtggatcccagaaatcattgcgcgcatttgtaacgaatttccgttcgagtttgtattttaggcgccattttcgagtgaaggacccggagccgaaacaccggtaggagcggggaggtgggtactacacaaccgtctccagccttggtctgagtggactgtcctgcaggtaaagtacttctcttcctggtcaggttgtcacgctcttacttcctgccttgtccgcgagcgcctggaaaatagaggccttgagcccgagcggcgaagtccgggcttgaagctgccgctgggagatttctcttgctgtcacccctcccccctcggccgctccccggcggcccgggctcccgcgcgcagctcccgggcgccacttttccaagctactcaaatgtctcggggaggccctgagcctcgcagatcttttctttaaaaaatcctagtctctatctggaaaagggcgtctccccctacccctcttccttctgccaacggactagtcaccgggtctcagccttcgctggtgacctttcatggtttactgtccaacgggactccgcctggggagctggagagacaaactcttgccactccaaaattagcaagcgctgccagcgtccgacttgaagttgctagtggttagtcccagccttcgcccttcgcggtccgaccgctgagaggagggagacttcgttatgccccgggccgtcaacggcgccaggagctaaagggcgggcagacgaaagcgggcggcgagtcgccagttagtcttcaccgctctggagagagttgctagccacgggatcctgacccggacacgaactcgtttctccacgtcggtgcgcgcttgcatccctggccccgaaagcgtgggaatgtccggaaatgctggcgtatgggagttccttaattagaaatgcgttagcgaatattatacgcttatactatgggcggacgggtggagagccttaaaaacaacaacaacaaactaagcagttgctcaatcgttgattgatcctcaggcacgtctagattttcccacttacataggtcttgttaagaaaccagtcctgccttcttgccactcgtgtctttcgatggctcccttcccgaagtcccgctgcctctaagcggagtgttaagcggggctctcggaagccggtggaccgagatttcccctgggtggggcgggcgcggtgtagcggcccgcgggctgacttgctcccggctgtcccccggccccagcgaccatgccccgtaaaggcacccagccctccactgcccggcgcagagaggaagggccgccgccgccgtcccctgacggcgccagcagcgacgcggagcctgagccgccgtccggccgcacggagagcccagccaccgccgcaggtgagtgacccgccgcgactcggcgggaacgcgcgctgtgggactggcaggcaaacgcgcccagcccgaggctggctggggttgttgagcgcggagttgacatctgaaggtccggtgtcggtccggtagaggctcaggaaagccatttggcaactttgagataggattcccgtgcaattttggtgtaacggcgctggaagggatgggggcgagcaaacgggttcagttgtgaatttttgtttgtgacctgtggaatggtacaggtcacaaacaaaaattcaatatctttattgtattcccgctaaaatcgagacggtcaatcaagagagcaagtggacttttttcccagagacaatcaatatgactatgtgagcatgatgaaaagttttttgaccctaacctcacctccgtggtgttagattgccgttaaagagaaga

SEQ ID NO: 30158 - DNA, 316 bp, Homo sapiens
tgtggacggctaaatgaacctattaaagtcttgtgtcggagagttgaaatattaaatgaacacagaggagagaaggtgaatcatctgtagactttcattgtaaatcagaatgtttcatttatgatctaacaaattttagtaagtcagatattcatgttataatacttaatgaagaagtgttatattgaaatttatatcttaacatttaagatgaacattctccttattaactgtttttatctaatgtttgcatattttaagttcatattgtacatatgaagtgtgtattcagtctttaaacttttaatttctgtag

SEQ ID NO: 30159 - DNA, 418 bp, Homo sapiens
ggctggttggtttggcttcttgatttttgtgatctttgagaaagggaccaaaacagcatggaaaagtatcaattctttgctaagttgggttattaatgagaactactggcagtttgtgtgcatgttcaattgaagtttttaatccatagaattagtttcagtatgaaatgagtgaattttgaagtaggcctatgacttaataccaacaattgttttctggttttgtttttcctcaaaacaggaaggggatgattatgaagtcattcctaacagtaatttctatgtatccagaacggcctgcagagataatacttctgtctatcacataagtggaaagaaaaagacatttaaggatgttggaaatcttcttcgaagccatggaattgacttggaccataatagatttttaattttacag

SEQ ID NO: 30160 - DNA, 375 bp, Homo sapiens
tagaaatcaataatcataaactcaaggcccaacaagacaaacttgataaaataaataagcaattagatgaatgtgcttctgctattactaaagcccaagtagcaatcaagactgctgacaggtagagtatgcatgttaccctaacttgttttccctttccctgccttcacattggaaagggggttactatgtaatgttccataaaatgtttctcttactgttaatttattgaacctgtctgacacattacctaatgggacttccatgacggaaaacctataatgaacatttatcctatggccaattaaaaaggctggtaaacaggtatgccataggaaagtacaggtagactgtaactccccagttgctgtgagg

SEQ ID NO: 30161 - DNA, 844 bp, Homo sapiens
ttattgtccaaaaaatatttgaggttacatgtttgtgtgatttacctgttattacttaatgtttgacttttctttgtttctctttaggaacaaacaaaaaatgcacagttcataataatttctcttcgaaataatatgtttgagatttcggatagacttattggaatttacaagacatacaacataacaaaaagtgttgctgtaaatccaaaagaaattgcatctaagggactttgttgaactttatgctgaagattcttcaagttgattcagtgtattactgatttttttctatttgtaaaggattatgagttgtataaaatacatactccctaaactagatcatgaaactggtttctgttttatgcagttgtcatttgtaaagtctaataaaatattctctataattgcttctagattacaaaaatatgacaatcttgtaagtagcagactatggagaaaaatgagttacctggagggtcaggtaacttgccaaactaaaaagtatgttagttgaggcaaagtcctaagcaaggttgtgctatcaaggctcagcataccttcgtgggcctttgatttaccaacactggaaatgcctgccaactaatcttggatagattctttaaggcattccacttagcttgccagttgagacaatcaccacagttattacccaaatactatgaacatatttttgtaaaccagtcattctgaattatagtgatgagaatttaaatatatgcttttctagaatttgatgtttgaccatttatgacttaattaccagagagccagtaaattaggacagtgtttcaacaagcctaggctatctcgtaagttgaaa

SEQ ID NO: 30162 - DNA, 228 bp, Homo sapiens
gggccaatttaggcaatacaagagtctggagcttttatgacctaagcagttggggctctccttatgctaccaatgataaatgatagaataagtaagcagagggctgggcgcggtggctcatgcctataatcctagcaccttgagaggccaaggcgggcggatcacgaggtcaggagatcgagaccatcctggctaacacggtaaaaccccgtctctactaaaaataca

SEQ ID NO: 30163 - DNA, 440 bp, Homo sapiens
tccagccagagcacgcacgcacggagccgggagcatgcagcctgcactgcgggggatgtgatgctcggctctaactcgcctggctggcccgccacggacgcctcagcttgcaaccatggtaacgtttctggcgggggacacccccgggagcccaccgcgatgggcagcctcctggtgactgatggacgagtgtccacctcccagaccgagagcgcttagtaggtcggaggaagtggagaggatgtaacacgcccccagccgggagtgaagccctgaggaggtaggagccgcatatgtccatccgtgcattcccaccgtcagcgcgcaggggtgctgtagatcaccggtaggaactttatttggctggtgcttcattatgctgattaaactgcagtggatttgatgggcatgattgcgctggggaagatgcataatgaact

SEQ ID NO: 30164 - DNA, 232 bp, Homo sapiens
aaacatttttgtgtaggaatttttatcatactaatttgtatttctcataaagaacccttgggggtttgacaggaaagtgaatctatttagtaaaattaggaactgggaaaaaatagtgtctctttttttaaatgcttcaaaagaaggaatatttctattgcaataaattattttttgattgcctctgtacctcttcctgctccacattcccattctgaatggcatcattaca

SEQ ID NO: 30165 - DNA, 906 bp, Homo sapiens
agctgtaacactcaccgcaaaggtctgcagcttcactcctgagccagcgagaccacgaacccaccagaaggaagaaactcctaacacatccgaacatcagaaggaacagattccagacgcgccaccttaagagctgtaacactcaccgcgagggtcccggcttcattcttgaagtcagtgagaccaagaacccaccaattccggacacaagagggtgcagcaagaaggctctcagtagacaccacatgcaggtgccttgaccttggactgcgcagcttccagaactgtaagaaataagtttctgtttttatacattacccagcctaagatattttgttatagcagcaacaacagactaagacactatgcctacatagctggccaatggataaatgaatacatttatatacaattgacccatgaacaatgcaattgttaggggtgctgaccttctgcacagttcaaaatctgcatataacttctgacttcccccaaaaacttaactacttacagcctcctgttggccagccttcctgataacatgaacacatacttatgtgtttatgtataacacatacatatgtgttaactgactgtttatcatgtatgtttataactaaactgttggttaacacatacataagttaacacatatgtatgtattaaccaactgtttatgttatacacacacgtatgtgttagccaactgtttatcatatgtacatgttatacatatgtgttaacaaatgtgtgtgatttatgcattcgtgacatgaatatattttgtgaattaatgacatgcctttttcctatttttttcaatatttctaggccatgcagtttatctgtgagtttttaaaaattgtcacaatctccatgataaaaaattccaacatacttattaaa

SEQ ID NO: 30166 - DNA, 704 bp, Homo sapiens
aacctccgcctccgggttcaagtgattctcctgcctcaacctccctggtagctaggattacaggcatgtgtcaccatgcctggctaatttttttgtatttttagtagaaatgggtttcatcatgttggccaggctggtttcgaactcctgacctcaggtgatccacctgccttggcctcccaaagtgctgggattaaaagcatgagccatcatgcccagcctgaaatacatatacagatatatatatttaaaaactgaatcagccttttgtcagctttatgacctaggaatgtctttctcaaggatctgggaaatgtaaacattaccagatagcatacctatcttccagtttctgtgggagggtaacagcctaatcttaatgagtaccttgcaccaagctataaaagtaactcctgtttccacactcccccacccccgaaaagttgatatcttagataacacaagtggtcacatcaattatcaggtaaagttagaatgaactgtgtgaccagtggtgctgtcaagttctcttagttgaggactatttatctcgaaaacatacatgtaatgggctgtacctgcttggctgtacaaaatggtgaaatttccttctgtctttgtgatctcttagcaaagtgcctgtgatgtgcatcacattctcatttaatttttattcaataataaagcttatctttctctactgc

SEQ ID NO: 30167 - DNA, 400 bp, Homo sapiens
ttttggctgcaataagcagaaaagccatcccagagtcactaaacaatttttaaaaaaataaaaaggaatcactccatgtcccaagtcccaagggacgcatctgtagccccttaataataagaggctcatctttcccttcaccgtcctcagcatgtgggttatcctcagctagcatgtctcacagtcataagatggctgtgccaattctggacatcccatgccaaagaaatgattactgttcagcagaagctaattaactttattttatgttgtgtctcttgtacttaacagtaaggaaacgtgtcccatgaactctctagtagactccccaatatcttgctggagagacttaggtcatataaatacctctctaaaccagtctttaagcaggaggatggtc

SEQ ID NO: 30168 - DNA, 521 bp, Homo sapiens
tttttttttaacagtgaaaagtatattttattggcatttaggcctagcgtagttcaattcaaataaaatataacaaagcaacttatttaagctaattgaatataacacataaacaattttttcttaagtttctgctttaccatcatatgattgtgttcatgcaagtacaatcattaaaactgtcctcctaagcatatatcatagcaccaccttttatttgcagtacttgatatgtaaatttcattgtcaaaacatatctggctttatcaatgtaaacatatttgctacaagtaaactttaaaggtaaaagtgaatactaatgaataaatcaaaatagaactgagcatcacatgatataattaagcaaaactccatctaaaaaaaaaaagaaagaaagaaataggcaggacccaagctacatcttccttctcgtagactgttgggaaatggttagctgcgtgagaagcacaggtaggtcatcttcctcccacttaggacattggtttgcagatcttaaaaaa

SEQ ID NO: 30169 - DNA, 697 bp, Homo sapiens
ggaccttccttctaaactgaaacattatttagggaaggcctaaagcagcttgggaggcctgggaatctggccaggctaaggttgtgcaaaacgacaggagctaacattaactgtgccacttcccactgcctggtcctgtaaggctgggcagctaagctttagcagcagttaatgcaaaaaggaatgagaactcagactctagaactggggatttttgattaagagagggttctgaataaaggaaagctaaggaatcgtgtttcgcttggcaaagagtaagaatgtagactccagaggctaaaggcttgtttataaatatttaaaggtgatgagaaaaatatttaggatattactatttttcttgttgccatttaccatttttagcacactggtgcctgttattgttaagtaatatctagtctaatctttgtgattgcacctttgtaagaacggtaaatgttatgtgcttattcctgggaagtagaaaaagggcatcattcatctagggattggtgcagaggactgatcctggcaacctttgatagcagaaggaaaagaaaatgggaggggttgatttctggaacctttgcaagtaaaggaaaaaagtataactctgtgatggccaaattacaaaggataagttgtccgagaagtatatttgatgagaaggtcacaaatcctcaaaggttagaaacaa

SEQ ID NO: 30170 - DNA, 464 bp, Homo sapiens
gatgttacccattttaagacacacctttttaagggtaactttaaggggaaaaaaagcctgcctattatgatattacactttctcatcaaataaagagagcttttgaattatcatcatcatcattattttttgagataggctccctgtcacccaggctgcagtgcagtggtgcagttgtggctcattgcagtctcaacctcccaggctcaagggatcctccaacctcagcccccagagtagctgggagtacaggcacgtgctgccagatctagctaattaaaaaaaaaatgtttttggtacagacaagatcttgctatgttgcccaggctggtctgacacctctgggctcaaactatccccctgtcttggccttctaaagtgctgggattataggtgtgagccaccacgcccagccttgaattatctagacataaattgttatcataagttactcttgtacatag

SEQ ID NO: 30171 - DNA, 378 bp, Homo sapiens
cagaaatcaatagcagaagcaaaattgtaaaattcacaaacatgtggaaattaaacaacacactaacaactaatggatcacaaaataaatcaacagggacattagaaaacatctgagacaaatgaaaacaaaaatacaacataccgaaacttagaagatgcagcaagaccagtataagagagaagtttatagcagtaaaaacttacatttaaaaagaagaaaagcttaaatcaacaacctaacttcacaccttaagtagaaaaacagaacaaaccaagcacaaagttagtagatagaaggaaataataatgatcagagataaatgaaaaagagaatacaaaaaataggaaaaaaaatcaataaaactaagactttttt

SEQ ID NO: 30172 - DNA, 333 bp, Homo sapiens
ctggctggctgccccagtggatgcccatacctgctcctgcctggcttccccactacatcgtgaccccccagtgaacccccagtggcgtgggctgggcacacaggagccctccacagatgcacgtgaggaacgtttcccacctaagccccctcgtgacaggccggctctgggtcactctgagggtgtctagaagaccccagcttgggagaagagttcctgttataacacttgtcttttggctggagatccctgagactttgagattgtcagggaggctttgggattgacgccacatgtctcaggtccccagctgagtcaagtgtcatctgtccc

SEQ ID NO: 30173 - DNA, 2668 bp, Homo sapiens
ggctgtggctgtgactggcgctgccgtgggcgccgcagccctcgcgggagccggacgcggtaatgccccagcggcgcagcgggcggctgcgtccctgagccgctatataagcgcggcagggaacatccggaggggctgaagatgaaggtgcccgcgcatgggcccccgctgattgccagtccctcccgaccccgcgccccgcgcggagcccgaggccgccgaggacccgccttcgccgcagtagcagctggagcagcgacagaggcggcagctgcggcggcggcggcgcccgcgcccctcgcgccagcgcgtagagcggcggcggcagctcgggggccgccactgccccggctgccatgagttgtgcggaggtgatgtatcacccccagccttatggagcgtcccagtatctgcccaaccccatggcagcgacaacctgccccacagcctactatcagccggcgccccaacctggccagcagaagaagttagcggtattcagcaagatgcaggactctctggaagtcacccttcccagcaaacaagaggaggaggatgaggaggaggaggaggaggagaaagaccagcctgccgagatggagtaccttaactctcgctgtgtccttttcacttatttccagggagacattgggtcagtagtggatgaacacttctcaagagctttgggccaagccatcaccctccatccagaatctgccatttcaaaaagcaagatggggctaacccccctatggcgagacagctcagctctctcaagccagcggaatagtttcccaacttccttttggaccagctcttaccagcccccacctgcaccttgtttggggggagttcatcctgacttccaggtcactggaccccctggcaccttttctgcagctgatcccagtccttggccgggacacaacctgcatcagactggcccagcccctccccctgctgtgtctgagtcctggccttatcctttgacatctcaggtgagcccatcctacagccatatgcatgacgtgtacatgcggcaccaccaccctcatgcccacatgcaccaccgccaccgccaccatcatcaccatcaccaccctcctgctggctctgccctggatccatcctatgggcctctgctgatgccttcagtgcatgcggccaggattcctgctccccagtgtgacatcacaaagacagaaccaactacagtcacctctgctacctcagcatgggctggagcctttcatggaacagtagacatagtgcccagcgtgggattcgatacaggtctacagcatcaagacaagagtaaggaatcaccgtggtactgaaacacacaatcttagtgagttaagttgcagcataaatccaagggcccactgggaaaagatactgtcgggtttttccattcagcaataggacacgaaaggcatagaaggagaagacaaagtgtcacgcagttgactggttttcggcctttcttgagaaagcaaagtgggtcccagacattgaagaaaagcatttttatttgtttatttcctcatctgagcctttgccaactgtgcaactctctccttttgttatcttgcttttatcaatatatagctaagtttttgtttcattttgatttttttttttagccaaccaccttgtcaggaaaggatggaaccacacattaaaatgttcattctttcaggaatacaagtttgtagctctatgtgcatctatttttgtagaaatacaaaaagtttggtttagcattgatgggctatttttgagggatgtattttttttaaaattgtaaaaattgttgagttctgtttaaagaacttgctctcagagaagcactggcaaaaatgtttaaaatgcttatctctaagatgtctattatatgctctgtctgtgctttctaggttacctcaaatgttttgtttttttccttcttacaaaagtagctataccgtagtcaaaccaatgcagtattgtttttacattgaatctcagtaaagatttaattccatgctagctcaattagttttgaattatatgtatagcttgaaaagtttttttttaatgactgtgctaaagaaatgatattttattgctttgatttctcccaaagaataacttggaggttgactaataagaaagttggcataaactttcaatcaaatgaagagtttgcctagaggagactaattctctttctagcccatccaaatttgataaatggaaccagaggttatatacaactacaaggaaaaaaatgcatttaaccatgccacctatgagtgccagtgacttattttacttgtttttaattattcattcatggcaatttaaaaagtcatattttaagtgggatttgtttttcctgaagggcatttgaaggaacaatatctgggaaggtactagagaaattacaaagcccgagctctttcttataatgccacctatccctgtaagctaaacaaacaaacaaacaaacaaacaaacagttctatatataatagtttcaacacagaacttaacaagtctctttttttgtttgtttaaatctggctttacttgatttaattcctttttagaaagaaatttagggcaaaataaagtgtatattaggatttaaatttatgccacaatttaaaaataaaaccagagg

SEQ ID NO: 30174 - DNA, 2509 bp, Homo sapiens
ggctgtggctgtgactggcgctgccgtgggcgccgcagccctcgcgggagccggacgcggtaatgccccagcggcgcagcgggcggctgcgtccctgagccgctatataagcgcggcagggaacatccggaggggctgaagatgaaggtgcccgcgcatgggcccccgctgattgccagtccctcccgaccccgcgccccgcgcggagcccgaggccgccgaggacccgccttcgccgcagtagcagctggagcagcgacagaggcggcagctgcggcggcggcggcgcccgcgcccctcgcgccagcgcgtagagcggcggcggcagctcgggggccgccactgccccggctgccatgagttgtgcggaggtgatgtatcacccccagccttatggagcgtcccagtatctgcccaaccccatggcagcgacaacctgccccacagcctactatcagccggcgccccaacctggccagcagggagacattgggtcagtagtggatgaacacttctcaagagctttgggccaagccatcaccctccatccagaatctgccatttcaaaaagcaagatggggctaacccccctatggcgagacagctcagctctctcaagccagcggaatagtttcccaacttccttttggaccagctcttaccagcccccacctgcaccttgtttggggggagttcatcctgacttccaggtcactggaccccctggcaccttttctgcagctgatcccagtccttggccgggacacaacctgcatcagactggcccagcccctccccctgctgtgtctgagtcctggccttatcctttgacatctcaggtgagcccatcctacagccatatgcatgacgtgtacatgcggcaccaccaccctcatgcccacatgcaccaccgccaccgccaccatcatcaccatcaccaccctcctgctggctctgccctggatccatcctatgggcctctgctgatgccttcagtgcatgcggccaggattcctgctccccagtgtgacatcacaaagacagaaccaactacagtcacctctgctacctcagcatgggctggagcctttcatggaacagtagacatagtgcccagcgtgggattcgatacaggtctacagcatcaagacaagagtaaggaatcaccgtggtactgaaacacacaatcttagtgagttaagttgcagcataaatccaagggcccactgggaaaagatactgtcgggtttttccattcagcaataggacacgaaaggcatagaaggagaagacaaagtgtcacgcagttgactggttttcggcctttcttgagaaagcaaagtgggtcccagacattgaagaaaagcatttttatttgtttatttcctcatctgagcctttgccaactgtgcaactctctccttttgttatcttgcttttatcaatatatagctaagtttttgtttcattttgatttttttttttagccaaccaccttgtcaggaaaggatggaaccacacattaaaatgttcattctttcaggaatacaagtttgtagctctatgtgcatctatttttgtagaaatacaaaaagtttggtttagcattgatgggctatttttgagggatgtattttttttaaaattgtaaaaattgttgagttctgtttaaagaacttgctctcagagaagcactggcaaaaatgtttaaaatgcttatctctaagatgtctattatatgctctgtctgtgctttctaggttacctcaaatgttttgtttttttccttcttacaaaagtagctataccgtagtcaaaccaatgcagtattgtttttacattgaatctcagtaaagatttaattccatgctagctcaattagttttgaattatatgtatagcttgaaaagtttttttttaatgactgtgctaaagaaatgatattttattgctttgatttctcccaaagaataacttggaggttgactaataagaaagttggcataaactttcaatcaaatgaagagtttgcctagaggagactaattctctttctagcccatccaaatttgataaatggaaccagaggttatatacaactacaaggaaaaaaatgcatttaaccatgccacctatgagtgccagtgacttattttacttgtttttaattattcattcatggcaatttaaaaagtcatattttaagtgggatttgtttttcctgaagggcatttgaaggaacaatatctgggaaggtactagagaaattacaaagcccgagctctttcttataatgccacctatccctgtaagctaaacaaacaaacaaacaaacaaacaaacagttctatatataatagtttcaacacagaacttaacaagtctctttttttgtttgtttaaatctggctttacttgatttaattcctttttagaaagaaatttagggcaaaataaagtgtatattaggatttaaatttatgccacaatttaaaaataaaaccagagg

SEQ ID NO: 30175 - DNA, 1450 bp, Homo sapiens
ggctgtggctgtgactggcgctgccgtgggcgccgcagccctcgcgggagccggacgcggtaatgccccagcggcgcagcgggcggctgcgtccctgagccgctatataagcgcggcagggaacatccggaggggctgaagatgaaggtgcccgcgcatgggcccccgctgattgccagtccctcccgaccccgcgccccgcgcggagcccgaggccgccgaggacccgccttcgccgcagtagcagctggagcagcgacagaggcggcagctgcggcggcggcggcgcccgcgcccctcgcgccagcgcgtagagcggcggcggcagctcgggggccgccactgccccggctgccatgagttgtgcggaggtgatgtatcacccccagccttatggagcgtcccagtatctgcccaaccccatggcagcgacaacctgccccacagcctactatcagccggcgccccaacctggccagcagaagaagttagcggtattcagcaagatgcaggactctctggaagtcacccttcccagcaaacaagaggaggaggatgaggaggaggaggaggaggagaaagaccagcctgccgagatggagtaccttaactctcgctgtgtccttttcacttatttccagggagacattgggtcagtagtggatgaacacttctcaagagctttgggccaagccatcaccctccatccagaatctgccatttcaaaaagcaagatggggctaacccccctatggcgagacagctcagctctctcaagccagcggaatagtttcccaacttccttttggaccagctcttaccagcccccacctgcaccttgtttggggggagttcatcctgacttccaggtcactggaccccctggcaccttttctgcagctgatcccagtccttggccgggacacaacctgcatcagactggcccagcccctccccctgctgtgtctgagtcctggccttatcctttgacatctcaggtgagcccatcctacagccatatgcatgacgtgtacatgcggcaccaccaccctcatgcccacatgcaccaccgccaccgccaccatcatcaccatcaccaccctcctgctggctctgccctggatccatcctatgggcctctgctgatgccttcagtgcatgcggccaggattcctgctccccagtgtgacatcacaaagacagaaccaactacagtcacctctgctacctcagcatgggctggagcctttcatggaacagtagacatagtgcccagcgtgggattcgatacaggtctacagcatcaagacaagagtaaggaatcaccgtggtactgaaacacacaatcttagtgaagaagctgctctccaagtgaatacagctcaatgcaactcaacaagtgtttgcagagcacctgctgaaagtcaaggagaagccttactcacttcca

SEQ ID NO: 30176 - DNA, 425 bp, Homo sapiens
agtggacaattagaggcaagtctatcccaaaactgagtcttatgttaataatgttttttattttctgtcttctcagacagctcagctctctcaagccagcggaatagtttcccaacttccttttggaccagctcttaccagcccccacctgcaccttgtttggggggagttcatcctgacttccaggtcactggaccccctggcaccttttctgcagctgatcccagtccttggccgggacacaacctgcatcagactggcccagcccctccccctgctgtgtctgagtcctggccttatcctttgacatctcaggtgagcccatcctacagccatatgcatgacgtgtacatgcggcaccaccaccctcatgcccacatgcaccaccgccaccgccaccatcatcaccatcaccaccctcctgc

SEQ ID NO: 30177 - DNA, 385 bp, Homo sapiens
tccatctctgcaaaaaaataaaaataaattagccaggtgtggtggctgtgcccggaatctcagctacttgggaggctgaggtgggaggatcacttgagcctgggcggtcaaggctgcagtgagccttgattgcaccactgcactccagcctgggtgatggagcaagatcctgtttcaaaaaaaaaaaaaaaaaataggaaaaggaaaaggaaagaaagaaagaaagaaattctcttaaaatttttttaaaattataaatattaaaataagaaggcaaatagactaagaaaaaatcagtaaaagcgacaaattgtcatgtttatattatctttacaatataaaacgtcagttcaagtcaatttttaaatgatattgaaatattact

SEQ ID NO: 30178 - DNA, 400 bp, Homo sapiens
gacaagcacgccagccattggctcataatgagctgaaagaccaatgactgcttctcagagactccctagggcccagtgtcctgggggcagacctgtggctgagtcagcatggtgcacagcagaaagtggggggagagtggccagcgctgccccggcgggctctgtctgcatcacctggagcggcacagacccttcagtctccattctctcttcaggaaagaggcctactcgcagatgaacgcaccaaggctcagagacaaagcaaatccgtgggatgccgagggcacttggataacttccgctcgggagagaagcccaaactccgcgtcccggagacctgaagtgtggccgccagtggacacccagctgagggatgagcaggtgggcctcagtggtggct

SEQ ID NO: 30179 - DNA, 1149 bp, Homo sapiens
gcgggaaaagttcagctgagagatataaaagagcagtctttccagcacctgcaaatccagagcggcgggcactgacgggcacttgcaccgtgtggacagactctccggttctggggaaatccagtccctgttactccattttggccagaaattcaagacatttcaggtggcagaataaattcaatccttgtttctccatcttatcgagtagtagaagttagttacattctctttgaactcatcatgaattccatgaagactgaagaaaacaagtcatttagcgctatggaagatgaccagaggactagacctgaagtttcaaaggatactgtcatgaagcagacacatgctgacacacctgttgatcattgtctatctggcataagaaagtgtagcagcacctttaagcttaaaagtgaagtcaacaagcatgaaacagcccttgaaatgcagaatccaaatttgaacaataaagaatgttgtttcacctttacgttgaatggaaactccagaaaattagaccgtagtgtgtttacagcatatggtaaacccagcgagagtatctactcagccctgagtgctaatgactatttcagtgaaaggataaagaatcagtttaataagaacattattgtttatgaagaaaagacaatagatggacatataaatttaggaatgcctctcaagtgcctgcctagtgattctcattttaaaattacatttggtcaaagaaagagtagcaaagaagatggacacatattacgccaatgtgaaaatccaaacatggaatgcattctttttcatgttgttgctataggaaggacaagaaagaagattgttaagatcaacgaacttcatgaaaaaggaagtaaactttgtatttatgccttgaagggtgagactattgaaggagccttatgcaaggatggccgttttcggtctgacataggtgaatttgaatggaaactaaaggaaggtcataagaaaatttatggaaaacagtccatggtggatgaagtatctggaaaagtcttagaaatggacatttcaaaaaaaaaagcattacaacagaaagatatccataaaaaaattaaacagaatgaaagtgccactgatgaaattaatcaccagagtctgatacagtctaag

SEQ ID NO: 30180 - DNA, 982 bp, Homo sapiens
gcgggaaaagttcagctgagagatataaaagagcagtctttccagcacctgcaaatccagagcggcgggcactgacgggcacttgcaccgtgtggacagactctccggttctggggaaatccagtccctgttactccattttggccagaaattcaaggatactgtcatgaagcagacacatgctgacacacctgttgatcattgtctatctggcataagaaagtgtagcagcacctttaagcttaaaagtgaagtcaacaagcatgaaacagcccttgaaatgcagaatccaaatttgaacaataaagaatgttgtttcacctttacgttgaatggaaactccagaaaattagaccgtagtgtgtttacagcatatggtaaacccagcgagagtatctactcagccctgagtgctaatgactatttcagtgaaaggataaagaatcagtttaataagaacattattgtttatgaagaaaagacaatagatggacatataaatttaggaatgcctctcaagtgcctgcctagtgattctcattttaaaattacatttggtcaaagaaagagtagcaaagaagatggacacatattacgccaatgtgaaaatccaaacatggaatgcattctttttcatgttgttgctataggaaggacaagaaagaagattgttaagatcaacgaacttcatgaaaaaggaagtaaactttgtatttatgccttgaagggtgagactattgaaggagccttatgcaaggatggccgttttcggtctgacataggtgaatttgaatggaaactaaaggaaggtcataagaaaatttatggaaaacagtccatggtggatgaagtatctggaaaagtcttagaaatggacatttcaaaaaaaaaagcattacaacagaaagatatccataaaaaaattaaacagaatgaaagtgccactgatgaaattaatcaccagagtctgatacagtctaag

SEQ ID NO: 30181 - DNA, 1218 bp, Homo sapiens
gaactgggctacctctctacagctgtttcctcagagggaaaaatcttgagaccagatggtggagctctggagtcagaggaaatgggtgtcttcagcacaaagctgctgcttttacttcagccacttctgacatttttacataccgagcctgagattgtgtgattatctcaaatcaaatcactttgatggagataaataatcaaaactgttttatagtcattgatttggtgagaacagtaatggaaaatggtgttgaaggacttctcatttttggagctttccttccagagtcctggctgattggtgttcgctgttcatctgagcccccaaaagcattattactgatacttgcacacagtcaaaagcgcagactggatggatggtcttttataaggcatttaagggtacactactgtgtttcactgaccatacatttttcttagcccctcaagtaatatagcacagagttatgaatgacaattcccctaaccattcctcttcatatctgcctcttccccttaccatcgtaattctccaaactggtcataaaggcactctgtgaagatattggggactgacatcttaagctctcacctggctgcagtaggaaaggcaaactgacgacaaaaaaaagattctttataaagatgatatggtaacatgtatcttgccctggagtctgggtgggtccagtcagtctcagatttacaagcatttaggagcctaggtaaaagctgctagtattcttttaaaagttacatttatgacttgcaatgatagaaaactccttccaattaaatggcattttataatattatgtgtgtacttcacagtgttaaaaataccctcatacgttattgcatttgatcttcacagaaagtgcattttaaccagtactctgggtgcaataaataatatgtagaaatttaagtcctccaattccagcatatccagtgagttttgacagtgtgtttatgtggaatgtttaaggatatacaattgtactttatataaattggttcttgttcttcttaaatgtgacatgaaataattgtgctgctacattatactggaaattaacaggggaaaagggaagagctcttggctcccttgaggttctgctagtggtgttaggagtggttacaactgagcttttagtaaccatttaaccgtatgtaaacttggtttctaattaaaaaaaaatttctttttccaatt

SEQ ID NO: 30182 - DNA, 285 bp, Homo sapiens
ctgaatcgaacttttcttagttgatgagtgttttaagtgtcagtttacagtgaaatcctgtgatgatacaaaatttagatatagtataattgactctcatcctctgccatgcctattgtctgcaggtgagggccaggctgacatttcatttttaatcattgacttaatattcagtaagtaaacctgatatgtgaacttttctctccctttcctttctattctgtaactggaagactaatggaaaaatacagttttctgttaactttgcaataagccctgtgtttc

SEQ ID NO: 30183 - DNA, 483 bp, Homo sapiens
gcatgccactccaaaagtcagtgacttaaaacaaccactatttatctctcttatgtatctgctggttggctgatctaggttgggcttgacactaggccacagatttggtccaggtctgttccacttgcctctcattattgttggagtaacgggctacccagggcatgcccttagcatgctaagacggacaagcaagagggcaagcccactcgcaagcatatgtcaagcctttacttgagtcgtatcaaccaacattctattggctaaagtaatcatgtggccacattccacataagtaaatgaagcagagaaataggctccagttttagtgggaggaactctgaaatcacagtgcaaagggcacagctgcaggggaagatgagggattggtaacaaggatacattctcccatgttggaaaaaaggaaactgatgagaggtgataaaagaatttccgtcgagtttctattttctgtgactgcat

SEQ ID NO: 30184 - DNA, 487 bp, Homo sapiens
tcatataacataaaattaactattttaaagtgtacaattcagtggtgtttagtacgttcacaaatttgtggaaccactacctctatctagtcctaaaacatttttgtcaccccgaacgataactgtacccattagcagtcactcccaactcctcccttgccccagcccctggctaccactcacctttctctctatatagatgtgcccattctggatatttcatataagtgaaatcgtacactgtgtggctggaatcgcacactgtgcggctggactcatgcactgtgcggctggagtcgtgcaccgtgtggctggactcgtgcactgtggctggagtcgtacactgtgcagctggagtcgtgcgctgtgtggatggaatcatacactgtgtggcttcttgtgcctggtttcttttactcagtgtcaaaagttcatccatgtggcatgtatcaatacttcattcctttttatggccgaattatgttcc

SEQ ID NO: 30185 - DNA, 334 bp, Homo sapiens
tctacttgatatccatcaagcatattatatctgcaaatgtatatctatcatcaaacttggaaaatataaaagtttcttaaataattttttctcaattttcttttttctactattataattacacatttgttgcactgagatcaagataatcaaacaagcccctaagtctctgttcatctttttaaatttttttcttactgttttacatcttatataattttagttgatttatcttactttactctgtcatgcttattcagttatcaattccaatctaggaaaattcctttactttagaaatttgatttttagttctagaaaaactaattaattc

SEQ ID NO: 30186 - DNA, 3169 bp, Homo sapiens
caacaccgactgtcatgcaaataatacatttaaaatagttgcatggtttcaaagacaatgcagacgtaattggcctttgactttgggacctcgggttactctcactccctactgcaaaacaaactaagggttgaaagcaaagcattctgttcaaatccagggccctttgtttgaaaagaacacagggcccacagctggtgttttgaagtagaagttcccactagtggcgcagtggaccgtctgatgctgacttgcaggaagtcggtcctgggaggctctgaacacccctccctgtgattaaccactttgctgtcagaaatgtcattttcccatacactgtgctgtgggcccggggcctccttcgcttctttctttgggttccatatgttgcccgatcttgaggttagcgctcgccccaatttctccatgagtttactctgagttgacaggcgatgatctgacagttggaggtgtctgggtgtttggaggtggccccgttctcatgttggctgctcatcagacattgagtttggccccggcggttctactacgtcactacctggaagcaattgcctttaacactctgctgtttggggtttcgatgctttttatgctgcgttgcgtgctttcattccggaagagctaagtgtcctttgcagtctctctgagaatgttttgtaattctgccgccacgctgttctgtgcggaccgacctcaagaggcttgggcccccgtgggtgtcccactgcctgccggcccagggtacaggctgcttgggtccgctgggctggccttgggctgtcagaatctggtccagggtgtttcgaggggacactgcacagccgctcgcccctcgactcagtcatgggagctgcagcacgcagatccaccgcaagcttcctgcacgcgcatctccggaatgctgcgctgggccctcccaccatcttcgcgtttgtgagaatttactcagaagtgagagaactgaagattcctggtgcttttgttaacacgtttctatcttattggttggtgtggaaatgttagatgtgttgttaggtttttaaatgctgtgggtggtatgattaaagggttaagtcctcacctcagcccccagcccccttttggggggtaggaagaggctgagttatctcctatttaaaacctccttggatttaagtagttcagagttaaagctaaaacaccaaatattaactctttcccccaagtgtctccaggaactggacgttggggccattcttattcagttctttctgtagctccaaggtccttaaaatgagtgagttgatcccaagaacaccccacagcaccaaccagcagggcacagtgcaagcgacttcatagatcggggtgctcgtgtaggggtccggggctcctttgaactctgggagttgtgtgcgcagtcttgggtgggagacggcaggtccctctgtcccaagaagctggtggtgccaaggccttcctctgtctccatcagtgccagcctgatcgcgttctggaagacccagtctcagactctgtgcctttaaagtccggtcctcagtgtcctttcagaatcatgttggggctgcgtttctctggggaactaagcctgtgccattccacaaggcaggcgtggacctccagccttggaagctttctttccgctcctcagcccctgacttgtaaactgtgatgccatgcagtctggagccgcgggggacgcactcggtctcattgcggaaaacacttggttccagtcgtgtggtttctcccataccctgaccaagtccacctctgccaggattgcaggagattggtgcaagacccatctcttatgcattgaccatgaccatcagcaaagcctggtggtcttgttctcatagtcactcgagaagaatatttattgtaatggaagtagattttttaaaaaaggaattggaatcatgtctttgtagaatgtgtgtgtgtgaagtcctcagctgtaaggtgctattcagtcctgtgacccttattttggaatgctcttcattactgttgctctgttttgtgacttcctgggaaaccgcctactttggtgtggtgtcaccttgagctgtgcacataggacaccagttttgacttaacctaacaggcagtttttatctctagctttttcaagccaggtattgagcagtttcttggccaatggcctgagaaaccacctgtccctgtcaaggggtgattttattggttttaagtggggaagtaatcccatgtacttatttcttaaatacctaggaagttcttcttggtggctcctcttggccctcccctctttctcccccaacccaccatcctgcaaggcaaggaatggcctctccctccacagaggcaacggctgcagagggagcactgtggctgccatcccagttcctcttcaaagccaaacagacacgcgtgactcaaaccctacagtatggagggtggcgttgcattgaaattccaggcctgagtttgatagtggattttaatgtagttgttaaaggtatgaattcatgttttataactgtagaggcaagcaagtttttattttttaaaaagttttgagagaataatttataagtttctgtgcagcaaagtggctaattactcattaaatacaggaaaagaatgtagtatctaaatccagctttttcttacctctggtacacttcagattacttacctaatacatattgagggcttttaacccttagttttatcaatttttctagttttattttatttttataaaataattgaaaaagaaccaaaaatgaattcagaagttccatagatggatttttgccccttcttaattttctcccacaatgaaaacattttagaagacattttgaatcaaaatgtattatgaccattgaaagttctctattttctaagaagctgagcagctccaagggcctcgtttcaggtggtactctatgtattgtctgtgggcttgtttctacctgtacagtggaaccatgtgaccatgtcttgtgcttgcaatatagaaaccatgcagtgctgttttgtgaattggcagtttctgtataaactcttatttatatacattggcctctctgtatgattttccatttgctacatgaattgtaaaattaattataaaattatagtacctgctaaatac

SEQ ID NO: 30187 - DNA, 427 bp, Homo sapiens
ccccccccaaaaaaaaaaaagagggggagtgttttattttacaataaaactggtgaagaaagctaaatgctgagaaactgagcatctattgtcgtgtttaagcttagctgggtcctttctagtttgtttttacagcttactaggtgaagtagtttgcactatttttgcaataaattcatggaaaacctaacagttacttgttttgtttcttactgtgtgtatataaactaatactaaaagtttggcatagtgttttttcacctccttacataacccctaacatgcacagaatgctgtaaatctgataaaatatgatgtgaatgatattttataaagttattttgtatggtgtcaattttgttttgcctcatagtatgtcagcaaaaaattaaataaaagtcctcctatttacagctgcttccaaaaa

SEQ ID NO: 30188 - DNA, 422 bp, Homo sapiens
gcggccgcccctcggccccggagcccctcggcggcgccaccatgtactcgggagccggccccgggacaaaggaattaatagagtaacacgggtaaaaaatgcagagaaagcaaaggaagatgccaagagtgatgagaggggtgacttggaacaaatctgtgtgtggaggtgtctgagctcttgggagtggctgggggctcatgtgacgttgcaggatgcccgcctcagcataacagcaccctgagcgcaggctcaggtcaggcccacctcactggaatcctggccacgtgatgggtgtctcacctcacctctctgaacctcagtctcctcttcgtacagagtgaaaacctcgtcctcatggtggtggtgctttgatcagaggagatgatgcgggcgacctgcagttgtgtcccacatgcagg

SEQ ID NO: 30189 - DNA, 423 bp, Homo sapiens
gcggccgcccctcggccccggagcccctcggcggcgccaccatgtactcgggagccggccccgcacttgcacctcctgcgccgccgccccccatccaaggatatgccttcaagcctccacctagacccgactttgggacctccgggagaacaatcaaattacaggccaatttcttcgaaatggacatccccaaaattgacatctatcattatgaattggatatcaagccagagaagtgcccgaggagagttaacagggaaatcgtggaacacatggtccagcactttaaaacacagatctttggggatcggaagcccgtgtttgacggcaggaagaatctatacacagccatgccccttccgattgggagggacaaggtccagacacggatatcgagaacttgctgaaaccaccaaactttaa

SEQ ID NO: 30190 - DNA, 5967 bp, Homo sapiens
caacaccgactgtcatgcaaataatacatttaaaatagttgcatggtttcaaagacaatgcagacgtaattggcctttgactttgggacctcgggttactctcactccctactgcaaaacaaactaagggttgaaagcaaagcattctgttcaaatccagggccctttgtttgaaaagaacacagggcccacagctggtgttttgaagtagaagttcccactagtggcgcagtggaccgtctgatgctgacttgcaggaagtcggtcctgggaggctctgaacacccctccctgtgattaaccactttgctgtcagaaatgtcattttcccatacactgtgctgtgggcccggggcctccttcgcttctttctttgggttccatatgttgcccgatcttgaggttagcgctcgccccaatttctccatgagtttactctgagttgacaggcgatgatctgacagttggaggtgtctgggtgtttggaggtggccccgttctcatgttggctgctcatcagacattgagtttggccccggcggttctactacgtcactacctggaagcaattgcctttaacactctgctgtttggggtttcgatgctttttatgctgcgttgcgtgctttcattccggaagagctaagtgtcctttgcagtctctctgagaatgttttgtaattctgccgccacgctgttctgtgcggaccgacctcaagaggcttgggcccccgtgggtgtcccactgcctgccggcccagggtacaggctgcttgggtccgctgggctggccttgggctgtcagaatctggtccagggtgtttcgaggggacactgcacagccgctcgcccctcgactcagtcatgggagctgcagcacgcagatccaccgcaagcttcctgcacgcgcatctccggaatgctgcgctgggccctcccaccatcttcgcgtttgtgagaatttactcagaagtgagagaactgaagattcctggtgcttttgttaacacgtttctatcttattggttggtgtggaaatgttagatgtgttgttaggtttttaaatgctgtgggtggtatgattaaagggttaagtcctcacctcagcccccagcccccttttggggggtaggaagaggctgagttatctcctatttaaaacctccttggatttaagtagttcagagttaaagctaaaacaccaaatattaactctttcccccaagtgtctccaggaactggacgttggggccattcttattcagttctttctgtagctccaaggtccttaaaatgagtgagttgatcccaagaacaccccacagcaccaaccagcagggcacagtgcaagcgacttcatagatcggggtgctcgtgtaggggtccggggctcctttgaactctgggagttgtgtgcgcagtcttgggtgggagacggcaggtccctctgtcccaagaagctggtggtgccaaggccttcctctgtctccatcagtgccagcctgatcgcgttctggaagacccagtctcagactctgtgcctttaaagtccggtcctcagtgtcctttcagaatcatgttggggctgcgtttctctggggaactaagcctgtgccattccacaaggcaggcgtggacctccagccttggaagctttctttccgctcctcagcccctgacttgtaaactgtgatgccatgcagtctggagccgcgggggacgcactcggtctcattgcggaaaacacttggttccagtcgtgtggtttctcccataccctgaccaagtccacctctgccaggattgcaggagattggtgcaagacccatctcttatgcattgaccatgaccatcagcaaagcctggtggtcttgttctcatagtcactcgagaagaatatttattgtaatggaagtagattttttaaaaaaggaattggaatcatgtctttgtagaatgtgtgtgtgtgaagtcctcagctgtaaggtgctattcagtcctgtgacccttattttggaatgctcttcattactgttgctctgttttgtgacttcctgggaaaccgcctactttggtgtggtgtcaccttgagctgtgcacataggacaccagttttgacttaacctaacaggcagtttttatctctagctttttcaagccaggtattgagcagtttcttggccaatggcctgagaaaccacctgtccctgtcaaggggtgattttattggttttaagtggggaagtaatcccatgtacttatttcttaaatacctaggaagttcttcttggtggctcctcttggccctcccctctttctcccccaacccaccatcctgcaaggcaaggaatggcctctccctccacagaggcaacggctgcagagggagcactgtggctgccatcccagttcctcttcaaagccaaacagacacgcgtgactcaaaccctacagtatggagggtggcgttgcattgaaattccaggcctgagtttgatagtggattttaatgtagttgttaaaggtatgaattcatgttttataactgtagaggcaagcaagtttttattttttaaaaagttttgagagaataatttataagtttctgtgcagcaaagtggctaattactcattaaatacaggaaaagaatgtagtatctaaatccagctttttcttacctctggtacacttcagattacttacctaatacatattgagggcttttaacccttagttttatcaatttttctagttttattttatttttataaaataattgaaaaagaaccaaaaatgaattcagaagttccatagatggatttttgccccttcttaattttctcccacaatgaaaacattttagaagacattttgaatcaaaatgtattatgaccattgaaagttctctattttctaagaagctgagcagctccaagggcctcgtttcaggtggtactctatgtattgtctgtgggcttgtttctacctgtacagtggaaccatgtgaccatgtcttgtgcttgcaatatagaaaccatgcagtgctgttttgtgaattggcagtttctgtataaactcttatttatatacattggcctctctgtatgattttccatttgctacatgaattgtaaaattaattataaaattatagtacctgctaaatacaattctgaggcttcatgtcattgtctttagttgaataccatgctgtgtgtcttgaagatgtccacgcttgcatgatgctaggtggcaatgccactttaaattaagccttaatcagatgttaaatttgtgagtttcagagtatgcaaaaatattaggcagagtgagtgtaaactgttcagatcaagatgctgtatcataattcaagttatttttttctggagttaaagggaagcattcagtgatacacctctctctctctctctctctctctcttgtctagcttggctatggccatagcttgatgaaaatggaccattgtgcatttctgtgacagtcaaaaagacctgttctaaaagtcttgcgactttttcagggttttttttttttttcatgtttctttttttttttcccctccagtctgagatttctgtgtggctgatggagagtgtgatttgggcgtaggtcttatttgcaaacctgctcatgttctaagctttcttcaggtagtaccacctgtcatcgcttctgcatatgatttaaatggatttttgtttttataaaagtatcataaatttagagataaaatggaggggacccagctttctttacaatgtggatctacctcagttaaacagttgggtgctattactaagtctgtcaaattaaattggaaaaagtaaccaaacagtgagatacaactccacatgaaacttgaaattgtaatttccgtttatttaatgatatttttatttatttgtgccttttatgttgaaccccaatgcattgaaaaaattcagtatgaaacagtacatattttatttatattacaggtgggagaaaagtccaattggtcatggaatttgatagacttttccccagccaactgctacagtgtattataatcccgactgcccccctgtgaaaagaaaaaaaaaatgtccaagagcaaatttaacattttacaaacaataaagtccaaactcctctatgcacatatttatagcttatcacttcattttctgtgccagtgaaggggtggccagaaaaaaaatcccaagtaccctcatcattgcttttctagccattcatgccccctcttcctctggcacattttctaagagtttatttcataagcagcaaacggactgttgtcgatttcatctctcctgacctacctggtggaggtgctaatggccatggacagaaaggggcgagccagagctcgtggctttgtggaggcagaggcctgcattcagcagcggccctgtgtgcctgtaagttaggaaggctttctgacaggtaagaaaatgagataggttgatgacttaccatgcttttatatttggcagtttacaattctagacttttcctactatggcgatctttttttacttaattctttggaggtaacaatattttggagtcttaagaatttgattttataccaataagaaataaaaattagggatctttcctgtagtatatagttttactattttaaagagatctctgaattttacaagagaaccaacattccttaatggcagaactttgaaagttgatttgggaggctttttgctgcaggatctcaaaaatagagagagagatgattctacttaaatgtttttaattttctaacttccatcaggttgatacttaagctctattttgtaaagagtaaatcatcctttagtatgctgcataagatgatcagcattcttgcactttctcagtaataagacgtgccgggcaattggctccccaggacgcattgtgtttttaacctaacgagaggactttggggcaggtgattaaatttatataggtacctcaagaaaaagaacctgaatatgctgcattttctttctttagcttttacatgtagcattttgttttgcttttgttatttttgttttgatatatgctttttggaccccaatagactgttgaaagaaatttaaaaattactcttgtagggatatagtatccttaaaaaataaaaattaaaaaaaatttaaaaaaattgctgcaatatctggctcgaaggttgccctatattagaataatactttagccaaatacacctgaggaggcagacactgtgtttataagcagacaataatgttctgaatccttcctgttcatgctgctttcttaattcatttctccatgtcatcaagaggttggataacttatttctaagctcaaggttaaaaatcatgtcaccttttttttttttcccccaacacagacctcagaaaaattgcgattgaggaagtagcatgatcctaaatgtgttgctgaaatcaggcagcccgagcctctggtctctccagagagcccgtcttcacatttctctattcctcagcactcacccgaaactgaacagatggggagtggtcttgattgtcaagataaaactggtgaagaaagctaaatgctgagaaactgagcatctattgtcgtgtttaagcttagctgggtcctttctagtttgtttttacagcttactaggtgaagtagtttgcactatttttgcaataaattcatggaaaacctaacagttacttgttttgtttcttactgtgtgtatataaactaatactaaaagtttggcatagtgttttttcacctccttacataacccctaacatgcacagaatgctgtaaatctgataaaatatgatgtgaatgatattttataaagttattttgtatggtgtcaattttgttttgcctcatagtatgtcagcaaaaaattaaataaaagtcctcctatttacagctgcttccaaaaa

SEQ ID NO: 30191 - DNA, 4712 bp, Homo sapiens
gcggccgcccctcggccccggagcccctcggcggcgccaccatgtactcgggagccggccccgcacttgcacctcctgcgccgccgccccccatccaaggatatgccttcaagcctccacctagacccgactttgggacctccgggagaacaatcaaattacaggccaatttcttcgaaatggacatccccaaaattgacatctatcattatgaattggatatcaagccagagaagtgcccgaggagagttaacagggaaatcgtggaacacatggtccagcactttaaaacacagatctttggggatcggaagcccgtgtttgacggcaggaagaatctatacacagccatgccccttccgattgggagggacaaggtggacctccagccttggaagctttctttccgctcctcagcccctgacttgtaaactgtgatgccatgcagtctggagccgcgggggacgcactcggtctcattgcggaaaacacttggttccagtcgtgtggtttctcccataccctgaccaagtccacctctgccaggattgcaggagattggtgcaagacccatctcttatgcattgaccatgaccatcagcaaagcctggtggtcttgttctcatagtcactcgagaagaatatttattgtaatggaagtagattttttaaaaaaggaattggaatcatgtctttgtagaatgtgtgtgtgtgaagtcctcagctgtaaggtgctattcagtcctgtgacccttattttggaatgctcttcattactgttgctctgttttgtgacttcctgggaaaccgcctactttggtgtggtgtcaccttgagctgtgcacataggacaccagttttgacttaacctaacaggcagtttttatctctagctttttcaagccaggtattgagcagtttcttggccaatggcctgagaaaccacctgtccctgtcaaggggtgattttattggttttaagtggggaagtaatcccatgtacttatttcttaaatacctaggaagttcttcttggtggctcctcttggccctcccctctttctcccccaacccaccatcctgcaaggcaaggaatggcctctccctccacagaggcaacggctgcagagggagcactgtggctgccatcccagttcctcttcaaagccaaacagacacgcgtgactcaaaccctacagtatggagggtggcgttgcattgaaattccaggcctgagtttgatagtggattttaatgtagttgttaaaggtatgaattcatgttttataactgtagaggcaagcaagtttttattttttaaaaagttttgagagaataatttataagtttctgtgcagcaaagtggctaattactcattaaatacaggaaaagaatgtagtatctaaatccagctttttcttacctctggtacacttcagattacttacctaatacatattgagggcttttaacccttagttttatcaatttttctagttttattttatttttataaaataattgaaaaagaaccaaaaatgaattcagaagttccatagatggatttttgccccttcttaattttctcccacaatgaaaacattttagaagacattttgaatcaaaatgtattatgaccattgaaagttctctattttctaagaagctgagcagctccaagggcctcgtttcaggtggtactctatgtattgtctgtgggcttgtttctacctgtacagtggaaccatgtgaccatgtcttgtgcttgcaatatagaaaccatgcagtgctgttttgtgaattggcagtttctgtataaactcttatttatatacattggcctctctgtatgattttccatttgctacatgaattgtaaaattaattataaaattatagtacctgctaaatacaattctgaggcttcatgtcattgtctttagttgaataccatgctgtgtgtcttgaagatgtccacgcttgcatgatgctaggtggcaatgccactttaaattaagccttaatcagatgttaaatttgtgagtttcagagtatgcaaaaatattaggcagagtgagtgtaaactgttcagatcaagatgctgtatcataattcaagttatttttttctggagttaaagggaagcattcagtgatacacctctctctctctctctctctctctcttgtctagcttggctatggccatagcttgatgaaaatggaccattgtgcatttctgtgacagtcaaaaagacctgttctaaaagtcttgcgactttttcagggttttttttttttttcatgtttctttttttttttcccctccagtctgagatttctgtgtggctgatggagagtgtgatttgggcgtaggtcttatttgcaaacctgctcatgttctaagctttcttcaggtagtaccacctgtcatcgcttctgcatatgatttaaatggatttttgtttttataaaagtatcataaatttagagataaaatggaggggacccagctttctttacaatgtggatctacctcagttaaacagttgggtgctattactaagtctgtcaaattaaattggaaaaagtaaccaaacagtgagatacaactccacatgaaacttgaaattgtaatttccgtttatttaatgatatttttatttatttgtgccttttatgttgaaccccaatgcattgaaaaaattcagtatgaaacagtacatattttatttatattacaggtgggagaaaagtccaattggtcatggaatttgatagacttttccccagccaactgctacagtgtattataatcccgactgcccccctgtgaaaagaaaaaaaaaatgtccaagagcaaatttaacattttacaaacaataaagtccaaactcctctatgcacatatttatagcttatcacttcattttctgtgccagtgaaggggtggccagaaaaaaaatcccaagtaccctcatcattgcttttctagccattcatgccccctcttcctctggcacattttctaagagtttatttcataagcagcaaacggactgttgtcgatttcatctctcctgacctacctggtggaggtgctaatggccatggacagaaaggggcgagccagagctcgtggctttgtggaggcagaggcctgcattcagcagcggccctgtgtgcctgtaagttaggaaggctttctgacaggtaagaaaatgagataggttgatgacttaccatgcttttatatttggcagtttacaattctagacttttcctactatggcgatctttttttacttaattctttggaggtaacaatattttggagtcttaagaatttgattttataccaataagaaataaaaattagggatctttcctgtagtatatagttttactattttaaagagatctctgaattttacaagagaaccaacattccttaatggcagaactttgaaagttgatttgggaggctttttgctgcaggatctcaaaaatagagagagagatgattctacttaaatgtttttaattttctaacttccatcaggttgatacttaagctctattttgtaaagagtaaatcatcctttagtatgctgcataagatgatcagcattcttgcactttctcagtaataagacgtgccgggcaattggctccccaggacgcattgtgtttttaacctaacgagaggactttggggcaggtgattaaatttatataggtacctcaagaaaaagaacctgaatatgctgcattttctttctttagcttttacatgtagcattttgttttgcttttgttatttttgttttgatatatgctttttggaccccaatagactgttgaaagaaatttaaaaattactcttgtagggatatagtatccttaaaaaataaaaattaaaaaaaatttaaaaaaattgctgcaatatctggctcgaaggttgccctatattagaataatactttagccaaatacacctgaggaggcagacactgtgtttataagcagacaataatgttctgaatccttcctgttcatgctgctttcttaattcatttctccatgtcatcaagaggttggataacttatttctaagctcaaggttaaaaatcatgtcaccttttttttttttcccccaacacagacctcagaaaaattgcgattgaggaagtagcatgatcctaaatgtgttgctgaaatcaggcagcccgagcctctggtctctccagagagcccgtcttcacatttctctattcctcagcactcacccgaaactgaacagatggggagtggtcttgattgtcaagataaaactggtgaagaaagctaaatgctgagaaactgagcatctattgtcgtgtttaagcttagctgggtcctttctagtttgtttttacagcttactaggtgaagtagtttgcactatttttgcaataaattcatggaaaacctaacagttacttgttttgtttcttactgtgtgtatataaactaatactaaaagtttggcatagtgttttttcacctccttacataacccctaacatgcacagaatgctgtaaatctgataaaatatgatgtgaatgatattttataaagttattttgtatggtgtcaattttgttttgcctcatagtatgtcagcaaaaaattaaataaaagtcctcctatttacagctgcttccaaaaa

SEQ ID NO: 30192 - DNA, 4741 bp, Homo sapiens
agcttcatcccaccgggcaattttcctgcacagcagctgttacagtcccattctcacctggcccctgggccagttcggaagcctctgagcagcacttgcacctcctgcgccgccgccccccatccaaggatatgccttcaagcctccacctagacccgactttgggacctccgggagaacaatcaaattacaggccaatttcttcgaaatggacatccccaaaattgacatctatcattatgaattggatatcaagccagagaagtgcccgaggagagttaacagggaaatcgtggaacacatggtccagcactttaaaacacagatctttggggatcggaagcccgtgtttgacggcaggaagaatctatacacagccatgccccttccgattgggagggacaaggtggacctccagccttggaagctttctttccgctcctcagcccctgacttgtaaactgtgatgccatgcagtctggagccgcgggggacgcactcggtctcattgcggaaaacacttggttccagtcgtgtggtttctcccataccctgaccaagtccacctctgccaggattgcaggagattggtgcaagacccatctcttatgcattgaccatgaccatcagcaaagcctggtggtcttgttctcatagtcactcgagaagaatatttattgtaatggaagtagattttttaaaaaaggaattggaatcatgtctttgtagaatgtgtgtgtgtgaagtcctcagctgtaaggtgctattcagtcctgtgacccttattttggaatgctcttcattactgttgctctgttttgtgacttcctgggaaaccgcctactttggtgtggtgtcaccttgagctgtgcacataggacaccagttttgacttaacctaacaggcagtttttatctctagctttttcaagccaggtattgagcagtttcttggccaatggcctgagaaaccacctgtccctgtcaaggggtgattttattggttttaagtggggaagtaatcccatgtacttatttcttaaatacctaggaagttcttcttggtggctcctcttggccctcccctctttctcccccaacccaccatcctgcaaggcaaggaatggcctctccctccacagaggcaacggctgcagagggagcactgtggctgccatcccagttcctcttcaaagccaaacagacacgcgtgactcaaaccctacagtatggagggtggcgttgcattgaaattccaggcctgagtttgatagtggattttaatgtagttgttaaaggtatgaattcatgttttataactgtagaggcaagcaagtttttattttttaaaaagttttgagagaataatttataagtttctgtgcagcaaagtggctaattactcattaaatacaggaaaagaatgtagtatctaaatccagctttttcttacctctggtacacttcagattacttacctaatacatattgagggcttttaacccttagttttatcaatttttctagttttattttatttttataaaataattgaaaaagaaccaaaaatgaattcagaagttccatagatggatttttgccccttcttaattttctcccacaatgaaaacattttagaagacattttgaatcaaaatgtattatgaccattgaaagttctctattttctaagaagctgagcagctccaagggcctcgtttcaggtggtactctatgtattgtctgtgggcttgtttctacctgtacagtggaaccatgtgaccatgtcttgtgcttgcaatatagaaaccatgcagtgctgttttgtgaattggcagtttctgtataaactcttatttatatacattggcctctctgtatgattttccatttgctacatgaattgtaaaattaattataaaattatagtacctgctaaatacaattctgaggcttcatgtcattgtctttagttgaataccatgctgtgtgtcttgaagatgtccacgcttgcatgatgctaggtggcaatgccactttaaattaagccttaatcagatgttaaatttgtgagtttcagagtatgcaaaaatattaggcagagtgagtgtaaactgttcagatcaagatgctgtatcataattcaagttatttttttctggagttaaagggaagcattcagtgatacacctctctctctctctctctctctctcttgtctagcttggctatggccatagcttgatgaaaatggaccattgtgcatttctgtgacagtcaaaaagacctgttctaaaagtcttgcgactttttcagggttttttttttttttcatgtttctttttttttttcccctccagtctgagatttctgtgtggctgatggagagtgtgatttgggcgtaggtcttatttgcaaacctgctcatgttctaagctttcttcaggtagtaccacctgtcatcgcttctgcatatgatttaaatggatttttgtttttataaaagtatcataaatttagagataaaatggaggggacccagctttctttacaatgtggatctacctcagttaaacagttgggtgctattactaagtctgtcaaattaaattggaaaaagtaaccaaacagtgagatacaactccacatgaaacttgaaattgtaatttccgtttatttaatgatatttttatttatttgtgccttttatgttgaaccccaatgcattgaaaaaattcagtatgaaacagtacatattttatttatattacaggtgggagaaaagtccaattggtcatggaatttgatagacttttccccagccaactgctacagtgtattataatcccgactgcccccctgtgaaaagaaaaaaaaaatgtccaagagcaaatttaacattttacaaacaataaagtccaaactcctctatgcacatatttatagcttatcacttcattttctgtgccagtgaaggggtggccagaaaaaaaatcccaagtaccctcatcattgcttttctagccattcatgccccctcttcctctggcacattttctaagagtttatttcataagcagcaaacggactgttgtcgatttcatctctcctgacctacctggtggaggtgctaatggccatggacagaaaggggcgagccagagctcgtggctttgtggaggcagaggcctgcattcagcagcggccctgtgtgcctgtaagttaggaaggctttctgacaggtaagaaaatgagataggttgatgacttaccatgcttttatatttggcagtttacaattctagacttttcctactatggcgatctttttttacttaattctttggaggtaacaatattttggagtcttaagaatttgattttataccaataagaaataaaaattagggatctttcctgtagtatatagttttactattttaaagagatctctgaattttacaagagaaccaacattccttaatggcagaactttgaaagttgatttgggaggctttttgctgcaggatctcaaaaatagagagagagatgattctacttaaatgtttttaattttctaacttccatcaggttgatacttaagctctattttgtaaagagtaaatcatcctttagtatgctgcataagatgatcagcattcttgcactttctcagtaataagacgtgccgggcaattggctccccaggacgcattgtgtttttaacctaacgagaggactttggggcaggtgattaaatttatataggtacctcaagaaaaagaacctgaatatgctgcattttctttctttagcttttacatgtagcattttgttttgcttttgttatttttgttttgatatatgctttttggaccccaatagactgttgaaagaaatttaaaaattactcttgtagggatatagtatccttaaaaaataaaaattaaaaaaaatttaaaaaaattgctgcaatatctggctcgaaggttgccctatattagaataatactttagccaaatacacctgaggaggcagacactgtgtttataagcagacaataatgttctgaatccttcctgttcatgctgctttcttaattcatttctccatgtcatcaagaggttggataacttatttctaagctcaaggttaaaaatcatgtcaccttttttttttttcccccaacacagacctcagaaaaattgcgattgaggaagtagcatgatcctaaatgtgttgctgaaatcaggcagcccgagcctctggtctctccagagagcccgtcttcacatttctctattcctcagcactcacccgaaactgaacagatggggagtggtcttgattgtcaagataaaactggtgaagaaagctaaatgctgagaaactgagcatctattgtcgtgtttaagcttagctgggtcctttctagtttgtttttacagcttactaggtgaagtagtttgcactatttttgcaataaattcatggaaaacctaacagttacttgttttgtttcttactgtgtgtatataaactaatactaaaagtttggcatagtgttttttcacctccttacataacccctaacatgcacagaatgctgtaaatctgataaaatatgatgtgaatgatattttataaagttattttgtatggtgtcaattttgttttgcctcatagtatgtcagcaaaaaattaaataaaagtcctcctatttacagctgcttccaaaaa

SEQ ID NO: 30193 - DNA, 3192 bp, Homo sapiens
  misc_feature (4)..(4): n is a, c, g, or t
cctnctactactaaattcgcggccgcgtcgacttccatagatggatttttgccccttcttaattttctcccacaatgaaaacattttagaagacattttgaatcaaaatgtattatgaccattgaaagttctctattttctaagaagctgagcagctccaagggcctcgtttcaggtggtactctatgtattgtctgtgggcttgtttctacctgtacagtggaaccatgtgaccatgtcttgtgcttgcaatatagaaaccatgcagtgctgttttgtgaattggcagtttctgtataaactcttatttatatacattggcctctctgtatgattttccatttgctacatgaattgtaaaattaattataaaattatagtacctgctaaatacaattctgaggcttcatgtcattgtctttagttgaataccatgctgtgtgtcttgaagatgtccacgcttgcatgatgctaggtggcaatgccactttaaattaagccttaatcagatgttaaatttgtgagtttcagagtatgcaaaaatattaggcagagtgagtgtaaactgttcagatcaagatgctgtatcataattcaagttatttttttctggagttaaagggaagcattcagtgatacacctctctctctctctctctctctctcttgtctagcttggctatggccatagcttgatgaaaatggaccattgtgcatttctgtgacagtcaaaaagacctgttctaaaagtcttgcgactttttcagggttttttttttttttcatgtttctttttttttttcccctccagtctgagatttctgtgtggctgatggagagtgtgatttgggcgtaggtcttatttgcaaacctgctcatgttctaagctttcttcaggtagtaccacctgtcatcgcttctgcatatgatttaaatggatttttgtttttataaaagtatcataaatttagagataaaatggaggggacccagctttctttacaatgtggatctacctcagttaaacagttgggtgctattactaagtctgtcaaattaaattggaaaaagtaaccaaacagtgagatacaactccacatgaaacttgaaattgtaatttccgtttatttaatgatatttttatttatttgtgccttttatgttgaaccccaatgcattgaaaaaattcagtatgaaacagtacatattttatttatattacaggtgggagaaaagtccaattggtcatggaatttgatagacttttccccagccaactgctacagtgtattataatcccgactgcccccctgtgaaaagaaaaaaaaaatgtccaagagcaaatttaacattttacaaacaataaagtccaaactcctctatgcacatatttatagcttatcacttcattttctgtgccagtgaaggggtggccagaaaaaaaatcccaagtaccctcatcattgcttttctagccattcatgccccctcttcctctggcacattttctaagagtttatttcataagcagcaaacggactgttgtcgatttcatctctcctgacctacctggtggaggtgctaatggccatggacagaaaggggcgagccagagctcgtggctttgtggaggcagaggcctgcattcagcagcggccctgtgtgcctgtaagttaggaaggctttctgacaggtaagaaaatgagataggttgatgacttaccatgcttttatatttggcagtttacaattctagacttttcctactatggcgatctttttttacttaattctttggaggtaacaatattttggagtcttaagaatttgattttataccaataagaaataaaaattagggatctttcctgtagtatatagttttactattttaaagagatctctgaattttacaagagaaccaacattccttaatggcagaactttgaaagttgatttgggaggctttttgctgcaggatctcaaaaatagagagagagatgattctacttaaatgtttttaattttctaacttccatcaggttgatacttaagctctattttgtaaagagtaaatcatcctttagtatgctgcataagatgatcagcattcttgcactttctcagtaataagacgtgccgggcaattggctccccaggacgcattgtgtttttaacctaacgagaggactttggggcaggtgattaaatttatataggtacctcaagaaaaagaacctgaatatgctgcattttctttctttagcttttacatgtagcattttgttttgcttttgttatttttgttttgatatatgctttttggaccccaatagactgttgaaagaaatttaaaaattactcttgtagggatatagtatccttaaaaaataaaaattaaaaaaaatttaaaaaaattgctgcaatatctggctcgaaggttgccctatattagaataatactttagccaaatacacctgaggaggcagacactgtgtttataagcagacaataatgttctgaatccttcctgttcatgctgctttcttaattcatttctccatgtcatcaagaggttggataacttatttctaagctcaaggttaaaaatcatgtcaccttttttttttttcccccaacacagacctcagaaaaattgcgattgaggaagtagcatgatcctaaatgtgttgctgaaatcaggcagcccgagcctctggtctctccagagagcccgtcttcacatttctctattcctcagcactcacccgaaactgaacagatggggagtggtcttgattgtcaagataaaactggtgaagaaagctaaatgctgagaaactgagcatctattgtcgtgtttaagcttagctgggtcctttctagtttgtttttacagcttactaggtgaagtagtttgcactatttttgcaataaattcatggaaaacctaacagttacttgttttgtttcttactgtgtgtatataaactaatactaaaagtttggcatagtgttttttcacctccttacataacccctaacatgcacagaatgctgtaaatctgataaaatatgatgtgaatgatattttataaagttattttgtatggtgtcaattttgttttgcctcatagtatgtcagcaaaaaattaaataaaagtcctcctatttacagctgcttccaaaaa

SEQ ID NO: 30194 - DNA, 3322 bp, Homo sapiens
gcggccgcccctcggccccggagcccctcggcggcgccaccatgtactcgggagccggccccgcacttgcacctcctgcgccgccgccccccatccaaggatatgccttcaagcctccacctagacccgactttgggacctccgggagaacaatcaaattacaggccaatttcttcgaaatggacatccccaaaattgacatctatcattatgaattggatatcaagccagagaagtgcccgaggagagttaacagggaaatcgtggaacacatggtccagcactttaaaacacagatctttggggatcggaagcccgtgtttgacggcaggaagaatctatacacagccatgccccttccgattgggagggacaaggtggagctggaggtcacgctgccaggagaaggcaaggatcgcatcttcaaggtgtccatcaagtgggtgtcctgcgtgagcttgcaggcgttacacgatgcactttcagggcggctgcccagcgtcccttttgagacgatccaggccctggacgtggtcatgaggcacttgccatccatgaggtacacccccgtgggccgctccttcttcaccgcgtccgaaggctgctctaaccctcttggcgggggccgagaagtgtggtttggcttccatcagtccgtccggccttctctctggaaaatgatgctgaatattgatgtgtcagcaacagcgttttacaaaggcacagccagtaatcgagtttgtttgtgaagttttggattttaaaagtattgaagaacaacaaaaacctctgacagattcccaaagggtaaagtttaccaaagaaattaaaggtctaaaggtggagataacgcactgtgggcagatgaagaggaagtaccgcgtctgcaatgtgacccggcggcccgccagtcaccaaacattcccgctgcagcaggagagcgggcagacggtggagtgcacggtggcccagtatttcaaggacaggcacaagttggttctgcgctacccccacctcccatgtttacaagtcggacaggagcagaaacacacctaccttcccctggaggtctgtaacattgtggcaggacaaagatgtattaaaaaattaacggacaatcagacctcaaccatgatcagagcaactgctaggtcggcgcccgatcggcaagaagagattagcaaattgatgcgaagtgcaagtttcaacacagatccatacgtccgtgaatttggaatcatggtcaaagatgagatgacagacgtgactgggcgggtgctgcagccgccctccatcctctacgggggcaggaataaagctattgcgacccctgtccagggcgtctgggacatgcggaacaagcagttccacacgggcatcgagatcaaggtgtgggccattgcgtgcttcgccccccagcgccagtgcacggaagtccatctgaagtccttcacagagcagctcagaaagatctcgagagacgctggcatgcccatccagggccagccgtgcttctgcaaatacgcgcagggggcggacagcgtggagcccatgttccggcacctgaagaacacgtatgcgggcctgcagctggtggtggtcatcctgcccggcaagacgcccgtgtacgccgaggtcaagcgcgtgggagacacggtgctggggatggccacgcagtgcgtgcagatgaagaacgtgcagaggaccacgccacagaccctgtccaacctctgcctgaagatcaacgtcaagctgggaggcgtgaacaacatcctgctgccccagggcaggccgccggtgttccagcagcccgtcatctttctgggagcagacgtcactcacccccccgccggggatgggaagaagccctccattgccgccgtggtgggcagcatggacgcccaccccaatcgctactgcgccaccgtgcgcgtgcagcagcaccggcaggagatcatacaagacctggccgccatggtccgcgagctcctcatccagttctacaagtccacgcgcttcaagcccacccgcatcatcttctaccgcgacggtgtctctgaaggccagttccagcaggttctccaccacgagttgctggccatccgtgaggcctgtatcaagctagaaaaagactaccagcccgggatcaccttcatcgtggtgcagaagaggcaccacacccggctcttctgcactgacaagaacgagcgggttgggaaaagtggaaacattccagcaggcacgactgtggacacgaaaatcacccaccccaccgagttcgacttctacctgtgtagtcacgctggcatccaggggacaagcaggccttcgcactatcacgtcctctgggacgacaatcgtttctcctctgatgagctgcagatcctaacctaccagctgtgtcacacctacgtgcgctgcacacgctccgtgtccatcccagcgccagcatactacgctcacctggtggccttccgggccaggtaccacctggtggataaggaacatgacagtgctgaaggaagccatacctctgggcagagtaacgggcgagaccaccaagcactggccaaggcggtccaggttcaccaagacactctgcgcaccatgtactttgcttgacatgttttagtgtttagcgattgtgtaccgagtgggattcacgagaccagctacactcagaccaacagatggccagcccttccgtgacagccagcatcgaacatgagacgtcattgattttattagattctccgttttccagaatgccttccgtcccagatttcaaacttggattttgaactgcagacctgtatgagaacccaatgtcataggaaatatggtttgctaaaatctataagctgcttattaaaacagagtcccgtgtgtcctaaaaatctcctaaaaccagtctatgaactcagggctttaaaacatttttaatttatttggtcattcaatttacttgtttttaatacatgattctctatgaaattgatgggctcaaactagctgtgaatcttctgagagtgaaagcaacacaaaacacaagtgtggttttaaagccttgaacattctgatgttgtcactaaagttgatttccaggcgatgctcgtgtgcccctggcgtggctcacccaagttcctcgactgagggccggtggccatgcagaggcgtccgcaggtgccgtgttctgccagcaccgcccttcacccggcctgaactaaggagcagtggcagaaggtgggccccgtgtgtttacagcatttccaggtccagagaggttggcagacaagtgccattttaataaaaaatgtattta

SEQ ID NO: 30195 - DNA, 2280 bp, Homo sapiens
  misc_feature (4)..(4): n is a, c, g, or t
cctnctactactaaattcgcggccgcgtcgacgtttttataaaagtatcataaatttagagataaaatggaggggacccagctttctttacaatgtggatctacctcagttaaacagttgggtgctattactaagtctgtcaaattaaattggaaaaagtaaccaaacagtgagatacaactccacatgaaacttgaaattgtaatttccgtttatttaatgatatttttatttatttgtgccttttatgttgaaccccaatgcattgaaaaaattcagtatgaaacagtacatattttatttatattacaggtgggagaaaagtccaattggtcatggaatttgatagacttttccccagccaactgctacagtgtattataatcccgactgcccccctgtgaaaagaaaaaaaaaatgtccaagagcaaatttaacattttacaaacaataaagtccaaactcctctatgcacatatttatagcttatcacttcattttctgtgccagtgaaggggtggccagaaaaaaaatcccaagtaccctcatcattgcttttctagccattcatgccccctcttcctctggcacattttctaagagtttatttcataagcagcaaacggactgttgtcgatttcatctctcctgacctacctggtggaggtgctaatggccatggacagaaaggggcgagccagagctcgtggctttgtggaggcagaggcctgcattcagcagcggccctgtgtgcctgtaagttaggaaggctttctgacaggtaagaaaatgagataggttgatgacttaccatgcttttatatttggcagtttacaattctagacttttcctactatggcgatctttttttacttaattctttggaggtaacaatattttggagtcttaagaatttgattttataccaataagaaataaaaattagggatctttcctgtagtatatagttttactattttaaagagatctctgaattttacaagagaaccaacattccttaatggcagaactttgaaagttgatttgggaggctttttgctgcaggatctcaaaaatagagagagagatgattctacttaaatgtttttaattttctaacttccatcaggttgatacttaagctctattttgtaaagagtaaatcatcctttagtatgctgcataagatgatcagcattcttgcactttctcagtaataagacgtgccgggcaattggctccccaggacgcattgtgtttttaacctaacgagaggactttggggcaggtgattaaatttatataggtacctcaagaaaaagaacctgaatatgctgcattttctttctttagcttttacatgtagcattttgttttgcttttgttatttttgttttgatatatgctttttggaccccaatagactgttgaaagaaatttaaaaattactcttgtagggatatagtatccttaaaaaataaaaattaaaaaaaatttaaaaaaattgctgcaatatctggctcgaaggttgccctatattagaataatactttagccaaatacacctgaggaggcagacactgtgtttataagcagacaataatgttctgaatccttcctgttcatgctgctttcttaattcatttctccatgtcatcaagaggttggataacttatttctaagctcaaggttaaaaatcatgtcaccttttttttttttcccccaacacagacctcagaaaaattgcgattgaggaagtagcatgatcctaaatgtgttgctgaaatcaggcagcccgagcctctggtctctccagagagcccgtcttcacatttctctattcctcagcactcacccgaaactgaacagatggggagtggtcttgattgtcaagataaaactggtgaagaaagctaaatgctgagaaactgagcatctattgtcgtgtttaagcttagctgggtcctttctagtttgtttttacagcttactaggtgaagtagtttgcactatttttgcaataaattcatggaaaacctaacagttacttgttttgtttcttactgtgtgtatataaactaatactaaaagtttggcatagtgttttttcacctccttacataacccctaacatgcacagaatgctgtaaatctgataaaatatgatgtgaatgatattttataaagttattttgtatggtgtcaattttgttttgcctcatagtatgtcagcaaaaaattaaataaaagtcctcctatttacagctgcttccaaaaa

SEQ ID NO: 30196 - DNA, 5115 bp, Homo sapiens
  misc_feature (4965)..(4965): n is a, c, g, or t
  misc_feature (4975)..(4975): n is a, c, g, or t
  misc_feature (4982)..(4982): n is a, c, g, or t
  misc_feature (4989)..(4990): n is a, c, g, or t
  misc_feature (4997)..(4997): n is a, c, g, or t
  misc_feature (5000)..(5000): n is a, c, g, or t
caacaccgactgtcatgcaaataatacatttaaaatagttgcatggtttcaaagacaatgcagacgtaattggcctttgactttgggacctcgggttactctcactccctactgcaaaacaaactaagggttgaaagcaaagcattctgttcaaatccagggccctttgtttgaaaagaacacagggcccacagctggtgttttgaagtagaagttcccactagtggcgcagtggaccgtctgatgctgacttgcaggaagtcggtcctgggaggctctgaacacccctccctgtgattaaccactttgctgtcagaaatgtcattttcccatacactgtgctgtgggcccggggcctccttcgcttctttctttgggttccatatgttgcccgatcttgaggttagcgctcgccccaatttctccatgagtttactctgagttgacaggcgatgatctgacagttggaggtgtctgggtgtttggaggtggccccgttctcatgttggctgctcatcagacattgagtttggccccggcggttctactacgtcactacctggaagcaattgcctttaacactctgctgtttggggtttcgatgctttttatgctgcgttgcgtgctttcattccggaagagctaagtgtcctttgcagtctctctgagaatgttttgtaattctgccgccacgctgttctgtgcggaccgacctcaagaggcttgggcccccgtgggtgtcccactgcctgccggcccagggtacaggctgcttgggtccgctgggctggccttgggctgtcagaatctggtccagggtgtttcgaggggacactgcacagccgctcgcccctcgactcagtcatgggagctgcagcacgcagatccaccgcaagcttcctgcacgcgcatctccggaatgctgcgctgggccctcccaccatcttcgcgtttgtgagaatttactcagaagtgagagaactgaagattcctggtgcttttgttaacacgtttctatcttattggttggtgtggaaatgttagatgtgttgttaggtttttaaatgctgtgggtggtatgattaaagggttaagtcctcacctcagcccccagcccccttttggggggtaggaagaggctgagttatctcctatttaaaacctccttggatttaagtagttcagagttaaagctaaaacaccaaatattaactctttcccccaagtgtctccaggaactggacgttggggccattcttattcagttctttctgtagctccaaggtccttaaaatgagtgagttgatcccaagaacaccccacagcaccaaccagcagggcacagtgcaagcgacttcatagatcggggtgctcgtgtaggggtccggggctcctttgaactctgggagttgtgtgcgcagtcttgggtgggagacggcaggtccctctgtcccaagaagctggtggtgccaaggccttcctctgtctccatcagtgccagcctgatcgcgttctggaagacccagtctcagactctgtgcctttaaagtccggtcctcagtgtcctttcagaatcatgttggggctgcgtttctctggggaactaagcctgtgccattccacaaggcaggcgtggacctccagccttggaagctttctttccgctcctcagcccctgacttgtaaactgtgatgccatgcagtctggagccgcgggggacgcactcggtctcattgcggaaaacacttggttccagtcgtgtggtttctcccataccctgaccaagtccacctctgccaggattgcaggagattggtgcaagacccatctcttatgcattgaccatgaccatcagcaaagcctggtggtcttgttctcatagtcactcgagaagaatatttattgtaatggaagtagattttttaaaaaaggaattggaatcatgtctttgtagaatgtgtgtgtgtgaagtcctcagctgtaaggtgctattcagtcctgtgacccttattttggaatgctcttcattactgttgctctgttttgtgacttcctgggaaaccgcctactttggtgtggtgtcaccttgagctgtgcacataggacaccagttttgacttaacctaacaggcagtttttatctctagctttttcaagccaggtattgagcagtttcttggccaatggcctgagaaaccacctgtccctgtcaaggggtgattttattggttttaagtggggaagtaatcccatgtacttatttcttaaatacctaggaagttcttcttggtggctcctcttggccctcccctctttctcccccaacccaccatcctgcaaggcaaggaatggcctctccctccacagaggcaacggctgcagagggagcactgtggctgccatcccagttcctcttcaaagccaaacagacacgcgtgactcaaaccctacagtatggagggtggcgttgcattgaaattccaggcctgagtttgatagtggattttaatgtagttgttaaaggtatgaattcatgttttataactgtagaggcaagcaagtttttattttttaaaaagttttgagagaataatttataagtttctgtgcagcaaagtggctaattactcattaaatacaggaaaagaatgtagtatctaaatccagctttttcttacctctggtacacttcagattacttacctaatacatattgagggcttttaacccttagttttatcaatttttctagttttattttatttttataaaataattgaaaaagaaccaaaaatgaattcagaagttccatagatggatttttgccccttcttaattttctcccacaatgaaaacattttagaagacattttgaatcaaaatgtattatgaccattgaaagttctctattttctaagaagctgagcagctccaagggcctcgtttcaggtggtactctatgtattgtctgtgggcttgtttctacctgtacagtggaaccatgtgaccatgtcttgtgcttgcaatatagaaaccatgcagtgctgttttgtgaattggcagtttctgtataaactcttatttatatacattggcctctctgtatgattttccatttgctacatgaattgtaaaattaattataaaattatagtacctgctaaatacaattctgaggcttcatgtcattgtctttagttgaataccatgctgtgtgtcttgaagatgtccacgcttgcatgatgctaggtggcaatgccactttaaattaagccttaatcagatgttaaatttgtgagtttcagagtatgcaaaaatattaggcagagtgagtgtaaactgttcagatcaagatgctgtatcataattcaagttatttttttctggagttaaagggaagcattcagtgatacacctctctctctctctctctctctctcttgtctagcttggctatggccatagcttgatgaaaatggaccattgtgcatttctgtgacagtcaaaaagacctgttctaaaagtcttgcgactttttcagggttttttttttttttcatgtttctttttttttttcccctccagtctgagatttctgtgtggctgatggagagtgtgatttgggcgtaggtcttatttgcaaacctgctcatgttctaagctttcttcaggtagtaccacctgtcatcgcttctgcatatgatttaaatggatttttgtttttataaaagtatcataaatttagagataaaatggaggggacccagctttctttacaatgtggatctacctcagttaaacagttgggtgctattactaagtctgtcaaattaaattggaaaaagtaaccaaacagtgagatacaactccacatgaaacttgaaattgtaatttccgtttatttaatgatatttttatttatttgtgccttttatgttgaaccccaatgcattgaaaaaattcagtatgaaacagtacatattttatttatattacaggtgggagaaaagtccaattggtcatggaatttgatagacttttccccagccaactgctacagtgtattataatcccgactgcccccctgtgaaaagaaaaaaaaaatgtccaagagcaaatttaacattttacaaacaataaagtccaaactcctctatgcacatatttatagcttatcacttcattttctgtgccagtgaaggggtggccagaaaaaaaatcccaagtaccctcatcattgcttttctagccattcatgccccctcttcctctggcacattttctaagagtttatttcataagcagcaaacggactgttgtcgatttcatctctcctgacctacctggtggaggtgctaatggccatggacagaaaggggcgagccagagctcgtggctttgtggaggcagaggcctgcattcagcagcggccctgtgtgcctgtaagttaggaaggctttctgacaggtaagaaaatgagataggttgatgacttaccatgcttttatatttggcagtttacaattctagacttttcctactatggcgatctttttttacttaattctttggaggtaacaatattttggagtcttaagaatttgattttataccaataagaaataaaaattagggatctttcctgtagtatatagttttactattttaaagagatctctgaattttacaagagaaccaacattccttaatggcagaactttgaaagttgatttgggaggctttttgctgcaggatctcaaaaatagagagagagatgattctacttaaatgtttttaattttctaacttccatcaggttgatacttaagctctattttgtaaagagtaaatcatcctttagtatgctgcataagatgatcagcattcttgcactttctcagtaataagacgtgccgggcaattggctccccaggacgcattgtgtttttaacctaacgagagantggggcgggntaatttntggcccnnaaaaacngangcggtttctactaagagcaaggtggattggaatttgcaccaaggaaaaaacgtggtgcacaaaaaacaagtggcggtgtatacacagaaaagagcggcgaatactctatatcact

SEQ ID NO: 30197 - DNA, 3523 bp, Homo sapiens
gcggccgcccctcggccccggagcccctcggcggcgccaccatgtactcgggagccggccccgcacttgcacctcctgcgccgccgccccccatccaaggatatgccttcaagcctccacctagacccgactttgggacctccgggagaacaatcaaattacaggccaatttcttcgaaatggacatccccaaaattgacatctatcattatgaattggatatcaagccagagaagtgcccgaggagagttaacagggaaatcgtggaacacatggtccagcactttaaaacacagatctttggggatcggaagcccgtgtttgacggcaggaagaatctatacacagccatgccccttccgattgggagggacaaggtggagctggaggtcacgctgccaggagaaggcaaggatcgcatcttcaaggtgtccatcaagtgggtgtcctgcgtgagcttgcaggcgttacacgatgcactttcagggcggctgcccagcgtcccttttgagacgatccaggccctggacgtggtcatgaggcacttgccatccatgaggtacacccccgtgggccgctccttcttcaccgcgtccgaaggctgctctaaccctcttggcgggggccgagaagtgtggtttggcttccatcagtccgtccggccttctctctggaaaatgatgctgaatattgatgtgtcagcaacagcgttttacaaaggcacagccagtaatcgagtttgtttgtgaagttttggattttaaaagtattgaagaacaacaaaaacctctgacagattcccaaagggtaaagtttaccaaagaaattaaaggtctaaaggtggagataacgcactgtgggcagatgaagaggaagtaccgcgtctgcaatgtgacccggcggcccgccagtcaccaaacattcccgctgcagcaggagagcgggcagacggtggagtgcacggtggcccagtatttcaaggacaggcacaagttggttctgcgctacccccacctcccatgtttacaagtcggacaggagcagaaacacacctaccttcccctggaggtctgtaacattgtggcaggacaaagatgtattaaaaaattaacggacaatcagacctcaaccatgatcagagcaactgctaggtcggcgcccgatcggcaagaagagattagcaaattgatgcgaagtgcaagtttcaacacagatccatacgtccgtgaatttggaatcatggtcaaagatgagatgacagacgtgactgggcgggtgctgcagccgccctccatcctctacgggggcaggaataaagctattgcgacccctgtccagggcgtctgggacatgcggaacaagcagttccacacgggcatcgagatcaaggtgtgggccattgcgtgcttcgccccccagcgccagtgcacggaagtccatctgaagtccttcacagagcagctcagaaagatctcgagagacgctggcatgcccatccagggccagccgtgcttctgcaaatacgcgcagggggcggacagcgtggagcccatgttccggcacctgaagaacacgtatgcgggcctgcagctggtggtggtcatcctgcccggcaagacgcccgtgtacgccgaggtcaagcgcgtgggagacacggtgctggggatggccacgcagtgcgtgcagatgaagaacgtgcagaggaccacgccacagaccctgtccaacctctgcctgaagatcaacgtcaagctgggaggcgtgaacaacatcctgctgccccagggcaggccgccggtgttccagcagcccgtcatctttctgggagcagacgtcactcacccccccgccggggatgggaagaagccctccattgccgccgtggtgggcagcatggacgcccaccccaatcgctactgcgccaccgtgcgcgtgcagcagcaccggcaggagatcatacaagacctggccgccatggtccgcgagctcctcatccagttctacaagtccacgcgcttcaagcccacccgcatcatcttctaccgcgacggtgtctctgaaggccagttccagcaggttctccaccacgagttgctggccatccgtgaggcctgtatcaagctagaaaaagactaccagcccgggatcaccttcatcgtggtgcagaagaggcaccacacccggctcttctgcactgacaagaacgagcgggttgggaaaagtggaaacattccagcaggcacgactgtggacacgaaaatcacccaccccaccgagttcgacttctacctgtgtagtcacgctggcatccaggggacaagcaggccttcgcactatcacgtcctctgggacgacaatcgtttctcctctgatgagctgcagatcctaacctaccagctgtgtcacacctacgtgcgctgcacacgctccgtgtccatcccagcgccagcatactacgctcacctggtggccttccgggccaggtaccacctggtggataaggaacatgacagtgctgaaggaagccatacctctgggcagagtaacgggcgagaccaccaagcactggccaaggcggtccaggttcaccaagacactctgcgcaccatgtactttgcttgacatgttttagtgtttagcgattgtgtaccgagtgggattcacgagaccagctacactcagaccaacagatggccagcccttccgtgacagccagcatcgaacatgagacgtcattgattttattagattctccgttttccagaatgccttccgtcccagatttcaaacttggattttgaactgcagacctgtatgagaacccaatgtcataggaaatatggtttgctaaaatctataagctgcttattaaaacagagtcccgtgtgtcctaaaaatctcctaaaaccagtctatgaactcagggctttaaaacatttttaatttatttggtcattcaatttacttgtttttaatacatgattctctatgaaattgatgggctcaaactagctgtgaatcttctgagagtgaaagcaacacaaaacacaagtgtggttttaaagccttgaacattctgatgttgtcactaaagttgatttccaggcgatgctcgtgtgcccctggcgtggctcacccaagttcctcgactgagggccggtggccatgcagaggcgtccgcaggtgccgtgttctgccagcaccgcccttcacccggcctgaactaaggagcagtggcagaaggtgggccccgtgtgtttacagcatttccaggtccagagaggttggcagacaagtgccattttaataaaaaatgtatttaaaaaaagaaaaaagacaatatactgacagtctaatcatcagatttgtcctataggactgtgacatttattttccaaagtttttaaagaatacgggtctgtggtgataaatacagtacaatcctttttcactgttatgtctttaatgtaagagaaaaatatatatatctggtttgcagtattaatgtgatagatagatgctg

SEQ ID NO: 30198 - DNA, 2892 bp, Homo sapiens
gcggccgcccctcggccccggagcccctcggcggcgccaccatgtactcgggagccggccccgcacttgcacctcctgcgccgccgccccccatccaaggatatgccttcaagcctccacctagacccgactttgggacctccgggagaacaatcaaattacaggccaatttcttcgaaatggacatccccaaaattgacatctatcattatgaattggatatcaagccagagaagtgcccgaggagagttaacagggaaatcgtggaacacatggtccagcactttaaaacacagatctttggggatcggaagcccgtgtttgacggcaggaagaatctatacacagccatgccccttccgattgggagggacaaggtggagctggaggtcacgctgccaggagaaggcaaggatcgcatcttcaaggtgtccatcaagtgggtgtcctgcgtgagcttgcaggcgttacacgatgcactttcagggcggctgcccagcgtcccttttgagacgatccaggccctggacgtggtcatgaggcacttgccatccatgaggtacacccccgtgggccgctccttcttcaccgcgtccgaaggctgctctaaccctcttggcgggggccgagaagtgtggtttggcttccatcagtccgtccggccttctctctggaaaatgatgctgaatattgatgtgtcagcaacagcgttttacaaaggcacagccagtaatcgagtttgtttgtgaagttttggattttaaaagtattgaagaacaacaaaaacctctgacagattcccaaagggtaaagtttaccaaagaaattaaaggtctaaaggtggagataacgcactgtgggcagatgaagaggaagtaccgcgtctgcaatgtgacccggcggcccgccagtcaccaaacattcccgctgcagcaggagagcgggcagacggtggagtgcacggtggcccagtatttcaaggacaggcacaagttggttctgcgctacccccacctcccatgtttacaagtcggacaggagcagaaacacacctaccttcccctggaggtctgtaacattgtggcaggacaaagatgtattaaaaaattaacggacaatcagacctcaaccatgatcagagcaactgctaggtcggcgcccgatcggcaagaagagattagcaaattgatgcgaagtgcaagtttcaacacagatccatacgtccgtgaatttggaatcatggtcaaagatgagatgacagacgtgactgggcgggtgctgcagccgccctccatcctctacgggggcaggaataaagctattgcgacccctgtccagggcgtctgggacatgcggaacaagcagttccacacgggcatcgagatcaaggtgtgggccattgcgtgcttcgccccccagcgccagtgcacggaagtccatctgaagtccttcacagagcagctcagaaagatctcgagagacgctggcatgcccatccagggccagccgtgcttctgcaaatacgcgcagggggcggacagcgtggagcccatgttccggcacctgaagaacacgtatgcgggcctgcagctggtggtggtcatcctgcccggcaagacgcccgtgtacgccgaggtcaagcgcgtgggagacacggtgctggggatggccacgcagtgcgtgcagatgaagaacgtgcagaggaccacgccacagaccctgtccaacctctgcctgaagatcaacgtcaagctgggaggcgtgaacaacatcctgctgccccagggcaggccgccggtgttccagcagcccgtcatctttctgggagcagacgtcactcacccccccgccggggatgggaagaagccctccattgccgccgtggtgggcagcatggacgcccaccccaatcgctactgcgccaccgtgcgcgtgcagcagcaccggcaggagatcatacaagacctggccgccatggtccgcgagctcctcatccagttctacaagtccacgcgcttcaagcccacccgcatcatcttctaccgcgacggtgtctctgaaggccagttccagcaggttctccaccacgagttgctggccatccgtgaggcctgtatcaagctagaaaaagactaccagcccgggatcaccttcatcgtggtgcagaagaggcaccacacccggctcttctgcactgacaagaacgagcgggttgggaaaagtggaaacattccagcaggcacgactgtggacacgaaaatcacccaccccaccgagttcgacttctacctgtgtagtcacgctggcatccaggggacaagcaggccttcgcactatcacgtcctctgggacgacaatcgtttctcctctgatgagctgcagatcctaacctaccagctgtgtcacacctacgtgcgctgcacacgctccgtgtccatcccagcgccagcatactacgctcacctggtggccttccgggccaggtaccacctggtggataaggaacatgacagtgctgaaggaagccatacctctgggcagagtaacgggcgagaccaccaagcactggccaaggcggtccaggttcaccaagacactctgcgcaccatgtactttgcttgacatgttttagtgtttagcgattgtgtaccgagtgggattcacgagaccagctacactcagaccaacagatggccagcccttccgtgacagccagcatcgaacatgagacgtcattgattttattagattctccgttttccagaatgccttccgtcccagatttcaaacttggattttgaactgcagacctgtatgagaacccaatgtcataggaaatatggtttgctaaaatctataagctgcttattaaaacagagtcccgtgtgtcct

SEQ ID NO: 30199 - DNA, 2535 bp, Homo sapiens
gcggccgcccctcggccccggagcccctcggcggcgccaccatgtactcgggagccggccccgcacttgcacctcctgcgccgccgccccccatccaaggatatgccttcaagcctccacctagacccgactttgggacctccgggagaacaatcaaattacaggccaatttcttcgaaatggacatccccaaaattgacatctatcattatgaattggatatcaagccagagaagtgcccgaggagagttaacagggaaatcgtggaacacatggtccagcactttaaaacacagatctttggggatcggaagcccgtgtttgacggcaggaagaatctatacacagccatgccccttccgattgggagggacaaggtggagctggaggtcacgctgccaggagaaggcaaggatcgcatcttcaaggtgtccatcaagtgggtgtcctgcgtgagcttgcaggcgttacacgatgcactttcagggcggctgcccagcgtcccttttgagacgatccaggccctggacgtggtcatgaggcacttgccatccatgaggtacacccccgtgggccgctccttcttcaccgcgtccgaaggctgctctaaccctcttggcgggggccgagaagtgtggtttggcttccatcagtccgtccggccttctctctggaaaatgatgctgaatattgatgtgtcagcaacagcgttttacaaaggcacagccagtaatcgagtttgtttgtgaagttttggattttaaaagtattgaagaacaacaaaaacctctgacagattcccaaagggtaaagtttaccaaagaaattaaaggtctaaaggtggagataacgcactgtgggcagatgaagaggaagtaccgcgtctgcaatgtgacccggcggcccgccagtcaccaaacattcccgctgcagcaggagagcgggcagacggtggagtgcacggtggcccagtatttcaaggacaggcacaagttggttctgcgctacccccacctcccatgtttacaagtcggacaggagcagaaacacacctaccttcccctggaggtctgtaacattgtggcaggacaaagatgtattaaaaaattaacggacaatcagacctcaaccatgatcagagcaactgctaggtcggcgcccgatcggcaagaagagattagcaaattgatgcgaagtgcaagtttcaacacagatccatacgtccgtgaatttggaatcatggtcaaagatgagatgacagacgtgactgggcgggtgctgcagccgccctccatcctctacgggggcaggaataaagctattgcgacccctgtccagggcgtctgggacatgcggaacaagcagttccacacgggcatcgagatcaaggtgtgggccattgcgtgcttcgccccccagcgccagtgcacggaagtccatctgaagtccttcacagagcagctcagaaagatctcgagagacgctggcatgcccatccagggccagccgtgcttctgcaaatacgcgcagggggcggacagcgtggagcccatgttccggcacctgaagaacacgtatgcgggcctgcagctggtggtggtcatcctgcccggcaagacgcccgtgtacgccgaggtcaagcgcgtgggagacacggtgctggggatggccacgcagtgcgtgcagatgaagaacgtgcagaggaccacgccacagaccctgtccaacctctgcctgaagatcaacgtcaagctgggaggcgtgaacaacatcctgctgccccagggcaggccgccggtgttccagcagcccgtcatctttctgggagcagacgtcactcacccccccgccggggatgggaagaagccctccattgccgccgtggtgggcagcatggacgcccaccccaatcgctactgcgccaccgtgcgcgtgcagcagcaccggcaggagatcatacaagacctggccgccatggtccgcgagctcctcatccagttctacaagtccacgcgcttcaagcccacccgcatcatcttctaccgcgacggtgtctctgaaggccagttccagcaggttctccaccacgagttgctggccatccgtgaggcctgtatcaagctagaaaaagactaccagcccgggatcaccttcatcgtggtgcagaagaggcaccacacccggctcttctgcactgacaagaacgagcgggttgggaaaagtggaaacattccagcaggcacgactgtggacacgaaaatcacccaccccaccgagttcgacttctacctgtgtagtcacgctggcatccaggggacaagcaggccttcgcactatcacgtcctctgggacgacaatcgtttctcctctgatgagctgcagatcctaacctaccagctgtgtcacacctacgtgcgctgcacacgctccgtgtccatcccagcgccagcatactacgctcacctggtggccttccgggccaggtaccacctggtggataaggaacatgacaggtgagtggcatgcctggctgga

SEQ ID NO: 30200 - DNA, 1540 bp, Homo sapiens
gggacacttctcgtccccatcttcccgagagtccaggcacatgcccaggaaaggaaagttttgggaacccctgaccacactcactgcctgttcctgcaggtggtgggcagcatggacgcccaccccaatcgctactgcgccaccgtgcgcgtgcagcagcaccggcaggagatcatacaagacctggccgccatggtccgcgagctcctcatccagttctacaagtccacgcgcttcaagcccacccgcatcatcttctaccgcgacggtgtctctgaaggccagttccagcaggttctccaccacgagttgctggccatccgtgaggcctgtatcaagctagaaaaagactaccagcccgggatcaccttcatcgtggtgcagaagaggcaccacacccggctcttctgcactgacaagaacgagcgggttgggaaaagtggaaacattccagcaggcacgactgtggacacgaaaatcacccaccccaccgagttcgacttctacctgtgtagtcacgctggcatccaggggacaagcaggccttcgcactatcacgtcctctgggacgacaatcgtttctcctctgatgagctgcagatcctaacctaccagctgtgtcacacctacgtgcgctgcacacgctccgtgtccatcccagcgccagcatactacgctcacctggtggccttccgggccaggtaccacctggtggataaggaacatgacagtgctgaaggaagccatacctctgggcagagtaacgggcgagaccaccaagcactggccaaggcggtccaggttcaccaagacactctgcgcaccatgtactttgcttgacatgttttagtgtttagcgattgtgtaccgagtgggattcacgagaccagctacactcagaccaacagatggccagcccttccgtgacagccagcatcgaacatgagacgtcattgattttattagattctccgttttccagaatgccttccgtcccagatttcaaacttggattttgaactgcagacctgtatgagaacccaatgtcataggaaatatggtttgctaaaatctataagctgcttattaaaacagagtcccgtgtgtcctaaaaatctcctaaaaccagtctatgaactcagggctttaaaacatttttaatttatttggtcattcaatttacttgtttttaatacatgattctctatgaaattgatgggctcaaactagctgtgaatcttctgagagtgaaagcaacacaaaacacaagtgtggttttaaagccttgaacattctgatgttgtcactaaagttgatttccaggcgatgctcgtgtgcccctggcgtggctcacccaagttcctcgactgagggccggtggccatgcagaggcgtccgcaggtgccgtgttctgccagcaccgcccttcacccggcctgaactaaggagcagtggcagaaggtgggccccgtgtgtttacagcatttccaggtccagagaggttggcagacaagtgccattttaataaaaaatgtattta

SEQ ID NO: 30201 - DNA, 1526 bp, Homo sapiens
caagacagacactctgggcaagaccgacactctgggcaagacagacactctgggcaagacagacactctgggcagagtaacgggcgagaccaccaagcactggccaaggcggtccaggttcaccaagacactctgcgcaccatgtactttgcttgacatgttttagtgtttagcgattgtgtaccgagtgggattcacgagaccagctacactcagaccaacagatggccagcccttccgtgacagccagcatcgaacatgagacgtcattgattttattagattctccgttttccagaatgccatccgtgaggcctgtatcaagctagaaaaagactaccagcccgggatcaccttcatcgtggtgcagaagaggcaccacacccggctcttctgcactgacaagaacgagcgggttgggaaaagtggaaacattccagcaggcacgactgtggacacgaaaatcacccaccccaccgagttcgacttctacctgtgtagtcacgctggcatccaggggacaagcaggccttcgcactatcacgtcctctgggacgacaatcgtttctcctctgatgagctgcagatcctaacctaccagctgtgtcacacctacgtgcgctgcacacgctccgtgtccatcccagcgccagcatactacgctcacctggtggccttccgggccaggtaccacctggtggataaggaacatgacagtgctgaaggaagccatacctctgggcagagtaacgggcgagaccaccaagcactggccaaggcggtccaggttcaccaagacactctgcgcaccatgtactttgcttgacatgttttagtgtttagcgattgtgtaccgagtgggattcacgagaccagctacactcagaccaacagatggccagcccttccgtgacagccagcatcgaacatgagacgtcattgattttattagattctccgttttccagaatgccttccgtcccagatttcaaacttggattttgaactgcagacctgtatgagaacccaatgtcataggaaatatggtttgctaaaatctataagctgcttattaaaacagagtcccgtgtgtcctaaaaatctcctaaaaccagtctatgaactcagggctttaaaacatttttaatttatttggtcattcaatttacttgtttttaatacatgattctctatgaaattgatgggctcaaactagctgtgaatcttctgagagtgaaagcaacacaaaacacaagtgtggttttaaagccttgaacattctgatgttgtcactaaagttgatttccaggcgatgctcgtgtgcccctggcgtggctcacccaagttcctcgactgagggccggtggccatgcagaggcgtccgcaggtgccgtgttctgccagcaccgcccttcacccggcctgaactaaggagcagtggcagaaggtgggccccgtgtgtttacagcatttccaggtccagagaggttggcagacaagtgccattttaataaaaaatgtattta

SEQ ID NO: 30202 - DNA, 2210 bp, Homo sapiens
gggacacttctcgtccccatcttcccgagagtccaggcacatgcccaggaaaggaaagttttgggaacccctgaccacactcactgcctgttcctgcaggtggtgggcagcatggacgcccaccccaatcgctactgcgccaccgtgcgcgtgcagcagcaccggcaggagatcatacaagacctggccgccatggtccgcgagctcctcatccagttctacaagtccacgcgcttcaagcccacccgcatcatcttctaccgcgacggtgtctctgaaggccagttccagcaggttctccaccacgagttgctggccatccgtgaggcctgtatcaagctagaaaaagaataccagcccgggatcactttcattgtggtgcagaagaggcaccacacccggctcttctgcactgacaagaacgagcgggttgggaaaagtggaaacattccagcaggcacgactgtggacacgaaaatcacccaccccaccgagttcgacttctacctgtgtagtcacgctggcatccaggggacaagcaggccttcgcactatcacgtcctctgggacgacaatcgtttctcctctgatgagctgcagatcctaacctaccagctgtgtcacacctacgtgcgctgcacacgctccgtgtccatcccagcgccagcatactacgctcacctggtggccttccgggccaggtaccacctggtggataaggaacatgacagtgctgaaggaagccatacctctgggcagagtaacgggcgagaccaccaagcactggccaaggcggtccaggttcaccaagacactctgcgcaccatgtactttgcttgacatgttttagtgtttagcgattgtgtaccgagtgggattcacgagaccagctacactcagaccaacagatggccagcccttccgtgacagccagcatcgaacatgagacgtcattgattttattagattctccgttttccagaatgccatccgtgaggcctgtatcaagctagaaaaagactaccagcccgggatcaccttcatcgtggtgcagaagaggcaccacacccggctcttctgcactgacaagaacgagcgggttgggaaaagtggaaacattccagcaggcacgactgtggacacgaaaatcacccaccccaccgagttcgacttctacctgtgtagtcacgctggcatccaggggacaagcaggccttcgcactatcacgtcctctgggacgacaatcgtttctcctctgatgagctgcagatcctaacctaccagctgtgtcacacctacgtgcgctgcacacgctccgtgtccatcccagcgccagcatactacgctcacctggtggccttccgggccaggtaccacctggtggataaggaacatgacagtgctgaaggaagccatacctctgggcagagtaacgggcgagaccaccaagcactggccaaggcggtccaggttcaccaagacactctgcgcaccatgtactttgcttgacatgttttagtgtttagcgattgtgtaccgagtgggattcacgagaccagctacactcagaccaacagatggccagcccttccgtgacagccagcatcgaacatgagacgtcattgattttattagattctccgttttccagaatgccttccgtcccagatttcaaacttggattttgaactgcagacctgtatgagaacccaatgtcataggaaatatggtttgctaaaatctataagctgcttattaaaacagagtcccgtgtgtcctaaaaatctcctaaaaccagtctatgaactcagggctttaaaacatttttaatttatttggtcattcaatttacttgtttttaatacatgattctctatgaaattgatgggctcaaactagctgtgaatcttctgagagtgaaagcaacacaaaacacaagtgtggttttaaagccttgaacattctgatgttgtcactaaagttgatttccaggcgatgctcgtgtgcccctggcgtggctcacccaagttcctcgactgagggccggtggccatgcagaggcgtccgcaggtgccgtgttctgccagcaccgcccttcacccggcctgaactaaggagcagtggcagaaggtgggccccgtgtgtttacagcatttccaggtccagagaggttggcagacaagtgccattttaataaaaaatgtattta

SEQ ID NO: 30203 - DNA, 3445 bp, Homo sapiens
caacaccgactgtcatgcaaataatacatttaaaatagttgcatggtttcaaagacaatgcagacgtaattggcctttgactttgggacctcgggttactctcactccctactgcaaaacaaactaagggttgaaagcaaagcattctgttcaaatccagggccctttgtttgaaaagaacacagggcccacagctggtgttttgaagtagaagttcccactagtggcgcagtggaccgtctgatgctgacttgcaggaagtcggtcctgggaggctctgaacacccctccctgtgattaaccactttgctgtcagaaatgtcattttcccatacactgtgctgtgggcccggggcctccttcgcttctttctttgggttccatatgttgcccgatcttgaggttagcgctcgccccaatttctccatgagtttactctgagttgacaggcgatgatctgacagttggaggtgtctgggtgtttggaggtggccccgttctcatgttggctgctcatcagacattgagtttggccccggcggttctactacgtcactacctggaagcaattgcctttaacactctgctgtttggggtttcgatgctttttatgctgcgttgcgtgctttcattccggaagagctaagtgtcctttgcagtctctctgagaatgttttgtaattctgccgccacgctgttctgtgcggaccgacctcaagaggcttgggcccccgtgggtgtcccactgcctgccggcccagggtacaggctgcttgggtccgctgggctggccttgggctgtcagaatctggtccagggtgtttcgaggggacactgcacagccgctcgcccctcgactcagtcatgggagctgcagcacgcagatccaccgcaagcttcctgcacgcgcatctccggaatgctgcgctgggccctcccaccatcttcgcgtttgtgagaatttactcagaagtgagagaactgaagattcctggtgcttttgttaacacgtttctatcttattggttggtgtggaaatgttagatgtgttgttaggtttttaaatgctgtgggtggtatgattaaagggttaagtcctcacctcagcccccagcccccttttggggggtaggaagaggctgagttatctcctatttaaaacctccttggatttaagtagttcagagttaaagctaaaacaccaaatattaactctttcccccaagtgtctccaggaactggacgttggggccattcttattcagttctttctgtagctccaaggtccttaaaatgagtgagttgatcccaagaacaccccacagcaccaaccagcagggcacagtgcaagcgacttcatagatcggggtgctcgtgtaggggtccggggctcctttgaactctgggagttgtgtgcgcagtcttgggtgggagacggcaggtccctctgtcccaagaagctggtggtgccaaggccttcctctgtctccatcagtgccagcctgatcgcgttctggaagacccagtctcagactctgtgcctttaaagtccggtcctcagtgtcctttcagaatcatgttggggctgcgtttctctggggaactaagcctgtgccattccacaaggcaggcgtggacctccagccttggaagctttctttccgctcctcagcccctgacttgtaaactgtgatgccatgcagtctggagccgcgggggacgcactcggtctcattgcggaaaacacttggttccagtcgtgtggtttctcccataccctgaccaagtccacctctgccaggattgcaggagattggtgcaagacccatctcttatgcattgaccatgaccatcagcaaagcctggtggtcttgttctcatagtcactcgagaagaatatttattgtaatggaagtagattttttaaaaaaggaattggaatcatgtctttgtagaatgtgtgtgtgtgaagtcctcagctgtaaggtgctattcagtcctgtgacccttattttggaatgctcttcattactgttgctctgttttgtgacttcctgggaaaccgcctactttggtgtggtgtcaccttgagctgtgcacataggacaccagttttgacttaacctaacaggcagtttttatctctagctttttcaagccaggtattgagcagtttcttggccaatggcctgagaaaccacctgtccctgtcaaggggtgattttattggttttaagtggggaagtaatcccatgtacttatttcttaaatacctaggaagttcttcttggtggctcctcttggccctcccctctttctcccccaacccaccatcctgcaaggcaaggaatggcctctccctccacagaggcaacggctgcagagggagcactgtggctgccatcccagttcctcttcaaagccaaacagacacgcgtgactcaaaccctacagtatggagggtggcgttgcattgaaattccaggcctgagtttgatagtggattttaatgtagttgttaaaggtatgaattcatgttttataactgtagaggcaagcaagtttttattttttaaaaagttttgagagaataatttataagtttctgtgcagcaaagtggctaattactcattaaatacaggaaaagaatgtagtatctaaatccagctttttcttacctctggtacacttcagattacttacctaatacatattgagggcttttaacccttagttttatcaatttttctagttttattttatttttataaaataattgaaaaagaaccaaaaatgaattcagaagttccatagatggatttttgccccttcttaattttctcccacaatgaaaacattttagaagacattttgaatcaaaatgtattatgaccattgaaagttctctattttctaagaagctgagcagctccaagggcctcgtttcaggtggtactctatgtattgtctgtgggcttgtttctacctgtacagtggaaccatgtgaccatgtcttgtgcttgcaatatagaaaccatgcagtgctgttttgtgaattggcagtttctgtataaactcttatttatatacattggcctctctgtatgattttccatttgctacatgaattgtaaaattaattataaaattatagtacctgctaaatacaattctgaggcttcatgtcattgtctttagttgaataccatgctgtgtgtcttgaagatgtccacgcttgcatgatgctaggtggcaatgccactttaaattaagccttaatcagatgttaaatttgtgagtttcagagtatgcaaaaatattaggcagagtgagtgtaaactgttcagatcaagatgctgtatcataattcaagttatttttttctggagttaaagtggatcaaaagtggatcatccagccagacaagcagtattaagtgaacat

SEQ ID NO: 30204 - DNA, 1819 bp, Homo sapiens
gggacacttctcgtccccatcttcccgagagtccaggcacatgcccaggaaaggaaagttttgggaacccctgaccacactcactgcctgttcctgcaggtggtgggcagcatggacgcccaccccaatcgctactgcgccaccgtgcgcgtgcagcagcaccggcaggagatcatacaagacctggccgccatggtccgcgagctcctcatccagttctacaagtccacgcgcttcaagcccacccgcatcatcttctaccgcgacggtgtctctgaaggccagttccagcaggttctccaccacgagttgctggccatccgtgaggcctgtatcaagctagaaaaagaataccagcccgggatcactttcattgtggtgcagaagaggcaccacacccggctcttctgcactgacaagaacgagcgggttgggaaaagtggaaacattccagcaggcacgactgtggacacgaaaatcacccaccccaccgagttcgacttctacctgtgtagtcacgctggcatccaggggacaagcaggccttcgcactatcacgtcctctgggacgacaatcgtttctcctctgatgagctgcagatcctaacctaccagctgtgtcacacctacgtgcgctgcacacgagtgcgtgcagatgaagaacgtgcagaggaccacgccacagaccctgtccaacctctgcctgaagatcaacgtcaagctgggaggcgtgaacaacatcctgctgccccagggcaggccgccggtgttccagcagcccgtcatctttctgggagcagacgtcactcacccccccgccggggatgggaagaagccctccattgccgccgtggtgggcagcatggacgcccaccccaatcgctactgcgccaccgtgcgcgtgcagcagcaccggcaggagatcatacaagacctggccgccatgcatactacgctcacctggtggccttccgggccaggtaccacctggtggataaggaacatgacagtgctgaaggaagccatacctctgggcagagtaacgggcgagaccaccaagcactggccaaggcggtccaggttcaccaagacactctgcgcaccatgtactttgcttgacatgttttagtgtttagcgattgtgtaccgagtgggattcacgagaccagctacactcagaccaacagatggccagcccttccgtgacagccagcatcgaacatgagacgtcattgattttattagattctccgttttccagaatgccttccgtcccagatttcaaacttggattttgaactgcagacctgtatgagaacccaatgtcataggaaatatggtttgctaaaatctataagctgcttattaaaacagagtcccgtgtgtcctaaaaatctcctaaaaccagtctatgaactcagggctttaaaacatttttaatttatttggtcattcaatttacttgtttttaatacatgattctctatgaaattgatgggctcaaactagctgtgaatcttctgagagtgaaagcaacacaaaacacaagtgtggttttaaagccttgaacattctgatgttgtcactaaagttgatttccaggcgatgctcgtgtgcccctggcgtggctcacccaagttcctcgactgagggccggtggccatgcagaggcgtccgcaggtgccgtgttctgccagcaccgcccttcacccggcctgaactaaggagcagtggcagaaggtgggccccgtgtgtttacagcatttccaggtccagagaggttggcagacaagtgccattttaataaaaaatgtattta

SEQ ID NO: 30205 - DNA, 2441 bp, Homo sapiens
gcggccgcccctcggccccggagcccctcggcggcgccaccatgtactcgggagccggccccgcacttgcacctcctgcgccgccgccccccatccaaggatatgccttcaagcctccacctagacccgactttgggacctccgggagaacaatcaaattacaggccaatttcttcgaaatggacatccccaaaattgacatctatcattatgaattggatatcaagccagagaagtgcccgaggagagttaacagggaaatcgtggaacacatggtccagcactttaaaacacagatctttggggatcggaagcccgtgtttgacggcaggaagaatctatacacagccatgccccttccgattgggagggacaaggtggagctggaggtcacgctgccaggagaaggcaaggatcgcatcttcaaggtgtccatcaagtgggtgtcctgcgtgagcttgcaggcgttacacgatgcactttcagggcggctgcccagcgtcccttttgagacgatccaggccctggacgtggtcatgaggcacttgccatccatgaggtacacccccgtgggccgctccttcttcaccgcgtccgaaggctgctctaaccctcttggcgggggccgagaagtgtggtttggcttccatcagtccgtccggccttctctctggaaaatgatgctgaatattgatgtgtcagcaacagcgttttacaaaggcacagccagtaatcgagtttgtttgtgaagttttggattttaaaagtattgaagaacaacaaaaacctctgacagattcccaaagggtaaagtttaccaaagaaattaaaggtctaaaggtggagataacgcactgtgggcagatgaagaggaagtaccgcgtctgcaatgtgacccggcggcccgccagtcaccaaacattcccgctgcagcaggagagcgggcagacggtggagtgcacggtggcccagtatttcaaggacaggcacaagttggttctgcgctacccccacctcccatgtttacaagtcggacaggagcagaaacacacctaccttcccctggaggtctgtaacattgtggcaggacaaagatgtattaaaaaattaacggacaatcagacctcaaccatgatcagagcaactgctaggtcggcgcccgatcggcaagaagagattagcaaattgatgcgaagtgcaagtttcaacacagatccatacgtccgtgaatttggaatcatggtcaaagatgagatgacagacgtgactgggcgggtgctgcagccgccctccatcctctacgggggcaggaataaagctattgcgacccctgtccagggcgtctgggacatgcggaacaagcagttccacacgggcatcgagatcaaggtgtgggccattgcgtgcttcgccccccagcgccagtgcacggaagtccatctgaagtccttcacagagcagctcagaaagatctcgagagacgctggcatgcccatccagggccagccgtgcttctgcaaatacgcgcagggggcggacagcgtggagcccatgttccggcacctgaagaacacgtatgcgggcctgcagctggtggtggtcatcctgcccggcaagacgcccgtgtacggtaggtgtgggcgctcccgctggctgtggggagccgtcgtggtctccgtgggtgtttgttcctgcctaagcccctctgtgtttctgctgcactgagaaaggtgctccttttgggcctttcaggaggctgaggaagaagaggtggcttgtcatcactgccacttctgatcactgtgttcagggcctccccgtcgtcctgtatgatgccatggtcctgggcagtcagcaccctcaggtggcacaggccttggcacatgggtgggcaccccgcccatcatacagcatgcgtgttggctggatgggggaacgtttgtttaacgcacagagcgttgcaccagggtcacctcctgcccgggactcagcctatgtgtaaccactctgtgcccacctcagaattttgtggagtttcgccaaagtccatgccagggggtcacccacagggccccacgctgagccacagacagattattgacatgtaaaaaccacacttctctcagttcaacatcccaaaaaaaaaaaaaacaaccaacacaaaaaaacactttttggggcgcgtttgggcccttcaaaaacgtttctctaaacaacccaccttttttgtgcccacgggcccccaaatatgatgacggtagaaccctgcggcacaagcgggttccaaagggaaaaactccggggcctagacacaggcgctcgggtttcctcgcccaatttaaaaacgcgccggcgggacaccagcggtttgtgaacaaactccaagggattctaaggcccatacgggatctatcaaggggattcagggagccgattaagtc

SEQ ID NO: 30206 - DNA, 1026 bp, Homo sapiens
  misc_feature (951)..(952): n is a, c, g, or t
  misc_feature (955)..(955): n is a, c, g, or t
  misc_feature (960)..(960): n is a, c, g, or t
  misc_feature (963)..(963): n is a, c, g, or t
  misc_feature (967)..(967): n is a, c, g, or t
  misc_feature (969)..(969): n is a, c, g, or t
  misc_feature (972)..(972): n is a, c, g, or t
gcggccgcccctcggccccggagcccctcggcggcgccaccatgtactcgggagccggccccgcacttgcacctcctgcgccgccgccccccatccaaggatatgccttcaagcctccacctagacccgactttgggacctccgggagaacaatcaaattacaggccaatttcttcgaaatggacatccccaaaattgacatctatcattatgaattggatatcaagccagagaagtgcccgaggagagttaacagggaaatcgtggaacacatggtccagcactttaaaacacagatctttggggatcggaagcccgtgtttgacggcaggaagaatctatacacagccatgccccttccgattgggagggacaaggtggagctggaggtcacgctgccaggagaaggcaaggatcgcatcttcaaggtgtccatcaagtgggtgtcctgcgtgagcttgcaggcgttacacgatgcactttcagggcggctgcccagcgtcccttttgagacgatccaggccctggacgtggtcatgaggcacttgccatccatgaggtacacccccgtgggccgctccttcttcaccgcgtccgaaggctgctctaaccctcttggcgggggccgagaagtgtggtttggcttccatcagtccgtccggccttctctctggaaaatgatgctgaatattgatgtgtcagcaacagcgttttacaaaggcacagccagtaatcgagtttgtttgtgaagttttggattttaaaagtattgaagaacaacaaaaacctctgacagattcccaaagggtaaagtttaccaaagaaattaaaggtctaaaggtggagataacgcactgtgggcagatgaagaggaagtaccgcgtctgcaatgtgacccggcggcccgccagtcaccaaacattccggtgcagcaggaaacggcaaacgggnntgncgtgnccntttnangcnggccaagttggttggacccactcgcatttacgtggcaggcggaaactacttccg

SEQ ID NO: 30207 - DNA, 1161 bp, Homo sapiens
gggacacttctcgtccccatcttcccgagagtccaggcacatgcccaggaaaggaaagttttgggaacccctgaccacactcactgcctgttcctgcaggtggtgggcagcatggacgcccaccccaatcgctactgcgccaccgtgcgcgtgcagcagcaccggcaggagatcatacaagacctggccgccatggtccgcgagctcctcatccagttctacaagtccacgcgcttcaagcccacccgcatcatcttctaccgcgacggtgtctctgaaggccagttccagcaggttctccaccacgagttgctggccatccgtgaggcctgtatcaagctagaaaaagaataccagcccgggatcactttcattgtggtgcagaagaggcaccacacccggctcttctgcactgacaagaacgagcgggttgggaaaagtggaaacattccagcaggcacgactgtggacacgaaaatcacccaccccaccgagttcgacttctacctgtgtagtcacgctggcatccaggggacaagcaggccttcgcactatcacgtcctctgggacgacaatcgtttctcctctgatgagctgcagatcctaacctaccagctgtgtcacacctacgtgcgctgcacacgctccgtgtccatcccagcgccagcatactacgctcacctggtggccttccgggccaggtaccacctggtggataaggaacatgacagtgctgaaggaagccatacctctgggcagagtaacgggcgagaccaccaagcactggccaaggcggtccaggttcaccaagacactctgcgcaccatgtactttgcttgacatgttttagtgtttagcgattgtgtaccgagtgggattcacgagaccagctacactcagaccaacagatggccagcccttccgtgacagccagcatcgaacatgagacgtcattgataaactaatactaaaagtttggcatagtgttttttcacctccttacataacccctaacatgcacagaatgctgtaaatctgataaaatatgatgtgaatgatattttataaagttattttgtatggtgtcaattttgttttgcctcatagtatgtcagcaaaaaattaaataaaagtcctcctatttacagctgcttccaaaaa

SEQ ID NO: 30208 - DNA, 491 bp, Homo sapiens
ccctccctctttttgtgtttgtttggctctctctctctctctcttgtctagcttggctatggccatagcttgatgaaaatggaccattgtgcatttctgtgacagtcaaaaagacctgttctaaaagtcttgcgactttttcagggttttttttttttttcatgtttctttttttttttcccctccagtctgagatttctgtgtggctgatggagagtgtgatttgggcgtaggtcttatttgcaaacctgctcatgttctaagctttcttcaggtagtaccacctgtcatcgcttctgcatatgatttaaatggatttttgtttttataaaagtatcataaatttagagataaaatggaggggacccagctttctttacaatgtggatctacctcagttaaacagttgggtgctattactaagtctgtcaaattaaattggaaaaagtaaccaaacagtgagatacaactccacatgaaacttgaaattg

SEQ ID NO: 30209 - DNA, 217 bp, Homo sapiens
aagctcacacatgttgtaaagtctgtcatgcctgttctcatacacgaaactatttcactgaggaggagagagcagttcactgccacatgcttcgtcctgagatccataaaaactaccttctctgtgttgtggctttcagtgatgggggtttaacttgtctaggtccagacacggatatcgagaacttgctgaaaccaccaaactttaagtacaaagt

SEQ ID NO: 30210 - DNA, 728 bp, Homo sapiens
attattatttgtagagatgagatctctccatgttgcccaggctgatctcgaactcctgggctcaagcgatcctcccacatcagcatcctaaagtactgggattacaggcttgagccaccattctgggcactaaatataatttttaatgataaatgatttttccacctcccaggttcaagtgattctcctgcttcagcctcccgagtagctgagattacaggggtgcaccaccacagccagctaatttttgtatttttagtagagatggggtttcaccatgttggccattctggtgtcgaactcctgacctcaaatgatcttccagcctcggcctcccaaagtgttgggattacaggcgtgagccaccgcatctggccaagaaatcctcttttttttttaattttattttatttttgagatggagtctcactctgtcgcccgggctgtagtgcagtggcactatctcggctcactgcaacctctgcctttagggttcaagtgattctcttgcttcagcctcctgagtagctgggattacaggcgcccgccaccatgcccagctaaaggaaatcccctgtaaggaggaaagtttaaaaacaaatttaaaaaggaaagaaaaagacgtacaaaattcgcggtacctgtcttattctaataaaaaatatgatatttatccacagatataggaactaacggggggagaaaattttctcttttatgacgtatat

SEQ ID NO: 30211 - DNA, 397 bp, Homo sapiens
ttttttaaggcagggtcccactccgtcgcccaggctggagtgcagtggcacaatctcggctcactgcagccttgacctcctggggctcaagcaatcctttcacatcagcctcccaagtagctgggaccacaggcgtgcaccaccatacctggccaatttttgtattctttgtagagatagggttctgccacattacccaggctgatctcgaactcctgagctcagacaatccaaccaatgtggcctcccaaagtgctgggactataggcatgagcaccgtacccagccgggtaaggtcttaacaacagtatgatatgaccattctgaccagactccactctaacagatgttggttccccctatcaatttcctgtgacaactcagagcctccctctat

SEQ ID NO: 30212 - DNA, 359 bp, Homo sapiens
taaagaattcatcagctctttgattgaaggttagatcttgttaatcttagccatataaagaagtctagaccaggcatgacggctcacacctataatcccagcacttggggaagtcaaggcaggaagatcacttgaacccaggagttgggaccagcctaggcaacatactgagaccctcgtctctacaaaaaaatagaaaaaattagccaggcgttgtggtacatgcccatagtcccagctactcagaaagcttagatgggaggatcacttgagcccagaaggcagaggttgcagtgaaccgagactgcaccactgcactcttggggcagcctaggtaaagagtgagaccttgtctcttt

SEQ ID NO: 30213 - DNA, 252 bp, Homo sapiens
agagacacagtcttgctctgtcacccagcctggagtgcagtggcacaatcatggctcactgcagtcttgacatcctgggctcaagtcatccccctatctcagcctcctgagtagctgggattacaggcatgtgccatcatgcttggtggctgtctgccgagctgggattaactgcacacttcatgtgccagcaccccgggcccccaccacaccatagagggaatggccaattgagctgccccaatattaact

SEQ ID NO: 30214 - DNA, 403 bp, Homo sapiens
catcattattattatttttgaaacaggatctcactatgttacccaacgctggactcaaatcctgggcccaagccatcctcctgtctcagccttgggagtagctgggactacagacccatgcaccatgcccagcttattagaaaatcattactttgcatggggaaaatatggatatttccctgccaaatcattaccctttgaataacaacttcaaaaatataaattcaacaaagcagttgctttgatgatatattagagctaatataatatataacgaaatgagccatatataataaactttttagggtgcttgtgttttattatttcttccaagaaaatattaaagaaggtgaagaaaactaatggaccattacaacattaactttagtctgggaaatatgta

SEQ ID NO: 30215 - DNA, 377 bp, Homo sapiens
cccagcagctcaggaggctgaaacaggaagatcacttgagcccaggaggttgaggcggtggtgagctgtgatcgagccactccactccagcctgagcgacagactgagatcctgtctcaaaaaaaaaaaaaaattttttttttaatgtacatatatctcgacccagcaattccacttacaggtaattattctagagagagatggatgcacgttcaaggctgtgttcatagtaaatgcaaggtagaaataataatgctttaaaagtacatcaaatggaggcccggtgcagtggcacatgcctgtaatcccaggtactcgggaggctgaggcaggagaatcacttgagcccaggaggtggaggttgtggtgagctgaga

SEQ ID NO: 30216 - DNA, 870 bp, Homo sapiens
agccagttcctgctatatgatctgttttctagcctcgctaatgtgagactgaagcattcttaccaaagaaatcatttcctagtaaagaagcccattgaactcactttatttgtttatttccttcgaaagccaccgaagagagaaaaacagagaaggtgtgtagtgtggcggaaaaagcacagcatatagttttacagacttgggtctgcagctgactagctgggtggcctggggatagtggcttcatcttttggggcttcaagattctttgtctttaaaatcaggggttatatcagatcatcaaagttcccattccattaaagaaaaccctgcatgtatccataatgatgctctcctgttaaatttacaatgaaggaaacacatcacttaactgtaagaatttcccaaaatgaactgatgaccagtgatctctctatcagagaaatgtcagatttctagcctccagaactttgatttttctggacattcaatagttcctctttctcagatatttttcaactgatgccagaaacacttggtatttgtttttaatccaacccttttgttttgaggctttggagggtaacacattttcataccctgtgagtcccaggatccacagctctgctgtggtcttagaagccactgaaacattggtgaatgtgaagtcacttttggggtgcctgccctcatccctctgtctctctgcttccgtgtaaataaagactgtttcaattgtgtcctctctgtgtcatggactgttccaatgtcatgcagatttctgtgtctgatatggattttaaaagttgttctctttgtggaatataagtgtacagaataataaataatgtttcctgggctgtgtatctg

SEQ ID NO: 30217 - DNA, 447 bp, Homo sapiens
agtgcccctgctcattagctgtttctgtacccaagtgcataggctacgcactgtgactgatgtggatctatttgcccctcgctacaaaagggtctcaagtccttgtcccttcagtgtgtgggaccccatcgtgttaccaatggggcttggggactgaggctcaagactgcttgctgggaaatgtaacccctttgttctggacaggtagaaggagaggagaatggtcatcccaggcctaatgtaaagtttctgcaacccaacccaattcccagactcattttggtcatgatcaatacaggggtcaacaaaattttctgtaaagggcgagctagtaaatagatttgctgtgtgtactatgctgtctctgttgcaaccaactcggccattgtaaccttgacaacatgcaaatgatgggcgtgactgcatgccaataaaactttatttaga

SEQ ID NO: 30218 - DNA, 832 bp, Homo sapiens
cgccgtaggagattaacaaaaggatttgtggaaactattaatggctcttaataagatcaaaatttgggaacgaataaaaaaccatctagaaggacactatacaaactggtttttggatattgcaaagttaaaagaacaaatatttaaagcatcccaggcacatctgaccttaataccaggaactggagtgcttgaaggagctgcagacggattagcagccagtaacccattaaaatggatgaaaacacttggaagctctgtgatttcaatgatgattgtgttattaatctgtgttgtttgtctttgtgtagtctgcagatgcagatcctgactcctgcgagaagtagctcaccgtgataaagctgcctttgcttttattgccctgcaaaaacaagaagggggatatgctggggaataggcccccaaatctggacataaactggccccaaaactggccataaacaaaatctctgcagcgctgtgacatgttcatggtggccataacgcccatgctggaaggctgtggtttaccggaatgagagcgaggaacacctggcctatccagggcggaaaaccacttataggtattcctaaaccacaaacaacctatgccttaaggacatgttcctgctgcagataactagccagagcccatccctttgtttcggcccatccttttgtttcctgtaaggagtgcttttagttaatctataatctatagaaacaatacttatcactggcttgctgtcaataaatatgtgggtaaatctctgctcatggctctcagctctgaaggctgtgagtcccctgatttcccactccacatgctata

SEQ ID NO: 30219 - DNA, 527 bp, Homo sapiens
ttcttgtaattaccatctacaccagcatttcaggtatagctctttataactctggagacatgtaaaacatgtttaacacccacgagttttgaaagttgcattccttattagagtaggaactctctagcccaactccattctatgttctcagctccctccaccccccaaaatacatcagactagcaaggcagtcctatgtttacaaaacgagtttagattgtcatttcattccataactcttaataatactcaagttttatacattcacgtattttaaatgctcggtctgtagaagacactaggagaattgcattccaattactggatggttgctgctctggctttttagaacttgaaattaatttttatttagagcaaaggaggaaatcttttaagaggctaaaatcatgctgctattattgctgtgaaattgtataaagattaggattcatgccagtttttattttaaaaaataatgtgcattttaagggtttatatttagaaaaaaataaaatgtttcaagaaca

SEQ ID NO: 30220 - DNA, 443 bp, Homo sapiens
cccaacagttgactgtcactgacaatgttggaagtcatctggaaaagagaacctctgtggtaatgtggtctcattaaagtcaagccttgttgtgattcctgtctacctccctgaagcaaagcccttctgtttattcacactaatgagccagagctgagctaaattgaatccctgtccttggaggaaaaccacatttccagaagcatgttagtttaaaggtagtaggtgagaaatgtgttctcttgaaacaagcactttgaaatttgaataggaagttgtagtgtatataggaagtctctgcctctttcgcctagtatctctgcctttgtttcaatttgttttgatttttacagactgttttgacaatgtataaaccaaggtattttgttttttggaagtatgtaaattgtgaccttcccacaaatatataaactttaaagaaa

SEQ ID NO: 30221 - DNA, 383 bp, Homo sapiens
atctataaaggagagaaaattggacccagcatttcagccaggtcataacacttcttgaaaaaattacgctgagcagatctgtggagaattagactttggtattgtattaagactctaataatggctgggcgtggtggcccgtaatcccaacactttggaaggcccaggcaggaggattgcttgagcccaggagttgaaggccagcctgggcaatatagcgagaccccatctctaccaaaaataaaaaattagtggcatgtgcctgtggccccaactactcgggaggctgagatagaaggatcgcttaagcctgggagtttgaggctgcagtgagccgtgattgttcaactgcactctagtctgggtgacagtgagaccctagc

SEQ ID NO: 30222 - DNA, 331 bp, Homo sapiens
tgttcttctaattttctccactttttaaagtcaaaaacttttttttaatattttccttaaaatgcaagtatcagccgggtgcggtggcactcccagcactttgggaggccgaggtgggcagatcactagaggtcaggagtctgagaacagcctggccaacatgatgaaatcccatctctattaaaaatacaaaaaccagcagggcgaggtggcgggcacctgtaatcccagctacttggaaggctgaggcagaataatcatttgaacctaggaggaggaagtttcagtgagccaagattgtgccactgcactccactgtctcaaaaaaata

SEQ ID NO: 30223 - DNA, 328 bp, Homo sapiens
taaaggttctctgtggtaccaggtaactgcataaatcttagttttgaaaggattcctcttagactttagtgagggaaggacagtaacagagagactagaaagagactgttgcaactctagttataatccaggtaagaaatgacagtggcctggcccaaggtggtattcaaggagatgtcgagagaaggtcagatatacatctggcagacagagccaacagaatttgttgtcagattggatgtggactatgagagagagaacattctaagctttctggcttgagcagctagaggattgagttgtcgttactgagatggggaagacggat

SEQ ID NO: 30224 - DNA, 1345 bp, Homo sapiens
gtcataagcctccctgtttgcatcccaacatacactggtgtcctggctgatgggatgtgcactgggtctggaaagacttggtgttatctagggcttttgaagtggatcttgtgggctagcctctcaggggatcccacaggcctgaacacaagaggattttttgtttgtttgtttatttagagacaaggtcttgctctgtcacccaggctgaagggcagtggtgtgatcatagctctacagcctcaaactcctgggcttaagccaccttcccacctcagcctcctaaaatgctgggattacaggtgtgagccactgtgtccagccaacatgaggttttaaagggaggaaaagaagccactgctctgtgggactgtctcctgtggaacctttgttttcattcagggagaaaatggttttattgtagcaggagctaacatcatgtctgatcctgactgatatttggatggcaactgtaggaagtacctaacttaccattaaaatcgggtctgaaagtagttctaatccccaggggaggaatgaaaatattaatgaggattattttgcctcattattcctctccttcttgtaagccttagctgtctcatgtgtaagaaaatgttctttctcaactgtccttcctcttcttgaggtaaaatttctaatcaaatgagatagtttccacacagtttggtaagtgtgttgccttctccactggagtgagaaattccctagaggctttggccaacaggactaaatctctgccctcccacctacagacttggaatcctcgagcatgcctgactggccttcagcctcctcatctgaaactcgctcacactgctcaggagatgactgtgagcaatcaggggtcatactctgattaaagtgggctactctttgattcttagaatatttcaactctcccttccaacctcccccaaaatatatgttgatttgaaaagcattatcatctgactgggaaaagtgacaatgaaacattaggaatccaggcaccctttttgtgtcaagctgacctgtaagaggagttatagagccttgttttcctggcagggcagtggtcggataaagagtaaggcaaaagctaagagagactgaggcaactgacccagaatctgaagactggctacacacttcagagctaacagtgggagtatatggactctccagccttagacaatctaactcaacctcccatttctcactgtgatggcttgtgttttcacatttgacaatttctgaggtcactctggaggtatgttctacatcagcagatggaagtaaaaatcatgaataaaagctgactgttgtgtttgaaccttgttgg

SEQ ID NO: 30225 - DNA, 329 bp, Homo sapiens
gtccatgctgacactctaaggtccatatcaacaagtgaaaaagaaaaacaattaaacaattcagaatagtagaaaaagtctgctttgtaccataggtaaacttgtttaggtaatgtagaagaacatgttgtctaaaatatgcagaatgatatttcattaccacatgctcttgtggtatctggccagaatggagatttatttctcctctcttctgttactgccttaatcaatatattgtaacagaaacgactttgtataggattcatagctatgttattaaaacagcatacctttgggaggccgaggcgggcggatcatgaggtcaggag

SEQ ID NO: 30226 - DNA, 296 bp, Homo sapiens
tggggatggtttctgagttgtgaggaatatcagtttcatcatagataaggtaggggttttccctttcaatgatatctggttttgggttcccttcaggctgcttcctcacagtcatgtcatccccatagggagggatattgtcagggtcatcaaaagcaacgttctcacttccctttttcttcttctccttcggtttcttctcctctttgggatttttggccttcttccccctgcactggttacacaggatcaggctaaggaccaggagggccaagacggttgcgcagctgcccacg

SEQ ID NO: 30227 - DNA, 461 bp, Homo sapiens
ggccagctcagtttatccttcggagagacaaggatatgcatgattcttaaccaggctatatgttaaaaaaaaattggaaaatgcaatacattttttattatacaaactacagaatgagtatgcaagttttatttatcaaaatgtaatggatttttaaaggctgagaaattttccttatacctaccttttcagttattttaattataccaaattatcaactagaatagcttcatccatatgaaatataaaatgaagagacacctaggctctatcaggcttaggattctttgaacttatttccactttaatttctcagtggaagttaagaggggtgagaaaacaaagaaggggaaaaactgacaactaacaaaaccagcaccacatcgctaggtggtgcttactaattaccttctcaggattttcctcagattgaaaagcttatgaggatttcttgggagtct

SEQ ID NO: 30228 - DNA, 2808 bp, Homo sapiens
  misc_feature (1)..(2): n is a, c, g, or t
  misc_feature (5)..(5): n is a, c, g, or t
  misc_feature (18)..(18): n is a, c, g, or t
  misc_feature (51)..(52): n is a, c, g, or t
  misc_feature (59)..(59): n is a, c, g, or t
  misc_feature (61)..(61): n is a, c, g, or t
nnggngggggggcagccnctcgggaagagccaatcaggggcgagcgtcttnncgtcgcncnaggcccggcgcggattggcggcgcgcgtctcccacttcccctcggaggaaaggctcagctcccagcgcgcccctcccgtctccgcagcaaaaaagtttgagtcgccgctgccgggttgccagcggagtcgcgcgtcgggagctacgtagggcagagaagtcatggcttctccgtccaaaggcaatgacttgttttcgcccgacgaggagggcccagcagtggtggccggaccaggcccggggctggggggcgccgcgggggccgcggaggagcgccgcgtcaaggtctccagcctgcccttcagcgtggaggcgctcatgtccgacaagaagccgcccaaggagtcgcccgctgtgcctcccgaaggcgcctcggccggggcccacctgcggccactgctgctgtcggggcaccgcgctcgggaagcgcacagccccgggccgctggtgaagcccttcgagaccgcctcggtcaagtcgggaaattcagaagatggagcggcgtggatgcaggaacccggccgatattcgccgccgccaagacatatgagccctaccacctgcaccctgaggaaacacaagaccaatcggaagccgcgcacgccctttaccacatcccagctcctcgccctggagcgcaagttccgtcagaaacagtacctctccattgcagagcgtgcagagttctccagctctctgaacctcacagagacccaggtcaaaatctggttccagaaccgaagcgccaaggcgaaaagactgcaggaggcggaactggaaaagctgaaaatggctgcaaaacctatgctaccctccagcttcagtctccccttccccatcagctcgcccctgcaggcagcgtccatatacgcagcatcctacccgttccatagacctgtgcttcccatcccgcccgtgggactctatgccacgccagtgggatatggcatgtaccacctgtcctaaggaagaccagatcaatagactccatgatggatgcttgtttcaaagggtttcctctccctctccacaaaggcatagccagccagtactcctgcgctgctaagccctcgacgttgcaccccaccccctctaacggctagctgacagggccacaccacatagctgaaatttcgttctgtaggcggaggcaccaagccctgcttttcttggtgtaacttccagagtccccccttttttcccttgcacaaaagcttggctctgatggtttttttggcatgatgtatatatatatatacgaaaaatactacagaccctttttatcagcagacgtaaaaattcaaattattttaaaaggcaaaatttatatacatatgtgctttttttctatatctcaccttcccaaaaagacacatgtgtaagtccatttgttgtattttcttaaagagggagacaaattcggaggagcgccgcgtcaaggtctccagcctgcccttcagcgtggaggcgctcatgtccgatttgcaaaaatgtgctaaagtcaatgatttttaccgggattattgacttctgcttatacaagaagccgcccaaggagtcgcccgctgtgcctcccgaaggcgcctcggccggcctgcggaaaaacaaaagaaaacagacacaatgcagcagccagaaaatattagatatggagagattatggccactgctgctgaccggccacggcgtccgggaagcgcacagccccgggccgctggtgatcaaagtgaacccacatcatatttctgcattttacttgcattaaaagaaacctctttataagcccttcgagaccgcctcggtcaagtcgggaaattcagaagatggagcggcgtggatgctacatacgttgttcctatctcccgcccacgcccacacatatttttaaagtttttaggaacccggccgatattcgccgccgccaagacatatgagccctaccacctgcaccctgacctttttaagaatatttttgtaagaccaatacctgggatgagaagaatccgtagactgccggaaacacaagaccaatcggaagccgcgcacgccctttaccacatcccagctcctcgccctggaggtgaggtagaaaaattagaaatacttcctaattcttctcaaggctgttggtaactttggagcgcaagttccgtcagaaacagtacctctccattgcagagcgtgcagagttctctatttcagataattggagagtaaaatgttaaaacctgtgagaggattgtacagctctctgaacctcacagacccaggtcaaaaggttctgagaaatactaggtacattcatcctcacagattgcaaaggtgctttgggtgggggtttagtaattttctgcttaaaaaatgagtatcttgtaaccattacctatatctaaatattcttgaacaattagtagatccagaaagaaaaaaaaaatatgcttctctgtgtgtgtacctgttgtatgtcctaacttattagaaaaattttatatctttttacatgtggggggcagaaggtaaagcatgtttgacttgtgaaaatgggatgtcaaacagccataagttccctggtattcaccttcctgtccatctgtcccctccatcggtatacctttatccctttgaaagggtgcttgtacaatttgatatattttattgaagagttatctcttattctgaattaaattaagcatttgttttattctgaattaaattaagcatttgttttattgcagtaaagtttgtcca

SEQ ID NO: 30229 - DNA, 454 bp, Homo sapiens
tttttttttgtttgagatggagtctggctctgtcgcccaggctggaatgcagtgatgcaatcttggctcactgcaaccttcgccttcccggttcaagccattcttctgcctcagcctctgtagtagctgagattgcaggcgcctgccacacatacccagctaagttttgtatttttagtagagacggggtttcaccatgttgaccaggttggttttgaactcctgacctcaagtgatacacccatctcagcttccaaagggctgagactacaggcatgagctattgtgcccagtcgctattacaacctatttctaagttttccctaagtatcattttttttgtggcttattcattcatttagttagcaaatatttactgagtgccaattctgtgccaggcactgttctagtaacttgggatacaataacgaacaaaggactaagatgaggacaa

SEQ ID NO: 30230 - DNA, 474 bp, Homo sapiens
acctaattggaatgaagactataattgctacataaagtggttattcatcacgttagaaaatatgcagttgaggcaggtgcaatagcctttctttaaatactactagtcctcagcttccaaaccagaagctctgtgccttattgccttactccttggctggtgagttcagagaacccaaagtgggacagatgggccatgctggggttcttggacttaccaccacttccttgtactaaaaaactaagtaccctctaaggggcaaatttatgtggtttgggcaggtcacagtcaagggtccaagcagctatgtagaaatgaagtcacctgtgcacatggggtctccatacacagatgtgccatccttgtcgacatctaataaaaatatatatgaagttggtaggtgtctcaaataagtaacttagtgaaatcagggcactagtgcagcatttgaaataaaagtcaaccagcatctgg

SEQ ID NO: 30231 - DNA, 279 bp, Homo sapiens
ggcttggtggcacatgcctgtaatcccagttactcaggaggctgaggcaggagaatcacttgaacctgggaggcagaggttatagtgagccaagatggcgccactgcactccagcctggacaagagtgagactccctctaaaaaaaaaaaaaaacctttgcatatgagctgcagcaataaaagtgctatgagacccaacctctctgtaaccgtattctttgaaagctgtggaataaggccaagtgcagtggctcacatctaatcccagcactttggaag

SEQ ID NO: 30232 - DNA, 480 bp, Homo sapiens
cgtgccctggcctcttcatcaacgatgctgccctccaaccaccttctggcccaacaggtctgttaacttacctgctggaaggtgagtggctggaccagcgattcttgaggaccactgccttggttgctgcatccagccttcacacactggtgggcagttttgttttacctagtgtggtggccaacaccttatggtcaagagagactcaagggaaggaggaaggggggataagcatcccagctgaggaccaaggtcgtgcttgacttctgcttgtcatcagtagatggagatagcccacctcaattagtcaaaatccctaactcatatgggtctttctggaggagccagttcttatgtagttcgtaatttgtttcttgaatcatctttgcttttaaagcattacgaaataacttagtgcttttttttcctaatttttagaagatactatttattgtagaaaactgagaaaatcttgaccat

SEQ ID NO: 30233 - DNA, 452 bp, Homo sapiens
gcaaatcatgggccccggggccagattcctgcaaaccagtgttcctgcagggaccttgggctgtctcatcaatccaattgtggcaaatctcaaagaccgtctaacaaaaccagctcctgcccactcccttcctttatgtcctggaaagggtgggaaacccagccctgccatgtggcatcgagagaaagacatgagcttgggtcagacacaggctacacctccagccatgtgtgatgtctttggaaagtcaccagcctccctaagcctccaccttgagagctattatgcaagaagaactatataaagactgctaagcgatatgtatggtgcctggtacacagaaggtgcttagtgagtttgaatttccttctttgcctccttgcctttattaaggcagatttaaatgtactctgtaacaatataaattataaattcagagttctagaaagaaa

SEQ ID NO: 30234 - DNA, 447 bp, Homo sapiens
tccacattctacaactgtaaactgctaattttttgtggcttcttgctctatacaccatgcaatgcataatttatcagtttgtttaaaacattagaaagggagaaatactcagccttgtccttgaacctgagttgatactcgatctatctccatctgcattgccccctttttctctactttgtctcttattttgctgtattttttcttcctcagaactctcctgaaaagcctttgatttggtaaatatattttgggattttcagatgttgaggtttattataaatgctttaaattttctggttttattttttttaattaggttttgttgaggaacagagtgtaaaagaaaggatatggttaaaatatgaaaataagtaaaaatggtgcatgtacatcgttagtatacaaatgatatcaaatagtttagaaagagatgtcaaaggctcc

SEQ ID NO: 30235 - DNA, 408 bp, Homo sapiens
  misc_feature (13)..(13): n is a, c, g, or t
  misc_feature (16)..(16): n is a, c, g, or t
  misc_feature (35)..(35): n is a, c, g, or t
  misc_feature (38)..(38): n is a, c, g, or t
gcggccgctactnctnctactactactaaattcgnggncgtcgacaaaaaatattactacctacttatgaaaagtgaaacagaatttttacatttcttattcacattttctttttacttatgttttcactcaaaaaataataatatggtttctttttccatataaaaagaaagttgtaccctagaacaattttgcaaaatatctgctctaggggtcaaaacaggtgaagctttgtgaatgattttacactctcctgaatgtcattttatataatttcttttcaaaatcaaaagtcaaacaggaaaattactcctatccactggcctatgcactccaccagcattgatttctttttgcaaaggaaagcaagtgtgccttataacttgcatgctctgaaaatcatttata

SEQ ID NO: 30236 - DNA, 2052 bp, Homo sapiens
atttagtatacagaggaggacacaaacatgagaagattaaggtagagagtgaaatatggtcaggacaaatgtgaatttagagcctgagtgatggtttagtggatttatgtcctcacttgtcactaatgaaaaggaccttacaggttatataattaaagctctgttgacattggctcttgaaggcaaacttcataatgaggggaagagtcaagttttgtgtaacctgaagcatatacagtgtccattgccagcacttgagtaaagataaagagtaggagaatcaaagctgttgtataattagttctcttctcatccacacccataaaccagttcaagaaagggatgaaggtacaacttggccaagtagaaatcaaatgccccatcacagagtgttttgaattcttggaagaaacaactgttgtctataacttaacgcatgaagactccatcaagtataagtacttcttggaacttggccgtattgattccagcaccaagccatgtcctcagtgcaagcactttacaaccttcaagaaaaaaggacatattcccaccccttccagatcagaaagcaaatacaaacaaaatggcaggatgaagtggtttcaaaggctgtttggagtcatctccatttaaggtaaggagagcactgacatggataccccagccaaccaatcgtgagattcatggccacagtatggcaccctgtactgagactaagatctttgttctttgtgatgaacagatccagtgccctacctgccaattcgtctggtgttttaagtgccactctccttggcatgaaggtgttaactgcaaggagtacaaaaaaggagacaaattgttgcgtcactgggccagcgaaattgagcatgggcagaggaatgcccagaagtgtccaaagtgcaagatccacatccagcgaactgaaggatgtgaccatatgacctgctcacaatgtaacactaatttttgttaccgatgtggtgagagataccgccagctccgattttttggagaccacacatcaaacctcagtatatttggatgcaaatatcgctacctcccagagagacctcatttaaggagattagtgcgagggtcagtctgtgctggaaaattattcattgcacctctaattatggttttgggattggcactaggggccatagcggttgtaatcggtttatttgtatttcctatctattgcctttgtaaaaaacagagaaaacgatcacggacaggtatgcactggtaacatgcagatgatttcatccagctaagctggttggagtaggagcgataccaaagggtacacccatctgtgagtcacatcttgaaaaacactgagaggaaccttctaccatctcatctcccagtgattctccgtgggccacaatgcctctagctatggtgcactcccaacatggtatcctgtcctttccctaaacaaattgctgctgcttttaaaaaatggtcactttcataaactataaacatctatatcataactctgacctttgtggttcttggaagaagatattttaagaaccagttatcctaagaattctgagcacgcctcttctgagaattgcttggactgtctttgaactctgcacctccttccaggccatcttgtgagacttggtgttaatagctgaagtcctatctgtaccaacaagcaaggccacttttcagaagataagagttcactgaatgcacctattataatctgtggccccagcagtataattcttttatctttcaaatgttataattgcaaaaaatctcaatgtccaaaagggaatgagtgaaactaaattaatgaggaagaatattaagttactgaagtgtatatgcgtagggggcgtgaatgtgtgtgtatataaatatgtattaaaactaggcccagtaaccttgtacttacccagttccatgccgctacactatttttccacattttcatagacctattgaaagatgatggctcctttgtggacataatttagcaatgtattaaattaaagtcaatgtagacaacaggccatttcg

SEQ ID NO: 30237 - DNA, 1889 bp, Homo sapiens
atttagtatacagaggaggacacaaacatgagaagattaaggtagagagtgaaatatggtcaggacaaatgtgaatttagagcctgagtgatggtttagtggatttatgtcctcacttgtcactaatgaaaaggaccttacaggttatataattaaagctctgttgacattggctcttgaaggcaaacttcataatgaggggaagagtcaagttttgtgtaacctgaagcatatacagtgtccattgccagcacttgagtaaagataaagagtaggagaatcaaagctgttgtataattagttctcttctcatccacacccataaaccagttcaagaaagggatgaaggtacaacttggccaagtagaaatcaaatgccccatcacagagtgttttgaattcttggaagaaacaactgttgtctataacttaacgcatgaagactccatcaagtataagtacttcttggaacttggccgtattgattccagcaccaagccatgtcctcagtgcaagcactttacaaccttcaagaaaaaaggacatattcccaccccttccagatcagaaagcaaatacaaaatccagtgccctacctgccaattcgtctggtgttttaagtgccactctccttggcatgaaggtgttaactgcaaggagtacaaaaaaggagacaaattgttgcgtcactgggccagcgaaattgagcatgggcagaggaatgcccagaagtgtccaaagtgcaagatccacatccagcgaactgaaggatgtgaccatatgacctgctcacaatgtaacactaatttttgttaccgatgtggtgagagataccgccagctccgattttttggagaccacacatcaaacctcagtatatttggatgcaaatatcgctacctcccagagagacctcatttaaggagattagtgcgagggtcagtctgtgctggaaaattattcattgcacctctaattatggttttgggattggcactaggggccatagcggttgtaatcggtttatttgtatttcctatctattgcctttgtaaaaaacagagaaaacgatcacggacaggtatgcactggtaacatgcagatgatttcatccagctaagctggttggagtaggagcgataccaaagggtacacccatctgtgagtcacatcttgaaaaacactgagaggaaccttctaccatctcatctcccagtgattctccgtgggccacaatgcctctagctatggtgcactcccaacatggtatcctgtcctttccctaaacaaattgctgctgcttttaaaaaatggtcactttcataaactataaacatctatatcataactctgacctttgtggttcttggaagaagatattttaagaaccagttatcctaagaattctgagcacgcctcttctgagaattgcttggactgtctttgaactctgcacctccttccaggccatcttgtgagacttggtgttaatagctgaagtcctatctgtaccaacaagcaaggccacttttcagaagataagagttcactgaatgcacctattataatctgtggccccagcagtataattcttttatctttcaaatgttataattgcaaaaaatctcaatgtccaaaagggaatgagtgaaactaaattaatgaggaagaatattaagttactgaagtgtatatgcgtagggggcgtgaatgtgtgtgtatataaatatgtattaaaactaggcccagtaaccttgtacttacccagttccatgccgctacactatttttccacattttcatagacctattgaaagatgatggctcctttgtggacataatttagcaatgtattaaattaaagtcaatgtagacaacaggccatttcg

SEQ ID NO: 30238 - DNA, 1568 bp, Homo sapiens
ccttccatctgctcttccatcatgcaggtacaacttggccaagtagaaatcaaatgccccatcacagagtgttttgaattcttggaagaaacaactgttgtctataacttaacgcatgaagactccatcaagtataagtacttcttggaacttggccgtattgattccagcaccaagccatgtcctcagtgcaagcactttacaaccttcaagaaaaaaggacatattcccaccccttccagatcagaaagcaaatacaaaatccagtgccctacctgccaattcgtctggtgttttaagtgccactctccttggcatgaaggtgttaactgcaaggagtacaaaaaaggagacaaattgttgcgtcactgggccagcgaaattgagcatgggcagaggaatgcccagaagtgtccaaagtgcaagatccacatccagcgaactgaaggatgtgaccatatgacctgctcacaatgtaacactaatttttgttaccgatgtggtgagagataccgccagctccgattttttggagaccacacatcaaacctcagtatatttggatgcaaatatcgctacctcccagagagacctcatttaaggagattagtgcgagggtcagtctgtgctggaaaattattcattgcacctctaattatggttttgggattggcactaggggccatagcggttgtaatcggtttatttgtatttcctatctattgcctttgtaaaaaacagagaaaacgatcacggacaggtatgcactggtaacatgcagatgatttcatccagctaagctggttggagtaggagcgataccaaagggtacacccatctgtgagtcacatcttgaaaaacactgagaggaaccttctaccatctcatctcccagtgattctccgtgggccacaatgcctctagctatggtgcactcccaacatggtatcctgtcctttccctaaacaaattgctgctgcttttaaaaaatggtcactttcataaactataaacatctatatcataactctgacctttgtggttcttggaagaagatattttaagaaccagttatcctaagaattctgagcacgcctcttctgagaattgcttggactgtctttgaactctgcacctccttccaggccatcttgtgagacttggtgttaatagctgaagtcctatctgtaccaacaagcaaggccacttttcagaagataagagttcactgaatgcacctattataatctgtggccccagcagtataattcttttatctttcaaatgttataattgcaaaaaatctcaatgtccaaaagggaatgagtgaaactaaattaatgaggaagaatattaagttactgaagtgtatatgcgtagggggcgtgaatgtgtgtgtatataaatatgtattaaaactaggcccagtaaccttgtacttacccagttccatgccgctacactatttttccacattttcatagacctattgaaagatgatggctcctttgtggacataatttagcaatgtattaaattaaagtcaatgtagacaacaggccatttcg

SEQ ID NO: 30239 - DNA, 551 bp, Homo sapiens
gtacaacttggccaagtagaaatcaaatgccccatcacagagtgttttgaattcttggaagaaacaactgttgtctataacttaacgcatgaagactccatcaagtataagtacttcttggaacttggccgtattgattccagcaccaagccatgtcctcagtgcaagcactttacaaccttcaagaaaaaaggacatattcccaccccttccagatcagaaagcaaatacaaagtaagcattttcaccagagctgtgggttagatgtcacatggcagaagcagccagattagatccacttgtcgtgggcattaagggggcatctttcctttatggagctgaaggtgagcatatattggccatcattctgaaagcatatggtttggggaggctgatgataagagagtgctcttaaggaattaattacagttttgtctttgactttaaccatgttgaaaattaatctagtaaccttataggaaggctgatctttagagtaataatagttactactaccaaatactaaataaatactaaggctttttctttat

SEQ ID NO: 30240 - DNA, 429 bp, Homo sapiens
ctgaatatctttggtagggcagaggtaccaggaatggggtcaccgtctaacacaggcaaaggtaagctccctggataagtccatgctgtcacctgtactcctaattccattccctccaagttgacttttcagagctgaacttctaaccttgcgtgtcagtatttggggtcctgacacctctctctagggcatatgccccggccagctccactgtgcctggaagagacttcactcctttcctttctcagatgccattgagagaagcccaagcacatgaataacctgacttaggtgaccatgaggcagtgaagtgtccccgagcatcgtggcataggggcttggatggcccatacgcagttctgtgaccatcactgggagccacagctccaaggccacttctctccatcaccttacagagagctggaaact

SEQ ID NO: 30241 - DNA, 3130 bp, Homo sapiens
atcagaaaatggaaccccctttgtcgtgaaaccgatcaagcattttgacaggaagcccttcattattcataacattgtatgctgaccaagacgtcagaagaccacctgtgcccttttctctcgtggaagataaaacctggactcagggagcaaccacaggctctccactttgaaactttagtttgaattttaaaagataggaagtaatacagtttaagttcctttctcacactcagtattgcatgcttagtgctggttttcttacaacattttggcaggtgtagctttttctgttaaaaatggtatacatgaagtcacatacttttttaaaggaacactcagaacattctgtcattccagtcagaaactgtcttttgaaatatttctttacaacctaccaaaaaaggaaggttgttttttctacatgtgcttgggtatctaacatctaccattaaaacaacaaatggcttgcagacagggcagtaatggtttatcctaaattactcaaccccttgtagccttgacaaattttaccttaaaaccaaaatgaaacacaaaaattaatccttaataatgatagcaagtgatctttctttttagttttagccttcctttttcaatagtaatatttaaacccacttttgaccaattgtttgcccaaatattcttgtcatttggagtcagtggaaaatccagcacaccaagcaccagtcttcttctgaggcaaaagaaaagtgttgtcattttcactctgttggagctgcacacttttttttctttttttttctttttttttttgtcgtgtaagaaggatgctggtcagagctgcagaaaatatgaggcaattaaaagtctttagctgttagcaaacctgttagttttacttctgcattgaaccagcctcagaagctacttactgctttatgtactctttgggcattaatgccttctctgtaattatatctcgtttttgcttgacagtgacctacccaataattgcatcgtgcattgccatgaaaggtaaacacattgtgaactgaacttaccaagcagattctgtgagaaagcactggttgaggctgaacactgttgacacatcatttttattggaagagtattaactggtgcctcttctgaaacacaccaacccatattcctctgctcccccaaagctgtttctgatcctgctgggagcaactaactagttattatgcacatctgctccagacccagctctttaacttcatggttttacagcttgttttttctttttcttttcttttctttttttttttaaaaaagcacctttttttgttgtttccccttaataaaagaggtttctaatttatgtttctctaagatttcctttggttgtatttagaaacacaaatagttttataatcaggattgcatttgtgctgggtaaaagaggagagctgtgctttctaccccaaagttgttggtaatggagccggtctgcccttcctacaaactcaagaggctcattgttcaaggtgtaacaacatttaattgcatgtcctctaacgctttgaaacctttagagggaagatcctcattttttacaattttgttccttttcatcatagaaaacatgtttaagataaaatacaaactttacctaccccaaattcataaagtacatttagtgctgtatagcactaaaacttagagatacagacactgtacttactttttaagaattagagacagtaactccaaaaataattgtccttttttctttctttctttttttacaataaggctcttgaaaattgtcattacttgtgttttcctatacattcatctgtgtgaaagcctttttcttctttgatttaaaaaaattaactatacagttaatggtttagaacttagaactacttagaattaatgctaaagtgtcaggaagaaattaatttagcttcaataattgtgactggcctcaggaattctcccttccacacctgcccacctcacctcactgcaccgcaccgcaccagagccagagcagctgcttgtctgcagcaggacacagttcctacatacgtttcagttctttcatggtaagctcaatggactttgaattgtttacagtgctgtatgtccaattgttaaatgtaccattctgaacgatgttaaagcaagtgtggtttatttatggcatgaaccatgtaacttgaaatatgaacttacaaggaggggcactcattaggtaacaagttcttacaccaaacttccttgatgaaataagccaaaataatcctaaaattcattagaagaacttgataaaagactcaaataaatgttagaaagagcccgtaattttaggactcctataaaattcttccttgtttgttaatgctattaaaactcagattcaagggaaataccagcttccacttgagtcactttgaaatagttaattcaacagcaccatgttagaaatatattggcagccaagactctgaactctgcagaaacatttgtttcacccagacttcaaactctagccctgactatgatgcccctgtgtgcatttacaataaagactccaacggagggagcctgttggtgttaaattgtttacatttctttatacaaataatgtgctttcagtgccttagttacagctccctttctgtttcttgttccaaggattctgtagtatgtagtgtgtttcttaggtaaagtctctttttgctactgaaagggaaatggtctctaaacactggtcactgtagcaggtaaacactactctaacgtggagaaatgagcttcatgctgaggtagtggttgccttagagctgttatttatgctgtagaaaacgaaaatggttttgctacctgataagcttcagattagatatagccctaaagttatcctgtacctgcattaaattttcattttagaagagaatcttggttttggtaattcatttttttttaagatcattatgtgcaaaacaccaagttttaaaaataactcacagaatggccttagttttcaatgtctgatggtatatttgtgagttgtgttatctgtaatatacatcccagaataaaggagtgaattaaatagtttaaaaaaaaaaagaaagttggggtaaaaaaa

SEQ ID NO: 30242 - DNA, 705 bp, Homo sapiens
atggagatgggcagacggattcattcagagctgcggaacagggcgccctctgatgtgaaagaacttgccctggacaacagtcggtcgaatgaaggcaaactcgaagccctcacagatgaatttgaagaactggaattcttaagtaaaatcaacggaggcctcacctcaatctcagacttaccaaagttaaagttgagaaagcttgaactaagagtctcagggggcctggaagtattggcagaaaagtgtccaaacctcacgcatctatatttaagtggcaacaaaattaaagacctcagcacaatagagccactgaaacagttagaaaacctcaagagcttagaccttttcaattgcgaggtaaccaacctgaacgactacggagaaaacgtgttcaagcttctcctgcaactcacatatctcgacagctgttactgggaccacaaggaggccccttactcagatattgaggaccacgtggagggcctggatgacgaggaggagggtgagcatgaggaggagtatgatgaagatgctcaggtagtggaagatgaggagggcgaggaggaggaggaggaaggtgaagaggaggacgtgagtggaggggacgaggaggatgaagaaggttataacgatggagaggtagatggcgaggaagatgaagaagagcttggtgaagaagaaaggggtcagaagcgaaaatga

SEQ ID NO: 30243 - DNA, 453 bp, Homo sapiens
caactcccttcactgggctgcttttgacccagaacattcaaagctactgtggaaccacaatcagcagatcctaacatgcttcttgcaaactgatgcacattttttaaactatctgtgaatcccctactacttaccttaattgaaaatgactgatacagaacttcccagagtctctttcctcttttctctctcacttatttcgttctctgcacaaaaaattttggaataaatgaaatgcatttttctctgcataatttctctctgtttaacagtgaccacacatctttgatttttgtcactgaactttcaaaggtctttgcataccatgggttgacaatgtcagtcaaaggacaatttacaagcatatttcttcactcttctatgaaccaatttgctgaataatttctttttttaaaaggtatgaagtgtacagtagatgctcagtagatattt

SEQ ID NO: 30244 - DNA, 379 bp, Homo sapiens
accatgctggtgaggcgcctggactccagtcagataacccagcatcaactctgctgtgacccttaccagctgtgtgactttgggcaacttatttaacctacctatgcctgttttcttcatgtataactaaaggtgatagtgaacctaatgaggattaaattgcgcaatgaataagcacttaccacagtgcctagcatagtaaacatttaatacatgtattaaagaattgggagcaatggtcttgcaaccttttccacaacccccccagccctttaattcaggaaaacctgcctaaaaatgaaggcccaaagtgtaaggcacaataaaaacaataaaagtgggagcccttgaatagagtggggtagggagccttggctcc

SEQ ID NO: 30245 - DNA, 1314 bp, Homo sapiens
acagggccataaagctcatatggagtaccctgcaaaaatgttgaaagctgatactgaatatttactcaatttgtgaaaataatataaggaaaattctgcccaacatcccaagaagtttcaagaaaaccttccgtcagctcactaagctttgtgcaagtgtgccatctgaattcataattacatataaaatagggggacctcaaataaaagcattaagttaaaaactgttacgagatatgtgaaacttctaaggttctagcagaatcaaatctaaaactactatctaaggagatgtccgtaaacccaacttataagatgcctccctatcaaagaaccctaccactaccaccatctacaaactgaagttatctaataaccaaaatattatgagaaacataacaacagcacaaaaaaatgagtagcggcagcaaatggggaaacatgaaagtcagaagctcaagaattggagataacataataatttgaacaaggctattatgaaaatacattttaaatcattaaagatgtttaaaaagtaatagaaaccaggccaggtgcagtggctcacaactgtaattccagcacattgggaggctgaggcgggtggatcacccgaggccaggagtttgagaccagcctggccaacatggtgaaatgctgtctctactaaaaatacaaaaattagtcagggagggtggtacatgcctgtaatcctagctacttgggaggctgaggcaggggaatcacttgaactcgggaggcagaggttgcagtgagctgagatcacaccattgcactccagactgggtgacagaatgagaccctgtctaaaaaaaaaaaaaaaagtaatagaaaccaaaatggaaaaaaaaaaaaaggacagtaaaggaaaaaaaagatatgtgcatttgagaaaaaaatgaaatcacatacttggaaatgaaaattgtctttgaaattaaaaactgagcagatcagttaaacagcagattcaatatattcaaggaaacaaagagtgaaatggaatttagatttgattaaatcacacagaacacaacacattatgtgtgtttggaaaagatggatgaaagcctaaaaggtatgatggatgcagggaagtggagaggttcagtacatatctagtaggagtcccagtgagagattataaaagagagagtatatgcaaaagtaaataactagaaattttttagaatttaataaaaacatgagatttcagattgaaggaatgcattgagaccactgcaggatacacagaatcaaatacacacctagaaatatcatcatgacaataaa

SEQ ID NO: 30246 - DNA, 1260 bp, Homo sapiens
acagggccataaagctcatatggagtaccctgcaaaaatgttgaaagctgatactgaatatttactcaatttgtgaaaataatataaggaaaattctgcccaacatcccaagaagtttcaagaaaaccttccgtcagctcactaagctttgtgcaagtgtgccatctgaattcataattacatataaaatagggggacctcaaataaaagcattaagttaaaaactgttacgagatatgtgaaacttctaaggttctagcagaatcaaatctaaaactactatctaaggagatgtccgtaaacccaacttataagatgcctccctatcaaagaaccctaccactaccaccatctacaaactgaagttatctaataaccaaaatattatgagaaacataacaacagcacaaaaaaatgagtagcggcagcaaatggggaaacatgaaagtcagaagctcaagaattggagataacataataatttgaacaaggctattatgaaaatacattttaaatcattaaagatgtttaattgggaggctgaggcgggtggatcacccgaggccaggagtttgagaccagcctggccaacatggtgaaatgctgtctctactaaaaatacaaaaattagtcagggagggtggtacatgcctgtaatcctagctacttgggaggctgaggcaggggaatcacttgaactcgggaggcagaggttgcagtgagctgagatcacaccattgcactccagactgggtgacagaatgagaccctgtctaaaaaaaaaaaaaaaagtaatagaaaccaaaatggaaaaaaaaaaaaaggacagtaaaggaaaaaaaagatatgtgcatttgagaaaaaaatgaaatcacatacttggaaatgaaaattgtctttgaaattaaaaactgagcagatcagttaaacagcagattcaatatattcaaggaaacaaagagtgaaatggaatttagatttgattaaatcacacagaacacaacacattatgtgtgtttggaaaagatggatgaaagcctaaaaggtatgatggatgcagggaagtggagaggttcagtacatatctagtaggagtcccagtgagagattataaaagagagagtatatgcaaaagtaaataactagaaattttttagaatttaataaaaacatgagatttcagattgaaggaatgcattgagaccactgcaggatacacagaatcaaatacacacctagaaatatcatcatgacaataaa

SEQ ID NO: 30247 - DNA, 515 bp, Homo sapiens
acattaaatgtacatgcaaatttttagcaaggttgtgcctaatcaccaccatgaaaacttctttggaatatgagccttggtgtttaccagtagggaaatgacaggttgttcaaaaggaaatgtttcccaagttctggttggaagctggcatcagagaaagagggaaatctagaactgttcttagtttctctagcaacaagatttcaaaaaattgtactgaaagttcagtgaacattgttacagggatttccattcttcataaaaagaataaacttgcaaaaactgagactgaatgatttagcaattgaattataaaagatcaatgttggatattctgtgttttaaaacataataaaaattagattagtttaatttgaattcgagacactaagtgataaagttacatgttcagtatttgaagctgtagctttgcataagcaataaataattaataggattttgaaacttggtccaagcatataaaatagtgcaaataccaagaaatagcatgcaaa

SEQ ID NO: 30248 - DNA, 780 bp, Homo sapiens
gccacatgaaactggcattttaaattgaagtgcattaactggatagtcctaatcaataagcacgtggtttgtgtccaaagagtattttacctacgtgacaaaataaatattacatttaggtttcattatgcctttcttgtaaagactgattttccattttataaggtaaaatgcttgtgaaacttgatgcagaatatttgactacttgaattcagcagaacatactacatatttttctttgtagacatttttggcagtttcattctttaagaacaagtcgagaagtagataatcttctctacccaaattttttaccttttgagaaaaaatatggatttaaattatgagcaatattaaactctcattacatcatcagaaatctgggagctaaagtttatttcagaagtcttattagatggagttgcatttcttaaattaggagttatgttttatttaaatttcctgcctacccttggagttgtaaacatcaccttacttcataaaaccttccctgaagtgcctcgtagtttcccatctctctgtgcccatgtggagatactgctatttcttgtcttttatccaaatgggcctgaaaattcagagtgtagccacagtaacttctgtgctgtgaatgcatatggcttggatcccaagtagagcactcagtctgccttgctctttgatatcaattataatctattaacataactaaaatcccatatatggactcctttggctgttttcaatcttaaagccgtttatggtagaacttttcatgta

SEQ ID NO: 30249 - DNA, 753 bp, Homo sapiens
accctacatgctgcgcctatacccaggaccgatggtaactgaggcggaggggaaaggagggcctgagatggcaagtctgtcctcctcggtggttcctgtgtccttcatttccactctgtgagagtctgtgctggaccctggagttggtggagaaggagccagtgacaagcagaggagcaaactgtctttatcacactccatgatcccagctgctaaaatccacactgagctctgcttaccagccttcttctctcctgctggaacccagaggaggttccagcagcctcagcaccacctgacactgtctatcatccacactgcagcaaggtgattctgccaaaacatatctccttaaaagccaactggagcttctcatcagcatcaatgtgaagccaaaaatccttaggaggacagagggagtccctcacaacctagactggtccccttccctccagctgcctcaactgtccacaggactctcttcccacctgcggccacactgtgcaacctggaatttccccacctgggcggactcatcacgtcatcaccaattggatgcatcttctgctctgtgcagctggtgaaatctttctcaacccttgagatgcagcccaatcttctcctaacatctggattcctctctgtcactgcattccctcctgtcatcctgcctttgttttcttgccctcctttctctcccgggtgacaggcattacctaaaattaaataaaaattcagatcatccttgcaaat

SEQ ID NO: 30250 - DNA, 496 bp, Homo sapiens
tggccagcgactacccactcacgcgtattgcgccagattgcgtattatctatcatccacactgcagcaaggtgattctgccaaaacatatctccttaaaagccaactggagcttctcatcagcatcaatgtgaagccaaaaatccttaggaggacagagggagtccctcacaacctagactggtccccttccctccagctgcctcaactgtccacaggactctcttcccacctgcggccacactgtgcaacctggaatttccccacctgggcggactcatcacgtcatcaccaattggatgcatcttctgctctgtgcagctggtgaaatctttctcaacccttgagatgcagcccaatcttctcctaacatctggattcctctctgtcactgcattccctcctgtcatcctgcctttgttttcttgccctcctttctctcccgggtgacaggcattacctaaaattaaataaaaattcagatcatccttgcaaat

SEQ ID NO: 30251 - DNA, 522 bp, Homo sapiens
  misc_feature (79)..(79): n is a, c, g, or t
  misc_feature (83)..(83): n is a, c, g, or t
ctaggcaacatcactgcactcccacctacccgccacccttctaccggcacctaccaccaaccgtgagtccgctcaaccnccanacatgcgatttaggtgattctgccaaaacatatctccttaaaagccaactggagcttctcatcagcatcaatgtgaagccaaaaatccttaggaggacagagggagtccctcacaacctagactggtccccttccctccagctgcctcaactgtccacaggactctcttcccacctgcggccacactgtgcaacctggaatttccccacctgggcggactcatcacgtcatcaccaattggatgcatcttctgctctgtgcagctggtgaaatctttctcaacccttgagatgcagcccaatcttctcctaacatctggattcctctctgtcactgcattccctcctgtcatcctgcctttgttttcttgccctcctttctctcccgggtgacaggcattacctaaaattaaataaaaattcagatcatccttgcaaat

SEQ ID NO: 30252 - DNA, 380 bp, Homo sapiens
acttgcccaaagttgacgctagtaagtggcagagctaagcctagactctgggtcttaagcatagttcaaggcgctttccacagagtgtagatggagtttcacatttttcatccagattccttaaggacctgaacttgctaatttgatctactaacctggaaattgactagggcttctcttataccactcagccctttaaagttttgccagtaaagtatcaacatggttaataatatgctgtaatttagagcacacaagccaatggacatacaaatttggtcattcagtagccacccagagagtgagcacagatacacactggagcagctgatttggcaagattggtggaggctgaacatattaactagtcattaaatgaa

SEQ ID NO: 30253 - DNA, 709 bp, Homo sapiens
gcacttatcaccttttcaacatactatacactttacctatttatcttgttaactgtccatctcctccaaccagaatgtaagctcagtaggagcaagaatttttgtctgctttaatcactgatacatcttgtctccagcacctaaaatgtaggggctcaacaagtatttgttgaaaagtcagtaaatgagtgactgattcttaaagacctttttgtaactccattttagaagaccaaagaaaaaaagacaaaatcttgaacattaatatttatacaaaccaaatactactttttgtaggtaaaatatgattctattgtgatgtaaagttacctttttgactgtagtgaaatccatgaatggcaaggatctaactaatttactattgctcctcttccaggaaatgtttcaactttcaaataaagaggacttctgattgtcaagcatggcaaattcatgtggaatgcctaaaaatgctgagtactaaaaatatttttaaagatatggctaagcagcaagaaagtaacagcaattgttaaaagttgaaaatgacaaggaaattagaacctagagaagtaagtaggtaagtcctgcataagtcaatccctgatggggatattaagagacaaagggacagcctaatgtccacacaggaaggtcaaagccaatacccttgaaagatgaaatcctcagtgggtaaattaaaaaaaaa

SEQ ID NO: 30254 - DNA, 393 bp, Homo sapiens
gaaaataactggtagtggggctccttggctggagtagtcatggagggtctctagaggatgacttgccatctgatatgtctgaaggacagagctgagccagccccttgaagtgcttgacaatgactggctcaggcagagggaacagcatgaacaaaggcctcagggcaggacaaagcttagcatgtttgggtacagaaagaaggccaaagtgggaggggagaaagaggtggcaagaagaaattaagataatcagaatctcttttcattgctctgtgggagaaaaaggctttagatttgtcattcgtccaatgctgtgtatgacagttgcttctagtgaccctgcagtctttgagtctctttttgctttgggaggctgaaacaatgtttctttct

SEQ ID NO: 30255 - DNA, 4646 bp, Homo sapiens
agcggagcgggacccgcggctcgggatggaggctggacacctgttctgctgttgtgtcctgccattctcctgaagaacagaggcacactgtaaaacccaacacttccccttgcattctataagattacagcaagatggaaataccaaatccccctacctccaaatgtatcacttactggaaaagaaaagtgaaatctgaatacatgcgacttcgacaacttaaacggcttcaggcaaatatgggtgcaaaggctttgtatgtggcaaattttgcaaaggttcaagaaaaaacccagatcctcaatgaagaatggaagaagcttcgtgtccaacctgttcagtcaatgaagcctgtgagtggacacccttttctcaaaaagtgtaccatagagagcattttcccgggatttgcaagccaacatatgttaatgaggtcactgaacacagttgcattggttcccatcatgtattcctggtcccctctccaacagaactttatggtagaagatgagacggttttgtgcaatattccctacatgggagatgaagtgaaagaagaagatgagacttttattgaggagctgatcaataactatgatgggaaagtccatggtgaagaagagatgatccctggatccgttctgattagtgatgctgtttttctggagttggtcgatgccctgaatcagtactcagatgaggaggaggaagggcacaatgacacctcagatggaaagcaggatgacagcaaagaagatctgccagtaacaagaaagagaaagcgacatgctattgaaggcaacaaaaagagttccaagaaacagttcccaaatgacatgatcttcagtgcaattgcctcaatgttccctgagaatggtgtcccagatgacatgaaggagaggtatcgagaactaacagagatgtcagaccccaatgcacttccccctcagtgcacacccaacatcgatggccccaatgccaagtctgtgcagcgggagcaatctctgcactccttccacacacttttttgccggcgctgctttaaatacgactgcttccttcacccttttcatgccacccctaatgtatataaacgcaagaataaagaaatcaagattgaaccagaaccatgtggcacagactgcttccttttgctggaaggagcaaaggagtatgccatgctccacaacccccgctccaagtgctctggtcgtcgccggagaaggcaccacatagtcagtgcttcctgctccaatgcctcagcctctgctgtggctgagactaaagaaggagacagtgacagggacacaggcaatgactgggcctccagttcttcagaggctaactctcgctgtcagactcccacaaaacagaaggctagtccagccccacctcaactctgcgtagtggaagcaccctcggagcctgtggaatggactggggctgaagaatctctttttcgagtcttccatggcacctacttcaacaacttctgttcaatagccaggcttctggggaccaagacgtgcaagcaggtctttcagtttgcagtcaaagaatcacttatcctgaagctgccaacagatgagctcatgaacccctcacagaagaagaaaagaaagcacagattgtgggctgcacactgcaggaagattcagctgaagaaagataactcttccacacaagtgtacaactaccaaccctgcgaccacccagaccgcccctgtgacagcacctgcccctgcatcatgactcagaatttctgtgagaagttctgccagtgcaacccagactgtcagaatcgtttccctggctgtcgctgtaagacccagtgcaataccaagcaatgtccttgctatctggcagtgcgagaatgtgaccctgacctgtgtctcacctgtggggcctcagagcactgggactgcaaggtggtttcctgtaaaaactgcagcatccagcgtggacttaagaagcacctgctgctggccccctctgatgtggccggatggggcaccttcataaaggagtctgtgcagaagaacgaattcatttctgaatactgtggtgagctcatctctcaggatgaggctgatcgacgcggaaaggtctatgacaaatacatgtccagcttcctcttcaacctcaataatgattttgtagtggatgctactcggaaaggaaacaaaattcgatttgcaaatcattcagtgaatcccaactgttatgccaaagtggtcatggtgaatggagaccatcggattgggatctttgccaagagggcaattcaagctggcgaagagctcttctttgattacaggtacagccaagctgatgctctcaagtacgtggggatcgagagggagaccgacgtcctttagccctcccaggccccaacggcagcacttatggtagcggcactgtcttggctttcgtgctcacaccactgctgctcgagtctcctgcactgtgtctcccacactgagaaaccccccaacccactccctctgtagtgaggcctctgccatgtccagagggcacaaaactgtctcaatgagaggggagacagaggcagctagggcttggtctcccaggacagagagttacagaaatgggagactgtttctctggcctcagaagaagcgagcacaggctggggtggatgacttatgcgtgatttcgtgtcggctccccaggctgtggcctcaggaatcaacttaggcagttcccaacaagcgctagcctgtaattgtagctttccacatcaagagtccttatgttattgggatgcaggcaaacctctgtggtcctaagacctggagaggacaggctaagtgaagtgtggtccctggagcctacaagtggtctgggttagaggcgagcctggcaggcagcacagactgaactcagaggtagacaggtcaccttactacctcctccctcgtggcagggctcaaactgaaagagtgtgggttctaagtacaggcattcaaggctgggggaaggaaagctacgccatccttccttagccagagagggagaaccagccagatgatagtagttaaactgctaagcttgggcccaggaggctttgagaaagccttctctgtgtactctggagatagatggagaagtgttttcagattcctgggaacagacaccagtgctccagctcctccaaagttctggcttagcagctgcaggcaagcattatgctgctattgaagaagcattaggggtatgcctggcaggtgtgagcatcctggctcgctggatttgtgggtgttttcaggccttccattccccatagaggcaaggcccaatggccagtgttgcttatcgcttcagggtaggtgggcacaggcttggactagagaggagaaagattggtgtaatctgctttcctgtctgtagtgcctgctgtttggaaagggtgagttagaatatgttccaaggttggtgaggggctaaattgcacgcgtttaggctggcaccccgtgtgcagggcacactggcagagggtatctgaagtgggagaagaagcaggtagaccacctgtcccaggctgtggtgccaccctctctggcattcatgcagagcaaagcactttaaccatttcttttaaaaggtctatagattggggtagagtttggcctaaggtctctagggtccctgcctaaatcccactcctgagggagggggaagaagagagggtgggagattctcctccagtcctgtctcatctcctgggagaggcagacgagtgagtttcacacagaagaatttcatgtgaatggggccagcaagagctgccctgtgtccatggtgggtgtgccgggctggctgggaacaaggagcagtatgttgagtagaaagggtgtgggcgggtatagattggcctgggagtgttacagtagggagcaggcttctcccttctttctgggactcagagccccgcttcttcccactccacttgttgtcccatgaaggaagaagtggggttcctcctgacccagctgcctcttacggtttggtatgggacatgcacacacactcacatgctctcactcaccacactggagggcacacacgtaccccgcacccagcaactcctgacagaaagctcctcccacccaaatgggccaggccccagcatgatcctgaaatctgcatccgccgtggtttgtattcattgtgcatatcagggataccctcaagctggactgtgggttccaaattactcatagaggagaaaaccagagaaagatgaagaggaggagttaggtctatttgaaatgccaggggctcgctgtgaggaataggtgaaaaaaaacttttcaccagcctttgagagactagactgaccccacccttccttcagtgagcagaatcactgtggtcagtctcctgtcccagcttcagttcatgaatactcctgttcctccagtttcccatcctttgtccctgctgtcccccacttttaaagatgggtctcaacccctccccaccacgtcatgatggatggggcaaggtggtggggactaggggagcctggtatacatgcggcttcattgccaataaatttcatgcactttaaagtcctgtggcttgtgacctcttaataaagtgttagaatccaaaaaaaaaaa

SEQ ID NO: 30256 - DNA, 352 bp, Homo sapiens
  misc_feature (316)..(316): n is a, c, g, or t
ctttcttttatttctgtgttgtgttcttttatgttatttgcttgtttgggaggggttgtgtttaagtttaactcttgtagcacaggccagctggatttaggatggactctagcttctgtgtaccaaagtcgtcctgttgaggggtttgggaagatactccccagtcatcaaacacagtccctcagagcaagtcacgttgtcatttacctgcatttgcagagctccctagggccgtgactgagacctgtccttcctgtctttttcagattgtgggctgcacactgcaggaagattcagctgaagaaagataactctnccatacaagtgtagaactaccaacgctgcgccctaa

SEQ ID NO: 30257 - DNA, 148 bp, Homo sapiens
tcaggtcttgcctggcagctcaggtactggggctagggtgtctgctatgcctggtatacatgcggcttcattgccaataaatttcatgcactttaaagtcctgtggcttgtgacctcttaataaagtgttagaatccaaaaaaaaaaa

SEQ ID NO: 30258 - DNA, 4765 bp, Homo sapiens
agcggagcgggacccgcggctcgggatggaggagtctcactcttgttgcccaggccgcagtacaatggcgtgatctcagctcactgcaacctctgcctcccgggttcacatgattctcctgcctcagcctcccgagtagctgggattacagctggacacctgttctgctgttgtgtcctgccattctcctgaagaacagaggcacactgtaaaacccaacacttccccttgcattctataagattacagcaagatggaaataccaaatccccctacctccaaatgtatcacttactggaaaagaaaagtgaaatctgaatacatgcgacttcgacaacttaaacggcttcaggcaaatatgggtgcaaaggctttgtatgtggcaaattttgcaaaggttcaagaaaaaacccagatcctcaatgaagaatggaagaagcttcgtgtccaacctgttcagtcaatgaagcctgtgagtggacacccttttctcaaaaagtgtaccatagagagcattttcccgggatttgcaagccaacatatgttaatgaggtcactgaacacagttgcattggttcccatcatgtattcctggtcccctctccaacagaactttatggtagaagatgagacggttttgtgcaatattccctacatgggagatgaagtgaaagaagaagatgagacttttattgaggagctgatcaataactatgatgggaaagtccatggtgaagaagagatgatccctggatccgttctgattagtgatgctgtttttctggagttggtcgatgccctgaatcagtactcagatgaggaggaggaagggcacaatgacacctcagatggaaagcaggatgacagcaaagaagatctgccagtaacaagaaagagaaagcgacatgctattgaaggcaacaaaaagagttccaagaaacagttcccaaatgacatgatcttcagtgcaattgcctcaatgttccctgagaatggtgtcccagatgacatgaaggagaggtatcgagaactaacagagatgtcagaccccaatgcacttccccctcagtgcacacccaacatcgatggccccaatgccaagtctgtgcagcgggagcaatctctgcactccttccacacacttttttgccggcgctgctttaaatacgactgcttccttcacccttttcatgccacccctaatgtatataaacgcaagaataaagaaatcaagattgaaccagaaccatgtggcacagactgcttccttttgctggaaggagcaaaggagtatgccatgctccacaacccccgctccaagtgctctggtcgtcgccggagaaggcaccacatagtcagtgcttcctgctccaatgcctcagcctctgctgtggctgagactaaagaaggagacagtgacagggacacaggcaatgactgggcctccagttcttcagaggctaactctcgctgtcagactcccacaaaacagaaggctagtccagccccacctcaactctgcgtagtggaagcaccctcggagcctgtggaatggactggggctgaagaatctctttttcgagtcttccatggcacctacttcaacaacttctgttcaatagccaggcttctggggaccaagacgtgcaagcaggtctttcagtttgcagtcaaagaatcacttatcctgaagctgccaacagatgagctcatgaacccctcacagaagaagaaaagaaagcacagattgtgggctgcacactgcaggaagattcagctgaagaaagataactcttccacacaagtgtacaactaccaaccctgcgaccacccagaccgcccctgtgacagcacctgcccctgcatcatgactcagaatttctgtgagaagttctgccagtgcaacccagactgtcagaatcgtttccctggctgtcgctgtaagacccagtgcaataccaagcaatgtccttgctatctggcagtgcgagaatgtgaccctgacctgtgtctcacctgtggggcctcagagcactgggactgcaaggtggtttcctgtaaaaactgcagcatccagcgtggacttaagaagcacctgctgctggccccctctgatgtggccggatggggcaccttcataaaggagtctgtgcagaagaacgaattcatttctgaatactgtggtgagctcatctctcaggatgaggctgatcgacgcggaaaggtctatgacaaatacatgtccagcttcctcttcaacctcaataatgattttgtagtggatgctactcggaaaggaaacaaaattcgatttgcaaatcattcagtgaatcccaactgttatgccaaagtggtcatggtgaatggagaccatcggattgggatctttgccaagagggcaattcaagctggcgaagagctcttctttgattacaggtacagccaagctgatgctctcaagtacgtggggatcgagagggagaccgacgtcctttagccctcccaggccccaacggcagcacttatggtagcggcactgtcttggctttcgtgctcacaccactgctgctcgagtctcctgcactgtgtctcccacactgagaaaccccccaacccactccctctgtagtgaggcctctgccatgtccagagggcacaaaactgtctcaatgagaggggagacagaggcagctagggcttggtctcccaggacagagagttacagaaatgggagactgtttctctggcctcagaagaagcgagcacaggctggggtggatgacttatgcgtgatttcgtgtcggctccccaggctgtggcctcaggaatcaacttaggcagttcccaacaagcgctagcctgtaattgtagctttccacatcaagagtccttatgttattgggatgcaggcaaacctctgtggtcctaagacctggagaggacaggctaagtgaagtgtggtccctggagcctacaagtggtctgggttagaggcgagcctggcaggcagcacagactgaactcagaggtagacaggtcaccttactacctcctccctcgtggcagggctcaaactgaaagagtgtgggttctaagtacaggcattcaaggctgggggaaggaaagctacgccatccttccttagccagagagggagaaccagccagatgatagtagttaaactgctaagcttgggcccaggaggctttgagaaagccttctctgtgtactctggagatagatggagaagtgttttcagattcctgggaacagacaccagtgctccagctcctccaaagttctggcttagcagctgcaggcaagcattatgctgctattgaagaagcattaggggtatgcctggcaggtgtgagcatcctggctcgctggatttgtgggtgttttcaggccttccattccccatagaggcaaggcccaatggccagtgttgcttatcgcttcagggtaggtgggcacaggcttggactagagaggagaaagattggtgtaatctgctttcctgtctgtagtgcctgctgtttggaaagggtgagttagaatatgttccaaggttggtgaggggctaaattgcacgcgtttaggctggcaccccgtgtgcagggcacactggcagagggtatctgaagtgggagaagaagcaggtagaccacctgtcccaggctgtggtgccaccctctctggcattcatgcagagcaaagcactttaaccatttcttttaaaaggtctatagattggggtagagtttggcctaaggtctctagggtccctgcctaaatcccactcctgagggagggggaagaagagagggtgggagattctcctccagtcctgtctcatctcctgggagaggcagacgagtgagtttcacacagaagaatttcatgtgaatggggccagcaagagctgccctgtgtccatggtgggtgtgccgggctggctgggaacaaggagcagtatgttgagtagaaagggtgtgggcgggtatagattggcctgggagtgttacagtagggagcaggcttctcccttctttctgggactcagagccccgcttcttcccactccacttgttgtcccatgaaggaagaagtggggttcctcctgacccagctgcctcttacggtttggtatgggacatgcacacacactcacatgctctcactcaccacactggagggcacacacgtaccccgcacccagcaactcctgacagaaagctcctcccacccaaatgggccaggccccagcatgatcctgaaatctgcatccgccgtggtttgtattcattgtgcatatcagggataccctcaagctggactgtgggttccaaattactcatagaggagaaaaccagagaaagatgaagaggaggagttaggtctatttgaaatgccaggggctcgctgtgaggaataggtgaaaaaaaacttttcaccagcctttgagagactagactgaccccacccttccttcagtgagcagaatcactgtggtcagtctcctgtcccagcttcagttcatgaatactcctgttcctccagtttcccatcctttgtccctgctgtcccccacttttaaagatgggtctcaacccctccccaccacgtcatgatggatggggcaaggtggtggggactaggggagcctggtatacatgcggcttcattgccaataaatttcatgcactttaaagtcctgtggcttgtgacctcttaataaagtgttagaatccaaaaaaaaaaa

SEQ ID NO: 30259 - DNA, 5543 bp, Homo sapiens
agcggagcgggacccgcggctcgggatggaggagtctcactcttgttgcccaggccgcagtacaatggcgtgatctcagctcactgcaacctctgcctcccgggttcacatgattctcctgcctcagcctcccgagtagctgggattacagctggacacctgttctgctgttgtgtcctgccattctcctgaagaacagaggcacactgtaaaacccaacacttccccttgcattctataagattacagcaagatggaaataccaaatccccctacctccaaatgtatcacttactggaaaagaaaagtgaaatctgaatacatgcgacttcgacaacttaaacggcttcaggcaaatatgggtgcaaaggctttgtatgtggcaaattttgcaaaggttcaagaaaaaacccagatcctcaatgaagaatggaagaagcttcgtgtccaacctgttcagtcaatgaagcctgtgagtggacacccttttctcaaaaagtgtaccatagagagcattttcccgggatttgcaagccaacatatgttaatgaggtcactgaacacagttgcattggttcccatcatgtattcctggtcccctctccaacagaactttatggtagaagatgagacggttttgtgcaatattccctacatgggagatgaagtgaaagaagaagatgagacttttattgaggagctgatcaataactatgatgggaaagtccatggtgaagaagagatgatccctggatccgttctgattagtgatgctgtttttctggagttggtcgatgccctgaatcagtactcagatgaggaggaggaagggcacaatgacacctcagatggaaagcaggatgacagcaaagaagatctgccagtaacaagaaagagaaagcgacatgctattgaaggcaacaaaaagagttccaagaaacagttcccaaatgacatgatcttcagtgcaattgcctcaatgttccctgagaatggtgtcccagatgacatgaaggagaggtatcgagaactaacagagatgtcagaccccaatgcacttccccctcagtgcacacccaacatcgatggccccaatgccaagtctgtgcagcgggagcaatctctgcactccttccacacacttttttgccggcgctgctttaaatacgactgcttccttcacccttttcatgccacccctaatgtatataaacgcaagaataaagaaatcaagattgaaccagaaccatgtggcacagactgcttccttttgctggaaggagcaaaggagtatgccatgctccacaacccccgctccaagtgctctggtcgtcgccggagaaggcaccacatagtcagtgcttcctgctccaatgcctcagcctctgctgtggctgagactaaagaaggagacagtgacagggacacaggcaatgactgggcctccagttcttcagaggctaactctcgctgtcagactcccacaaaacagaaggctagtccagccccacctcaactctgcgtagtggaagcaccctcggagcctgtggaatggactggggctgaagaatctctttttcgagtcttccatggcacctacttcaacaacttctgttcaatagccaggcttctggggaccaagacgtgcaagcaggtctttcagtttgcagtcaaagaatcacttatcctgaagctgccaacagatgagctcatgaacccctcacagaagaagaaaagaaagcacagattgtgggctgcacactgcaggaagattcagctgaagaaagataactcttccacacaagtgtacaactaccaaccctgcgaccacccagaccgcccctgtgacagcacctgcccctgcatcatgactcagaatttctgtgagaagttctgccagtgcaacccagactgtcagaatcgtttccctggctgtcgctgtaagacccagtgcaataccaagcaatgtccttgctatctggcagtgcgagaatgtgaccctgacctgtgtctcacctgtggggcctcagagcactgggactgcaaggtggtttcctgtaaaaactgcagcatccagcgtggacttaagaagcacctgctgctggccccctctgatgtggccggatggggcaccttcataaaggagtctgtgcagaagaacgaattcatttctgaatactgtggtgagctcatctctcaggatgaggctgatcgacgcggaaaggtctatgacaaatacatgtccagcttcctcttcaacctcaataatgattttgtagtggatgctactcggaaaggaaacaaaattcgatttgcaaatcattcagtgaatcccaactgttatgccaaaggtgagtcccagtaacctgggaggtggggtgggggatggatgcctctttactgtgatttccattcgttgttgaacattttccttagctgagctattttttgtccaaagataatcatgattaatatctggtatcattttaggcccctctcaatcttagttttctaatctgcttttttcagcgaatacattataaacactttcccacaaacatgatttaaccagcctgagcaacatagtgagacccatctcacaaaataataataggctgggtgtggtggcttacgcctgtaatcccagcactttgggaggctgaggcaggtggatcacttgaggccaggagttcaagaccagcctagcaaacatggtgaaaccccatctctactaaaaatacaaaaatcagctggggggcgtggtggtgtgcacctgtagtcccagctactcaggtggctgaggcacaagaatcgcttgaaccctggaggcagaggttgcaatgagccaagatcatgccactgcactccagcctgggcaacagagcaagactctgtctcaaaaaacaaaacaaaacaaaacaaaaaaccccacttataataataataaagataatttttctgccataataacagatctaaaagcatagaggcaactaccatattgactactttctaattccatttgattcatgttttcactgggaatttggagaaaatcaacccagaagcctactggttattgacttggagttgggtaggaacctagcctcgggtttatcctgcttgcagtggtcatggtgaatggagaccatcggattgggatctttgccaagagggcaattcaagctggcgaagagctcttctttgattacaggtacagccaagctgatgctctcaagtacgtggggatcgagagggagaccgacgtcctttagccctcccaggccccaacggcagcacttatggtagcggcactgtcttggctttcgtgctcacaccactgctgctcgagtctcctgcactgtgtctcccacactgagaaaccccccaacccactccctctgtagtgaggcctctgccatgtccagagggcacaaaactgtctcaatgagaggggagacagaggcagctagggcttggtctcccaggacagagagttacagaaatgggagactgtttctctggcctcagaagaagcgagcacaggctggggtggatgacttatgcgtgatttcgtgtcggctccccaggctgtggcctcaggaatcaacttaggcagttcccaacaagcgctagcctgtaattgtagctttccacatcaagagtccttatgttattgggatgcaggcaaacctctgtggtcctaagacctggagaggacaggctaagtgaagtgtggtccctggagcctacaagtggtctgggttagaggcgagcctggcaggcagcacagactgaactcagaggtagacaggtcaccttactacctcctccctcgtggcagggctcaaactgaaagagtgtgggttctaagtacaggcattcaaggctgggggaaggaaagctacgccatccttccttagccagagagggagaaccagccagatgatagtagttaaactgctaagcttgggcccaggaggctttgagaaagccttctctgtgtactctggagatagatggagaagtgttttcagattcctgggaacagacaccagtgctccagctcctccaaagttctggcttagcagctgcaggcaagcattatgctgctattgaagaagcattaggggtatgcctggcaggtgtgagcatcctggctcgctggatttgtgggtgttttcaggccttccattccccatagaggcaaggcccaatggccagtgttgcttatcgcttcagggtaggtgggcacaggcttggactagagaggagaaagattggtgtaatctgctttcctgtctgtagtgcctgctgtttggaaagggtgagttagaatatgttccaaggttggtgaggggctaaattgcacgcgtttaggctggcaccccgtgtgcagggcacactggcagagggtatctgaagtgggagaagaagcaggtagaccacctgtcccaggctgtggtgccaccctctctggcattcatgcagagcaaagcactttaaccatttcttttaaaaggtctatagattggggtagagtttggcctaaggtctctagggtccctgcctaaatcccactcctgagggagggggaagaagagagggtgggagattctcctccagtcctgtctcatctcctgggagaggcagacgagtgagtttcacacagaagaatttcatgtgaatggggccagcaagagctgccctgtgtccatggtgggtgtgccgggctggctgggaacaaggagcagtatgttgagtagaaagggtgtgggcgggtatagattggcctgggagtgttacagtagggagcaggcttctcccttctttctgggactcagagccccgcttcttcccactccacttgttgtcccatgaaggaagaagtggggttcctcctgacccagctgcctcttacggtttggtatgggacatgcacacacactcacatgctctcactcaccacactggagggcacacacgtaccccgcacccagcaactcctgacagaaagctcctcccacccaaatgggccaggccccagcatgatcctgaaatctgcatccgccgtggtttgtattcattgtgcatatcagggataccctcaagctggactgtgggttccaaattactcatagaggagaaaaccagagaaagatgaagaggaggagttaggtctatttgaaatgccaggggctcgctgtgaggaataggtgaaaaaaaacttttcaccagcctttgagagactagactgaccccacccttccttcagtgagcagaatcactgtggtcagtctcctgtcccagcttcagttcatgaatactcctgttcctccagtttcccatcctttgtccctgctgtcccccacttttaaagatgggtctcaacccctccccaccacgtcatgatggatggggcaaggtggtggggactaggggagcctggtatacatgcggcttcattgccaataaatttcatgcactttaaagtcctgtggcttgtgacctcttaataaagtgttagaatccaaaaaaaaaaa

SEQ ID NO: 30260 - DNA, 4593 bp, Homo sapiens
agcggagcgggacccgcggctcgggatggaggctggacacctgttctgctgttgtgtcctgccattctcctgaagaacagaggcacactgtaaaacccaacacttccccttgcattctataagattacagcaagatggaaataccaaatccccctacctccaaatgtatcacttactggaaaagaaaagtgaaatctgaatacatgcgacttcgacaacttaaacggcttcaggcaaatatgggtgcaaaggctttgtatgtggcaaattttgcaaaggttcaagaaaaaacccagatcctcaatgaagaatggaagaagcttcgtgtccaacctgttcagtcaatgaagcctgtgagtggacacccttttctcaaaaagtgtaccatagagagcattttcccgggatttgcaagccaacatatgttaatgaggtcactgaacacagttgcattggttcccatcatgtattcctggtcccctctccaacagaactttatggtagaagatgagacggttttgtgcaatattccctacatgggagatgaagtgaaagaagaagatgagacttttattgaggagctgatcaataactatgatgggaaagtccatggtgaagaagagatgatccctggatccgttctgattagtgatgctgtttttctggagttggtcgatgccctgaatcagtactcagatgaggaggaggaagggcacaatgacacctcagatggaaagcaggatgacagcaaagaagatctgccagtaacaagaaagagaaagcgacatgctattgaaggcaacaaaaagagttccaagaaacagttcccaaatgacatgatcttcagtgcaattgcctcaatgttccctgagaatggtgtcccagatgacatgaaggagaggtatcgagaactaacagagatgtcagaccccaatgcacttccccctcagtgcacacccaacatcgatggccccaatgccaagtctgtgcagcgggagcaatctctgcactccttccacacacttttttgccggcgctgctttaaatacgactgcttccttcacccttttcatgccacccctaatgtatataaacgcaagaataaagaaatcaagattgaaccagaaccatgtggcacagactgcttccttttgctggaaggagcaaaggagtatgccatgctccacaacccccgctccaagtgctctggtcgtcgccggagaaggcaccacatagtcagtgcttcctgctccaatgcctcagcctctgctgtggctgagactaaagaaggagacagtgacagggacacaggcaatgactgggcctccagttcttcagaggctaactctcgctgtcagactcccacaaaacagaaggctagtccagccccacctcaactctgcgtagtggaagcaccctcggagcctgtggaatggactggggctgaagaatctctttttcgagtcttccatggcacctacttcaacaacttctgttcaatagccaggcttctggggaccaagacgtgcaagcaggtctttcagtttgcagtcaaagaatcacttatcctgaagctgccaacagatgagctcatgaacccctcacagaagaagaaaagaaagcacagattgtgggctgcacactgcaggaagattcagctgaagaaagataactcttccacacaagtgtacaactaccaaccctgcgaccacccagaccgcccctgtgacagcacctgcccctgcatcatgactcagaatttctgtgagaagttctgccagtgcaacccagactgtcagaatcgtttccctggctgtcgctgtaagacccagtgcaataccaagcaatgtccttgctatctggcagtgcgagaatgtgaccctgacctgtgtctcacctgtggggcctcagagcactgggactgcaaggtggtttcctgtaaaaactgcagcatccagcgtggacttaagaagcacctgctgctggccccctctgatgtggccggatggggcaccttcataaaggagtctgtgcagaagaacgaattcatttctgaatactgtggtgagctcatctctcaggatgaggctgatcgacgcggaaaggtctatgacaaatacatgtccagcttcctcttcaacctcaataatgattttgtagtggatgctactcggaaaggaaacaaaattcgatttgcaaatcattcagtgaatcccaactgttatgccaaagtggtcatggtgaatggagaccatcggattgggatctttgccaagagggcaattcaagctggcgaagagctcttctttgattacaggtacagccaagctgatgctctcaagtacgtggggatcgagagggagaccgacgtcctttagccctcccaggccccaacggcagcacttatggtagcggcactgtcttggctttcgtgctcacaccactgctgctcgagtctcctgcactgtgtctcccacactgagaaaccccccaacccactccctctgtagtgaggcctctgccatgtccagagggcacaaaactgtctcaatgagaggggagacagaggcagctagggcttggtctcccaggacagagagttacagaaatgggagactgtttctctggcctcagaagaagcgagcacaggctggggtggatgacttatgcgtgatttcgtgtcggctccccaggctgtggcctcaggaatcaacttaggcagttcccaacaagcgctagcctgtaattgtagctttccacatcaagagtccttatgttattgggatgcaggcaaacctctgtggtcctaagacctggagaggacaggctaagtgaagtgtggtccctggagcctacaagtggtctgggttagaggcgagcctggcaggcagcacagactgaactcagaggtagacaggtcaccttactacctcctccctcgtggcagggctcaaactgaaagagtgtgggttctaagtacaggcattcaaggctgggggaaggaaagctacgccatccttccttagccagagagggagaaccagccagatgatagtagttaaactgctaagcttgggcccaggaggctttgagaaagccttctctgtgtactctggagatagatggagaagtgttttcagattcctgggaacagacaccagtgctccagctcctccaaagttctggcttagcagctgcaggcaagcattatgctgctattgaagaagcattaggggtatgcctggcaggtgtgagcatcctggctcgctggatttgtgggtgttttcaggccttccattccccatagaggcaaggcccaatggccagtgttgcttatcgcttcagggtaggtgggcacaggcttggactagagaggagaaagattggtgtaatctgctttcctgtctgtagtgcctgctgtttggaaagggtgagttagaatatgttccaaggttggtgaggggctaaattgcacgcgtttaggctggcaccccgtgtgcagggcacactggcagagggtatctgaagtgggagaagaagcaggtagaccacctgtcccaggctgtggtgccaccctctctggcattcatgcagagcaaagcactttaaccatttcttttaaaaggtctatagattggggtagagtttggcctaaggtctctagggtccctgcctaaatcccactcctgagggagggggaagaagagagggtgggagattctcctccagtcctgtctcatctcctgggagaggcagacgagtgagtttcacacagaagaatttcatgtgaatggggccagcaagagctgccctgtgtccatggtgggtgtgccgggctggctgggaacaaggagcagtatgttgagtagaaagggtgtgggcgggtatagattggcctgggagtgttacagtagggagcaggcttctcccttctttctgggactcagagccccgcttcttcccactccacttgttgtcccatgaaggaagaagtggggttcctcctgacccagctgcctcttacggtttggtatgggacatgcacacacactcacatgctctcactcaccacactggagggcacacacgtaccccgcacccagcaactcctgacagaaagctcctcccacccaaatgggccaggccccagcatgatcctgaaatctgcatccgccgtggtttgtattcattgtgcatatcagggataccctcaagctggactgtgggttccaaattactcatagaggagaaaaccagagaaagatgaagaggaggagttaggtctatttgaaatgccaggggctcgctgtgaggaataggtgaaaaaaaacttttcaccagcctttgagagactagactgaccccacccttccttcagtgagcagaatcactgtggtcagtctcctgtcccagcttcagttcatgaatactcctgttcctccagtttcccatcctttgtccctgctgtcccccacttttaaagatgggtctcaacccctccccaccacgtcatgatggatggggcaaggtggtggggactaggggagcctggtatacatgcggcttcattgccaataaatttcatgcacttta

SEQ ID NO: 30261 - DNA, 4601 bp, Homo sapiens
agcggagcgggacccgcggctcgggatggaggagtctcactcttgttgcccaggccgcagtacaatggcgtgatctcagctcactgcaacctctgcctcccgggttcacatgattctcctgcctcagcctcccgagtagctgggattacagctggacacctgttctgctgttgtgtcctgccattctcctgaagaacagaggcacactgtaaaacccaacacttccccttgcattctataagattacagcaagatggaaataccaaatccccctacctccaaatgtatcacttactggaaaagaaaagtgaaatctgaatacatgcgacttcgacaacttaaacggcttcaggcaaatatgggtgcaaaggctttgtatgtggcaaattttgcaaaggttcaagaaaaaacccagatcctcaatgaagaatggaagaagcttcgtgtccaacctgttcagtcaatgaagcctgtgagtggacacccttttctcaaaaagtgtaccatagagagcattttcccgggatttgcaagccaacatatgttaatgaggtcactgaacacagttgcattggttcccatcatgtattcctggtcccctctccaacagaactttatggtagaagatgagacggttttgtgcaatattccctacatgggagatgaagtgaaagaagaagatgagacttttattgaggagctgatcaataactatgatgggaaagtccatggtgaagaagagatgatccctggatccgttctgattagtgatgctgtttttctggagttggtcgatgccctgaatcagtactcagatgaggaggaggaagggcacaatgacacctcagatggaaagcaggatgacagcaaagaagatctgccagtaacaagaaagagaaagcgacatgctattgaaggcaacaaaaagagttccaagaaacagttcccaaatgacatgatcttcagtgcaattgcctcaatgttccctgagaatggtgtcccagatgacatgaaggagagcttttcatgccacccctaatgtatataaacgcaagaataaagaaatcaagattgaaccagaaccatgtggcacagactgcttccttttgctggaaggagcaaaggagtatgccatgctccacaacccccgctccaagtgctctggtcgtcgccggagaaggcaccacatagtcagtgcttcctgctccaatgcctcagcctctgctgtggctgagactaaagaaggagacagtgacagggacacaggcaatgactgggcctccagttcttcagaggctaactctcgctgtcagactcccacaaaacagaaggctagtccagccccacctcaactctgcgtagtggaagcaccctcggagcctgtggaatggactggggctgaagaatctctttttcgagtcttccatggcacctacttcaacaacttctgttcaatagccaggcttctggggaccaagacgtgcaagcaggtctttcagtttgcagtcaaagaatcacttatcctgaagctgccaacagatgagctcatgaacccctcacagaagaagaaaagaaagcacagattgtgggctgcacactgcaggaagattcagctgaagaaagataactcttccacacaagtgtacaactaccaaccctgcgaccacccagaccgcccctgtgacagcacctgcccctgcatcatgactcagaatttctgtgagaagttctgccagtgcaacccagactgtcagaatcgtttccctggctgtcgctgtaagacccagtgcaataccaagcaatgtccttgctatctggcagtgcgagaatgtgaccctgacctgtgtctcacctgtggggcctcagagcactgggactgcaaggtggtttcctgtaaaaactgcagcatccagcgtggacttaagaagcacctgctgctggccccctctgatgtggccggatggggcaccttcataaaggagtctgtgcagaagaacgaattcatttctgaatactgtggtgagctcatctctcaggatgaggctgatcgacgcggaaaggtctatgacaaatacatgtccagcttcctcttcaacctcaataatgattttgtagtggatgctactcggaaaggaaacaaaattcgatttgcaaatcattcagtgaatcccaactgttatgccaaagtggtcatggtgaatggagaccatcggattgggatctttgccaagagggcaattcaagctggcgaagagctcttctttgattacaggtacagccaagctgatgctctcaagtacgtggggatcgagagggagaccgacgtcctttagccctcccaggccccaacggcagcacttatggtagcggcactgtcttggctttcgtgctcacaccactgctgctcgagtctcctgcactgtgtctcccacactgagaaaccccccaacccactccctctgtagtgaggcctctgccatgtccagagggcacaaaactgtctcaatgagaggggagacagaggcagctagggcttggtctcccaggacagagagttacagaaatgggagactgtttctctggcctcagaagaagcgagcacaggctggggtggatgacttatgcgtgatttcgtgtcggctccccaggctgtggcctcaggaatcaacttaggcagttcccaacaagcgctagcctgtaattgtagctttccacatcaagagtccttatgttattgggatgcaggcaaacctctgtggtcctaagacctggagaggacaggctaagtgaagtgtggtccctggagcctacaagtggtctgggttagaggcgagcctggcaggcagcacagactgaactcagaggtagacaggtcaccttactacctcctccctcgtggcagggctcaaactgaaagagtgtgggttctaagtacaggcattcaaggctgggggaaggaaagctacgccatccttccttagccagagagggagaaccagccagatgatagtagttaaactgctaagcttgggcccaggaggctttgagaaagccttctctgtgtactctggagatagatggagaagtgttttcagattcctgggaacagacaccagtgctccagctcctccaaagttctggcttagcagctgcaggcaagcattatgctgctattgaagaagcattaggggtatgcctggcaggtgtgagcatcctggctcgctggatttgtgggtgttttcaggccttccattccccatagaggcaaggcccaatggccagtgttgcttatcgcttcagggtaggtgggcacaggcttggactagagaggagaaagattggtgtaatctgctttcctgtctgtagtgcctgctgtttggaaagggtgagttagaatatgttccaaggttggtgaggggctaaattgcacgcgtttaggctggcaccccgtgtgcagggcacactggcagagggtatctgaagtgggagaagaagcaggtagaccacctgtcccaggctgtggtgccaccctctctggcattcatgcagagcaaagcactttaaccatttcttttaaaaggtctatagattggggtagagtttggcctaaggtctctagggtccctgcctaaatcccactcctgagggagggggaagaagagagggtgggagattctcctccagtcctgtctcatctcctgggagaggcagacgagtgagtttcacacagaagaatttcatgtgaatggggccagcaagagctgccctgtgtccatggtgggtgtgccgggctggctgggaacaaggagcagtatgttgagtagaaagggtgtgggcgggtatagattggcctgggagtgttacagtagggagcaggcttctcccttctttctgggactcagagccccgcttcttcccactccacttgttgtcccatgaaggaagaagtggggttcctcctgacccagctgcctcttacggtttggtatgggacatgcacacacactcacatgctctcactcaccacactggagggcacacacgtaccccgcacccagcaactcctgacagaaagctcctcccacccaaatgggccaggccccagcatgatcctgaaatctgcatccgccgtggtttgtattcattgtgcatatcagggataccctcaagctggactgtgggttccaaattactcatagaggagaaaaccagagaaagatgaagaggaggagttaggtctatttgaaatgccaggggctcgctgtgaggaataggtgaaaaaaaacttttcaccagcctttgagagactagactgaccccacccttccttcagtgagcagaatcactgtggtcagtctcctgtcccagcttcagttcatgaatactcctgttcctccagtttcccatcctttgtccctgctgtcccccacttttaaagatgggtctcaacccctccccaccacgtcatgatggatggggcaaggtggtggggactaggggagcctggtatacatgcggcttcattgccaataaatttcatgcactttaaagtcctgtggcttgtgacctcttaataaagtgttagaatccaaaaaaaaaaa

SEQ ID NO: 30262 - DNA, 5048 bp, Homo sapiens
agcggagcgggacccgcggctcgggatggaggagtctcactcttgttgcccaggccgcagtacaatggcgtgatctcagctcactgcaacctctgcctcccgggttcacatgattctcctgcctcagcctcccgagtagctgggattacagctggacacctgttctgctgttgtgtcctgccattctcctgaagaacagaggcacactgtaaaacccaacacttccccttgcattctataagattacagcaagatggaaataccaaatccccctacctccaaatgtatcacttactggaaaagaaaagtgaaatctgaatacatgcgacttcgacaacttaaacggcttcaggcaaatatgggtgcaaaggctttgtatgtggcaaattttgcaaaggttcaagaaaaaacccagatcctcaatgaagaatggaagaagcttcgtgtccaacctgttcagtcaatgaagcctgtgagtggacacccttttctcaaaaagtgtaccatagagagcattttcccgggatttgcaagccaacatatgttaatgaggtcactgaacacagttgcattggttcccatcatgtattcctggtcccctctccaacagaactttatggtagaagatgagacggttttgtgcaatattccctacatgggagatgaagtgaaagaagaagatgagacttttattgaggagctgatcaataactatgatgggaaagtccatggtgaagaagagatgatccctggatccgttctgattagtgatgctgtttttctggagttggtcgatgccctgaatcagtactcagatgaggaggaggaagggcacaatgacacctcagatggaaagcaggatgacagcaaagaagatctgccagtaacaagaaagagaaagcgacatgctattgaaggtatcgagaactaacagagatgtcagaccccaatgcacttccccctcagtgcacacccaacatcgatggccccaatgccaagtctgtgcagcgggagcaatctctgcactccttccacacacttttttgccggcgctgctttaaatacgactgcttccttcaccgtgagtggggctactctgtttgaaatgctctcctctcttccatccccagccaccatttccttctctttgttctggtttctcgtatagagttcctggcttctgttctaacgttttacaaagggccagttctattttcccttgctcaattatagtgcaacatgctttgcatgatagggacagactaactagcaacttatctgtccctcagtacctcttagctttgaaagcattgtgttgatgtcagaaatgactgaattttgtgcaccctgatggtagccgtttatatcgaattctaactcctacaatagctctctaattcacttttgtttctccccatcttgtcaagtggatagaccactggcaacaagacagtttttgttttccagcttttcatgccacccctaatgtatataaacgcaagaataaagaaatcaagattgaaccagaaccatgtggcacagactgcttccttttgctggaaggagcaaaggagtatgccatgctccacaacccccgctccaagtgctctggtcgtcgccggagaaggcaccacatagtcagtgcttcctgctccaatgcctcagcctctgctgtggctgagactaaagaaggagacagtgacagggacacaggcaatgactgggcctccagttcttcagaggctaactctcgctgtcagactcccacaaaacagaaggctagtccagccccacctcaactctgcgtagtggaagcaccctcggagcctgtggaatggactggggctgaagaatctctttttcgagtcttccatggcacctacttcaacaacttctgttcaatagccaggcttctggggaccaagacgtgcaagcaggtctttcagtttgcagtcaaagaatcacttatcctgaagctgccaacagatgagctcatgaacccctcacagaagaagaaaagaaagcacagattgtgggctgcacactgcaggaagattcagctgaagaaagataactcttccacacaagtgtacaactaccaaccctgcgaccacccagaccgcccctgtgacagcacctgcccctgcatcatgactcagaatttctgtgagaagttctgccagtgcaacccagactgtcagaatcgtttccctggctgtcgctgtaagacccagtgcaataccaagcaatgtccttgctatctggcagtgcgagaatgtgaccctgacctgtgtctcacctgtggggcctcagagcactgggactgcaaggtggtttcctgtaaaaactgcagcatccagcgtggacttaagaagcacctgctgctggccccctctgatgtggccggatggggcaccttcataaaggagtctgtgcagaagaacgaattcatttctgaatactgtggtgagctcatctctcaggatgaggctgatcgacgcggaaaggtctatgacaaatacatgtccagcttcctcttcaacctcaataatgattttgtagtggatgctactcggaaaggaaacaaaattcgatttgcaaatcattcagtgaatcccaactgttatgccaaagtggtcatggtgaatggagaccatcggattgggatctttgccaagagggcaattcaagctggcgaagagctcttctttgattacaggtacagccaagctgatgctctcaagtacgtggggatcgagagggagaccgacgtcctttagccctcccaggccccaacggcagcacttatggtagcggcactgtcttggctttcgtgctcacaccactgctgctcgagtctcctgcactgtgtctcccacactgagaaaccccccaacccactccctctgtagtgaggcctctgccatgtccagagggcacaaaactgtctcaatgagaggggagacagaggcagctagggcttggtctcccaggacagagagttacagaaatgggagactgtttctctggcctcagaagaagcgagcacaggctggggtggatgacttatgcgtgatttcgtgtcggctccccaggctgtggcctcaggaatcaacttaggcagttcccaacaagcgctagcctgtaattgtagctttccacatcaagagtccttatgttattgggatgcaggcaaacctctgtggtcctaagacctggagaggacaggctaagtgaagtgtggtccctggagcctacaagtggtctgggttagaggcgagcctggcaggcagcacagactgaactcagaggtagacaggtcaccttactacctcctccctcgtggcagggctcaaactgaaagagtgtgggttctaagtacaggcattcaaggctgggggaaggaaagctacgccatccttccttagccagagagggagaaccagccagatgatagtagttaaactgctaagcttgggcccaggaggctttgagaaagccttctctgtgtactctggagatagatggagaagtgttttcagattcctgggaacagacaccagtgctccagctcctccaaagttctggcttagcagctgcaggcaagcattatgctgctattgaagaagcattaggggtatgcctggcaggtgtgagcatcctggctcgctggatttgtgggtgttttcaggccttccattccccatagaggcaaggcccaatggccagtgttgcttatcgcttcagggtaggtgggcacaggcttggactagagaggagaaagattggtgtaatctgctttcctgtctgtagtgcctgctgtttggaaagggtgagttagaatatgttccaaggttggtgaggggctaaattgcacgcgtttaggctggcaccccgtgtgcagggcacactggcagagggtatctgaagtgggagaagaagcaggtagaccacctgtcccaggctgtggtgccaccctctctggcattcatgcagagcaaagcactttaaccatttcttttaaaaggtctatagattggggtagagtttggcctaaggtctctagggtccctgcctaaatcccactcctgagggagggggaagaagagagggtgggagattctcctccagtcctgtctcatctcctgggagaggcagacgagtgagtttcacacagaagaatttcatgtgaatggggccagcaagagctgccctgtgtccatggtgggtgtgccgggctggctgggaacaaggagcagtatgttgagtagaaagggtgtgggcgggtatagattggcctgggagtgttacagtagggagcaggcttctcccttctttctgggactcagagccccgcttcttcccactccacttgttgtcccatgaaggaagaagtggggttcctcctgacccagctgcctcttacggtttggtatgggacatgcacacacactcacatgctctcactcaccacactggagggcacacacgtaccccgcacccagcaactcctgacagaaagctcctcccacccaaatgggccaggccccagcatgatcctgaaatctgcatccgccgtggtttgtattcattgtgcatatcagggataccctcaagctggactgtgggttccaaattactcatagaggagaaaaccagagaaagatgaagaggaggagttaggtctatttgaaatgccaggggctcgctgtgaggaataggtgaaaaaaaacttttcaccagcctttgagagactagactgaccccacccttccttcagtgagcagaatcactgtggtcagtctcctgtcccagcttcagttcatgaatactcctgttcctccagtttcccatcctttgtccctgctgtcccccacttttaaagatgggtctcaacccctccccaccacgtcatgatggatggggcaaggtggtggggactaggggagcctggtatacatgcggcttcattgccaataaatttcatgcactttaaagtcctgtggcttgtgacctcttaataaagtgttagaatccaaaaaaaaaaa

SEQ ID NO: 30263 - DNA, 3793 bp, Homo sapiens
ctactactactaaattcgcggcccgtcgactagctttgaaagcattgtgttgatgacagcaaagaagatctgccagtaacaagaaagagaaagcgacatgctattgaaggcaacaaaaagagttccaagaaacagttcccaaatgacatgatcttcagtgcaattgcctcaatgttccctgagaatggtgtcccagatgacatgaaggagagcttttcatgccacccctaatgtatataaacgcaagaataaagaaatcaagattgaaccagaaccatgtggcacagactgcttccttttgctggaaggagcaaaggagtatgccatgctccacaacccccgctccaagtgctctggtcgtcgccggagaaggcaccacatagtcagtgcttcctgctccaatgcctcagcctctgctgtggctgagactaaagaaggagacagtgacagggacacaggcaatgactgggcctccagttcttcagaggctaactctcgctgtcagactcccacaaaacagaaggctagtccagccccacctcaactctgcgtagtggaagcaccctcggagcctgtggaatggactggggctgaagaatctctttttcgagtcttccatggcacctacttcaacaacttctgttcaatagccaggcttctggggaccaagacgtgcaagcaggtctttcagtttgcagtcaaagaatcacttatcctgaagctgccaacagatgagctcatgaacccctcacagaagaagaaaagaaagcacagattgtgggctgcacactgcaggaagattcagctgaagaaagataactcttccacacaagtgtacaactaccaaccctgcgaccacccagaccgcccctgtgacagcacctgcccctgcatcatgactcagaatttctgtgagaagttctgccagtgcaacccagactgtcagaatcgtttccctggctgtcgctgtaagacccagtgcaataccaagcaatgtccttgctatctggcagtgcgagaatgtgaccctgacctgtgtctcacctgtggggcctcagagcactgggactgcaaggtggtttcctgtaaaaactgcagcatccagcgtggacttaagaagcacctgctgctggccccctctgatgtggccggatggggcaccttcataaaggagtctgtgcagaagaacgaattcatttctgaatactgtggtgagctcatctctcaggatgaggctgatcgacgcggaaaggtctatgacaaatacatgtccagcttcctcttcaacctcaataatgattttgtagtggatgctactcggaaaggaaacaaaattcgatttgcaaatcattcagtgaatcccaactgttatgccaaagtggtcatggtgaatggagaccatcggattgggatctttgccaagagggcaattcaagctggcgaagagctcttctttgattacaggtacagccaagctgatgctctcaagtacgtggggatcgagagggagaccgacgtcctttagccctcccaggccccaacggcagcacttatggtagcggcactgtcttggctttcgtgctcacaccactgctgctcgagtctcctgcactgtgtctcccacactgagaaaccccccaacccactccctctgtagtgaggcctctgccatgtccagagggcacaaaactgtctcaatgagaggggagacagaggcagctagggcttggtctcccaggacagagagttacagaaatgggagactgtttctctggcctcagaagaagcgagcacaggctggggtggatgacttatgcgtgatttcgtgtcggctccccaggctgtggcctcaggaatcaacttaggcagttcccaacaagcgctagcctgtaattgtagctttccacatcaagagtccttatgttattgggatgcaggcaaacctctgtggtcctaagacctggagaggacaggctaagtgaagtgtggtccctggagcctacaagtggtctgggttagaggcgagcctggcaggcagcacagactgaactcagaggtagacaggtcaccttactacctcctccctcgtggcagggctcaaactgaaagagtgtgggttctaagtacaggcattcaaggctgggggaaggaaagctacgccatccttccttagccagagagggagaaccagccagatgatagtagttaaactgctaagcttgggcccaggaggctttgagaaagccttctctgtgtactctggagatagatggagaagtgttttcagattcctgggaacagacaccagtgctccagctcctccaaagttctggcttagcagctgcaggcaagcattatgctgctattgaagaagcattaggggtatgcctggcaggtgtgagcatcctggctcgctggatttgtgggtgttttcaggccttccattccccatagaggcaaggcccaatggccagtgttgcttatcgcttcagggtaggtgggcacaggcttggactagagaggagaaagattggtgtaatctgctttcctgtctgtagtgcctgctgtttggaaagggtgagttagaatatgttccaaggttggtgaggggctaaattgcacgcgtttaggctggcaccccgtgtgcagggcacactggcagagggtatctgaagtgggagaagaagcaggtagaccacctgtcccaggctgtggtgccaccctctctggcattcatgcagagcaaagcactttaaccatttcttttaaaaggtctatagattggggtagagtttggcctaaggtctctagggtccctgcctaaatcccactcctgagggagggggaagaagagagggtgggagattctcctccagtcctgtctcatctcctgggagaggcagacgagtgagtttcacacagaagaatttcatgtgaatggggccagcaagagctgccctgtgtccatggtgggtgtgccgggctggctgggaacaaggagcagtatgttgagtagaaagggtgtgggcgggtatagattggcctgggagtgttacagtagggagcaggcttctcccttctttctgggactcagagccccgcttcttcccactccacttgttgtcccatgaaggaagaagtggggttcctcctgacccagctgcctcttacggtttggtatgggacatgcacacacactcacatgctctcactcaccacactggagggcacacacgtaccccgcacccagcaactcctgacagaaagctcctcccacccaaatgggccaggccccagcatgatcctgaaatctgcatccgccgtggtttgtattcattgtgcatatcagggataccctcaagctggactgtgggttccaaattactcatagaggagaaaaccagagaaagatgaagaggaggagttaggtctatttgaaatgccaggggctcgctgtgaggaataggtgaaaaaaaacttttcaccagcctttgagagactagactgaccccacccttccttcagtgagcagaatcactgtggtcagtctcctgtcccagcttcagttcatgaatactcctgttcctccagtttcccatcctttgtccctgctgtcccccacttttaaagatgggtctcaacccctccccaccacgtcatgatggatggggcaaggtggtggggactaggggagcctggtatacatgcggcttcattgccaataaatttcatgcactttaaagtcctgtggcttgtgacctcttaataaagtgttagaatccaaaaaaaaaaa

SEQ ID NO: 30264 - DNA, 4580 bp, Homo sapiens
gggtatctagaggatccctttgcggtgcctttcaacagaactttatgtgtagaagatgagacggttttgtgcaatattccctacatgggagatgaagtgaaagaagaagatgagacttttattgaggagctgatcaataactatgatgggaaagtccatggtgaagaagagatgatccctggatccgttctgattagtgatgctgtttttctggagttggtcgatgccctgaatcagtactcagatgaggaggaggaagggcacaatgacacctcagatggaaagcaggatgacagcaaagaagatctgccagtaacaagaaagagaaagcgacatgctattgaaggcaacaaaaagagttccaagaaacagttcccaaatgacatgatcttcagtgcaattgcctcaatgttccctgagaatggtgtcccagatgacatgaaggagaggtatcgagaactaacagagatgtcagaccccaatgcacttccccctcagtgcacacccaacatcgatggccccaatgccaagtctgtgcagcgggagcaatctctgcactccttccacacacttttttgccggcgctgctttaaatacgactgcttccttcaccgtgagtggggctactctgtttgaaatgctctcctctcttccatccccagccaccatttccttctctttgttctggtttctcgtatagagttcctggcttctgttctaacgttttacaaagggccagttctattttcccttgctcaattatagtgcaacatgctttgcatgatagggacagactaactagcaacttatctgtccctcagtacctcttagctttgaaagcattgtgttgatgtcagaaatgactgaattttgtgcaccctgatggtagccgtttatatcgaattctaactcctacaatagctctctaattcacttttgtttctccccatcttgtcaagtggatagaccactggcaacaagacagtttttgttttccagcttttcatgccacccctaatgtatataaacgcaagaataaagaaatcaagattgaaccagaaccatgtggcacagactgcttccttttgctggaaggagcaaaggagtatgccatgctccacaacccccgctccaagtgctctggtcgtcgccggagaaggcaccacatagtcagtgcttcctgctccaatgcctcagcctctgctgtggctgagactaaagaaggagacagtgacagggacacaggcaatgactgggcctccagttcttcagaggctaactctcgctgtcagactcccacaaaacagaaggctagtccagccccacctcaactctgcgtagtggaagcaccctcggagcctgtggaatggactggggctgaagaatctctttttcgagtcttccatggcacctacttcaacaacttctgttcaatagccaggcttctggggaccaagacgtgcaagcaggtctttcagtttgcagtcaaagaatcacttatcctgaagctgccaacagatgagctcatgaacccctcacagaagaagaaaagaaagcacagattgtgggctgcacactgcaggaagattcagctgaagaaagataactcttccacacaagtgtacaactaccaaccctgcgaccacccagaccgcccctgtgacagcacctgcccctgcatcatgactcagaatttctgtgagaagttctgccagtgcaacccagactgtcagaatcgtttccctggctgtcgctgtaagacccagtgcaataccaagcaatgtccttgctatctggcagtgcgagaatgtgaccctgacctgtgtctcacctgtggggcctcagagcactgggactgcaaggtggtttcctgtaaaaactgcagcatccagcgtggacttaagaagcacctgctgctggccccctctgatgtggccggatggggcaccttcataaaggagtctgtgcagaagaacgaattcatttctgaatactgtggtgagctcatctctcaggatgaggctgatcgacgcggaaaggtctatgacaaatacatgtccagcttcctcttcaacctcaataatgattttgtagtggatgctactcggaaaggaaacaaaattcgatttgcaaatcattcagtgaatcccaactgttatgccaaagtggtcatggtgaatggagaccatcggattgggatctttgccaagagggcaattcaagctggcgaagagctcttctttgattacaggtacagccaagctgatgctctcaagtacgtggggatcgagagggagaccgacgtcctttagccctcccaggccccaacggcagcacttatggtagcggcactgtcttggctttcgtgctcacaccactgctgctcgagtctcctgcactgtgtctcccacactgagaaaccccccaacccactccctctgtagtgaggcctctgccatgtccagagggcacaaaactgtctcaatgagaggggagacagaggcagctagggcttggtctcccaggacagagagttacagaaatgggagactgtttctctggcctcagaagaagcgagcacaggctggggtggatgacttatgcgtgatttcgtgtcggctccccaggctgtggcctcaggaatcaacttaggcagttcccaacaagcgctagcctgtaattgtagctttccacatcaagagtccttatgttattgggatgcaggcaaacctctgtggtcctaagacctggagaggacaggctaagtgaagtgtggtccctggagcctacaagtggtctgggttagaggcgagcctggcaggcagcacagactgaactcagaggtagacaggtcaccttactacctcctccctcgtggcagggctcaaactgaaagagtgtgggttctaagtacaggcattcaaggctgggggaaggaaagctacgccatccttccttagccagagagggagaaccagccagatgatagtagttaaactgctaagcttgggcccaggaggctttgagaaagccttctctgtgtactctggagatagatggagaagtgttttcagattcctgggaacagacaccagtgctccagctcctccaaagttctggcttagcagctgcaggcaagcattatgctgctattgaagaagcattaggggtatgcctggcaggtgtgagcatcctggctcgctggatttgtgggtgttttcaggccttccattccccatagaggcaaggcccaatggccagtgttgcttatcgcttcagggtaggtgggcacaggcttggactagagaggagaaagattggtgtaatctgctttcctgtctgtagtgcctgctgtttggaaagggtgagttagaatatgttccaaggttggtgaggggctaaattgcacgcgtttaggctggcaccccgtgtgcagggcacactggcagagggtatctgaagtgggagaagaagcaggtagaccacctgtcccaggctgtggtgccaccctctctggcattcatgcagagcaaagcactttaaccatttcttttaaaaggtctatagattggggtagagtttggcctaaggtctctagggtccctgcctaaatcccactcctgagggagggggaagaagagagggtgggagattctcctccagtcctgtctcatctcctgggagaggcagacgagtgagtttcacacagaagaatttcatgtgaatggggccagcaagagctgccctgtgtccatggtgggtgtgccgggctggctgggaacaaggagcagtatgttgagtagaaagggtgtgggcgggtatagattggcctgggagtgttacagtagggagcaggcttctcccttctttctgggactcagagccccgcttcttcccactccacttgttgtcccatgaaggaagaagtggggttcctcctgacccagctgcctcttacggtttggtatgggacatgcacacacactcacatgctctcactcaccacactggagggcacacacgtaccccgcacccagcaactcctgacagaaagctcctcccacccaaatgggccaggccccagcatgatcctgaaatctgcatccgccgtggtttgtattcattgtgcatatcagggataccctcaagctggactgtgggttccaaattactcatagaggagaaaaccagagaaagatgaagaggaggagttaggtctatttgaaatgccaggggctcgctgtgaggaataggtgaaaaaaaacttttcaccagcctttgagagactagactgaccccacccttccttcagtgagcagaatcactgtggtcagtctcctgtcccagcttcagttcatgaatactcctgttcctccagtttcccatcctttgtccctgctgtcccccacttttaaagatgggtctcaacccctccccaccacgtcatgatggatggggcaaggtggtggggactaggggagcctggtatacatgcggcttcattgccaataaatttcatgcactttaaagtcctgtggcttgtgacctcttaataaagtgttagaatccaaaaaaaaaaa

SEQ ID NO: 30265 - DNA, 4343 bp, Homo sapiens
ctactactactaaattcgcggcccgtcgactagctttgaaagcattgtgttgatgacagcaaagaagatctgccagtaacaagaaagagaaagcgacatgctattgaaggcaacaaaaagagttccaagaaacagttcccaaatgacatgatcttcagtgcaattgcctcaatgttccctgagaatggtgtcccagatgacatgaaggagaggtatcgagaactaacagagatgtcagaccccaatgcacttccccctcagtgcacacccaacatcgatggccccaatgccaagtctgtgcagcgggagcaatctctgcactccttccacacacttttttgccggcgctgctttaaatacgactgcttccttcaccgtgagtggggctactctgtttgaaatgctctcctctcttccatccccagccaccatttccttctctttgttctggtttctcgtatagagttcctggcttctgttctaacgttttacaaagggccagttctattttcccttgctcaattatagtgcaacatgctttgcatgatagggacagactaactagcaacttatctgtccctcagtacctcttagctttgaaagcattgtgttgatgtcagaaatgactgaattttgtgcaccctgatggtagccgtttatatcgaattctaactcctacaatagctctctaattcacttttgtttctccccatcttgtcaagtggatagaccactggcaacaagacagtttttgttttccagcttttcatgccacccctaatgtatataaacgcaagaataaagaaatcaagattgaaccagaaccatgtggcacagactgcttccttttgctggaaggagcaaaggagtatgccatgctccacaacccccgctccaagtgctctggtcgtcgccggagaaggcaccacatagtcagtgcttcctgctccaatgcctcagcctctgctgtggctgagactaaagaaggagacagtgacagggacacaggcaatgactgggcctccagttcttcagaggctaactctcgctgtcagactcccacaaaacagaaggctagtccagccccacctcaactctgcgtagtggaagcaccctcggagcctgtggaatggactggggctgaagaatctctttttcgagtcttccatggcacctacttcaacaacttctgttcaatagccaggcttctggggaccaagacgtgcaagcaggtctttcagtttgcagtcaaagaatcacttatcctgaagctgccaacagatgagctcatgaacccctcacagaagaagaaaagaaagcacagattgtgggctgcacactgcaggaagattcagctgaagaaagataactcttccacacaagtgtacaactaccaaccctgcgaccacccagaccgcccctgtgacagcacctgcccctgcatcatgactcagaatttctgtgagaagttctgccagtgcaacccagactgtcagaatcgtttccctggctgtcgctgtaagacccagtgcaataccaagcaatgtccttgctatctggcagtgcgagaatgtgaccctgacctgtgtctcacctgtggggcctcagagcactgggactgcaaggtggtttcctgtaaaaactgcagcatccagcgtggacttaagaagcacctgctgctggccccctctgatgtggccggatggggcaccttcataaaggagtctgtgcagaagaacgaattcatttctgaatactgtggtgagctcatctctcaggatgaggctgatcgacgcggaaaggtctatgacaaatacatgtccagcttcctcttcaacctcaataatgattttgtagtggatgctactcggaaaggaaacaaaattcgatttgcaaatcattcagtgaatcccaactgttatgccaaagtggtcatggtgaatggagaccatcggattgggatctttgccaagagggcaattcaagctggcgaagagctcttctttgattacaggtacagccaagctgatgctctcaagtacgtggggatcgagagggagaccgacgtcctttagccctcccaggccccaacggcagcacttatggtagcggcactgtcttggctttcgtgctcacaccactgctgctcgagtctcctgcactgtgtctcccacactgagaaaccccccaacccactccctctgtagtgaggcctctgccatgtccagagggcacaaaactgtctcaatgagaggggagacagaggcagctagggcttggtctcccaggacagagagttacagaaatgggagactgtttctctggcctcagaagaagcgagcacaggctggggtggatgacttatgcgtgatttcgtgtcggctccccaggctgtggcctcaggaatcaacttaggcagttcccaacaagcgctagcctgtaattgtagctttccacatcaagagtccttatgttattgggatgcaggcaaacctctgtggtcctaagacctggagaggacaggctaagtgaagtgtggtccctggagcctacaagtggtctgggttagaggcgagcctggcaggcagcacagactgaactcagaggtagacaggtcaccttactacctcctccctcgtggcagggctcaaactgaaagagtgtgggttctaagtacaggcattcaaggctgggggaaggaaagctacgccatccttccttagccagagagggagaaccagccagatgatagtagttaaactgctaagcttgggcccaggaggctttgagaaagccttctctgtgtactctggagatagatggagaagtgttttcagattcctgggaacagacaccagtgctccagctcctccaaagttctggcttagcagctgcaggcaagcattatgctgctattgaagaagcattaggggtatgcctggcaggtgtgagcatcctggctcgctggatttgtgggtgttttcaggccttccattccccatagaggcaaggcccaatggccagtgttgcttatcgcttcagggtaggtgggcacaggcttggactagagaggagaaagattggtgtaatctgctttcctgtctgtagtgcctgctgtttggaaagggtgagttagaatatgttccaaggttggtgaggggctaaattgcacgcgtttaggctggcaccccgtgtgcagggcacactggcagagggtatctgaagtgggagaagaagcaggtagaccacctgtcccaggctgtggtgccaccctctctggcattcatgcagagcaaagcactttaaccatttcttttaaaaggtctatagattggggtagagtttggcctaaggtctctagggtccctgcctaaatcccactcctgagggagggggaagaagagagggtgggagattctcctccagtcctgtctcatctcctgggagaggcagacgagtgagtttcacacagaagaatttcatgtgaatggggccagcaagagctgccctgtgtccatggtgggtgtgccgggctggctgggaacaaggagcagtatgttgagtagaaagggtgtgggcgggtatagattggcctgggagtgttacagtagggagcaggcttctcccttctttctgggactcagagccccgcttcttcccactccacttgttgtcccatgaaggaagaagtggggttcctcctgacccagctgcctcttacggtttggtatgggacatgcacacacactcacatgctctcactcaccacactggagggcacacacgtaccccgcacccagcaactcctgacagaaagctcctcccacccaaatgggccaggccccagcatgatcctgaaatctgcatccgccgtggtttgtattcattgtgcatatcagggataccctcaagctggactgtgggttccaaattactcatagaggagaaaaccagagaaagatgaagaggaggagttaggtctatttgaaatgccaggggctcgctgtgaggaataggtgaaaaaaaacttttcaccagcctttgagagactagactgaccccacccttccttcagtgagcagaatcactgtggtcagtctcctgtcccagcttcagttcatgaatactcctgttcctccagtttcccatcctttgtccctgctgtcccccacttttaaagatgggtctcaacccctccccaccacgtcatgatggatggggcaaggtggtggggactaggggagcctggtatacatgcggcttcattgccaataaatttcatgcactttaaagtcctgtggcttgtgacctcttaataaagtgttagaatccaaaaaaaaaaa

SEQ ID NO: 30266 - DNA, 4592 bp, Homo sapiens
agcggagcgggacccgcggctcgggatggaggctggacacctgttctgctgttgtgtcctgccattctcctgaagaacagaggcacactgtaaaacccaacacttccccttgcattctataagattacagcaagatggaaataccaaatccccctacctccaaatgtatcacttactggaaaagaaaagtgaaatctgaatacatgcgacttcgacaacttaaacggcttcaggcaaatatgggtgcaaaggctttgtatgtggcaaattttgcaaaggttcaagaaaaaacccagatcctcaatgaagaatggaagaagcttcgtgtccaacctgttcagtcaatgaagcctgtgagtggacacccttttctcaaaaagtgtaccatagagagcattttcccgggatttgcaagccaacatatgttaatgaggtcactgaacacagttgcattggttcccatcatgtattcctggtcccctctccaacagaactttatggtagaagatgagacggttttgtgcaatattccctacatgggagatgaagtgaaagaagaagatgagacttttattgaggagctgatcaataactatgatgggaaagtccatggtgaagaagagatgatccctggatccgttctgattagtgatgctgtttttctggagttggtcgatgccctgaatcagtactcagatgaggaggaggaagggcacaatgacacctcagatggaaagcaggatgacagcaaagaagatctgccagtaacaagaaagagaaagcgacatgctattgaaggcaacaaaaagagttccaagaaacagttcccaaatgacatgatcttcagtgcaattgcctcaatgttccctgagaatggtgtcccagatgacatgaaggagaggtatcgagaactaacagagatgtcagaccccaatgcacttccccctcagtgcacacccaacatcgatggccccaatgccaagtctgtgcagcgggagcaatctctgcactccttccacacacttttttgccggcgctgctttaaatacgactgcttccttcacccttttcatgccacccctaatgtatataaacgcaagaataaagaaatcaagattgaaccagaaccatgtggcacagactgcttccttttgctggaaggagcaaaggagtatgccatgctccacaacccccgctccaagtgctctggtcgtcgccggagaaggcaccacatagtcagtgcttcctgctccaatgcctcagcctctgctgtggctgagactaaagaaggagacagtgacagggacacaggcaatgactgggcctccagttcttcagaggctaactctcgctgtcagactcccacaaaacagaaggctagtccagccccacctcaactctgcgtagtggaagcaccctcggagcctgtggaatggactggggctgaagaatctctttttcgagtcttccatggcacctacttcaacaacttctgttcaatagccaggcttctggggaccaagacgtgcaagcaggtctttcagtttgcagtcaaagaatcacttatcctgaagctgccaacagatgagctcatgaacccctcacagaagaagaaaagaaagcacagattgtgggctgcacactgcaggaagattcagctgaagaaagataactcttccacacaagtgtacaactaccaaccctgcgaccacccagaccgcccctgtgacagcacctgcccctgcatcatgactcagaatttctgtgagaagttctgccagtgcaacccagactgtcagaatcgtttccctggctgtcgctgtaagacccagtgcaataccaagcaatgtccttgctatctggcagtgcgagaatgtgaccctgacctgtgtctcacctgtggggcctcagagcactgggactgcaaggtggtttcctgtaaaaactgcagcatccagcgtggacttaagaagcacctgctgctggccccctctgatgtggccggatggggcaccttcataaaggagtctgtgcagaagaacgaattcatttctgaatactgtggtgagctcatctctcaggatgaggctgatcgacgcggaaaggtctatgacaaatacatgtccagcttcctcttcaacctcaataatgattttgtagtggatgctactcggaaaggaaacaaaattcgatttgcaaatcattcagtgaatcccaactgttatgccaaagtggtcatggtgaatggagaccatcggattgggatctttgccaagagggcaattcaagctggcgaagagctcttctttgattacaggtacagccaagctgatgctctcaagtacgtggggatcgagagggagaccgacgtcctttagccctcccaggccccaacggcagcacttatggtagcggcactgtcttggctttcgtgctcacaccactgctgctcgagtctcctgcactgtgtctcccacactgagaaaccccccaacccactccctctgtagtgaggcctctgccatgtccagagggcacaaaactgtctcaatgagaggggagacagaggcagctagggcttggtctcccaggacagagagttacagaaatgggagactgtttctctggcctcagaagaagcgagcacaggctggggtggatgacttatgcgtgatttcgtgtcggctccccaggctgtggcctcaggaatcaacttaggcagttcccaacaagcgctagcctgtaattgtagctttccacatcaagagtccttatgttattgggatgcaggcaaacctctgtggtcctaagacctggagaggacaggctaagtgaagtgtggtccctggagcctacaagtggtctgggttagaggcgagcctggcaggcagcacagactgaactcagaggtagacaggtcaccttactacctcctccctcgtggcagggctcaaactgaaagagtgtgggttctaagtacaggcattcaaggctgggggaaggaaagctacgccatccttccttagccagagagggagaaccagccagatgatagtagttaaactgctaagcttgggcccaggaggctttgagaaagccttctctgtgtactctggagatagatggagaagtgttttcagattcctgggaacagacaccagtgctccagctcctccaaagttctggcttagcagctgcaggcaagcattatgctgctattgaagaagcattaggggtatgcctggcaggtgtgagcatcctggctcgctggatttgtgggtgttttcaggccttccattccccatagaggcaaggcccaatggccagtgttgcttatcgcttcagggtaggtgggcacaggcttggactagagaggagaaagattggtgtaatctgctttcctgtctgtagtgcctgctgtttggaaagggtgagttagaatatgttccaaggttggtgaggggctaaattgcacgcgtttaggctggcaccccgtgtgcagggcacactggcagagggtatctgaagtgggagaagaagcaggtagaccacctgtcccaggctgtggtgccaccctctctggcattcatgcagagcaaagcactttaaccatttcttttaaaaggtctatagattggggtagagtttggcctaaggtctctagggtccctgcctaaatcccactcctgagggagggggaagaagagagggtgggagattctcctccagtcctgtctcatctcctgggagaggcagacgagtgagtttcacacagaagaatttcatgtgaatggggccagcaagagctgccctgtgtccatggtgggtgtgccgggctggctgggaacaaggagcagtatgttgagtagaaagggtgtgggcgggtatagattggcctgggagtgttacagtagggagcaggcttctcccttctttctgggactcagagccccgcttcttcccactccacttgttgtcccatgaaggaagaagtggggttcctcctgacccagctgcctcttacggtttggtatgggacatgcacacacactcacatgctctcactcaccacactggagggcacacacgtaccccgcacccagcaactcctgacagaaagctcctcccacccaaatgggccaggccccagcatgatcctgaaatctgcatccgccgtggtttgtattcattgtgcatatcagggataccctcaagctggactgtgggttccaaattactcatagaggagaaaaccagagaaagatgaagaggaggagttaggtctatttgaaatgccaggggctcgctgtgaggaataggtgaaaaaacagaatcactgtggtcagtctcctgtcccagcttcagttcatgaatactcctgttcctccagtttcccatcctttgtccctgctgtcccccacttttaaagatgggtctcaacccctccccaccacgtcatgatggatggggcaaggtggtggggactaggggagcctggtatacatgcggcttcattgccaataaatttcatgcactttaaagtcctgtggcttgtgacctcttaataaagtgttagaatccaaaaaaaaaaa

SEQ ID NO: 30267 - DNA, 2476 bp, Homo sapiens
gaagcagagatacggagtgagcgagtcatacagagaatcccagcgtggtatatgccagaagatggtcatggtgaatggagaccatcggattgggatctttgccaagagggcaattcaagctggcgaagagctcttctttgattacaggtacagccaagctgatgctctcaagtacgtggggatcgagagggagaccgacgtcctttagccctcccaggccccaacggcagcacttatggtagcggcactgtcttggctttcgtgctcacaccactgctgctcgagtctcctgcactgtgtctcccacactgagaaaccccccaacccactccctctgtagtgaggcctctgccatgtccagagggcacaaaactgtctcaatgagaggggagacagaggcagctagggcttggtctcccaggacagagagttacagaaatgggagactgtttctctggcctcagaagaagcgagcacaggctggggtggatgacttatgcgtgatttcgtgtcggctccccaggctgtggcctcaggaatcaacttaggcagttcccaacaagcgctagcctgtaattgtagctttccacatcaagagtccttatgttattgggatgcaggcaaacctctgtggtcctaagacctggagaggacaggctaagtgaagtgtggtccctggagcctacaagtggtctgggttagaggcgagcctggcaggcagcacagactgaactcagaggtagacaggtcaccttactacctcctccctcgtggcagggctcaaactgaaagagtgtgggttctaagtacaggcattcaaggctgggggaaggaaagctacgccatccttccttagccagagagggagaaccagccagatgatagtagttaaactgctaagcttgggcccaggaggctttgagaaagccttctctgtgtactctggagatagatggagaagtgttttcagattcctgggaacagacaccagtgctccagctcctccaaagttctggcttagcagctgcaggcaagcattatgctgctattgaagaagcattaggggtatgcctggcaggtgtgagcatcctggctcgctggatttgtgggtgttttcaggccttccattccccatagaggcaaggcccaatggccagtgttgcttatcgcttcagggtaggtgggcacaggcttggactagagaggagaaagattggtgtaatctgctttcctgtctgtagtgcctgctgtttggaaagggtgagttagaatatgttccaaggttggtgaggggctaaattgcacgcgtttaggctggcaccccgtgtgcagggcacactggcagagggtatctgaagtgggagaagaagcaggtagaccacctgtcccaggctgtggtgccaccctctctggcattcatgcagagcaaagcactttaaccatttcttttaaaaggtctatagattggggtagagtttggcctaaggtctctagggtccctgcctaaatcccactcctgagggagggggaagaagagagggtgggagattctcctccagtcctgtctcatctcctgggagaggcagacgagtgagtttcacacagaagaatttcatgtgaatggggccagcaagagctgccctgtgtccatggtgggtgtgccgggctggctgggaacaaggagcagtatgttgagtagaaagggtgtgggcgggtatagattggcctgggagtgttacagtagggagcaggcttctcccttctttctgggactcagagccccgcttcttcccactccacttgttgtcccatgaaggaagaagtggggttcctcctgacccagctgcctcttacggtttggtatgggacatgcacacacactcacatgctctcactcaccacactggagggcacacacgtaccccgcacccagcaactcctgacagaaagctcctcccacccaaatgggccaggccccagcatgatcctgaaatctgcatccgccgtggtttgtattcattgtgcatatcagggataccctcaagctggactgtgggttccaaattactcatagaggagaaaaccagagaaagatgaagaggaggagttaggtctatttgaaatgccaggggctcgctgtgaggaataggtgaaaaaaaacttttcaccagcctttgagagactagactgaccccacccttccttcagtgagcagaatcactgtggtcagtctcctgtcccagcttcagttcatgaatactcctgttcctccagtttcccatcctttgtccctgctgtcccccacttttaaagatgggtctcaacccctccccaccacgtcatgatggatggggcaaggtggtggggactaggggagcctggtatacatgcggcttcattgccaataaatttcatgcactttaaagtcctgtggcttgtgacctcttaataaagtgttagaatccaaaaaaaaaaa

SEQ ID NO: 30268 - DNA, 1219 bp, Homo sapiens
tgcatcataatgtcagaacatagaggatccacatgctgctacaccgctagttgcatgcacatcgccaaagtggaatttcgcacatgctgcgaaatgagcccatgtacaccgccgtttacctaagctgtggagtccacctcatcatctcgacctgcatgcatagcagcgctacgctacaaggatttcttttaacaacgttcttgaattggaaaaacccttgcggactaaggtctctagggtccctgcctaaatcccactcctgagggagggggaagaagagagggtgggagattctcctccagtcctgtctcatctcctgggagaggcagacgagtgagtttcacacagaagaatttcatgtgaatggggccagcaagagctgccctgtgtccatggtgggtgtgccgggctggctgggaacaaggagcagtatgttgagtagaaagggtgtgggcgggtatagattggcctgggagtgttacagtagggagcaggcttctcccttctttctgggactcagagccccgcttcttcccactccacttgttgtcccatgaaggaagaagtggggttcctcctgacccagctgcctcttacggtttggtatgggacatgcacacacactcacatgctctcactcaccacactggagggcacacacgtaccccgcacccagcaactcctgacagaaagctcctcccacccaaatgggccaggccccagcatgatcctgaaatctgcatccgccgtggtttgtattcattgtgcatatcagggataccctcaagctggactgtgggttccaaattactcatagaggagaaaaccagagaaagatgaagaggaggagttaggtctatttgaaatgccaggggctcgctgtgaggaataggtgaaaaaaaacttttcaccagcctttgagagactagactgaccccacccttccttcagtgagcagaatcactgtggtcagtctcctgtcccagcttcagttcatgaatactcctgttcctccagtttcccatcctttgtccctgctgtcccccacttttaaagatgggtctcaacccctccccaccacgtcatgatggatggggcaaggtggtggggactaggggagcctggtatacatgcggcttcattgccaataaatttcatgcactttaaagtcctgtggcttgtgacctcttaataaagtgttagaatccaaaaaaaaaaa

SEQ ID NO: 30269 - DNA, 220 bp, Homo sapiens
atcaccccactgcagcttatgaacaacggtcatccctgtcttctcacttcaggtgctaaatgtgtgtccaaggagattgttaggaccagcctcctctgaatcagggcagctggacacttgggagggaagacagctggagagtatggtcacagcagcatcctcctctgttttctttcctagataactcttccacacaagtgtacaactaccaaccctgcga

SEQ ID NO: 30270 - DNA, 333 bp, Homo sapiens
atgagagtaacctggttcctcttccctgctctgggacaggtacagccaagctgatgctctcaagtacgtggggatcgagagggagaccgacgtcctttagccctcccaggccccaacggcagcacttatggtagcggcactgtcttggctttcgtgctcacaccactgctgctcgagtctcctgcactgtgtctcccacactgagaaaccccccaacccactccctctgtagtgaggcctctgccatgtccagagggcacaaaactgtctcaatgagaggggagacagaggcagctagggcttggtctcccaggacagagagttacagaaatg

SEQ ID NO: 30271 - DNA, 492 bp, Homo sapiens
agctgggattacatgtgtgtaccaccatgctcagctaatttttgtattatgtttttgtagagatggggtttcaccatgttggcctggctggtctccaactgacttcaagtgatctgcctgtcttggcctcccaaagtgctgggattactggcatgagccactatgcccagccaattttggaaggaaattacatttctttcttgggttatatgcccgtctttccctctccatgtcattgcttatatttcagtgtaccatagagagcattttcccgggatttgcaagccaacatatgttaatgaggtcactgaacacagttgcattggttcccatcatgtattcctggtcccctctccaacagaactttatggtatgtattgaaagcactgtggtggttatttaaactgtatgattgtgttatgttgatatgccagagctcctcttagggtaaagattgtccagtaattaacacagctaggacatgcagggcag

SEQ ID NO: 30272 - DNA, 3143 bp, Homo sapiens
tggcgtaagaggcggcggtggaggcgctacgctggcgtaagaggcggcggtggaggcgctacgctggcgtaagaggcggcggtggaggcgctacgctggcgtaagaggcggcggtggagacgtttcgctggcgtaagaggtggaggtggagacgttacgctggcgggcacgatacaactgcagctgcaataaactggtccttatacctgttgggttctaacccagaagtccagaaaaaagtggatcatgaattggatgacgtgtttgggaagtctgaccgtcccgctacagtagaagacctgaagaaacttcggtatctggaatgtgttattaaggagacccttcgcctttttccttctgttcctttatttgcccgtagtgttagtgaagattgtgaagtggcaggttacagagttctaaaaggcactgaagccgtcatcattccctatgcattgcacagagatccgagatacttccccaaccccgaggagttccagcctgagcggttcttccccgagaatgcacaagggcgccatccatatgcctacgtgcccttctctgctggccccaggaactgtatagtaatttgaaggtcaaaagtttgctgtgatggaagaaaagaccattctttcgtgcatcctgaggcacttttggatagaatccaaccagaaaagagaagagcttggtctagaaggacagttgattcttcgtccaagtaatggcatctggatcaagttgaagaggagaaatgcagatgaacgctaactatattattgggttgtgcctttatcatgagaaaggtctttattttaagagatccttgtcatttacaatttacagatcatgagttcaatatgcttgaatcccctagacctaatttttccttgatcccactgatcttgacatcaagtctaacaaagaaaaagttttgagttttgtattttcttttttcttttttctttattttttttttttgaaaccgtgtctcactctgtcgcccaggctggaggagtgcagtggtgtgatctcagctcactgcaacctccacctcccaggttcaagcaattcttctgcctcagcctcccaagtagctgggattacaggtgcctgccaccatgcctggctaatgtttttgtatttttagtagaaacagggtgtcaccatgttggccagactggtctcaaactcctgacctcaagtgatccacctgcctcagcctcccaaagtgctgggattatagtcgtgagccaccacgcctggccagagttttttatttttatcaccaccatagatgttacagttggctgtggtcacaaaagtagttaattgtgtcagcacccaaataaacatctaacaggtttctcaacagaggaatccacagtccaattccacttcaattgatagacccaaaaaatataatttaatcaaagttctagagtttttgtttgtttgtttgagatggagtcttgctctgtcgcccaggctggaacgcagtggtgacatctcggctcactgcaacctccacctcccaggttcaagtgattctcctgcctcagcctcctgagtagctgggactacaggcgcctgccaccacgcccagctaatttttgtatttttagtagagatggggtttcaccatgttggccaggatggtcttgatctcttgacctcgtgatctgcctgcctcggcctcccaaagtgctggcattacaggcatgagccaccatgcctggcccaaagttctagaattttttaaaggtattcatggtgactcaggaatacacacatacacacacacacacacacacacacacacacacacacacatacacacacacatataatttgaaagaggtgagtatgtactctgacttcagctctcaggttttaaaaattatattagtgggaccagttatgacaagaataatcattatagtacttttcagattttataacctggagcagattattttaagttgattagtaggttctgttacagtttttcttttgatcgtgcacttatagtcttcatttaattcctcatagaatcccagtcacctttatatatcatattattggaagagattcatcttcataatctccagttttttcacagtgcctcacagagttaatcatgccttttggagctagaaggactttagaacttatctagttatgctcctttatattataagtaagggaatagaatcaataagacagtttctgcccaaagtcatgttaccagttggtgacagagctggaaatacgtagagatctatacccttaaatctctccactcacatgctgatatactttctactacaatatgctatagctttatggaactcagggtgatgatcagacgtgtcattagaacatgagtcctctgcttctgattcaggcatacttttgggattcttccatctttaaaggaaaaaggaagccattcatctatatttagtaacccagtaatatctcacttagtttagggttagatctttagttaattcaaccttatagatcatacttatgaaggtgataactgacacgtgttccctgaattttaatttgataggcaatacatctacccactccattattttttaaaacttcatttaatagtttaaacaagattggttttgttttcaatttttattcactcttcatagaatcacaattacctttatatatcatatgttattggaagagattcctcagtaatctccaatctctcatagtgcctcacagggttggtcaatggcttttggaactggaaggaccttagaacttatctgttatgctcctgatagccaatagcagatagaagcttgcaatcaagagggtaggacatgtgttcttcaatggatatcaaaggaagaggttgcaaaccaaagccatttggcaagccctgtagcctgggccatttaagacaggggcggtctcagccaaattgcacccatttaactatcccaaagagccacagtgcctacaacccaggccctaagttgatgaagaaaaagtcaaggaaggaggtgatacaattggaaatattcccatcaaatggttaatcttatttagaaaatgggcatattagaaaaagtccttccaagatgattttggataataaaagttgtatttgtgga

SEQ ID NO: 30273 - DNA, 486 bp, Homo sapiens
gatgctgccttgttttataagaagatgatcaaggtgtgtgtgcccattacctctcctctgcctgaaagacgtgtctcaagaaaaataaattctattttagatgcaggtactgcatttaaaatagaatttatttttcttgagaatgtctttcagctccagaattattgttactcatattttaatcagtaagtcatttaagctatgacagagtaggaattgagaaattatttcatatgctacagtattgaaatgtggatgctgccttgttttataagaagatgatcaaggtttgtgtgcccattacctttcctctgcctgaaagacgtgtctcaagaaaaataaattctattttagatgcaggtactgcattttattctaagaattgatatcaattcaaaacatagaaaactgtaaaagataaatcaggagatggctgattcataatgggtaataaaataaatagcactttcgagctgaaaacgtcag

SEQ ID NO: 30274 - DNA, 479 bp, Homo sapiens
agccgtccccagccatggtgctcacacataggcttttgagctccttggagctatccagatcctgctcacttttccttcctgagatcaaaacaaatttcaccccctactcccactccaaacaaggccttgatgataaactaatccttcctaaaatgctggtaggtaaacaagcaatgatgaagcattgaacacaggttaactcctgacttttgtaccattgtctattccattacacattaacatgaccctgctgccctctagcagccaagctcagatgagttccaaattgcacccatttaactatcccaaagagccacagtgcctacaacccaggccctaagttgatgaagaaaaagtcaaggaaggaggtgatacaattggaaatattcccatcaaatggttaatcttatttagaaaatgggcatattagaaaaagtccttccaagatgattttggataataaaagttgtatttgtgga

SEQ ID NO: 30275 - DNA, 3512 bp, Homo sapiens
cagaggtactggtcactcctaatcatcgcagcataactctgttttaagctattgttctctgcatttgtaggggcacgatacaactgcagctgcaataaactggtccttatacctgttgggttctaacccagaagtccagaaaaaagtggatcatgaattggatgacgtgtttgggaagtctgaccgtcccgctacagtagaagacctgaagaaacttcggtatctggaatgtgttattaaggagacccttcgcctttttccttctgttcctttatttgcccgtagtgttagtgaagattgtgaagtggcaggttacagagttctaaaaggcactgaagccgtcatcattccctatgcattgcacagagatccgagatacttccccaaccccgaggagttccagcctgagcggttcttccccgagaatgcacaagggcgccatccatatgcctacgtgcccttctctgctggccccaggaactgtatagtaatttgaaggtcaaaagtttgctgtgatggaagaaaagaccattctttcgtgcatcctgaggcacttttggatagaatccaaccagaaaagagaagagcttggtctagaaggacagttgattcttcgtccaagtaatggcatctggatcaagttgaagaggagaaatgcagatgaacgctaactatattattgggttgtgcctttatcatgagaaaggtctttattttaagagatccttgtcatttacaatttacagatcatgagttcaatatgcttgaatcccctagacctaatttttccttgatcccactgatcttgacatcaagtctaacaaagaaaaagttttgagttttgtattttcttttttcttttttctttattttttttttttgaaaccgtgtctcactctgtcgcccaggctggaggagtgcagtggtgtgatctcagctcactgcaacctccacctcccaggttcaagcaattcttctgcctcagcctcccaagtagctgggattacaggtgcctgccaccatgcctggctaatgtttttgtatttttagtagaaacagggtgtcaccatgttggccagactggtctcaaactcctgacctcaagtgatccacctgcctcagcctcccaaagtgctgggattatagtcgtgagccaccacgcctggccagagttttttatttttatcaccaccatagatgttacagttggctgtggtcacaaaagtagttaattgtgtcagcacccaaataaacatctaacaggtttctcaacagaggaatccacagtccaattccacttcaattgatagacccaaaaaatataatttaatcaaagttctagagtttttgtttgtttgtttgagatggagtcttgctctgtcgcccaggctggaacgcagtggtgacatctcggctcactgcaacctccacctcccaggttcaagtgattctcctgcctcagcctcctgagtagctgggactacaggcgcctgccaccacgcccagctaatttttgtatttttagtagagatggggtttcaccatgttggccaggatggtcttgatctcttgacctcgtgatctgcctgcctcggcctcccaaagtgctggcattacaggcatgagccaccatgcctggcccaaagttctagaattttttaaaggtattcatggtgactcaggaatacacacatacacacacacacacacacacacacacacacacacacacatacacacacacatataatttgaaagaggtgagtatgtactctgacttcagctctcaggttttaaaaattatattagtgggaccagttatgacaagaataatcattatagtacttttcagattttataacctggagcagattattttaagttgattagtaggttctgttacagtttttcttttgatcgtgcacttatagtcttcatttaattcctcatagaatcccagtcacctttatatatcatattattggaagagattcatcttcataatctccagttttttcacagtgcctcacagagttaatcatgccttttggagctagaaggactttagaacttatctagttatgctcctttatattataagtaagggaatagaatcaataagacagtttctgcccaaagtcatgttaccagttggtgacagagctggaaatacgtagagatctatacccttaaatctctccactcacatgctgatatactttctactacaatatgctatagctttatggaactcagggtgatgatcagacgtgtcattagaacatgagtcctctgcttctgattcaggcatacttttgggattcttccatctttaaaggaaaaaggaagccattcatctatatttagtaacccagtaatatctcacttagtttagggttagatctttagttaattcaaccttatagatcatacttatgaaggtgataactgacacgtgttccctgaattttaatttgataggcaatacatctacccactccattattttttaaaacttcatttaatagtttaaacaagattggttttgttttcaatttttattcactcttcatagaatcacaattacctttatatatcatatgttattggaagagattcctcagtaatctccaatctctcatagtgcctcacagggttggtcaatggcttttggaactggaaggaccttagaacttatctgttatgctcctgatagccaatagcagatagaagcttgcaatcaagagggtaggacatgtgttcttcaatggatatcaaaggaagaggttgcaaaccaaagccatttggcaagccctgtagcctgggccatttaagacaggggcggtctcagccaaattgcacccatttaactatcccaaagagccacagtgcctacaacccaggccctaagttgatgaagaaaaagtcaaggaaggaggtgatacaattggaaatattcccatcaaatggttaatcttatttagaaaatgggcatattagaaaaagtccttccaagatgattttggataataaaagttgtatttgtggaaattggtattatctctgttttatgcacttacatttatcccttacattttgtttttagtgaccctacatgacattaaatttaaagtaaaacattgtttaatgttaccttttggcttgagaatgtctttcagctccagaattattgttactcatattttaatcagtaagtcatttaagctatgacagagtaggaattgagaaattatttcatatgctacagtattgaaatgtggatgctgccttgttttataagaagatgatcaaggtttgtgtgcccattacctttcctctgcctgaaagacgtgtctcaagaaaaataaattctattttagatgcaggtactgcattttattctaagaattgatatcaattcaaaacatagaaaactgtaaaagataaatcaggagatggctgattcataatgggtaataaaataaatagcactttcgagctgaaaacgtcag

SEQ ID NO: 30276 - DNA, 3551 bp, Homo sapiens
tggcgtaagaggcggcggtggaggcgctacgctggcgtaagaggcggcggtggaggcgctacgctggcgtaagaggcggcggtggaggcgctacgctggcgtaagaggcggcggtggagacgtttcgctggcgtaagaggtggaggtggagacgttacgctggcgggcacgatacaactgcagctgcaataaactggtccttatacctgttgggttctaacccagaagtccagaaaaaagtggatcatgaattggatgacgtgtttgggaagtctgaccgtcccgctacagtagaagacctgaagaaacttcggtatctggaatgtgttattaaggagacccttcgcctttttccttctgttcctttatttgcccgtagtgttagtgaagattgtgaagtggcaggttacagagttctaaaaggcactgaagccgtcatcattccctatgcattgcacagagatccgagatacttccccaaccccgaggagttccagcctgagcggttcttccccgagaatgcacaagggcgccatccatatgcctacgtgcccttctctgctggccccaggaactgtatagtaatttgaaggtcaaaagtttgctgtgatggaagaaaagaccattctttcgtgcatcctgaggcacttttggatagaatccaaccagaaaagagaagagcttggtctagaaggacagttgattcttcgtccaagtaatggcatctggatcaagttgaagaggagaaatgcagatgaacgctaactatattattgggttgtgcctttatcatgagaaaggtctttattttaagagatccttgtcatttacaatttacagatcatgagttcaatatgcttgaatcccctagacctaatttttccttgatcccactgatcttgacatcaagtctaacaaagaaaaagttttgagttttgtattttcttttttcttttttctttattttttttttttgaaaccgtgtctcactctgtcgcccaggctggaggagtgcagtggtgtgatctcagctcactgcaacctccacctcccaggttcaagcaattcttctgcctcagcctcccaagtagctgggattacaggtgcctgccaccatgcctggctaatgtttttgtatttttagtagaaacagggtgtcaccatgttggccagactggtctcaaactcctgacctcaagtgatccacctgcctcagcctcccaaagtgctgggattatagtcgtgagccaccacgcctggccagagttttttatttttatcaccaccatagatgttacagttggctgtggtcacaaaagtagttaattgtgtcagcacccaaataaacatctaacaggtttctcaacagaggaatccacagtccaattccacttcaattgatagacccaaaaaatataatttaatcaaagttctagagtttttgtttgtttgtttgagatggagtcttgctctgtcgcccaggctggaacgcagtggtgacatctcggctcactgcaacctccacctcccaggttcaagtgattctcctgcctcagcctcctgagtagctgggactacaggcgcctgccaccacgcccagctaatttttgtatttttagtagagatggggtttcaccatgttggccaggatggtcttgatctcttgacctcgtgatctgcctgcctcggcctcccaaagtgctggcattacaggcatgagccaccatgcctggcccaaagttctagaattttttaaaggtattcatggtgactcaggaatacacacatacacacacacacacacacacacacacacacacacacacatacacacacacatataatttgaaagaggtgagtatgtactctgacttcagctctcagttttcagattttataacctggagcagattattttaagttgattagtaggttctgttacagtttttcttttgatcgtgcacttatagtcttcatttaattcctcatagaatcccagtcacctttatatatcatattattggaagagattcatcttcataatctccagttttttcacagtgcctcacagagttaatcatgccttttggagctagaaggactttagaacttatctagttatgctcctttatattataagtaagggaatagaatcaataagacagtttctgcccaaagtcatgttaccagttggtgacagagctggaaatacgtagagatctatacccttaaatctctccactcacatgctgatatactttctactacaatatgctatagctttatggaactcagggtgatgatcagacgtgtcattagaacatgagtcctctgcttctgattcaggcatacttttgggattcttccatctttaaaggaaaaaggaagccattcatctatatttagtaacccagtaatatctcacttagtttagggttagatctttagttaattcaaccttatagatcatacttatgaaggtgataactgacacgtgttccctgaattttaatttgataggcaatacatctacccactccattattttttaaaacttcatttaatagtttaaacaagattggttttgttttcaatttttattcactcttcatagaatcacaattacctttatatatcatatgttattggaagagattcctcagtaatctccaatctctcatagtgcctcacagggttggtcaatggcttttggaactggaaggaccttagaacttatctgttatgctcctgatagccaatagcagatagaagcttgcaatcaagagggtaggacatgtgttcttcaatggatatcaaaggaagaggttgcaaaccaaagccatttggcaagccctgtagcctgggccatttaagacaggggcggtctcagccaaattgcacccatttaactatcccaaagagccacagtgcctacaacccaggccctaagttgatgaagaaaaagtcaaggaaggaggtgatacaattggaaatattcccatcaaatggttaatcttatttagaaaatgggcatattagaaaaagtccttccaagatgattttggataataaaagttgtatttgtggaaattggtattatctctgttttatgcacttacatttatcccttacattttgtttttagtgaccctacatgacattaaatttaaagtaaaacattgtttaatgttaccttttggcttgagaatgtctttcagctccagaattattgttactcatattttaatcagtaagtcatttaagctatgacagagtaggaattgagaaattatttcatatgctacagtattgaaatgtggatgctgccttgttttataagaagatgatcaaggtttgtgtgcccattacctttcctctgcctgaaagacgtgtctcaagaaaaataaattctattttagatgcaggtactgcattttattctaagaattgatatcaattcaaaacatagaaaactgtaaaagataaatcaggagatggctgattcataatgggtaataaaataaatagcactttcgagctgaaaacgtcag

SEQ ID NO: 30277 - DNA, 3606 bp, Homo sapiens
tggcgtaagaggcggcggtggaggcgctacgctggcgtaagaggcggcggtggaggcgctacgctggcgtaagaggcggcggtggaggcgctacgctggcgtaagaggcggcggtggagacgtttcgctggcgtaagaggtggaggtggagacgttacgctggcgggcacgatacaactgcagctgcaataaactggtccttatacctgttgggttctaacccagaagtccagaaaaaagtggatcatgaattggatgacgtgtttgggaagtctgaccgtcccgctacagtagaagacctgaagaaacttcggtatctggaatgtgttattaaggagacccttcgcctttttccttctgttcctttatttgcccgtagtgttagtgaagattgtgaagtggcaggttacagagttctaaaaggcactgaagccgtcatcattccctatgcattgcacagagatccgagatacttccccaaccccgaggagttccagcctgagcggttcttccccgagaatgcacaagggcgccatccatatgcctacgtgcccttctctgctggccccaggaactgtatagtaatttgaaggtcaaaagtttgctgtgatggaagaaaagaccattctttcgtgcatcctgaggcacttttggatagaatccaaccagaaaagagaagagcttggtctagaaggacagttgattcttcgtccaagtaatggcatctggatcaagttgaagaggagaaatgcagatgaacgctaactatattattgggttgtgcctttatcatgagaaaggtctttattttaagagatccttgtcatttacaatttacagatcatgagttcaatatgcttgaatcccctagacctaatttttccttgatcccactgatcttgacatcaagtctaacaaagaaaaagttttgagttttgtattttcttttttcttttttctttattttttttttttgaaaccgtgtctcactctgtcgcccaggctggaggagtgcagtggtgtgatctcagctcactgcaacctccacctcccaggttcaagcaattcttctgcctcagcctcccaagtagctgggattacaggtgcctgccaccatgcctggctaatgtttttgtatttttagtagaaacagggtgtcaccatgttggccagactggtctcaaactcctgacctcaagtgatccacctgcctcagcctcccaaagtgctgggattatagtcgtgagccaccacgcctggccagagttttttatttttatcaccaccatagatgttacagttggctgtggtcacaaaagtagttaattgtgtcagcacccaaataaacatctaacaggtttctcaacagaggaatccacagtccaattccacttcaattgatagacccaaaaaatataatttaatcaaagttctagagtttttgtttgtttgtttgagatggagtcttgctctgtcgcccaggctggaacgcagtggtgacatctcggctcactgcaacctccacctcccaggttcaagtgattctcctgcctcagcctcctgagtagctgggactacaggcgcctgccaccacgcccagctaatttttgtatttttagtagagatggggtttcaccatgttggccaggatggtcttgatctcttgacctcgtgatctgcctgcctcggcctcccaaagtgctggcattacaggcatgagccaccatgcctggcccaaagttctagaattttttaaaggtattcatggtgactcaggaatacacacatacacacacacacacacacacacacacacacacacacacatacacacacacatataatttgaaagaggtgagtatgtactctgacttcagctctcaggttttaaaaattatattagtgggaccagttatgacaagaataatcattatagtacttttcagattttataacctggagcagattattttaagttgattagtaggttctgttacagtttttcttttgatcgtgcacttatagtcttcatttaattcctcatagaatcccagtcacctttatatatcatattattggaagagattcatcttcataatctccagttttttcacagtgcctcacagagttaatcatgccttttggagctagaaggactttagaacttatctagttatgctcctttatattataagtaagggaatagaatcaataagacagtttctgcccaaagtcatgttaccagttggtgacagagctggaaatacgtagagatctatacccttaaatctctccactcacatgctgatatactttctactacaatatgctatagctttatggaactcagggtgatgatcagacgtgtcattagaacatgagtcctctgcttctgattcaggcatacttttgggattcttccatctttaaaggaaaaaggaagccattcatctatatttagtaacccagtaatatctcacttagtttagggttagatctttagttaattcaaccttatagatcatacttatgaaggtgataactgacacgtgttccctgaattttaatttgataggcaatacatctacccactccattattttttaaaacttcatttaatagtttaaacaagattggttttgttttcaatttttattcactcttcatagaatcacaattacctttatatatcatatgttattggaagagattcctcagtaatctccaatctctcatagtgcctcacagggttggtcaatggcttttggaactggaaggaccttagaacttatctgttatgctcctgatagccaatagcagatagaagcttgcaatcaagagggtaggacatgtgttcttcaatggatatcaaaggaagaggttgcaaaccaaagccatttggcaagccctgtagcctgggccatttaagacaggggcggtctcagccaaattgcacccatttaactatcccaaagagccacagtgcctacaacccaggccctaagttgatgaagaaaaagtcaaggaaggaggtgatacaattggaaatattcccatcaaatggttaatcttatttagaaaatgggcatattagaaaaagtccttccaagatgattttggataataaaagttgtatttgtggaaattggtattatctctgttttatgcacttacatttatcccttacattttgtttttagtgaccctacatgacattaaatttaaagtaaaacattgtttaatgttaccttttggcttgagaatgtctttcagctccagaattattgttactcatattttaatcagtaagtcatttaagctatgacagagtaggaattgagaaattatttcatatgctacagtattgaaatgtggatgctgccttgttttataagaagatgatcaaggtttgtgtgcccattacctttcctctgcctgaaagacgtgtctcaagaaaaataaattctattttagatgcaggtactgcattttattctaagaattgatatcaattcaaaacatagaaaactgtaaaagataaatcaggagatggctgattcataatgggtaataaaataaatagcactttcgagctgaaaacgtcag

SEQ ID NO: 30278 - DNA, 3553 bp, Homo sapiens
tggcgtaagaggcggcggtggaggcgctacgctggcgtaagaggcggcggtggaggcgctacgctggcgtaagaggcggcggtggaggcgctacgctggcgtaagaggcggcggtggagacgtttcgctggcgtaagaggtggaggtggagacgttacgctggcgggcacgatacaactgcagctgcaataaactggtccttatacctgttgggttctaacccagaagtccagaaaaaagtggatcatgaattggatgacgtgtttgggaagtctgaccgtcccgctacagtagaagacctgaagaaacttcggtatctggaatgtgttattaaggagacccttcgcctttttccttctgttcctttatttgcccgtagtgttagtgaagattgtgaagtggcaggttacagagttctaaaaggcactgaagccgtcatcattccctatgcattgcacagagatccgagatacttccccaaccccgaggagttccagcctgagcggttcttccccgagaatgcacaagggcgccatccatatgcctacgtgcccttctctgctggccccaggaactgtatagtaatttgaaggtcaaaagtttgctgtgatggaagaaaagaccattctttcgtgcatcctgaggcacttttggatagaatccaaccagaaaagagaagagcttggtctagaaggacagttgattcttcgtccaagtaatggcatctggatcaagttgaagaggagaaatgcagatgaacgctaactatattattgggttgtgcctttatcatgagaaaggtctttattttaagagatccttgtcatttacaatttacagatcatgagttcaatatgcttgaatcccctagacctaatttttccttgatcccactgatcttgacatcaagtctaacaaagaaaaagttttgagttttgtattttcttttttcttttttctttattttttttttttgaaaccgtgtctcactctgtcgcccaggctggaggagtgcagtggtgtgatctcagctcactgcaacctccacctcccaggttcaagcaattcttctgcctcagcctcccaagtagctgggattacaggtgcctgccaccatgcctggctaatgtttttgtatttttagtagaaacagggtgtcaccatgttggccagactggtctcaaactcctgacctcaagtgatccacctgcctcagcctcccaaagtgctgggattatagtcgtgagccaccacgcctggccagagttttttatttttatcaccaccatagatgttacagttggctgtggtcacaaaagtagttaattgtgtcagcacccaaataaacatctaacaggtttctcaacagaggaatccacagtccaattccacttcaattgatagacccaaaaaatataatttaatcaaagttctagagtttttgtttgtttgtttgagatggagtcttgctctgtcgcccaggctggaacgcagtggtgacatctcggctcactgcaacctccacctcccaggttcaagtgattctcctgcctcagcctcctgagtagctgggactacaggcgcctgccaccacgcccagctaatttttgtatttttagtagagatggggtttcaccatgttggccaggatggtcttgatctcttgacctcgtgatctgcctgcctcggcctcccaaagtgctggcattacaggcatgagccaccatgcctggcccaaagttctagaattttttaaaggtattcatggtgactcaggaatacacacatacacacacacacacacacacacacacacacacacacacatacacacacacatataatttgaaagaggtgagtatgtactctgacttcagctctcaggttttaaaaattatattagtgggaccagttatgacaagaataatcattatagtacttttcagattttataacctggagcagattattttaagttgattagtaggttctgttacagtttttcttttgatcgtgcacttatagtcttcatttaattcctcatagaatcccagtcacctttatatatcatattattggaagagattcatcttcataatctccagttttttcacagtgcctcacagagttaatcatgccttttggagctagaaggactttagaacttatctagttatgctcctttatattataagtaagggaatagaatcaataagacagtttctgcccaaagtcatgttaccagttggtgacagagctggaaatacgtagagatctatacccttaaatctctccactcacatgctgatatactttctactacaatatgctatagctttatggaactcagggtgatgatcagacgtgtcattagaacatgagtcctctgcttctgattcaggcatacttttgggattcttccatctttaaaggaaaaaggaagccattcatctatatttagtaacccagtaatatctcacttagtttagggttagatctttagttaattcaaccttatagatcatacttatgaaggtgataactgacacgtgttccctgaattttaatttgataggcaatacatctacccactccattattttttaaaacttcatttaatagtttaaacaagattggttttgttttcaatttttattcactcttcatagaatcacaattacctttatatatcatatgttattggaagagattcctcagtaatctccaatctctcatagtgcctcacagggttggtcaatggcttttggaactggaaggaccttagaacttatctgttatgctcctgatagccaatagcagatagaagcttgcaatcaagagggtaggacatgtgttcttcaatggatatcaaaggaagaggttgcaaaccaaagccatttggcaagccctgtagcctgggccatttaagacaggggcggtctcagccaaattgcacccatttaactatcccaaagagccacagtgcctacaacccaggccctaagttgatgaagaaaaagtcaaggaaggaggtgatacaattggaaatattcccatcaaatggttaatcttatttagaaaatgggcatattagaaaaagtccttccaagatgattttggataataaaagttgtatttgtggaaattggtattatctctgttttatgcacttacatttatcccttacattttgtttttagtgaccctacatgacattaaatttaaaaattattgttactcatattttaatcagtaagtcatttaagctatgacagagtaggaattgagaaattatttcatatgctacagtattgaaatgtggatgctgccttgttttataagaagatgatcaaggtttgtgtgcccattacctttcctctgcctgaaagacgtgtctcaagaaaaataaattctattttagatgcaggtactgcattttattctaagaattgatatcaattcaaaacatagaaaactgtaaaagataaatcaggagatggctgattcataatgggtaataaaataaatagcactttcgagctgaaaacgtcag

SEQ ID NO: 30279 - DNA, 329 bp, Homo sapiens
  misc_feature (2)..(2): n is a, c, g, or t
  misc_feature (17)..(18): n is a, c, g, or t
cnctctctctctctctnntctctctctctctctctatttcttgtaaccatttgttaaactcttttctttttctgatctcatggcatgcttttatgtattttgtacaggaggcaaaaaaaatacttaaaataagcaaagaaactgaacagaattgcatacattgggttgttttttctgtgctgtctgtacattgcttctgctgctgtgatttctaaacctgtgctgttattcaactgacttttttttgtactttgacccacgtttttttgaaataccagtaaaaaacaaagttcttgaaataaaactttttaaaaagttaaaaaaaaaat

SEQ ID NO: 30280 - DNA, 2101 bp, Homo sapiens
gggcgggacctggagctgagggcgggagccagtggacgcggctcagggtgggttcccgagggtgagacttatgggtgggccgagctgggggccgccctggcctggctcttcagacggcggggcaggtcgggcggggccgagccgcgaggcgttgggcggggtgtgatcctcgtcttgggggcagactccgggacggggcttagagcgcgtgaggcgggcagcgcggttgaggccgaagagctggtgaagggcagcccggcgtgggagccgcctgccaacgacacgcgggaagaagccggcccaccagcggctggggaagatgaggcgtcgtggacggcgcccggtggcgagctggccgggccagaagaggtgctgcaggagtcggctgcggtgaccggcaccgcctggctggaagctgacagcccaggcctgggaggagtgaccgcagaggcgggcagcggcgatgcccaggcccttccagctacgctccaggctccccacgaggtcctcgggcagtcaatcatgccccctgccattcctgaggctacagaggccagcgggccaccctcccccacccccggcgacaagctgagcccagcttctgaactccccaaggagagccccttggaggtttggctgaacctggggggcagcacacccgaccctcaagtgccagagctgacttacccatttcagggcaccctggagccccaaccggcatcagatatcattgacatcgactacttcgaaggactggatggtgagggtcgtggcgcagatctggggagcttcccagggtcaccaggaacctcagagaaccaccctgatactgagggagagaccccttcctggagcctgcttgacttatacgatgatttcacccccttcgatgaatctgatttctaccccaccacatccttttatgatgacttggatgaagaggaggaggaagaggaggatgacaaagatgcagtaggaggtggagacctagaagatgaaaatgagcttctagtgcccactgggaagcctggtctggggcccgggacaggccagcccaccagtcggtggcatgctgtccctccacagcacactctggggtcggtccccggcagcagcatcgccctcaggccccgcccaggagagccaggcagggacttggcctccagtgaaaatggcactgagtgccgcagtggctttgtgcggcataacggctcctgccggtcagtgtgcgacctcttcccaagttactgtcacaatggcggccagtgctacctggtggagaacataggggccttctgcaggtgcaacacgcaggactacatctggcacaaggggatgcgctgcgagtccatcatcaccgacttccaggtgatgtgcgtggccgtgggctcggctgccctcgtcctgctcctgctcttcatgatgacggtgttctttgccaagaagctctacctgctcaagacggagaataccaagctgcgtaggaccaacaaattccggaccccatctgagctccacaatgataacttctccctctccaccattgccgagggctctcacccaaatgatgatcctagtgctccccacaaaatccaggaggttctcaagtcctgcctgaaagaggaggagtcatttaacatccagaactccatgtcgcccaaacttgagggtggcaaaggtgaccaggctgacttggatgtgaactgtcttcagaataatttaacctaaagcagagcaagaagagaggaagcgggggtagtgggtggggggtaggggaagaaacattatctcctcttgtacagagtctatttcttgtaaccatttgttaaactcttttctttttctgatctcatggcatgcttttatgtattttgtacaggaggcaaaaaaaatacttaaaataagcaaagaaactgaacagaattgcatacattgggttgttttttctgtgctgtctgtacattgcttctgctgctgtgatttctaaacctgtgctgttattcaactgacttttttttgtactttgacccacgtttttttgaaataccagtaaaaaacaaagttcttgaaataaaactttttaaaaagttaaaaaaaaaat

SEQ ID NO: 30281 - DNA, 2086 bp, Homo sapiens
gcggccgcagaaccggcgggaggcgcggcggccgggcgagccgagggcgcagccagccgggcggaccgcggacagcggtcggggcgccgcgccatggggcgagccgggggcgggggcccgggccgggggccgccgccactgctgctgtttctgggggccgcgctggtcctggcctctggggccgtgccggcgcgtgaggcgggcagcgcggttgaggccgaagagctggtgaagggcagcccggcgtgggagccgcctgccaacgacacgcgggaagaagccggcccaccagcggctggggaagatgaggcgtcgtggacggcgcccggtggcgagctggccgggccagaagaggtgctgcaggagtcggctgcggtgaccggcaccgcctggctggaagctgacagcccaggcctgggaggagtgaccgcagaggcgggcagcggcgatgcccaggcccttccagctacgctccaggctccccacgaggtcctcgggcagtcaatcatgccccctgccattcctgaggctacagaggccagcgggccaccctcccccacccccggcgacaagctgagcccagcttctgaactccccaaggagagccccttggaggtttggctgaacctggggggcagcacacccgaccctcaagtgccagagctgacttacccatttcagggcaccctggagccccaaccggcatcagatatcattgacatcgactacttcgaaggactggatggtgagggtcgtggcgcagatctggggagcttcccagggtcaccaggaacctcagagaaccaccctgatactgagggagagaccccttcctggagcctgcttgacttatacgatgatttcacccccttcgatgaatctgatttctaccccaccacatccttttatgatgacttggatgaagaggaggaggaagaggaggatgacaaagatgcagtaggaggtggagacctagaagatgaaaatgagcttctagtgcccactgggaagcctggtctggggcccgggacaggccagcccaccagtcggtggcatgctgtccctccacagcacactctggggtcggtccccggcagcagcatcgccctcaggccccgcccaggagagccaggcagggacttggcctccagtgaaaatggcactgagtgccgcagtggctttgtgcggcataacggctcctgccggtcagtgtgcgacctcttcccaagttactgtcacaatggcggccagtgctacctggtggagaacataggggccttctgcaggtgcaacacgcaggactacatctggcacaaggggatgcgctgcgagtccatcatcaccgacttccaggtgatgtgcgtggccgtgggctcggctgccctcgtcctgctcctgctcttcatgatgacggtgttctttgccaagaagctctacctgctcaagacggagaataccaagctgcgtaggaccaacaaattccggaccccatctgagctccacaatgataacttctccctctccaccattgccgagggctctcacccaaatgatgatcctagtgctccccacaaaatccaggaggttctcaagtcctgcctgaaagaggaggagtcatttaacatccagaactccatgtcgcccaaacttgagggtggcaaaggtgaccaggctgacttggatgtgaactgtcttcagaataatttaacctaaagcagagcaagaagagaggaagcgggggtagtgggtggggggtaggggaagaaacattatctcctcttgtacagagtctatttcttgtaaccatttgttaaactcttttctttttctgatctcatggcatgcttttatgtattttgtacaggaggcaaaaaaaatacttaaaataagcaaagaaactgaacagaattgcatacattgggttgttttttctgtgctgtctgtacattgcttctgctgctgtgatttctaaacctgtgctgttattcaactgacttttttttgtactttgacccacgtttttttgaaataccagtaaaaaacaaagttcttgaaataaaactttttaaaaagttaaaaaaaaaat

SEQ ID NO: 30282 - DNA, 1162 bp, Homo sapiens
  misc_feature (186)..(186): n is a, c, g, or t
cgtacaaggccgccttcctgcttctgcctttgccctttgcaggctgtccttaacctagtcactaaaacgagttgtttagaataaaagtcagctcatggtcctcctctgctcaaaacctttttaaccttgcaacccactctttacagtggcttccaagatcctgccacggggccttgtacgcgtacnaggccccgcccaggagagccaggcagggacttggcctccagtgaaaatggcactgagtgccgcagtggctttgtgcggcataacggctcctgccggtcagtgtgcgacctcttcccaagttactgtcacaatggcggccagtgctacctggtggagaacataggggccttctgcaggtgcaacacgcaggactacatctggcacaaggggatgcgctgcgagtccatcatcaccgacttccaggtgatgtgcgtggccgtgggctcggctgccctcgtcctgctcctgctcttcatgatgacggtgttctttgccaagaagctctacctgctcaagacggagaataccaagctgcgtaggaccaacaaattccggaccccatctgagctccacaatgataacttctccctctccaccattgccgagggctctcacccaaatgatgatcctagtgctccccacaaaatccaggaggttctcaagtcctgcctgaaagaggaggagtcatttaacatccagaactccatgtcgcccaaacttgagggtggcaaaggtgaccaggctgacttggatgtgaactgtcttcagaataatttaacctaaagcagagcaagaagagaggaagcgggggtagtgggtggggggtaggggaagaaacattatctcctcttgtacagagtctatttcttgtaaccatttgttaaactcttttctttttctgatctcatggcatgcttttatgtattttgtacaggaggcaaaaaaaatacttaaaataagcaaagaaactgaacagaattgcatacattgggttgttttttctgtgctgtctgtacattgcttctgctgctgtgatttctaaacctgtgctgttattcaactgacttttttttgtactttgacccacgtttttttgaaataccagtaaaaaacaaagttcttgaaataaaactttttaaaaagttaaaaaaaaaat

SEQ ID NO: 30283 - DNA, 697 bp, Homo sapiens
agatttaaattttattgattaccgtatttccattcctagaatttatagaaatggcataccctgtaagtctaaatggtatgccacactacttattgtggatacaagatattttattgaaggtattattttaaaggagctaaatttaccctctaatgcaaaaatttgaaaaccctcattgcaaaaatttggtgtcttatagctctgtaataatgaatgggtttcgacttgcttatatagcttaaaatacatttctggttatcaaaaattgaggccaagcgtggtggctcatgcttgtaatcccagcactttgggaggctgaagctagtggatcgcttgatctcaggagtttaagaccagcctaacaatcatggtgaaacctcatctctaccaaaaatataaaaaattagccgaacatggtggcatgtgcctgtggtcccagctagttgggatgctgaggtgggaggattgctcgagcctgggaggtggaggttgcagtgaggcaaggtcatgccactggactccagcctgggcaacagagccagacctggtctcaaaaaaaatgactaacatggccgggcatggtggctcacgcctgtaatcccagcactttgggaggccgaagtgggcggatcacaaggtcaggagatcgagaccatcctggctaacacagtgaaaccccatctctactaaaaataca

SEQ ID NO: 30284 - DNA, 3635 bp, Homo sapiens
aatgaatccctgcggttggctgggggcagtgggtcccacactgcctaacttccctaaatgggcagcttcacttttagaaccccgggtccttccctggcaggcccaggtggcacatcctgtgtcgggtgggccctcaccttggatctccaggcctgacactgcccagctggatggaaccatggccccagccttcctgctgctgctgctgctgtggccacagggttgcgtctcaggcccctctgctgacagtgtatacacaaaagtgaggctccttgaaggggagactctgtctgtgcagtgctcctataagggctacaaaaaccgcgtggagggcaaggtttggtgcaaaatcaggaagaagaagtgtgagcctggctttgcccgagtctgggtgaaagggccccgctacttgctgcaggacgatgcccaggccaaggtggtcaacatcaccatggtggccctcaagctccaggactcaggccgatactggtgcatgcgcaacacctctgggatcctgtaccccttgatgggcttccagctggatgtgtctccagctccccaaactgagaggaacattcctttcacacatctggacaacatcctcaagggtggaactgtcacaactggccaagcccctacctcaggccctgatgccccttttaccactggtgtgatggtgttcaccccaggactcatcaccttgcctaggctcttagcctccaccagacctgcctccaagacaggctacagcttcactgctaccagcaccaccagccagggacccaggaggaccatggggtcccagacagtgaccgcgtctcccagcaatgccagggactcctctgctggcccagaatccatctccactaagtctggggacctcagcaccagatcgcccaccacagggctctgcctcaccagcagatctctcctcaacagactaccctccatgccctccatcaggcaccaggatgtttactccactgtgcttggggtggtgctgaccctcctggtgctgatgctgatcatggtctatgggttttggaagaagagacacatggcaagctacagcatgtgcagcgatccttctacacgtgacccacctggaagaccagagccctatgtggaagtctacttgatctgaggccacttaagcatggggtggggagcttctcccagagtggccccagggggttagaggaggggtgaagattggggccagtatcgatcttatgaagctggaggacttgtgcagtgctggactcacccaggacttcccaaacccagaggctgccatcctaagcagccccacagcccagtgttctccttgggggcaggaacctggggaggggcccagagcaaagggcatcagggagaaagtcccgaggaaatgtgaccagtggcttctgctcggagctgcagaccccagggctcttggtggaggcaggggaaccctgagagtgctgtttacagagaacctcagctcccgtctgcctcagaaaccctactgggctgagctgccctccccaccagggccactgtgtcctctgcttccctccgttctgcttcagcttcccctaaggttagggaagaaagaatcgggctcacgaatgccagaggcagtgatgtcccatcctggaggagaggaaacagtgactaaaagctggggacccacagaggggttggcagcttctcttgtcgggacaggtgtcctttgctgggcctctggatggccctgccctgactggggctgctcctccctcctgtcctgggaccccgcagagcccacgctctcactgctgcctcctgctggccgctgcctccttagaaagctgtgaccaggcagctaagagcctctgggctgcagggtcagcctctcccaagactgaagtgcagaggctggacttggggctctctcccccagcttctacacctgggctccaagtctgagttcccacaggggacccagcagcctccaggaagtccataccctggggtggctgagaccttggctctgtatggaggctgctcaccccacagacactggtggggagaccatggctcagaggaagggtggagcaaccctactcctacccctcaggatagagagagaagacacacttgggacacagtgaagacagtaacttggaactgaccacggcctggaggactggcccaggcagggggacagggaaaatggagcccaagtagcctctggccagggacccaatgtcccgaggaatctgcctcccacccactgactcagggctcagactcagcctctattgtccagagcactggcttggcgtccagcaatgaaggctggagaatgcagcctggattcccctacacacacacacacacacacacacacacacacacacacacacacacacacacaggtgtctactgacctggagtgactggaatagcacctggggataaatgtgacaactgtgcattgaaccctgggtcagggacgttccaatggccaagagagtgacacagccaggaccctggtggacagccagaggggccacttcaggatggatgtggggagagtggaagaggcagggagtaatcctgggggacagcagggaggaggcacttcttccctatgtccaggagagggcaatagagggaagactgaggctgaagaattgacggctctggacccaggacagacagacagacagacagacagacacgcacacacacccatctctgtctagcaagcagcctcctaagatagctgttctccctatcatgacggtgtagccaccatcctgttgtatactaggagagaacttaacccacctgggggaaaatagctccccaagagctggcaccagtaccactgatggccctgcttcctctgagtgagatgcccaggaggaggagccctagggaagaagtcagggacagggaccaggataccactctgtcactgtgtgaccctcagcaagtcactaacccttggcctcatttttcctgtcttgtgaaagaggacaataattcctacttctcaagattgttttcaagataaaataacattagcattgtacaatgatgcaaatgcctcattaccattattccttaagttgttttccagctctaatgttgtttccaacattacatttaagaccttaggattctgtttcttgcttttgtcatatctcttcccaagtgtcatcactatatggatgttgagggcccccgatgacagtccctttggtaaggtcctcttttgaggaggggagggtacagggtggactcatctcagtgtgaacttggcaagtcactgtccctctctgatcttgtttcctcatctggagaaggagtgagagaggagaaaggaagaaaccagtcaggcaggcagttagggtgggttctcggtagaattcttttaaacaaaagaacagcctgaaaaatcaagctgcaggcacagatatgggaacttgcacaggggggcttgcctaagacatgcccacagcctcatagataagacagactacacaggtgacttgcccaaacatgcctgcaatggaaaatttcatcccctgacatgtgcagtaaggggaacaaagcaatatggagtaagtaactcaagccaagggcccacatgtacattagaa

SEQ ID NO: 30285 - DNA, 884 bp, Homo sapiens
tggcctctctcagcgtgagacctggactgagcctgctaacgattctgttcctcagtttccccaaatagaaaattctaagattggtcagatgatcaaattatctatgttttcgatcttgatgctatagagaacagccatgttcccctgataacaagaaaaagacgtcccacggtcgaggtatccttgaccaactccccatccattcatttgttcaccgtccacaacccatctgatcaggaagcatttccaggcacctgcggagcacttagggcagtgtgcggaagctgcagggcaggcaggacgagggggcagtctggaggggggtggacacacagctgtccccagggagcccagcgcggtgccggtcacatgccgtgggagtggagggtcttgagcagacgcctcccttggagaagagccaccatctcaccttcccacgcaacaaattatctattaccagcacccgatgaggccgtccctcccaaattccacagtgcccaccactcgcactaccccccccgtgccacagaagcagtgtcagcagcctcgccacggttttcacgtcatgcagaaatggtcattccatgttctatggccaccagattctgctgagagtgtcgggatccttgactgcccagccacaccttgtgtgtgtctggtgtagtgtgtagtttacgaaacaaacggaaaagctcaaagacagcgatccaagacatgatcagcaatttggtcccaaattaggagaggaggaagaggagtatcaattttgtcaccaaaatgttaaaaaaaatgtccttggcgctctttttagctttcccgtttactaccagtccagacatgcaaaaaaaccttgtttattgaaaaataaacaacaagggctaaac

SEQ ID NO: 30286 - DNA, 875 bp, Homo sapiens
  misc_feature (857)..(857): n is a, c, g, or t
tggcctctctcagcgtgagacctggactgagcctgctaacgattctgttcctcagtttccccaaatagaaaattctaagattggtcagatgatcaaattatctatgttttcgatcttgatgctatagagaacagccatgttcccctgataacaagaaaaagacgtcccacggtcgaggtatccttgaccaactccccatccattcatttgttcaccgtccacaacccatctgatcaggaagcatttccaggcacctgcggagcacttagggcagtgtgcggaagctgcagggcaggcaggacgagggggcagtctggaggggggtggacacacagctgtccccagggagcccagcgcggtgccggtcacatgccgtgggagtggagggtcttgagcagacgcctcccttggagaagagccaccatctcaccttcccacgcaacaaattatctattaccagcacccgatgaggccgtccctcccaaattccacagtgcccaccactcgcactaccccccccgtgccacagaagcagtgtcagcagcctcgccacggttttcacgtcatgcagaaatggtcattccatgttctatggccaccagattctgctgagagtgtcgggatccttgactgcccagccacaccttgtgtgtgtctgcggatcggtgctccccaaccaacgggaagctcagaaagggatcacacgatcgcgtggtccccactgacagggcacaggaattcatgtgccaagttgaaaagcgggccatacatacgataaaacacagacaacgtcgtccacaggggcacagggggggccaggtagtgagatggagcacgctcgaccacgacatgattantgaaccgcgcgactcacc

SEQ ID NO: 30287 - DNA, 386 bp, Homo sapiens
  misc_feature (45)..(47): n is a, c, g, or t
tgagatggagtcttactctgtcgcctaggctggagtgcagtggcnnntcttgggtgacagagtaagactctgtctcggaaaaaaaaaaaatgggcaaaggatttaataaacatttcttcaaagaagatatgcaaatagccaacaaatacatggaaagatgctcagtatccttacctgtcagggaaatgcaaatccaaaccacaatgagataccacttcacatccactaggatggctagaatcaaaataatacatgctggtgaggatgcagaaaaattagaaccttcctacattgctagtggcaacgtaaaatgctgcagcagctgtgaaaaacagcctggcagttcttccaaaggctaaacactgagttgccatacatcccagcaa

SEQ ID NO: 30288 - DNA, 440 bp, Homo sapiens
tacagagtaaacattcttttttttaagtgcacatagaacttcacttagattaaccatatgctgggtgatatttttaaagtctcaataatttaaaagttttgaaatcacagaatgtattccctgactgaaaacagagttaaattagaattcactataatagatatctggaaaattcccagatatttagaaattaaacaatagtcttctaaataactcatgggtaaaatacgaaattttatggaaaattagaaaatattgtgaatgaagatgaaaaaacaacatgtcaatttgtaggatgcaggtaaagcaatactagaggaaaattaattgctttacaataatgatctaagcttctacctgaataaacgagaaaagaagagcaaattaaacctaatgtaaaggaaggcagtaatatagagcagaatcagtgaaataaaaga

SEQ ID NO: 30289 - DNA, 368 bp, Homo sapiens
atatcttgctgacatacctgtagggtaaattcctgtgagtgggattgctacatcagtgggaaaatacatttcaaattttgataaacatcaccaaattcttctctggaaaggtcactgattgtttgttttttcgagacagggtctcgctcttcacccagactgcaatgcagtggcacaatcatagcttattgcaacctcaaactcgtgggctcaagcaatgctcgctcctcccaagtagctaggaccacaggcatgcaccacgatgcccacctagttttttgtattttctatagagatgggggtctcactgtgtttctcaagctggtcacatactcttggcctcaggcagttctcccacatcagactct

SEQ ID NO: 30290 - DNA, 568 bp, Homo sapiens
gtgagccaatcactgtgccatgtcacatggattatactaccaccttctgagttaggttttattaatgcagtttttacagatgaggctactgtgacacagagggcataaacttgtcaaagacatgcagcaaacaggacagacaaatctgaagccaggttgtctaagctcagaatccacacctataaccgctgtaccccactgcttttgccagcaggagctcacgtacttaggacagacaatcagtacagtgctaggctcactgaaggtgttgaacaaatgtctgttcactctttttgttctcaaaagtaccaggaaaggccagaagaaaaaactacaagacttagaaactacaatggatcagatcactcagtagcacctcactagaaaatattaccagtcttataagtgcaaagtttatgttgtaattgtagcaatcatgattccagctctcttcctgacacatggtaagactgcactttatgcctcccttgcttgtattgggcaacatgactaattactactcagtgacttgagtagcggataacaggggtactcaagaacagctcga

SEQ ID NO: 30291 - DNA, 799 bp, Homo sapiens
gtgagccaatcactgtgccatgtcacatggattatactaccaccttctgagttaggttttattaatgcagtttttacagatgaggctactgtgacacagagggcataaacttgtcaaagacatgcagcaaacaggacagacaaatctgaagccaggttgtctaagctcagaatccacacctataaccgctgtaccccactgcttttgccagcaggagctcacgtacttaggacagacaatcagtacagtgctaggctcactgaaggtgttgaacaaatgtctgttcactctttttgttctcaaaagtaccaggaaaggccagaagaaaaaactacaagacttagaaactacaatggatcagatcactcagtagcacctcactagaaaatattaccagtcttataagtgcaaagtttatgttgtaattgtagcaatcatgattccagctctcttcctgacacatggtaagactgcactttatgcctcccttgcttgtattgggcaacatgactaattctggaaaatgagttgagcagaaattaacatgtttcctggaattttaaactgatggtttaagaccctgcaaaactccctccctctgcaacagcaaccagtctacaatggtcagacttcctacaatgaccaacttgaaatgaacacatagcatgacagagaaataaatctcattgattaagtcaatgagatgtattccacatcagaacctggcccaccctaatcaataacgtaaaccaattatctcctatgagctgctaacacattctctatcacatattaatac

SEQ ID NO: 30292 - DNA, 171 bp, Homo sapiens
cagtagtttggtaaaaactaccaaacaaaattttaaaaagcagccagtgagtggggaaaacaacaaaaacccgtattacatttaggagggcagggacaagtaagaatgacagccagccaagttttcttaagaaaatgtggttacaatatggttatctctgttagtgctgaa

SEQ ID NO: 30293 - DNA, 160 bp, Homo sapiens
ttttgagaaataaggggtttggaggctcaggacagaccatcccactgctgtcttagggacattgggctgctggagcctggcccaaagaaggtcttctgggaaatcaggactgagtctgggcaatgctagagtcagtgggtaaaatggctttggagtgtgg

SEQ ID NO: 30294 - DNA, 358 bp, Homo sapiens
gaaaattataagaattcaatctaaaaagcgtgaatggcttttcgtctccctagtactctgggatagaatgttgatgttttacaagtctgctctaattttcacaggagtggacaaacctacacacagagctgaacattacatattttcctgacttgttttctacaatttttatacttacccaaatccaacatgctttttcctaggaaaatgttctcaggttcttaaactgttcatttcagggaaaactcaatctacttgtatgggttcggtcttgtgtatcatcttacacagtaaccaaaaaaggcaaatttgattcatttaaattacagttaaatttatttctaaaagacaaatatat

SEQ ID NO: 30295 - DNA, 409 bp, Homo sapiens
tcaagaaatatcttgagggtttgtttacaatacagttaccaagtccaccttctagataggctgctttagtgtagtgttctggaacctttatttttaaacagattatccaggtaattatgttgtgtaaccaagagggaccactggtgtagaaacaatcagagagacctggggctgaattttactcagctcttcccttactgactctgacattgggcacatttcttaacttttatgaggataccgtgatataactggtacggttgtaatgaggcttagcaattatgtatgtataggaaacagtaactgctatggatgacaacgatgatagctcattaagctcatttggaatctagatgcagtatcactaccatattcatcatcatcatcatcgttggtcgacgcggccgca

SEQ ID NO: 30296 - DNA, 353 bp, Homo sapiens
gctactgtaaaaagtatttttgataagtacctgaaatttataatagtagagttcatgtttagcactttgtccccctttgcaactacctatgggaggcagaataggaaagtgtttaagagttctggttctggaataagaaagagcttgggccaggtcccagctcctctactttttagctttgtgaacttgaacaagtaatttaacttccttgggtctctattacctcatctgtcaaacaggtatagtagaaactacttcaaaggaatgtgagttatatgagatgatatatgtaaccatttggtaaatatttgctgtcattattataaatgaggaaactgatgctaaatagtgag

SEQ ID NO: 30297 - DNA, 669 bp, Homo sapiens
ccttaggggaggatgtagttgggggttcatgcatcaggtgggcaattggaagagatacgtcctctaaagtcttattgattctaagattttctgggtctggagctcattgacaagcgtaaggctagttggagcttttatagtctttattgatagcagtcatcccccacacacccctgatagtaatacactttactatctgtagtcatgaatgagaaagaatttgttttaaagcaacaagggggagaattgtgatattttaaaagcactaacatttttcttttttatctcaaagtcacatacttgtcatttgtgaagctgaataccagaagaatgcatgtgttgctgactagattgttgatattaaggagctattgtttgttactttatttttaggtgtgatgatggttttgtttttatgtttaaatgagccttgtcttttggagatacatactgaaatatttatagatgaaatgatctgatgtctggggaggtttgctttaaagtaatagaggagtggggagtagacaggggtatagatgaatcaaggttggccatgagttggtaattgttgaaactggtgataggtacatgtgggtttatatactattctgctttcatttatgttttgaattctccaaataaaacttaaaaaagaagtagaaaaaaagt

SEQ ID NO: 30298 - DNA, 1024 bp, Homo sapiens
atgaggccttggtagatttagaagttgagagtagaaagtacaggtttgtattttagaaggagatttgggaataaatgtagctttggttgatatagatcatatgttaaggtttgttggccagagctggtgtgtgtcttgggtgttgggcaaagaacagagaacagccaaagctctgcgaggtcaatgtgaaggatgatttccttggtgggctcaagtttatgactcagcctggacctagcttggcttctcagcttgagaagaagcatgattccatgtcacagctcctgtctttgaaaaagtcataatgactcccagacccaacatgtggagaaaactctggatttgtctcttcagttgaatgtctccattgaaaattgaggaaagaaatctctctaatatttgaacttcatcaaaagactaatatgttaatatttgaccgtcaatatttccttaaactagtctactgcttacatagctaacacatcaaagcatattaacttaggaaatgggattctcccaaacaatgaaacattgacggcaagcgttcttcatcttttcacatcacatttccttcaaatgctttatacatcttcaagcagacaaataatagtattataatgattacgagaccgatcattactcttttgccaaaaaaaaccaacgacaaaagactaacttagtggaccaacctttgtttcttcattatctctaccgtggttctgtccttttatttcgtctttcttctaattctgcttctgcttcttatttcctccctggatttgaactttacttacctaaactaccagttaggttaccttctcagaacctctaaggcagcagtttgaggttgatgatggaagatttaggattagaaaaaagaaacatgaatgaatttctgatgttttattataggggtttgtaatgcaggtagaaagacctttttcagagttaagagtttgatccgacaaatgagctattttgatatttataacgttgtctaataaaagtttcctataaaaacaaa

SEQ ID NO: 30299 - DNA, 1329 bp, Homo sapiens
tcagcatgccccagtagtctcaggaccaccataatggagaatccttgtaaatggtgcaataaagcttcattcagaagtttgataattacagctatcattcaggagacaggccttagaaagagtaagagttcatgaatttaccagactaatggtggacatgtccaaattgatgtccactagaatgtaaactacatgtgtctttgctgctaagtcgtcacagccttaacattgattagcactttgtatgtgttcagtacttgtttgttaaatcaatgaaaggataaaacatatgtatggatttggatacaattttgtgtatccaaaaagggaagcctgcaaaaaataattctgggaaacatgagttgaaatgcagagtaaactcagtactgcaatccatagcaatattttgcatattattattttttcttttaaatttttttcttgatcagatttatcatattcattgaatattattttattgcacttggctcctggcttccccccatcctgtgctctgaagtcagagtattatttgtggctctatgaaatgtccattgcttgtatacggtataaatttaattatcttttgtagtttttctcacagtatagactgaaaaggtttggttaattttgcaataacagaccactgcatatttcacaattaagtgttttcaacagtattaaggcaagatttacagtaacacttttaaagtgccagatgtacattgacagaaattttcttagtcaatcctagattgatcatgatttgtgatttctatgcaggccttggtatgattgccttttaattgctgtacaatttcttttttttttttaacttctctggtataaaatattctaaatttgaatgacagcttttgtcaaccttcttatccaatattcttccaccaacgctatgaaacaggaagagaaaatggagtttggtaatttcatcaaatatattcattattgggggcaggagtaacatttaaatcctcctctttattgctggccgtaaaaatatgtcttttggagagcagaacatgccagaatgtataaggtgcaactgtttgatatgaaaaccataggataggaaactatgcctatgacactaaaactccaaaaagtagaagaccacattgatgatgtcactgcattttaaaatggaaagaacaagtgttcaagaacaggaatttgtgtgaattgcatttattcctataataatatgaactcaatgagatgatgacatagacacaataacaaaaggagaaaaacaatgtggctttttttagccttcataacctaatcaaataaatatctttgtgtgtttta

SEQ ID NO: 30300 - DNA, 1395 bp, Homo sapiens
tcagcatgccccagtagtctcaggaccaccataatggagaatccttgtaaatggtgcaataaagcttcattcagaagtttgataattacagctatcattcaggagacaggccttagaaagagtaagagttcatgaatttaccagactaatggtggacatgtccaaattgatgtccactagaatgtaaactacatgtgtctttgctgctaagtcgtcacagccttaacattgattagcactttgtatgtgttcagtacttgtttgttaaatcaatgaaaggataaaacatatgtatggatttggatacaattttgtgtatccaaaaagggaagcctgcaaaaaataattctgggaaacatgagttgaaatgcagagtaaactcagtactgcaatccatagcaatattttgcatattattattttttcttttaaatttttttcttgatcagatttatcatattcattgaatattattttattgcacttggctcctggcttccccccatcctgtgctctgaagtcagagtattatttgtggctctatgaaatgtccattgcttgtatacggtataaatttaattatcttttgtagtttttctcacagtatagactgaaaaggtttggttaattttgcaataacagaccactgcatatttcacaattaagtgttttcaacagtattaaggcaagatttacagtaacacttttaaagtgccagatgtacattgacagaaattttcttagtcaatcctagattgatcatgatttgtgatttctatgcaggccttggtatgattgccttttaattgctgtacaatttcttttttttttttaacttctctggtataaaatattctaaatttgaatgacagcttttgtcaaccttcttatccaatattcttccaccaacgctatgaaacaggaagagaaaatggagtttggtaatttcatcaaatatattcattattgggggcaggagtaacatttaaatcctcctctttattgctggccgtaaaaatatgtcttttggagagcagaacatgccagaatgtataaggtgcaactgtttgatatgaaaaccataggataggaaactatgcctatgacactaaaactccaaaaagtagaagaccacattgatgatgtcactgcattttaaaatggaaagaacaagtgttcaagaacaggaatttgtgtgaattgcatttattcctataataatatgaactcaatgagatgatgacatagacacaataacaaaaggagaaaaacaatgtggctttttttagccttcataacctaatcaaataaatatctttgtgtgttttatgttcttttgagtgtttacatactgtgtaaatgaatatttttactgatctttgctggcaatgagtg

SEQ ID NO: 30301 - DNA, 1339 bp, Homo sapiens
gggagacaccgctcttggggaagttgggctgcagcccccgcacgtgctaggaagataagtgaaggtcccaacacatcctgtccccttagagcccctggggcccagcagccgggcccagcagcccgacccagcgcctagagcccattcgcagacagcgcgctgaggcggcttgggcgccatgccctttgggttactcagctcttcagcctcctggaacgctaggacaaaggagtgccttggtgctggcagaagccggggggcacagctgggttttacaaggaaggacgaaatctcatctcagcaatcgggatagatcaaccgttgcccgtctgaggtgacccaattcagggaccagccgcttggctctgaacacacacgtgtcacaaccccagctcgtacccaggccttgctagagctccaggtttatgagccgtaactcagcagaagcctagcatgagaacaactcatctgaagctccaacatttggggaatgcaacctttcgacagacatttgctgaatggataggagactcctgaaagcagaattctgcacattctgtggaccagccctgactacggagagcaggtgttagccagtatccatgcgcagtgcctcttagtcttacctgtctgctgccttacgcaagcatggagcttaatatgctagctgtgttctcctaacctcagatatctgtaaaaccagccacagtaagataacatggtagagcacaaaatgcttagaagagatttatttgaagcaatgcttcccagaagtttttcaatgcagcttatggcgagaaacacattttacatctctactcagtacgcagccactcatactcaactgaaacatcttctgaaacaatatttcacttcactctctgcaatacagaaaataccagatcgtattgtatgttatttcattgttttaaaatcctgagcctagcttgctaatagattacaactcagtttgaaaagcacaggctaaggggcttcaaataggggtgacacattgaacacacacatttatcacctctcccttcacagatctcattaaaatgataataaaggaacaaaatggcagaaatccacaaggacaaacagcaaacaagagggacatcagcagataggcaacctcaacaagtatatcacaatgagtgacacaccccctataacagccaattttgatggtcctcccatagctcttgccttattctttgtaataggattcagattgtttaaaatccccatattctaccgcaaagtcatgttatcaggaaagaccaaccctaaccccagttccatggagtaaagattaattaatctaaactctattaat

SEQ ID NO: 30302 - DNA, 2637 bp, Homo sapiens
  misc_feature (1304)..(1304): n is a, c, g, or t
  misc_feature (1540)..(1540): n is a, c, g, or t
  misc_feature (1718)..(1719): n is a, c, g, or t
  misc_feature (1721)..(1721): n is a, c, g, or t
  misc_feature (2631)..(2631): n is a, c, g, or t
  misc_feature (2633)..(2633): n is a, c, g, or t
gagacggagtctcgctctgtcaccaggctggagtgcagtggcgcgatcttggctcactgcaagttccgcctcccgggttcacgccattctcctgcctcagcctcccgagtagctgggactacaggcgcccgccaccatgcccgactaatttttttgtatttttagtagagacgaggtttcaccggattagcgaggatggtctcaatctcctgaccttgtgatccacccgcctcagcctcccaaagtgctgggattatgggcttgagccaccgcgcccagctagacttttttctaatagagtcccccataaattttattaccatagatacgctgtgtatgtactgtttctgtgctttgtacatgaaaagagtaaaatgtttttgtttttgttttggagacagtctcactctgttacctgggctggagtgcaatggcatgatctcagctcactgcaatctctgcctcctgggttcaagcgattctcttgcttcagcctcctgagtagctgggattacaggcggccaccaccacccctggctaatttttgtatttttagtagaggtttcaccacgttgatcaggctggtctcaaactcctgacctcgtggtctgcctgccttggcctcccaaagtgctgggattacaggcgtgagccaccatgcccaaccaattttttttttttaaatccttggtagtgattgacccccattgagaatgcatgctctaatattttttaaaagggaagaagacctagtgatagacctttgcattggcaggcatgtctttatgtttatacagtgaagtagtattttttctgtcagggtcaatagaaagtagacgaaattcattttcagccaatctttcaccagttgtgctttgttccttaccccaccacaggcaacagacaaagcatttcctgctgtctttcaaggtcttaacagattctttcttgattataaatgtattactaagtagaatcatttgggttctttctataaaaatcagtgaaaatcctctagatgaatgaattaaagttgtaggcataacactgataaacctctgctctcatactgaagtaggctgcttgcaggaactgacaactattggttggctttaaatgtaatgtagatgccaaagttttagtgtacagtgttacttaaattaccaaattacctttgtacaaatattcctcagatgctgtctacaggtgccatataaaataggttgataagtatttgcaaattctggtaaattgccttgctatgatttttcatgctcagtattagtcctctagtatcaatacgnagtttttctattccccagcctactaaggcctacaggttaaaataccaggaataaaaaggttttcagtggacttgatttaagtggaatctggatgatgtgacaagtacctttgtctttggagtaatgagtttataattggcttttgtccaaaaactcttaagtggattaatatctgaacaatcttagacataattatatgaaactggatcagaaaggctttctgactcctttctctncacttttttctcccagcttaactagaggcaattaacagtcatttcaaatctaattatttttattttccagtgtacttatcatcctttcatctttatgctaggagtatagtctcagttcttaatgagttgatgggatgaagatatagatagatagatagatagatagatagatagatanntntttttttttttttttttttttttgagacagagtctcgctctgtcgcccaggcgggagtgcagtggcacaatctcggctcactgcaagctccgccttgggggttcacaccattctcctgtctcagcctcctagctgggattacaggcgcccaccaaccaagcccggctaaggtatttttaaatgtactcaatcactgtcattttagtaaccttgaatcagaacctcagttgttaaaggcttaactgcttgtggcaactactatagtgctctagtggggacagtggttaaaatctgcagaatcccttgctttgtcatcttatccagaaggactgatagcttgttaaactgtggtatgattagaatgttggtggttgtgtagtgcatttggggtgctacaacgttaatcaaatataattgagctgttctgtttccagtcagtgtaaccatttaaaaataccttggcaaaacaagctaggagctagttcatgctaatattcttaaggacaaaaatagtttacagcttttttttttttaatctgaaatcctgaaggctatgcttaaaagttagagataaacctgttggaaataagtgattcatttatagactgaagcctctatgacttcaaaaagatactcaacagtctctggcatttgaagaacaaaatattttctctgtaaatacacctcatttccattctagttaggagcaatggcgcccaggacggcacacagaatggagaaaactggatagctggtaactcatttagctcttggcactctaaaaaacctcaaatacagccatccaagccagtaattctattgctgcgttatttctgtgtttaactgtgaaacttgcttcttgtctgtacccttgaaatggaataaaatttcatgagactccttgttaaananaaaa

SEQ ID NO: 30303 - DNA, 1204 bp, Homo sapiens
actgagtgactgggcgagacgaaggggcctgtggggaagggtgagggtgcaggtcaaggacagcagtaggagcttactgcagtgactgtatcataactgctggttatgaggattggatttcttttttgcagatgtcacgtgccggggtgaactgttattaactaaaaggagtcagggcttagctgcaaggaaaggaggaattgctcttaaagtgcttggaagtcaccgatctaaccaacggacaaaaaatttcctgaggacagaccctcccctctggaggcatccttctatcattggctcctgactccccgaagcaaggtcaagtgggagtttaatagctgttcctgggactgtgcagagggcagccctttgaactcagtgtctcaatcccacaggtgggaggttcccaccactgcgtaatttcgagagggagggccgagactgcctggggggaagtcccatggctacctggttcgaggcagctctttgatatctcctggagcactcctggtcctagaaccagacagctctcaactgaactgacacaagtaacaaactcagcatcccctctcctgggcattcctacaagccatgcgagccccgtgttggtggagacactgccttctccaccgcagacaccaacaagttagaatggagaaactgtctatggccctaccactctgaacacgccggatgtcatctcatctcggaagctaagcagggtcgggcctgcttaggacttgggtgggagaatggagaaattgatggacttttgacgatgcaggttttaacatcagatctgagccctaatagctgtgtgtctcagctgtctgggccacaccattaacagggaaaagtttcctccacttaaagaaagaaaaagacaaagaggagaaggaaggcaatacggagctctcctggaaggtacattaaatcattaaatgccagcctgcctgtttcacgtaggaggactcgtatatgtgttcctggtagggaatgtgtgtccaaaacaccagcatcttcttctcagcccacccaggctgcccccatcttgtttaatgccgtttaggcagaataactatttctccaattttccagtgcagaattagactctttaacttgacttctgcattttcctatgtgagactcagccggatgtatgtcctctcccacgtgtacaacccccataaactgaactaagaga

SEQ ID NO: 30304 - DNA, 232 bp, Homo sapiens
actgagtgactgggcgagacgaaggggcctgtggggaagggtgagggtgcaggtcaaggacagcagtaggagcttactgcagtgactgtatcataactgctggttatgaggattggatttcttttttgcagatgtcacgtgccggggtgaactgttattaactaaaaggagtcagggcttagctgcaaggaaaggaggtatgtggttgagtgcattgcaacacggtctctca

SEQ ID NO: 30305 - DNA, 264 bp, Homo sapiens
atccgccttattttatagaagaaaatactgaaactcaagacccgctacctgggcaggggaggagcagagaccagaaccctggacctctggctccatgctgtttctactctacactccatcttccacatctgctttttgctaatatcccatagctaagaaataagatataaacaatgccttgaaatacaagacaaccaaggcctcacctttctctcattactcaaatgatgcaaagcccgaagccctctccacctgacttcatcc

SEQ ID NO: 30306 - DNA, 420 bp, Homo sapiens
tagtggagtttactgtagaatagaaggtaaattcagttaaactcatttgtttttgtatgaactcttatcagcctcaaatgactagttctgtgggtcttgggaacaattgaaatgtagcccagtagtggaattctgctgagttgaagaagggtctttgctttactgagatatagcccaactactgtggaccacaaaccaggatccctgcttttaaagttagctatagggtttaactgtttatctagataccagatgtgtaggattctgcattttagaaagaagtagatttcttcctaaaagactgttgtcttgtatcagtgtctggctaatcatctagtactactaatttcatgaactttaaaatcttatttattccttaaatatgttaatttcgggttagggatgatatataggaatcgg

SEQ ID NO: 30307 - DNA, 496 bp, Homo sapiens
gacttactgtgtgctactcgagctttcatgttgctttacttacaatgtttgaatacatctacaatatacaatctttgctttggaaatttgtatatactttttatgctactcttcatattttaatacctgatttaatacccgatttataaaaacaatatataaatacccaatggttttacacttttggattaaaagcaaggaagctcagcctatatttattttcctttatcttctatacttttaagtatcaccttccctttagtatccaagtggagttataatttttgtttctatcatcaactatgatttataatactcactaggaaaacacatctattggatgtattcatatttctgctaattctattaatacatcttccttctttcttgatgttcaaaattccttttttttctttattttgtttgaataacagttttagtaaacatttaatgctaagcttgctaacaacaaatttttaaacagttcaaaaaaaaa

SEQ ID NO: 30308 - DNA, 411 bp, Homo sapiens
gccttacaaccatgtataaaatagtgaactgcgatatgatggagttgctcttatcttcatcccgggatgagaaaatagaggcagaagagttttaagcaatttgcacagttaataaagtgtggagccagaatttgaacccaatctggctccagacctctttactacagctctcagttagaaaattatttctaactgagatatttcggttcagcaagtgttggcttagttcctgtgtgctatgccagcagaaaatatagttcctacacagaagagcttacatttttgacataaatcaaaatgtatatacttgaaataaatgctacaacaccttagcatatggggtgtaaatgttgtgtatggatcagcatgaataatagagactgttagtgagtggcttgagagttaatttgc

SEQ ID NO: 30309 - DNA, 1242 bp, Homo sapiens
gaggctgaagatacatgacaccagatgaaaagtggatccacaagaacagggctccccaacccttgggccacagtgtgtggcctgttaggaactgggccacgcagcaggaggcgagcagccgtgagcattattgcctgagctccacctcctgtcagatcagtggcaacaatgatttctcataggagtattgcgaactgcactcgagggatctagatggcacactccatatgagaatataatgcctgatgaaaccatccttgctcccaccccccacctccatctgtggaaaaattgtcttctatgaaattggtcctggtaccaaaaagtttgggcaccgctgcacaagaaagattgaaaagtaccagaaagtaaatatgtaacaattaggtttcatcctccaaaagaagacttggtaagcttatagagcaatggaataatttataaataaataaataaatgtctcaaaaataagaaattaaaaaattaaatcagtatgtatgtagggggtggggcatggaggaaagatcattattcagtaactggtgttgaggtaactggctagccatttagaaaacaaattttgatctctacttattcataaactatcaaattaccagtagaaaacatgtgaagggattttaaaaatataatcttagagtgggcaaggctttctaaggctggtgtagaagtcaaaagtcagaaagatatgtgaatttgagcacgttaaaaacttttgaaatttctacattggaaaattgccatatagtcaaatacaatttatacgtacacacacacacacacacacacacacacacacacccatatgatagcaagcctctttattaaatagaactatgtcttacacatcagtaaggaaaagtgctgcagcaggatataaacatgtgcctagtgcacagaaagtgaaatgtaaatgacttgtagtgagacaatactaaaaatatctttgctatcaaagcaaatgttcctcgtggattcccaatctcacatgcaaatacatagccattaaagttaaatttgttttttttattctttattatcttctcaacataagcatgtgctgaagtttaatagcttgttattcttttgtaatacagaatacagcatttaacatagtattttttatttgtcttctttattgacagtttcacttgagtatagaatagctttaagcttctgtagtgaccaagttagtgatcagtagaaactctgctgggaattatc

SEQ ID NO: 30310 - DNA, 343 bp, Homo sapiens
gctgggattacaggtgtaagcccctgtgcccagccagcaatttcttctagaaagtcccagcagaggctgggtatggtgaatcacacctgtaatcctagcattttgggaggccgaggtgggtggatcccttgagcccaggagtttgagaacagcctggaacagcctgggcaacatagggagggacctcatctctatttaaaaagaaaaaaaagaggccgagtgcggtggctcacacctgtaatcctagcactttgggaggctgaggcgggtggatcacctgcgatcaggagtttgagcagcctggccaacatggtgaaaccctgtctctactaaaaatacaaaa

SEQ ID NO: 30311 - DNA, 521 bp, Homo sapiens
gtcagtgtcagggaaagcgcttgagcaggcttgctcgtttgcacaagggggaaaaaaaggaactggactgttcagaatgaacaaaggcggtggcggggcgggggcgggggaagactaatgtgtcttcagtgtataagaagggaaggagctgggagaaaacagtcagtggaataaggcctggggcaggatggggcgggggtccttcatgaatctgatggaaagactggcccctagcagtgaacagaaaaatactttatggagaaaaatgccttgaatttcctaagcctagtaaattttctatataagttatttttctttaggagaaactattattttcttgtaccaacttttaaagtaaatttcaaactgacataaaagttgaaacaatagtacaataaaacccatgtatcttcttccttaaattcaccaactgttaacatttgccatattttctctccctccctataaaaaaacttacatttttttgatgagtatcaaaagttgcagattaaaaaaaaaaa

SEQ ID NO: 30312 - DNA, 418 bp, Homo sapiens
agggtttaactgaggatggtgtttggagaacagaggatgaggaaaataagctgctttttgacttttgaaatgagaatattgctaggaagtggttgtttctggagcttctaataattagctccctcttccatgtgttttgatgttgggattagtggaaaaagagagaagtttttgtgtccattgttgtccactataaagcttggagtttcaggttgaactagattttttttttccttcaatcctctgaaagcttcccctcaggccccatctgctgccattggtcaccacagaaatacccccacagaattcctgtaaagaatggcactgcttctgaaggactgctctaagctgatgtctgaattcaattacatgtcatcagtgcatgctttattcataacatcatcttattgtaaacatc

SEQ ID NO: 30313 - DNA, 388 bp, Homo sapiens
  misc_feature (336)..(336): n is a, c, g, or t
  misc_feature (366)..(366): n is a, c, g, or t
tcccagcacttggggaggccaaggcaggcggatcacctgaggtcaggagttcaagaccagcctgaccaacatggtgaaaccctgtctctactaaaaatacaaaaattagtgggacgaggtgccagtagtcccagatacttgggaggctgaggcaggagaactgcttgaacccaagagatggaggctgcagtaagccaagatcgtgctgctgcacttcatcctgggcaatagagtgagtcaatttgtaagaaaacacattattatctgtgaagcacaatgaaaagtgaaataaaacaaggtatacctctactgaaagaaaaaaaaaaaaaaaaaaangttctttattttaaggcggccgcaagcttntttccctttagttgaggggtta

SEQ ID NO: 30314 - DNA, 444 bp, Homo sapiens
cctctctgttttatctttctgtaattagcattagtcagatgttagatattctggattgatcctgacatttcaacttttctttcctatgttccaactctgttattttaaaaaaaaaaaaaaaaaactcggaccacataagctagatctctggagggctagcctcagaagtcacccagtgtcacatgggccacattttattggttacagggccagccagtttgaaggggaagagaaatatgtctctgtttatgctgtgtccagtgctagcttgctacctgctctcccagttccagtgctcagggcagcactggcagaacagatgtacttactgagttaaaaacagcaacatccaagacaattgttaacttttaaaactgtctcccatcccagaaggtataactaaaaaactaacaataaaaataatagtaataaataataaaaata

SEQ ID NO: 30315 - DNA, 492 bp, Homo sapiens
ggcgcagctcacgcccctcggcctacgggagggagggcaaggagggttctacggttcctgggaggacgagaagagccaagagccccgacggccggcgccggggaaaaggccccgaggcggggtccgcatccctggaagggcggcgtccaccctcctgagaggcacggggcgcccagggctcggaggctcaaagcccgccggctcctgcagcttctgggagccgaagagtgtcagccgggaggatcccgcacacggcgcttagttctggaactgcatacccaggggaggatgcgggagcccgaagcccgggtatgtgtccccgaagcccgggtgtgggtccccatggttttcgtgttgggggtgggcgcggaacgctaagcctgggcctattgggagccatagtcttcttgatggctggtgcttattgggcttttttcagtcgaatttcgaaatgcagttgaatttcttactttggaaacgataatagaaatg

SEQ ID NO: 30316 - DNA, 452 bp, Homo sapiens
atactaaaaaccactaagctgtacatttaaaagggtgaatttgatggtatgtgaatcatgtctcaagctgatgacaactagaaaaggtccaacaagactgagagagaaagaggaggcaagtcccagataccagagcaggtggccccaacagagacgaggccacggaagagggaacagggcccggtcagacccctgcagccagatcctgggacagagaaacttgggagctgtggcaggagggaccacagacccaaggtgtctgcagacctgagggaggactgacgatgttcctgccagggctgaactcatcttaaaagaaaaaaaaaaaaaaaggccgggcacggtggctcacacctgtaatctcagcactttgggggactgaggtgggcaaatcacttgaggtcaggagtttgagtccagcctagccaacgtggtgaaaccccatctctact

SEQ ID NO: 30317 - DNA, 783 bp, Homo sapiens
  misc_feature (271)..(271): n is a, c, g, or t
  misc_feature (283)..(283): n is a, c, g, or t
tgtgattatgcatatttgcatctgaattaattttgacttataataataattaaaactttaagatttgtttttggtattattcaagtatgaaccattcactgaagacttattctaaagccagctctatcccaagttaaataacttgataagtataatattttcagtttataggccattgtttaaaattgtgtatataacttcatatgcttatgaagtaaattagaagcattttacatacatttgtttccaattctttttcaccaagtatctnatccccagcccncccatcttcccccacccccagcccttggccacagacctgcagagaacttttgcgtactcttttgaggcctcacctgtatgtagttccctcttctccagtaccttattctataaactcccaacatgttagcactgtaagactctcagcttagtgacagtgacattgcctcatttctggaggtctctacctctctccgtgtggtcaagaaactgccattgggcagaaaacacaagtgtgtatgagatttgcctccagtgttttcctgttctcaaatatcacagtcctgttctgcctgtgttccaatctctgaaaacagttttctcaaatattctatccagtttcagttttctcgttggtcatggtgggagggcaagtccatcttggctggaagaggaagtccttctgcgtctttttctctttgtccttccacatggttttgcattgtggattttctaaacttgccgtataagtaagcatgtgcctatttgtgaagggaaaga

SEQ ID NO: 30318 - DNA, 1552 bp, Homo sapiens
  misc_feature (1)..(1): n is a, c, g, or t
ngcgtcatacacctgcacccgggaggaaaggcgaggctctgcatctagatttacctcgttctcttttgtctccgcttttttttcacatttccttgcgaccctggcccttgagcgacaaaaaggggaagccaaggctggcccgaggaacggagagggcacatggcctagccacaagtggagcttctgctccgcccgaagggatgcgctggagcggcctcttccttctgccacggtctttctttgccaactagtaggtggagactggacctcagaagagggagtgggtgccccgagaactcacagctagcggacagtggaaagggcaggagccggaccaaggtgaggacagtggaactgaaggccgctggttacctctcctgccctccgctggccacagtggagaagacagcccctccctcctgctctgacctgacagtgttcatccatcgccctgtattagcgaagaacaacatcaagctggctagcaaggaactgtatacagggtccagctgggtatcacactggatctcacccaaagcttagatgtgatccagctcagtatcacaaagcagaacgaaaaggatgtgtttgggctgagaggccatacattggctccggcatgacgggtgacttcttccgagtctggcttctgcagcacacagggcttcgccagcacccagctcctgcagcatgggcagctcctgtgacagcaggcgcccgcagcctgcaaagcgtctccagtgccgccgcctcagtgaacctcaaccagcggcacctagcagctttctctgccaccctcttcaggtagttctgtagcagcgcgtttctcatgagacacttccctgtgagcagctttttctacccttgaggatggatttccagcaaattctgcccatgtggtaccacagccacttctctgccattcagtgaaactgccgttgtgccctcttcaaggtctggatctaagcccagggaccaggaaacctcttgcttgagtgctggaactcaggccagaaggtatggctgctgctatgtgctgtgaccagagaatcagagttctctttacttcttaccagccaacctcttgaaaatgcctttttgttttttgtttttttttgagacggagtctcgctctgttgcccaggcagtgcagtggctcactgcaacctccgcctcctgagttcaagtgattctcctgcctcagcctcacaagtaggtgggattacaggcatgtgccaccacgcccagctaattttgtatttttagtagtgacggggtttctccatgttggtcaggttggtctcaaactctcgacctcaggtgatccacctgtctcagcctcccaaagtgctgggattacagacgttagccagagcgcccagtctaagccctttatagcttaattctatatattaaattttcccagttcaaattactgtgtgcttcccttctcctgattgggaccttgcttgatacaaaattagtacaaggagtggtctcaagagatagatgcacaaagaagaggatatggggacggatttgggtatttggg

SEQ ID NO: 30319 - DNA, 1132 bp, Homo sapiens
  misc_feature (1)..(1): n is a, c, g, or t
ngcgtcatacacctgcacccgggaggaaaggcgaggctctgcatctagatttacctcgttctcttttgtctccgcttttttttcacatttccttgcgaccctggcccttgagcgacaaaaaggggaagccaaggctggcccgaggaacggagagggcacatggcctagccacaagtggagcttctgctccgcccgaagggatgcgctggagcggcctcttccttctgccacggtctttctttgccaactagtagagatggggtttcaccaggttagccaggctggtcttgaactccagacctcaagggatccgcctgcctcagctttccaaagtgctgggattacaggtggagactggacctcagaagagggagtgggtgccccgagaactcacagctagcggacagtggaaagggcaggagccggaccaaggctccggcatgacgggtgacttcttccgagtctggcttctgcagcacacagggcttcgccagcacccagctcctgcagcatgggcagctcctgtgacagcaggcgcccgcagcctgcaaagcgtctccagtgccgccgcctcagtgaacctcaaccagcggcacctagcagctttctctgccaccctcttcaggtctggatctaagcccagggaccaggaaacctcttgcttgagtgctggaactcaggccagaaggcaggaagcccgcctgaccccatgtctcaggctgccagaggagcgtgcgatgaggaaggctggactgtcttcacaggacaccagggagaagcctcaagccactgccccctgacaagtcgcagctctccagcctgtctcctcactcccctcccctccacatgggggggttggggtgggggcggggaaggttcggggcaggggtcatttcagctactgggcaccagtctcctcctcatgtttatcctgttccctttgcttgaaaggttcgtactccagatccttgtaaaaccgcttctcaccctttgagtctcagcttaaatgtcccctccttggaggggtcttccctgacaatgaagctccgaccgtcctctcctgttttacccagttcatttctttctggcatttgtaactacttgaagttaaagtgtgtgccatgtatgtgtc

SEQ ID NO: 30320 - DNA, 915 bp, Homo sapiens
  misc_feature (1)..(1): n is a, c, g, or t
ngcgtcatacacctgcacccgggaggaaaggcgaggctctgcatctagatttacctcgttctcttttgtctccgcttttttttcacatttccttgcgaccctggcccttgagcgacaaaaaggggaagccaaggctggcccgaggaacggagagggcacatggcctagccacaagtggagcttctgctccgcccgaagggatgcgctggagcggcctcttccttctgccacggtctttctttgccaactagtaggtgagggccgaaaggccgcgggccgtggagctcgggccggggagactcttttctagcctcttgggtcccgctcctcccaattccctggagaggcgtcgagcttgctgggaagtgccctcgggtaaggggcgcggagcctcctgcggcgatcctctgtcttcgggtcgccttagcaggacgcggcaagcgggacactgacctggccggagtcccgcgttctctcaccagctgctttgtccacgagttgctgctgggcgtcaggggtcccacggcccggagggatctagagcaggggggctcggggtcctttccataccctcggatcctctcccactctctccacgcctcgacccggagatgatttcaggctccagatctctttcataaatggaaagagtttttttggtttgttttgtcttaattatgtaggtgttgcatgcttggaagagaaaatttagaaaattaattggaaaaccataaagatagctttctcgtgatagccacaaggcttgctccctcattctgctcatatgtcaccccctcaaggaggccttccccagctctgtaaacaacctgtgctcggcgttaacttttctccctaatgtttatcactacctgacatatacgtgtttcccacgactcaacgataagtgttcatgag

SEQ ID NO: 30321 - DNA, 320 bp, Homo sapiens
cgtgcgaatctcctcctcctgttacttttaatctttgtgtctgtaaactaaagtgggtttctagttgataacatataggtgggctctagctcgattaattcactcgtactaatctctgtcttttaattggtatattgaaccacagtgattatggatatagtctggacttaattctatatattaaattttcccagttcaaattactgtgtgcttcccttctcctgattgggaccttgcttgatacaaaattagtacaaggagtggtctcaagagatagatgcacaaagaagaggatatggggacggatttgggtatttggg

SEQ ID NO: 30322 - DNA, 2581 bp, Homo sapiens
  misc_feature (1)..(1): n is a, c, g, or t
ngcgtcatacacctgcacccgggaggaaaggcgaggctctgcatctagatttacctcgttctcttttgtctccgcttttttttcacatttccttgcgaccctggcccttgagcgacaaaaaggggaagccaaggctggcccgaggaacggagagggcacatggcctagccacaagtggagcttctgctccgcccgaagggatgcgctggagcggcctcttccttctgccacggtctttctttgccaactagtaggtggagactggacctcagaagagggagtgggtgccccgagaactcacagctagcggacagtggaaagggcaggagccggaccaaggtgaggacagtggaactgaaggccgctggttacctctcctgccctccgctggccacagtggagaagacagcccctccctcctgctctgacctgacagtgttcatccatcgccctgtattagcgaagaacaacatcaagctggctagcaaggaactgtatacagggtccagctgggtatcacactggatctcacccaaagcttagatgtgatccagctcagtatcacaaagcagaacgaaaaggatgtgtttgggctgagaggccatacattggtaagtggcacatgaactgtattttctattgagcattgctggtatatggcaaatttgcataaaattatattgaaattgactaccggattgcactttcttgttccttctgataatttttcacgtgttctttttctttcttactttagatggagtctcgctctgtcgcccaggctggagtccagtggcgcgatctcggttcactgcaagctccgcctcccgagttcatgccattctcctgcctcagcctcctgagtagctgggactacaggcacctgccaccacggctggctaatttttttttttttttttttgaaatggagtcttgactccagtctggatgacagagcaatactccgtctcacaaaaaagaaaatatagtctataaataatgaagaaagtaaagtgaacctgggaggtggaggttatagtgagctgagatcatggcactgcacttcagcctgggcagcagcaagactccgtctcaaaaaaaaaaaaaaaagaaatatgcgagctgctaagctaggcagttctggctcaagatctctcatgatactgcagacaccacaccaacgaggaccccagtcctctggcactggaggacccacttagaaggcggatgactcacgtggctcttggcaggaagacctcagttcctccccacataggcctccctataggactgcttgagtgtcccgtttaccaaatgatctaaatatgttccggttttgattggctgctctgcaatgtgggccgttatctagctgattcggtggggcctgaagtgtcagttcctgccgcagggatgttatatggaacctttggcaggccgctacagacgaatcataatataaacctgtgctagttattgattacgtcccagctcctgcgttgcctgctctgtgaaatggttctggccctttagtttttcctttaccagctggcatgatcttaagctttgtcagtagagggcgctggagagacattgcaggagacgagtttcccttcctgcttctggtgtgttctctctaggctccggcatgacgggtgacttcttccgagtctggcttctgcagcacacagggcttcgccagcacccagctcctgcagcatgggcagctcctgtgacagcaggcgcccgcagcctgcaaagcgtctccagtgccgccgcctcagtgaacctcaaccagcggcacctagcagctttctctgccaccctcttcaggtagttctgtagcagcgcgtttctcatgagacacttccctgtgagcagctttttctacccttgaggatggatttccagcaaattctgcccatgtggtaccacagccacttctctgccattcagtgaaactgccgttgtgccctcttcaaggtctggatctaagcccagggaccaggaaacctcttgcttgagtgctggaactcaggccagaaggtatggctgctgctatgtgctgtgaccagagaatcagagttctctttacttcttaccagccaacctcttgaaaatgcctttttgttttttgtttttttttgagacggagtctcgctctgttgcccaggcagtgcagtggctcactgcaacctccgcctcctgagttcaagtgattctcctgcctcagcctcacaagtaggtgggattacaggcatgtgccaccacgcccagctaattttgtatttttagtagtgacggggtttctccatgttggtcaggttggtctcaaactctcgacctcaggtgatccacctgtctcagcctcccaaagtgctgggattacagacgttagccagagcgcccagtctaagccctttatagcttaattctatatattaaattttcccagttcaaattactgtgtgcttcccttctcctgattgggaccttgcttgatacaaaattagtacaaggagtggtctcaagagatagatgcacaaagaagaggatatggggacggatttgggtatttggg

SEQ ID NO: 30323 - DNA, 2927 bp, Homo sapiens
  misc_feature (1)..(1): n is a, c, g, or t
ngcgtcatacacctgcacccgggaggaaaggcgaggctctgcatctagatttacctcgttctcttttgtctccgcttttttttcacatttccttgcgaccctggcccttgagcgacaaaaaggggaagccaaggctggcccgaggaacggagagggcacatggcctagccacaagtggagcttctgctccgcccgaagggatgcgctggagcggcctcttccttctgccacggtctttctttgccaactagtagatttggacatttacagtgttcagccgttgttgtggcattccaattcaattgggaaacagcttgatgtagcgtccccataaggtccacagtaattaaattttttttttttttttttggtgcggtagtgcaatttcatggctcactgcaacctccacctcccaggttcaagcgatcctcccatctcagcctccctagtagctgggattacaggtgcacgccaccacaccaggctaatttttggtatttttagtagagatggggtttcaccaggttagccaggctggtcttgaactccagacctcaagggatccgcctgcctcagctttccaaagtgctgggattacaggtggagactggacctcagaagagggagtgggtgccccgagaactcacagctagcggacagtggaaagggcaggagccggaccaaggtgaggacagtggaactgaaggccgctggttacctctcctgccctccgctggccacagtggagaagacagcccctccctcctgctctgacctgacagtgttcatccatcgccctgtattagcgaagaacaacatcaagctggctagcaaggaactgtatacagggtccagctgggtatcacactggatctcacccaaagcttagatgtgatccagctcagtatcacaaagcagaacgaaaaggatgtgtttgggctgagaggccatacattggtaagtggcacatgaactgtattttctattgagcattgctggtatatggcaaatttgcataaaattatattgaaattgactaccggattgcactttcttgttccttctgataatttttcacgtgttctttttctttcttactttagatggagtctcgctctgtcgcccaggctggagtccagtggcgcgatctcggttcactgcaagctccgcctcccgagttcatgccattctcctgcctcagcctcctgagtagctgggactacaggcacctgccaccacggctggctaatttttttttttttttttttgaaatggagtcttgactccagtctggatgacagagcaatactccgtctcacaaaaaagaaaatatagtctataaataatgaagaaagtaaagtgaacctgggaggtggaggttatagtgagctgagatcatggcactgcacttcagcctgggcagcagcaagactccgtctcaaaaaaaaaaaaaaaagaaatatgcgagctgctaagctaggcagttctggctcaagatctctcatgatactgcagacaccacaccaacgaggaccccagtcctctggcactggaggacccacttagaaggcggatgactcacgtggctcttggcaggaagacctcagttcctccccacataggcctccctataggactgcttgagtgtcccgtttaccaaatgatctaaatatgttccggttttgattggctgctctgcaatgtgggccgttatctagctgattcggtggggcctgaagtgtcagttcctgccgcagggatgttatatggaacctttggcaggccgctacagacgaatcataatataaacctgtgctagttattgattacgtcccagctcctgcgttgcctgctctgtgaaatggttctggccctttagtttttcctttaccagctggcatgatcttaagctttgtcagtagagggcgctggagagacattgcaggagacgagtttcccttcctgcttctggtgtgttctctctaggctccggcatgacgggtgacttcttccgagtctggcttctgcagcacacagggcttcgccagcacccagctcctgcagcatgggcagctcctgtgacagcaggcgcccgcagcctgcaaagcgtctccagtgccgccgcctcagtgaacctcaaccagcggcacctagcagctttctctgccaccctcttcaggtagttctgtagcagcgcgtttctcatgagacacttccctgtgagcagctttttctacccttgaggatggatttccagcaaattctgcccatgtggtaccacagccacttctctgccattcagtgaaactgccgttgtgccctcttcaaggtctggatctaagcccagggaccaggaaacctcttgcttgagtgctggaactcaggccagaaggtatggctgctgctatgtgctgtgaccagagaatcagagttctctttacttcttaccagccaacctcttgaaaatgcctttttgttttttgtttttttttgagacggagtctcgctctgttgcccaggcagtgcagtggctcactgcaacctccgcctcctgagttcaagtgattctcctgcctcagcctcacaagtaggtgggattacaggcatgtgccaccacgcccagctaattttgtatttttagtagtgacggggtttctccatgttggtcaggttggtctcaaactctcgacctcaggtgatccacctgtctcagcctcccaaagtgctgggattacagacgttagccagagcgcccagtctaagccctttatagcttaattctatatattaaattttcccagttcaaattactgtgtgcttcccttctcctgattgggaccttgcttgatacaaaattagtacaaggagtggtctcaagagatagatgcacaaagaagaggatatggggacggatttgggtatttggg

SEQ ID NO: 30324 - DNA, 2442 bp, Homo sapiens
tttctaagagttacagaatagcaactgcaggaaggaacttgtgcccttaggactgaggaagtaaaaaggagggaaacttggaaacacgaaagagcccttcccctttcaattcaaggtggagactggacctcagaagagggagtgggtgccccgagaactcacagctagcggacagtggaaagggcaggagccggaccaaggtgaggacagtggaactgaaggccgctggttacctctcctgccctccgctggccacagtggagaagacagcccctccctcctgctctgacctgacagtgttcatccatcgccctgtattagcgaagaacaacatcaagctggctagcaaggaactgtatacagggtccagctgggtatcacactggatctcacccaaagcttagatgtgatccagctcagtatcacaaagcagaacgaaaaggatgtgtttgggctgagaggccatacattggtaagtggcacatgaactgtattttctattgagcattgctggtatatggcaaatttgcataaaattatattgaaattgactaccggattgcactttcttgttccttctgataatttttcacgtgttctttttctttcttactttagatggagtctcgctctgtcgcccaggctggagtccagtggcgcgatctcggttcactgcaagctccgcctcccgagttcatgccattctcctgcctcagcctcctgagtagctgggactacaggcacctgccaccacggctggctaatttttttttttttttttttgaaatggagtcttgactccagtctggatgacagagcaatactccgtctcacaaaaaagaaaatatagtctataaataatgaagaaagtaaagtgaacctgggaggtggaggttatagtgagctgagatcatggcactgcacttcagcctgggcagcagcaagactccgtctcaaaaaaaaaaaaaaaagaaatatgcgagctgctaagctaggcagttctggctcaagatctctcatgatactgcagacaccacaccaacgaggaccccagtcctctggcactggaggacccacttagaaggcggatgactcacgtggctcttggcaggaagacctcagttcctccccacataggcctccctataggactgcttgagtgtcccgtttaccaaatgatctaaatatgttccggttttgattggctgctctgcaatgtgggccgttatctagctgattcggtggggcctgaagtgtcagttcctgccgcagggatgttatatggaacctttggcaggccgctacagacgaatcataatataaacctgtgctagttattgattacgtcccagctcctgcgttgcctgctctgtgaaatggttctggccctttagtttttcctttaccagctggcatgatcttaagctttgtcagtagagggcgctggagagacattgcaggagacgagtttcccttcctgcttctggtgtgttctctctaggctccggcatgacgggtgacttcttccgagtctggcttctgcagcacacagggcttcgccagcacccagctcctgcagcatgggcagctcctgtgacagcaggcgcccgcagcctgcaaagcgtctccagtgccgccgcctcagtgaacctcaaccagcggcacctagcagctttctctgccaccctcttcaggtagttctgtagcagcgcgtttctcatgagacacttccctgtgagcagctttttctacccttgaggatggatttccagcaaattctgcccatgtggtaccacagccacttctctgccattcagtgaaactgccgttgtgccctcttcaaggtctggatctaagcccagggaccaggaaacctcttgcttgagtgctggaactcaggccagaaggtatggctgctgctatgtgctgtgaccagagaatcagagttctctttacttcttaccagccaacctcttgaaaatgcctttttgttttttgtttttttttgagacggagtctcgctctgttgcccaggcagtgcagtggctcactgcaacctccgcctcctgagttcaagtgattctcctgcctcagcctcacaagtaggtgggattacaggcatgtgccaccacgcccagctaattttgtatttttagtagtgacggggtttctccatgttggtcaggttggtctcaaactctcgacctcaggtgatccacctgtctcagcctcccaaagtgctgggattacagacgttagccagagcgcccagtctaagccctttatagcttaattctatatattaaattttcccagttcaaattactgtgtgcttcccttctcctgattgggaccttgcttgatacaaaattagtacaaggagtggtctcaagagatagatgcacaaagaagaggatatggggacggatttgggtatttggg

SEQ ID NO: 30325 - DNA, 2764 bp, Homo sapiens
tgtacatgtttccaaactgtcctccagaaagaatgtaatgctttgaacttccacttgagaatcaaatgtttaccttcctctgttcctccagatttggacatttacagtgttcagccgttgttgtggcattccaattcaattgggaaacagcttgatgtagcgtccccataaggtccacagtaattaaattttttttttttttttttggtgcggtagtgcaatttcatggctcactgcaacctccacctcccaggttcaagcgatcctcccatctcagcctccctagtagctgggattacaggtgcacgccaccacaccaggctaatttttggtatttttagtagagatggggtttcaccaggttagccaggctggtcttgaactccagacctcaagggatccgcctgcctcagctttccaaagtgctgggattacaggtggagactggacctcagaagagggagtgggtgccccgagaactcacagctagcggacagtggaaagggcaggagccggaccaaggtgaggacagtggaactgaaggccgctggttacctctcctgccctccgctggccacagtggagaagacagcccctccctcctgctctgacctgacagtgttcatccatcgccctgtattagcgaagaacaacatcaagctggctagcaaggaactgtatacagggtccagctgggtatcacactggatctcacccaaagcttagatgtgatccagctcagtatcacaaagcagaacgaaaaggatgtgtttgggctgagaggccatacattggtaagtggcacatgaactgtattttctattgagcattgctggtatatggcaaatttgcataaaattatattgaaattgactaccggattgcactttcttgttccttctgataatttttcacgtgttctttttctttcttactttagatggagtctcgctctgtcgcccaggctggagtccagtggcgcgatctcggttcactgcaagctccgcctcccgagttcatgccattctcctgcctcagcctcctgagtagctgggactacaggcacctgccaccacggctggctaatttttttttttttttttttgaaatggagtcttgactccagtctggatgacagagcaatactccgtctcacaaaaaagaaaatatagtctataaataatgaagaaagtaaagtgaacctgggaggtggaggttatagtgagctgagatcatggcactgcacttcagcctgggcagcagcaagactccgtctcaaaaaaaaaaaaaaaagaaatatgcgagctgctaagctaggcagttctggctcaagatctctcatgatactgcagacaccacaccaacgaggaccccagtcctctggcactggaggacccacttagaaggcggatgactcacgtggctcttggcaggaagacctcagttcctccccacataggcctccctataggactgcttgagtgtcccgtttaccaaatgatctaaatatgttccggttttgattggctgctctgcaatgtgggccgttatctagctgattcggtggggcctgaagtgtcagttcctgccgcagggatgttatatggaacctttggcaggccgctacagacgaatcataatataaacctgtgctagttattgattacgtcccagctcctgcgttgcctgctctgtgaaatggttctggccctttagtttttcctttaccagctggcatgatcttaagctttgtcagtagagggcgctggagagacattgcaggagacgagtttcccttcctgcttctggtgtgttctctctaggctccggcatgacgggtgacttcttccgagtctggcttctgcagcacacagggcttcgccagcacccagctcctgcagcatgggcagctcctgtgacagcaggcgcccgcagcctgcaaagcgtctccagtgccgccgcctcagtgaacctcaaccagcggcacctagcagctttctctgccaccctcttcaggtagttctgtagcagcgcgtttctcatgagacacttccctgtgagcagctttttctacccttgaggatggatttccagcaaattctgcccatgtggtaccacagccacttctctgccattcagtgaaactgccgttgtgccctcttcaaggtctggatctaagcccagggaccaggaaacctcttgcttgagtgctggaactcaggccagaaggtatggctgctgctatgtgctgtgaccagagaatcagagttctctttacttcttaccagccaacctcttgaaaatgcctttttgttttttgtttttttttgagacggagtctcgctctgttgcccaggcagtgcagtggctcactgcaacctccgcctcctgagttcaagtgattctcctgcctcagcctcacaagtaggtgggattacaggcatgtgccaccacgcccagctaattttgtatttttagtagtgacggggtttctccatgttggtcaggttggtctcaaactctcgacctcaggtgatccacctgtctcagcctcccaaagtgctgggattacagacgttagccagagcgcccagtctaagccctttatagcttaattctatatattaaattttcccagttcaaattactgtgtgcttcccttctcctgattgggaccttgcttgatacaaaattagtacaaggagtggtctcaagagatagatgcacaaagaagaggatatggggacggatttgggtatttggg

SEQ ID NO: 30326 - DNA, 2490 bp, Homo sapiens
  misc_feature (1)..(1): n is a, c, g, or t
ngcgtcatacacctgcacccgggaggaaaggcgaggctctgcatctagatttacctcgttctcttttgtctccgcttttttttcacatttccttgcgaccctggcccttgagcgacaaaaaggggaagccaaggctggcccgaggaacggagagggcacatggcctagccacaagtggagcttctgctccgcccgaagggatgcgctggagcggcctcttccttctgccacggtctttctttgccaactagtaggtggagactggacctcagaagagggagtgggtgccccgagaactcacagctagcggacagtggaaagggcaggagccggaccaaggtgaggacagtggaactgaaggccgctggttacctctcctgccctccgctggccacagtggagaagacagcccctccctcctgctctgacctgacagtgttcatccatcgccctgtattagcgaagaacaacatcaagctggctagcaaggaactgtatacagggtccagctgggtatcacactggatctcacccaaagcttagatgtgatccagctcagtatcacaaagcagaacgaaaaggatgtgtttgggctgagaggccatacattggtaagtggcacatgaactgtattttctattgagcattgctggtatatggcaaatttgcataaaattatattgaaattgactaccggattgcactttcttgttccttctgataatttttcacgtgttctttttctttcttactttagatggagtctcgctctgtcgcccaggctggagtccagtggcgcgatctcggttcactgcaagctccgcctcccgagttcatgccattctcctgcctcagcctcctgagtagctgggactacaggcacctgccaccacggctggctaatttttttttttttttttttgaaatggagtcttgactccagtctggatgacagagcaatactccgtctcacaaaaaagaaaatatagtctataaataatgaagaaagtaaagtgaacctgggaggtggaggttatagtgagctgagatcatggcactgcacttcagcctgggcagcagcaagactccgtctcaaaaaaaaaaaaaaaagaaatatgcgagctgctaagctaggcagttctggctcaagatctctcatgatactgcagacaccacaccaacgaggaccccagtcctctggcactggaggacccacttagaaggcggatgactcacgtggctcttggcaggaagacctcagttcctccccacataggcctccctataggactgcttgagtgtcccgtttaccaaatgatctaaatatgttccggttttgattggctgctctgcaatgtgggccgttatctagctgattcggtggggcctgaagtgtcagttcctgccgcagggatgttatatggaacctttggcaggccgctacagacgaatcataatataaacctgtgctagttattgattacgtcccagctcctgcgttgcctgctctgtgaaatggttctggccctttagtttttcctttaccagctggcatgatcttaagctttgtcagtagagggcgctggagagacattgcaggagacgagtttcccttcctgcttctggtgtgttctctctaggctccggcatgacgggtgacttcttccgagtctggcttctgcagcacacagggcttcgccagcacccagctcctgcagcatgggcagctcctgtgacagcaggcgcccgcagcctgcaaagcgtctccagtgccgccgcctcagtgaacctcaaccagcggcacctagcagctttctctgccaccctcttcaggtagttctgtagcagcgcgtttctcatgagacacttccctgtgagcagctttttctacccttgaggatggatttccagcaaattctgcccatgtggtaccacagccacttctctgccattcagtgaaactgccgttgtgccctcttcaaggtctggatctaagcccagggaccaggaaacctcttgcttgagtgctggaactcaggccagaaggcaggaagcccgcctgaccccatgtctcaggctgccagaggagcgtgcgatgaggaaggctggactgtcttcacaggacaccagggagaagcctcaagccactgccccctgacaagtcgcagctctccagcctgtctcctcactcccctcccctccacatgggggggttggggtgggggcggggaaggttcggggcaggggtcatttcagctactgggcaccagtctcctcctcatgtttatcctgttccctttgcttgaaaggttcgtactccagatccttgtaaaaccgcttctcaccctttgagtctcagcttaaatgtcccctccttggaggggtcttccctgacaatgaagctccgaccgtcctctcctgttttacccagttcatttctttctggcatttgtaactacttgaagttaaagtgtgtgccatgtatgtgtc

SEQ ID NO: 30327 - DNA, 2277 bp, Homo sapiens
  misc_feature (1)..(1): n is a, c, g, or t
ngcgtcatacacctgcacccgggaggaaaggcgaggctctgcatctagatttacctcgttctcttttgtctccgcttttttttcacatttccttgcgaccctggcccttgagcgacaaaaaggggaagccaaggctggcccgaggaacggagagggcacatggcctagccacaagtggagcttctgctccgcccgaagggatgcgctggagcggcctcttccttctgccacggtctttctttgccaactagtaggtggagactggacctcagaagagggagtgggtgccccgagaactcacagctagcggacagtggaaagggcaggagccggaccaaggtgaggacagtggaactgaaggccgctggttacctctcctgccctccgctggccacagtggagaagacagcccctccctcctgctctgacctgacagtgttcatccatcgccctgtattagcgaagaacaacatcaagctggctagcaaggaactgtatacagggtccagctgggtatcacactggatctcacccaaagcttagatgtgatccagctcagtatcacaaagcagaacgaaaaggatgtgtttgggctgagaggccatacattggtaagtggcacatgaactgtattttctattgagcattgctggtatatggcaaatttgcataaaattatattgaaattgactaccggattgcactttcttgttccttctgataatttttcacgtgttctttttctttcttactttagatggagtctcgctctgtcgcccaggctggagtccagtggcgcgatctcggttcactgcaagctccgcctcccgagttcatgccattctcctgcctcagcctcctgagtagctgggactacaggcacctgccaccacggctggctaatttttttttttttttttttgaaatggagtcttgactccagtctggatgacagagcaatactccgtctcacaaaaaagaaaatatagtctataaataatgaagaaagtaaagtgaacctgggaggtggaggttatagtgagctgagatcatggcactgcacttcagcctgggcagcagcaagactccgtctcaaaaaaaaaaaaaaaagaaatatgcgagctgctaagctaggcagttctggctcaagatctctcatgatactgcagacaccacaccaacgaggaccccagtcctctggcactggaggacccacttagaaggcggatgactcacgtggctcttggcaggaagacctcagttcctccccacataggcctccctataggactgcttgagtgtcccgtttaccaaatgatctaaatatgttccggttttgattggctgctctgcaatgtgggccgttatctagctgattcggtggggcctgaagtgtcagttcctgccgcagggatgttatatggaacctttggcaggccgctacagacgaatcataatataaacctgtgctagttattgattacgtcccagctcctgcgttgcctgctctgtgaaatggttctggccctttagtttttcctttaccagctggcatgatcttaagctttgtcagtagagggcgctggagagacattgcaggagacgagtttcccttcctgcttctggtgtgttctctctaggctccggcatgacgggtgacttcttccgagtctggcttctgcagcacacagggcttcgccagcacccagctcctgcagcatgggcagctcctgtgacagcaggcgcccgcagcctgcaaagcgtctccagtgccgccgcctcagtgaacctcaaccagcggcacctagcagctttctctgccaccctcttcaggcaggaagcccgcctgaccccatgtctcaggctgccagaggagcgtgcgatgaggaaggctggactgtcttcacaggacaccagggagaagcctcaagccactgccccctgacaagtcgcagctctccagcctgtctcctcactcccctcccctccacatgggggggttggggtgggggcggggaaggttcggggcaggggtcatttcagctactgggcaccagtctcctcctcatgtttatcctgttccctttgcttgaaaggttcgtactccagatccttgtaaaaccgcttctcaccctttgagtctcagcttaaatgtcccctccttggaggggtcttccctgacaatgaagctccgaccgtcctctcctgttttacccagttcatttctttctggcatttgtaactacttgaagttaaagtgtgtgccatgtatgtgtc

SEQ ID NO: 30328 - DNA, 855 bp, Homo sapiens
ctaacctggccttcttcaaatggcagaagagttaacagcagcaaaagaaggcattgatgggaggcaaacaaaagttggagcatttgttgaaagcagacttgccttacaggatacgtcatggaacagagggcaacctgcctcctggaaatgtggagtgtctagggagtcacagctgagatcttccttggattaaaggctgcgggtgtcacaaacaggatgctgtaacaacaccataaactttcaaacaactctatttcctacggttctggaggctggaagtccacaatcaaagtgtcatgttgtcaggttgtggtgagggccctcttttgggtgtagattgctaacttttctgtatgtgttcacatggcagaaagaaattgagctagctcttggatcctttcttataagggcaccaatcccaatacagaggcttcactctcatgacataattgtctcccaaagactctacctccaaatattatcaatcaatcacattaggggatagattttaacacatgattttggggggaacacattcagtccataacatttcttgagtcttcttctaggacccataggttattttaaaagtggcttgttcagttccaagtgtttgaagattttttttttctgttatctttaacttactgatttctagatagaccccattgtgctcagagaacactccttatgtgatttcaattattttaaatttgttgagattttatgacttagtatgtcatctgtcttggtgtgtattctgtgggggggatggggggtgcttgaaaaacgggtattctgctattatagaatgtcaaaatatcaactgtaataaacaagaaaaataatcctagt

SEQ ID NO: 30329 - DNA, 1088 bp, Homo sapiens
tacacactaaaactcccacagaaagggggaaaattagaaaaggggtgatataatttgactctgtgtcaccacccaaatctcatcttgaattgtaatccccgtaatttctcacctggcaagagtgggaccaggtggagacaattggatcatgggggcagttttccccatgctcttctcgtgataatgattgagtctcatgggatctgatgattctataagtgtctggcttttctcctacttgcactcactccatcctgccaccctgcgaggaaggtgcctgcttcttctttgccttccgccgtgagtgtgagtctcctgaggcctccccagcaatgtggaactgatacgtcatggaacagagggcaacctgcctcctggaaatgtggagtgtctagggagtcacagctgagatcttccttggattaaaggctgcgggtgtcacaaacaggatgctgtaacaacaccataaactttcaaacaactctatttcctacggttctggaggctggaagtccacaatcaaagtgtcatgttgtcaggttgtggtgagggccctcttttgggtgtagattgctaacttttctgtatgtgttcacatggcagaaagaaattgagctagctcttggatcctttcttataagggcaccaatcccaatacagaggcttcactctcatgacataattgtctcccaaagactctacctccaaatattatcaatcaatcacattaggggatagattttaacacatgattttggggggaacacattcagtccataacatttcttgagtcttcttctaggacccataggttattttaaaagtggcttgttcagttccaagtgtttgaagattttttttttctgttatctttaacttactgatttctagatagaccccattgtgctcagagaacactccttatgtgatttcaattattttaaatttgttgagattttatgacttagtatgtcatctgtcttggtgtgtattctgtgggggggatggggggtgcttgaaaaacgggtattctgctattatagaatgtcaaaatatcaactgtaataaacaagaaaaataatcctagt

SEQ ID NO: 30330 - DNA, 366 bp, Homo sapiens
gtcaaggtgggaggactgcttgggcccaggagttcgagtccagcctgggcaacatagggagatctcgtctctacagaaaatttttaaatttagctgggtgtgtggtgtgcacctgtggccccagctaactacttgggaggcagaggcaggaggatcacttgagcctaggaggatgaagctgacttctgagtttaaagtgttcggagaattgtgcaggtgtaatttatctgtgaccaacaagaagagcaaccagttactattagcaaaagggagatggaagactaataggtgccgctacactccagtctgggtgacaaagttagaccgtatctctaaataagtaaaaaataaatataccattaaatc

SEQ ID NO: 30331 - DNA, 506 bp, Homo sapiens
gaggggcgggctcaaaggccaggaacctcaagtcacttgagtctggcagcgtcaagggacaccccatgctgggtgtgccgtcttctctttgcatagaatcttgagctgatgatggttttgtgggttttttattaagagaaaaggcttactgaacgctttatatgcatcaattcatgagtccgtaccacagcctatgagatgttacactcatttcacagatggagaaactgaggccagaagaggtgagcttacctgcccaaggcatctagtgaccagaggggcagccagggtgtgatcctgcctcatctgacttcgtagttgggtacacatttaacttccgccttcctgtgtgtgttttccaagagcatcattaaaaagttttggccgggtgcggtggctcacgcgtgtaatcccagcactttgggaggccgacgtgagtagatcacctgaggtcaggatttcgagaccagcctggccaacatggcaaaactctgtctctactaaaa

SEQ ID NO: 30332 - DNA, 483 bp, Homo sapiens
gaggcttgctctgttgcccaggctggagtgcaatgtcacgatcttggcttactgcaacctctgactcccaggttcaagcgattctcatgcctcagcctcctgagtagcggggatatttgtgtgtgtgtgtgcgcgcatttggttttccatctgtgtcctctactaaaaagtttcattaaagcagggattctactgtgtctactcagtagcttcgaggtctatcctataatgggcactcaggaaatatttgttgattgggtgtagttttgtgaatatgctcatgaccatgtggtcattctaaagggctttattatttgtgagtggagcctgtatatttttccagcagcctgcctcccttcgtacagggccctgagaaatggaataatcccattactagtgaatgaacaatcagtttctatgtctatatcccactccaaactgaacctgaaggcagattctatgtccttcttcttaatagttatt

SEQ ID NO: 30333 - DNA, 451 bp, Homo sapiens
agtttcagaaattgtgttcctttggactgtagttcttcccatcagtatcaactcagatctgggcaagagggggcctagctctgagctgctccccatcatatagaggcaaagatctcttgaaagcaatgggtatgccccaccctagagtctgaacccatcccttttgggatcacattctgtttataaaagattccccaaattccctttccaagcagtcttcaggacatctaggagcctgcaaggatttcttcctggggcagtcaagcagactgcattgcccatgtgtacactctaagcctgagggatggccaagaaatgactctctgcaaggagtgggaatgagctgcagcgtgctggggttgggatgctcatgtgtgtgcaccaccacctcttcccaaagcaagtcacagctttgacaacagtaaaataaattttcaacttgcactgtccg

SEQ ID NO: 30334 - DNA, 756 bp, Homo sapiens
ataatattttatactttttatttccccaaatggctaacatatatagttggtgcttaaaaaatatttgagtaacttttctttaaccccatcaaccagattctaggaagcattttgacttggttctcagaactcggaggctggaagcttgttctccaatgcgtagggcagtacaaggaggcctcagcctttagtaagtaagaaggtaggtttctcttggtgccctgggaaaattttggttaacagatgtttggggtacttatttgtttggctctgtagccttagaccaggtctttgaataaatatttccatcactgtttccttttctcagtggcgaaaaatgccagtgttttctgagcaatcccctctcctttagagtttagggtgagccagttagtgcccagacgcaaatctgtgtcttaggggaagagccatccaataggagagtaatgtttagagcctgggctctggggtcagattgggttcaaattctgcctctgccacctaatagctctgtaaccttggacaagttacttgtccgtgccctggttcctcttccgtaaaattgaggcagtggtagcattatctcatggggctgtaacaaagcctaaatgccaaatgtaaagtgcctagaatagtacttcctgcctccttgctgaacaaaatgtttgcagttattgttttgtttattattctcttgtaaaccaagtagtgtttagttccttttttttttttccagacagagtctcactgtcgccc

SEQ ID NO: 30335 - DNA, 1374 bp, Homo sapiens
taaaaaagcacctttttttgttgtttccccttaataaaagaggtttctaatttatgtttctctaagatttccttgggttgtatttagaaacacaaatagttttataatcaggattgcatttgtgctgggtaaaagaggagagctgtgctttctaccccaaagttgttggtaatggagccggtctgcccttcctacaaactcaagaggctcattgttcaaggtgtaacaacatttaattgcatgtcctctaacgctttgaaacctttagagggaagatcctcattttttacaattttgttccttttcatcatagaaaacatgtttaagataaaatacaaactttacctaccccaaattcataaagtacatttagtgctgtatagcactaaaacttagagatacagacactgtacttactttttaagaattagagacagtaactccaaaaataattgtccttttttctttctttttttttttttacaataaggctcttgaaaattgtcattacttgtgttttcctatacattcatctgtgtgaaagcctttttcttctttgatttaaaaaaattatacagttaatggtttagaacttagaactacttagaattaatgctaaagtgtcaggaagaaattaatttagcttcaataattgtgactggcctcaggaattctcccttccacacctgcccacctcacctcacctcacctcaccgcaccgcaccgcaccgcaccgcaccagagccagagcagctgcttgtctgcagcaggacacggttcctacatacgtttcagttctttcatggtaagctcaatggactttgaattgtttacagtgctgtatgtccaattgttaaatgtaccattctgaacgatgttaaagcaagtgtggtttatttatggcatgaaccatgtaacttgaaatatgaacttacaaggaggggcactcattaggtaacaagttcttacaccaaacttccttgatgaaataaggccaaaataatcctaaaattcattaggaagaacttggataaaaggactccaaataaatgtttagaaagagcccataattttaggactcctataaaattcttccttgtttgttaatgctatttaattcaacagcaccatgttagaaatatattggcagccaagactctgaactctgcagaaacatttgtttcacccagacttcaaactctagccctgactatgatgcccctgtgtgcatttacaataaagactccaacggagggagcctgttggtgttaaattgtttacatttctttatacaaataatgtgctttcagtgccttagttacagctccctttctgtttcttgttccaaggattctgtagtatgtagagtgttta

SEQ ID NO: 30336 - DNA, 251 bp, Homo sapiens
cacgaagccctctctgccttctgtctgtggatttgctgttttgtacacttcacataaagggaatcatacagtatagaatcatcagcttttaactttttgatagatttgtgttccttctctctgtccctcccttgcgatctcttcccaggtatagacataaacacattttttcctatcctttctcctcctgtttttttccctccatctctcccttcctttcttaccaccccacccctgcctttccattcctg

SEQ ID NO: 30337 - DNA, 335 bp, Homo sapiens
gatgagcgagcatgaaaattagaggtacagaagatataaaagagactctgatttaacttctagagattataaaatgcataggctgtgactgttggcagcttagagattgtaaagatgagtgaagttgaagacagcaacagaaaccattcaaaaggaaacacaaagagaaaaaaatgactgacaaaaaattaacagagcatcagtgagctatggggcaacttggggtcctaaaagggtggagaagcaggagaaatgtttgaagaaatgaggagtgaaaaatttccaaattcgatgaaaactatcaattaaaagatagaaaattttcaaaaaaaata

SEQ ID NO: 30338 - DNA, 542 bp, Homo sapiens
cgagattgtgccactgcactccagcctggcagtagaaccagaccctgtctcaaaaacaaaaaatctgtctaggctgggcatggtggctcacgcttgtaatcccagcactttgggaggctgaggcaagtggatcaccagaggtcaggagtttgagaccaacctggccaacatggtgaaaccccgtctctcctaaaaataaaaaaattagccgggcatggtggtacatgcctataatcccagctacttgggaggctgaggcaggagagtggcttgaacctgagaggcggaggtcgcagtcagcttagattgcaccactgtaaagaaaagaaaaaaaaaagtccatacatgagtgtagggaatactttgtgaatttttagactttttattaaccaccagagaatatttactacacctgggtgttttttaaagaatactgttcttattctgaaataagtagaccgttttgcatatgatcagccagtgtcccttacacaatttatttcatgtaattttcatctttcccatgtaaatctcagttcagc

SEQ ID NO: 30339 - DNA, 280 bp, Homo sapiens
ttttaaaattcctaattgtgttagactcctcttttgaatattttcatgacaccttctacttcttgtttaccacaattagcatgggtataattattaaattactttgtaattacttgtttataattttttaaattacattgaaattatttgttttatctccctctcccctgaaagcatctaaattccttgggtgtaagaaccacatctctgttgctcactagtgcattgctgcataatgtaggtaatggaatatttatggaataaaagaattagttaatag

SEQ ID NO: 30340 - DNA, 446 bp, Homo sapiens
tgtcctgaggctgtggagacttaattcttcagctgggtggttcccgtaggaacaaggaacactttagctacttcttactcttttaacaccaatggctgtgggagaaggaaaggctcaaggccagggctcagctcgcagagtccatcttctcccacagttgccacatttgagagggggcctgctgaatgcccttgctgtcccctatggcagtattgaggcctgaccgaagtctggtatgctgcttgctggctacaagaactggtcacaggatgaaaattggggaaaggatttgggggaggtgacaagggtggcatggaagtctaggggacaaagggacagggttgggaacaaattggttaactttgattgccactcactgtggtgctttccccctttcccttgaattctgctttgaaaagaataaatttgtacttgtttactttggt

SEQ ID NO: 30341 - DNA, 515 bp, Homo sapiens
cgttcaaaacccttgccctttaggaaccgtcagtcagtgttctcagctgcagaatgtaaattaggagtcctaggtattcagaaatgctatagtgaatacacagaaggtctccaaacatggaaatgtacttttggtggttgaaagacatattgtatactagttagagccagagctctggagtcagattgtctggatttgaatcctggcttcacaaatcacttagctatgagaccttgggcaagtcacatattgtctgtaagccttaggtttcttaaaaatctagaaatgatgacaataacagtatttaccttccagagttgttgtgaggattaatacattaaaaatgatactcataaagctcttggcacaagagcttggcacatagtaggtactcagtaaatgttattgattaaaactagctatttttgaaagccttttgaatttctcctcaatcttggtgatgacataatgacccttactggatagagtctttcataaatacacacaaacctaag

SEQ ID NO: 30342 - DNA, 458 bp, Homo sapiens
gttaagggagtatttacctgagactttccttagtgctttacatatattaacctactttaatcctcacaacaacacaatgaggcttatcccatactagataggtgaacaaactaaggctcagagagattggataacttgccccagggtcatatatctagtaagtagtagagctagaatacagagctacaaactaagggtggtgaaatgctgcaaagccagaaaagcactgagaagaaatgaagggaaagccctggccattccatagttcagtgtaatcagtaacttatgatagtttgtattatttaagtagaaagttaaaatgagtcaatttcatgtgatgggctgtgtggctctcttttctccttgtgtgtctctttgtgggtgtgtgtgttgaaggccttttaatgctctaaaacaaaacagattatatctgaccattgttagagaaactttgtaaa

SEQ ID NO: 30343 - DNA, 389 bp, Homo sapiens
atattgcctctgaaaacttccgaagccctcaagcttttacagccaggtcagaataaaccactcctgtgtgttctcctagcacctttgctgcatctcttagtgcagtcagtgaatctagtttgtcttccagttcatactaacctaccttgtgaaaaggaagggtcacataatgaattgtgtactttacagtcttctctaacaaaagtgggagctcttccatagtgggatactgttcaggctctcattcaatcattactgagcacctaccacgtgtcaggcattagctgaactgctgggaattcaggggtgaggcagacccaatccctgccctcactcttacatctcctgtagcctagcccaatgtctagcccagggcctggcacagtagg

SEQ ID NO: 30344 - DNA, 250 bp, Homo sapiens
atcatatcctcttttgtccaatcagacctttgcacaactgacaactcttcatcaaacctaagcataacaatacagtttttactgtttctctgggtcttcatttctgaagtcccctgtgtcctgtaaaacttaaatagatttgtgtgtttttctcttgtaaatgtgtcttttgttacaaggatctcaccatgaatccatcaatgaaagagaaaaaaaaatcagttttctgctatacttctcttatatacac

SEQ ID NO: 30345 - DNA, 835 bp, Homo sapiens
cctggcaacctccaaatagaaaaccattgtgctactggtattacagggtgtggaggattatagatgacttatgtgctatttaagcaatgcattctatcttatcatgtatatatgtgggtatgatgaccaccatactatcggattattgcagagtgtgaggtagtgtgcggtttttaagtgcgtgtgtgtgagagaataaatgcttgaatatctgcaataagtattagagagcactcctgaaatataagccacttcctgacctgggcatattaaccaagaagcaaacctattaaaagtatgagagcattcgattttctacaataatagtacacatttgttgacatgaactagattcaggaagggaatacagaaagagcaggcagacattgggcctatttaattaacttggggcttatgatcacccttcagaagaggatgctaaggatgccttctccagagccaagaggcctctccttgtgcctttatttggctttcctcctctcattggtgacccatcatgttaggaaaaaaaaaaaatctctcaaaagtgtaaatgttattctttctgtgggtgatgtcataattttagtggcccaagcatttgttactaaaatagtacttagcaacacataatcattattttctcctcttaaaattctgagtgtgtttgttctgatgaagtcaggagacacatttttcagggaggtaggagtaagagcttaaaaacacgaagtaatgcctggaataatctcttgacttgtgttccttaaataagcaagaagacaactaaattttccttcctgtggcgacagctctggcggagtaaaaaaaaatt

SEQ ID NO: 30346 - DNA, 272 bp, Homo sapiens
ctgaagccaagacttttatggacacagaaaaagttggttagtcctacagatggaaatttcatctcagtaggattatatagctatttcttttattaataaaaattttctattaagtgtaccagagccacttttcagctctgaggataaggaactttataggtgcctagatgagactctttttattcccctagaaatgttgaaatttttgctctaattaaattagactcaaaatatgaacattccttgaacatataccacttagtcatccagac

SEQ ID NO: 30347 - DNA, 698 bp, Homo sapiens
gtgaatgtgcccatgaaggtcagcagcccagtgactgccagcaccctgccactgccaccactggtgcaagtgtaagcatggacactggcaaccctgctcccacctgcaccctgccacaggtacaagtgcacacaggaatgcagcagctcgacttctgctggtaccccaaccccaccaaggcataagcaccctgcggcgctgccacaggtgccagaacacgtgagtgagcacagatcctgctgccaccgccccaaagaagcactttgtctggcaccacccatcagagggttgtggctaatggaccaggaacaccttggaccctctgatgcagcaggttcccaatctcacggggccagataacaaagctggggtcctggtaccaactccccagacttagagtccaccaggagtgctgagctgagccgtggcccctaaaatcttccagaaatgaacccagtcaactgaacctaccttataccgcaatgaaacccccaagggcagcaaagaagagaaaagcaaagaaaaaaacatgcatcgaaaggacagcaacttcagaggttgagggaacatcatcccacacagataagaaggaatcagcacaagaactctggcaactcaaaatgccagaatgttttcttacctccaaatgaccacacaagttccccagcaatggtccctacctggggctgaaatgacag

SEQ ID NO: 30348 - DNA, 550 bp, Homo sapiens
cctgaatcaccctttagaatcatggattccttgaccattggtaccaggagggagctcagtggtgttgcggcctcccttttgtattactgatggtccagccaagctccagacaggagcagtgtgttggccgcaatggcacagtgagttggcgcagagccagagctagaacccctccactggacttctggttaagggatgtattcttcctcatactatcagcagaaatcaacggcctcatgtctctcctccaaatacaaaaagcactctgaataacaaaaatgatcatttaaaaatgtatccattaggctgggcgtggtggctcacgcctgtaatcccagtactttgggaggctgaagtggttcgatcgcttgagttcaggagttcgagaccagcctggccaatatgaaaccccatctctactaaaaatacaaaaattagccaggcatggtggcgggcgcttgtaattccagctacccaggaggctgaggcaggagaatgacttgaacctgggagacggaggttgcagtgagcggagactgcaccactgcac

SEQ ID NO: 30349 - DNA, 424 bp, Homo sapiens
gtattctgctccacaagctccacgtgtacttattcctcagtacgcccccttagtgagtttgtttattgggtgagtgaaaggaacagatgagtagatgaatgacccaggtgaggcctggggtcggggaggactgtggctcttcttacctgctgttgaagctggcctggtggaggaggctggaggcaaaggtggggacgtagtctctgtagcttctgcaagtagagggtctgctgctggggtcagggaggatctgaacctgggcctgcttgactctacagtctgtttgtttctactactgtctgcgaaggtctgctgtttctactgctacatagtcacctgcatctaggtcttctttttgccattgttgggaattggcataagatggaatgagattagatggcatcatggtcagagtgacccattt

SEQ ID NO: 30350 - DNA, 377 bp, Homo sapiens
catttggacctgcagttaagcccaaattaagaaagttacacagcataatcgaataagaaaccatatgaatactgaagtctcttatctgatcattgctgcagctatcattaaaggtcatacccattatctagcagagattcaaaaggtaaatattaggaagaaatgataaatcactacttctatttggagcaggaagtacagggatggagagtagaaagccgtaatgttggagaatacagtggcataggaaaacattaaataatcaaagattaagttattgataataaacattcctaaacaaaaattagtcctgtagcatgctggtcattgtagtacaataattacatcaactacgtcctctcaaactagccatactc

SEQ ID NO: 30351 - DNA, 1378 bp, Homo sapiens
  misc_feature (27)..(27): n is a, c, g, or t
  misc_feature (1102)..(1102): n is a, c, g, or t
ggaaggtggcagagcagcctccccaantaagcctgggtcgccgcctcggtgaagggccgcggggccgagcgcgggaagtggcgtccagtcggtttttggcaggcgagagccagagcgtgagaaccctcccacggcgaggccaagccctgagactggactagcaaggtcgtgagtctctctgtcagctctccgcagcgaaggggcgcggggggcggggaccgtgcccgaccgtgccagctcccgccccggaagcggaagtgcaagcactgcggggtcctgtccagtgtgagcccgacccgagctccagtagttccgcccgctggtcatcgcgccctttcccctgccggtgtcctgctcgccgtccccgccatgctgtctctagactttttggacgatgtgcggcggatgaacaagcggcagctctattatcaagtcctaaattttggaatgattgtctcatcggcactaatgatctggaaggggttaatggtaataactggaagtgaaagtccgattgtagtggtgctcagtggcagcatggaacctgcatttcatagaggagatcttctctttctaacaaatcgagttgaagatcccatacgagtgggagaaattgttgtttttaggatagaaggaagagagattcctatagttcaccgagtcttgaagattcatgaaaagcaaaatgggcatatcaagtttttgaccaaaggagataataatgcggttgatgaccgaggcctctataaacaaggacaacattggctagagaaaaaagatgttgtggggagagccaggggatttgttccttatattggaattgtgacgatcctcatgaatgactatcctaaatttaagtatgcagttctctttttgctgggtttattcgtgctggttcatcgtgagtaagaagcctgccttgctgttcctgggaagatgccatagttttcgttactggatgttggagtagatactggtcctgtgattggtggactggggaacacacgtgttgggtgcttctgggtagccctggtttgcattagtttatgtttccatgccagagtttgtgtgggcgggcgcatgtgcaccacagagtgcactngaggggactatcagtcaccggattccataatgtcatgtcacactttcaatttgtacattagtgaatttttatattaaaggtgagcaagccaggtgttttgaagcagtcatttagggtaggatggatgaatgggtggagttgaacgtaaccttatagaaggaaaggggggaggataataaaatgtgtgaaaaaagggggtatcagggggagacaattaagaaaagaataggggaaagaaggtggaagggggaaaaaattgtggtttatgtcgtgtag

SEQ ID NO: 30352 - DNA, 1514 bp, Homo sapiens
  misc_feature (27)..(27): n is a, c, g, or t
  misc_feature (1238)..(1238): n is a, c, g, or t
ggaaggtggcagagcagcctccccaantaagcctgggtcgccgcctcggtgaagggccgcggggccgagcgcgggaagtggcgtccagtcggtttttggcaggcgagagccagagcgtgagaaccctcccacggcgaggccaagccctgagactggactagcaaggtcgtgagtctctctgtcagctctccgcagcgaaggggcgcggggggcggggaccgtgcccgaccgtgccagctcccgccccggaagcggaagtgcaagcactgcggggtcctgtccagtgtgagcccgacccgagctccagtagttccgcccgctggtcatcgcgccctttcccctgccggtgtcctgctcgccgtccccgccatgctgtctctagactttttggacgatgtgcggcggatgaacaagcggcaggtacaatgagagaaatgcaaagatagttaagaaagactcggccttcaaggagcctaaatgtgtagaaaaggactaaggcaaaacaataacttttttgagctcttgccatgtgtgaagcactttatacacctgtaagctctattatcaagtcctaaattttggaatgattgtctcatcggcactaatgatctggaaggggttaatggtaataactggaagtgaaagtccgattgtagtggtgctcagtggcagcatggaacctgcatttcatagaggagatcttctctttctaacaaatcgagttgaagatcccatacgagtgggagaaattgttgtttttaggatagaaggaagagagattcctatagttcaccgagtcttgaagattcatgaaaagcaaaatgggcatatcaagtttttgaccaaaggagataataatgcggttgatgaccgaggcctctataaacaaggacaacattggctagagaaaaaagatgttgtggggagagccaggggatttgttccttatattggaattgtgacgatcctcatgaatgactatcctaaatttaagtatgcagttctctttttgctgggtttattcgtgctggttcatcgtgagtaagaagcctgccttgctgttcctgggaagatgccatagttttcgttactggatgttggagtagatactggtcctgtgattggtggactggggaacacacgtgttgggtgcttctgggtagccctggtttgcattagtttatgtttccatgccagagtttgtgtgggcgggcgcatgtgcaccacagagtgcactngaggggactatcagtcaccggattccataatgtcatgtcacactttcaatttgtacattagtgaatttttatattaaaggtgagcaagccaggtgttttgaagcagtcatttagggtaggatggatgaatgggtggagttgaacgtaaccttatagaaggaaaggggggaggataataaaatgtgtgaaaaaagggggtatcagggggagacaattaagaaaagaataggggaaagaaggtggaagggggaaaaaattgtggtttatgtcgtgtag

SEQ ID NO: 30353 - DNA, 1324 bp, Homo sapiens
  misc_feature (27)..(27): n is a, c, g, or t
  misc_feature (1048)..(1048): n is a, c, g, or t
ggaaggtggcagagcagcctccccaantaagcctgggtcgccgcctcggtgaagggccgcggggccgagcgcgggaagtggcgtccagtcggtttttggcaggcgagagccagagcgtgagaaccctcccacggcgaggccaagccctgagactggactagcaaggtcgtgagtctctctgtcagctctccgcagcgaaggggcgcggggggcggggaccgtgcccgaccgtgccagctcccgccccggaagcggaagtgcaagcactgcggggtcctgtccagtgtgagcccgacccgagctccagtagttccgcccgctggtcatcgcgccctttcccctgccggtgtcctgctcgccgtccccgccatgctgtctctagactttttggacgatgtgcggcggatgaacaagcggcagctctattatcaagtcctaaattttggaatgattgtctcatcggcactaatgatctggaaggggttaatggtaataactggaagtgaaagtccgattgtagtggtgctcagtggcagcatggaacctgcatttcatagaggagatcttctctttctaacaaatcgagttgaagatcccatacgagtgggagaaattgttgtttttaggatagaaggaagagagattcctatagttcaccgagtcttgaagattcatgaaaagcaaaatgggcatatcaagtttttgaccaaaggagataataatgcggttgatgaccgaggcctctataaacaaggacaacattggctagagaagatcctcatgaatgactatcctaaatttaagtatgcagttctctttttgctgggtttattcgtgctggttcatcgtgagtaagaagcctgccttgctgttcctgggaagatgccatagttttcgttactggatgttggagtagatactggtcctgtgattggtggactggggaacacacgtgttgggtgcttctgggtagccctggtttgcattagtttatgtttccatgccagagtttgtgtgggcgggcgcatgtgcaccacagagtgcactngaggggactatcagtcaccggattccataatgtcatgtcacactttcaatttgtacattagtgaatttttatattaaaggtgagcaagccaggtgttttgaagcagtcatttagggtaggatggatgaatgggtggagttgaacgtaaccttatagaaggaaaggggggaggataataaaatgtgtgaaaaaagggggtatcagggggagacaattaagaaaagaataggggaaagaaggtggaagggggaaaaaattgtggtttatgtcgtgtag

SEQ ID NO: 30354 - DNA, 1056 bp, Homo sapiens
  misc_feature (780)..(780): n is a, c, g, or t
actactactaattcgcggcgctcgacgtcctgctcgccgtccccgccatgctgtctctagactttttggacgatgtgcggcggatgaacaagcggcagctctattatcaagtcctaaattttggaatgattgtctcatcggcactaatgatctggaaggggttaatggtaataactggaagtgaaagtccgattgtagtggtgctcagtggcagcatggaacctgcatttcatagaggagatcttctctttctaacaaatcgagttgaagatcccatacgagtgggagaaattgttgtttttaggatagaaggaagagagattcctatagttcaccgagtcttgaagattcatgaaaagcaaaatgggcatatcaagtttttgaccaaaggagataataatgcggttgatgaccgaggcctctataaacaaggacaacattggctagagaaaaaagatgttgtggggagagccaggggatttgttccttatattggaattgtgacgatcctcatgaatgactatcctaaatttaagtatgcagttctctttttgctgggtttattcgtgctggttcatcgtgagtaagaagcctgccttgctgttcctgggaagatgccatagttttcgttactggatgttggagtagatactggtcctgtgattggtggactggggaacacacgtgttgggtgcttctgggtagccctggtttgcattagtttatgtttccatgccagagtttgtgtgggcgggcgcatgtgcaccacagagtgcactngaggggactatcagtcaccggattccataatgtcatgtcacactttcaatttgtacattagtgaatttttatattaaaggtgagcaagccaggtgttttgaagcagtcatttagggtaggatggatgaatgggtggagttgaacgtaaccttatagaaggaaaggggggaggataataaaatgtgtgaaaaaagggggtatcagggggagacaattaagaaaagaataggggaaagaaggtggaagggggaaaaaattgtggtttatgtcgtgtag

SEQ ID NO: 30355 - DNA, 1259 bp, Homo sapiens
  misc_feature (27)..(27): n is a, c, g, or t
  misc_feature (983)..(983): n is a, c, g, or t
ggaaggtggcagagcagcctccccaantaagcctgggtcgccgcctcggtgaagggccgcggggccgagcgcgggaagtggcgtccagtcggtttttggcaggcgagagccagagcgtgagaaccctcccacggcgaggccaagccctgagactggactagcaaggtcgtgagtctctctgtcagctctccgcagcgaaggggcgcggggggcggggaccgtgcccgaccgtgccagctcccgccccggaagcggaagtgcaagcactgcggggtcctgtccagtgtgagcccgacccgagctccagtagttccgcccgctggtcatcgcgccctttcccctgccggtgtcctgctcgccgtccccgccatgctgtctctagactttttggacgatgtgcggcggatgaacaagcggcagctctattatcaagtcctaaattttggaatgattgtctcatcggcactaatgatctggaaggggttaatggtaataactggaagtgaaagtccgattgtagtggtgctcagtggcagcatggaacctgcatttcatagaggagatcttctctttctaacaaatcgagttgaagatcccatacgagtgggagaaattgttgtttttaggatagaaggaagagagattcctatagttcaccgagtcttgaagattcatgaaaagatttgttccttatattggaattgtgacgatcctcatgaatgactatcctaaatttaagtatgcagttctctttttgctgggtttattcgtgctggttcatcgtgagtaagaagcctgccttgctgttcctgggaagatgccatagttttcgttactggatgttggagtagatactggtcctgtgattggtggactggggaacacacgtgttgggtgcttctgggtagccctggtttgcattagtttatgtttccatgccagagtttgtgtgggcgggcgcatgtgcaccacagagtgcactngaggggactatcagtcaccggattccataatgtcatgtcacactttcaatttgtacattagtgaatttttatattaaaggtgagcaagccaggtgttttgaagcagtcatttagggtaggatggatgaatgggtggagttgaacgtaaccttatagaaggaaaggggggaggataataaaatgtgtgaaaaaagggggtatcagggggagacaattaagaaaagaataggggaaagaaggtggaagggggaaaaaattgtggtttatgtcgtgtag

SEQ ID NO: 30356 - DNA, 707 bp, Homo sapiens
  misc_feature (27)..(27): n is a, c, g, or t
  misc_feature (707)..(707): n is a, c, g, or t
ggaaggtggcagagcagcctccccaantaagcctgggtcgccgcctcggtgaagggccgcggggccgagcgcgggaagtggcgtccagtcggtttttggcaggcgagagccagagcgtgagaaccctcccacggcgaggccaagccctgagactggactagcaaggtcgtgagtctctctgtcagctctccgcagcgaaggggcgcggggggcggggaccgtgcccgaccgtgccagctcccgccccggaagcggaagtgcaagcactgcggggtcctgtccagtgtgagcccgacccgagctccagtagttccgcccgctggtcatcgcgccctttcccctgccggtgtcctgctcgccgtccccgccatgctgtctctagactttttggacgatgtgcggcggatgaacaagcggcagctctattatcaagtcctaaattttggaatgattgtctcatcggcactaatgatctggaaggggttaatggtaataactggaagtgaaagtccgattgtagtggtgctcagtggcagcatggaacctgcatttcatagaggagatcttctctttctaacaaatcgagttgaagatcccatacgagtgggagaaattgttgtttttaggatagaaggaagagagattcctatagttcaccgagtcttgaagattcatgaaaaggcgaggcctctatcaaggaccttggn

SEQ ID NO: 30357 - DNA, 594 bp, Homo sapiens
  misc_feature (500)..(500): n is a, c, g, or t
  misc_feature (502)..(502): n is a, c, g, or t
  misc_feature (505)..(505): n is a, c, g, or t
  misc_feature (507)..(507): n is a, c, g, or t
  misc_feature (509)..(509): n is a, c, g, or t
  misc_feature (511)..(511): n is a, c, g, or t
ctctattatcaagtcctaaattttggaatgattgtctcatcggcactaatgatctggaaggggttaatggtaataactggaagtgaaagtccgattgtagtggtgctcaggtaacagtttttcctttcaaggcatggaattgcatggcattacttgggagaaaaattgagatatgaaataactggcatatcattctcttagaaactactcttttccagaaaagggcctggaagaaaattagtcactacttatcagttgtaagaaattctcaggctgggcacggtggcttatgcctgtaatcccaccaatttgggatgctgaggccggtggattacttgagctatggaatttgagactagcttgggcaacgtggtgaaaccctgtctccacaaaaaatacaaaaattagcgggtgtggtggcatggacctgtagtctcagctactcgggaggctgaggtgggaggatcacctaagccctagaggttgaggcctgcagtgangnttngntngnattgcaccactgcacttcagcctgggtgacagagcgagaccctgtctccaaaaaaaaaaaaaaaaagagagaaaagaaattct

SEQ ID NO: 30358 - DNA, 933 bp, Homo sapiens
ccacacaaatgagagatttttatgtatgtggtcccactatcaaaataataggaagcagttaatggggctttgagaaaagcatagtcccgtgtacagtaatatgcatctaaatagagttttccattcacctgtcaattattttcacaagattagcattaaaaaatacaagcaaacatatgacccttaagcttcacacacaaaaaattggtctttgttcattctcagatgacaggatgtcccaaaagtaacaaaagatgggagccagtcctctcatagctgtttcttcaatcatcccatcaacagctcttcatttattgaactaccttccttttccaaagaggtaatgctgagatcagtcagaaaggctttctgagaaaactggcttggatttctgggtctgttgcagtcaattcaagatgaactggcttgtatcaatgaagcgctcaatgcagttcacaaaacaggcctcagcccgactgtccaactttggcccaggcttgtccatgcacttctcccaacaaagttcagtcatctggtgcaccagctgctggaagcgctgcttttgagtctctacctcaatgaaaatgctgcaactgcgggtccactgcacccaaacccgccgcagaggaagagcaggaggaatccatcccaggacaaccatgcttgcagagacgaactccgcaccaaccttcacgtgtctccacgacctagttaatcaatttaaaatgaggtcactagggtgggccccaatccaatatgactgataactttataaaaaggagagatttggatacagaaagagacagagtgaaaaccatgtgaagaaacataggaaaagatggcagctacaagccaaggagaagcttgcagtgtgtattcatctgttctcatgctgttaataaagacatacctgagactgggtaatttaaaaaa

SEQ ID NO: 30359 - DNA, 146 bp, Homo sapiens
atgttgcaaaatgaaataatatatatttgctattatgaattatagtgtcactgtgatagagccaaaatttgaacccagagatggcgtgtgtctctgcccacactactgatcatctgcaattccccatctattattgaaaaaaaaaa

SEQ ID NO: 30360 - DNA, 109 bp, Homo sapiens
atcactacaagaaaaagcagtcttaatttttatttattagaaaaggttttattatattatttatgtaaataatgataaatacaacatttaaactataacatatttgata

SEQ ID NO: 30361 - DNA, 455 bp, Homo sapiens
ctcaggaaataaagaatgttctaatggttgagtttataagatagatccatttctatctctgtccttagagagcccttatcttgttgcctgccctctcctaggaggcattgttgacctttaccattgtaggcactgaaccacgctgaaagagaagccttacaggatggaggcaacttttatccaaattgaaaatgtttttataaacatacattagctcttcatgaaccatttgtttcctgaagtcccaatggaaatgatcatattctgttagggattccaatgatatattctttaaactaagactcgtgaacgttaaaaggcaaaagcgaagccagaagtaaattttgactcattctttatataatcatttgaaaacttcacttgaaaactggagaaaattttggaactttcttgttctactatggagaagataaaagcagaagcatccacagtat

SEQ ID NO: 30362 - DNA, 740 bp, Homo sapiens
agaaatgggattatgctatgtgcccaggctgctctcgatctcttgtactcaagtgattctcctgcctcggcctcccaaagtactgggattatacatgtgagtcactgtgcctggcccccaacccctttaaagaacatcctccagtacccatttgacctggggtctttccaagcaagaggctggcatgctgccctccaggcctcccacccattccccgccgtgccttcccacccatctcatctcaccagcagattcaattagctgatttgatgctacagctgcagaaagccaagcaattatggaacacagaccaggtgccttggcactcgctctcacagaggggtctgggaggcctccagacagacagcagggcgagagggaggtggaacagtagaggcaaagattggccaacccagcctgcacaagagagccacctgggagctttgaagaatacagatgccttccaaaaccccaaaaaacccagacgcctgggttgattcagtttatctgttctgggaacggggcatcagagtttttttaaagtccctgagtaatactaacgtacagacagggttagggagtcaaacaatgtgcaggggtagggaccagtgctagagagtttgtttgtttgtttgtttgtttgtttatgtttttgagatagggactggctctgtcacctagactggagtgcagtgccgtgatctcgggtcactgcaacctccacctcccaaggctcaagc

SEQ ID NO: 30363 - DNA, 1043 bp, Homo sapiens
  misc_feature (15)..(15): n is a, c, g, or t
  misc_feature (35)..(35): n is a, c, g, or t
  misc_feature (45)..(45): n is a, c, g, or t
  misc_feature (859)..(860): n is a, c, g, or t
  misc_feature (864)..(864): n is a, c, g, or t
  misc_feature (870)..(870): n is a, c, g, or t
  misc_feature (1042)..(1042): n is a, c, g, or t
ttacggggtctaagngtagcgatggcccctggcgntgggtataantcgccctctcctcgaggatcgaggggactctgaccacagcctgtggctgggaagggagacagaggcggcggcggctcaggggaaacgaggctgcagtggtggtagtaggaagatgtcgggcgaggacgagcaacaggagcaaactatcgctgaggacctggtcgtgaccaagtataagatggggggcgacatcgccaacagggtacttcggtccttggtggaagcatctagctcaggtgtgtcggtactgagcctgtgtgagaaaggtgatgccatgattatggaagaaacagggaaaatcttcaagaaagaaaaggaaatgaagaaaggtattgcttttcccaccagcatttcggtaaataactgtgtatgtcacttctcccctttgaagagcgaccaggattatattctcaaggaaggtgacttggtaaaaattgaccttggggtccatgtggatggcttcatcgctaatgtagctcacacttttgtggttgatgtagctcaggggacccaagtaacagggaggaaagcagatgttattaaggcagctcacctttgtgctgaagctgccctacgcctggtcaaacctggaaatcagaacacacaagtgacagaagcctggaacaaagttgcccactcatttaactgcacgccaatagaaggtatgctgtcacaccagttgaagcagcatgtcatcgatggagaaaaaaccattatccagaatcccacagaccagcagaaagggacctgaaaagctgattggggtcctgaagttatgcggggatgttccgcacgcacggaagggaggcaggtnngganagaccntttaagaccctttacggttgggtgagtggactcgggctctcggaggggggagggtgggcccgcgctgcgttgagaggacaggcctgtggggggccccatgcccctgtgttaggggggtggcattgtccgcggggcgtcaggtggggtctaaacgggtggctcctccgtcggna

SEQ ID NO: 30364 - DNA, 1052 bp, Homo sapiens
  misc_feature (39)..(39): n is a, c, g, or t
  misc_feature (920)..(920): n is a, c, g, or t
  misc_feature (930)..(930): n is a, c, g, or t
  misc_feature (935)..(935): n is a, c, g, or t
  misc_feature (947)..(947): n is a, c, g, or t
  misc_feature (955)..(955): n is a, c, g, or t
  misc_feature (959)..(959): n is a, c, g, or t
  misc_feature (961)..(962): n is a, c, g, or t
  misc_feature (966)..(966): n is a, c, g, or t
aagggagaagggggccaactataggctaggtacgaggcngggtgttgctcgccctctcctcgaggatcgaggggactctgaccacagcctgtggctgggaagggagacagaggcggcggcggctcaggggaaacgaggctgcagtggtggtagtaggaagatgtcgggcgaggacgagcaacaggagcaaactatcgctgaggacctggtcgtgaccaagtataagatggggggcgacatcgccaacagggtacttcggtccttggtggaagcatctagctcaggtgtgtcggtactgagcctgtgtgagaaaggtgatgccatgattatggaagaaacagggaaaatcttcaagaaagaaaaggaaatgaagaaaggtattgcttttcccaccagcatttcggtaaataactgtgtatgtcacttctcccctttgaagagcgaccaggattatattctcaaggaaggtgacttggtaaaaattgaccttggggtccatgtggatggcttcatcgctaatgtagctcacacttttgtggttgatgtagctcaggggacccaagtaacagggaggaaagcagatgttattaaggcagctcacctttgtgctgaagctgccctacgcctggtcaaacctggaaatcagaacacacaagtgacagaagcctggaacaaagttgcccactcatttaactgcacgccaatagaaggtatgctgtcacaccagttgaagcagcatgtcatcgatggagaaaaaaccattatccagaatcccacagaccagcagaagaaggaccatgaaaaagctgaatttgaggtacatgaagtatatgctgtggatgttctcgtcagctcaggagagggcaaggggcaagatgcggacgagacctttttcaaagagaccctctaaagtgggtganggaatccggncttcngggggagggtgngcgcgctnactnannaaangcggggggggccacgggcctggtcaaggggtgcgaatgtccggggagccccaagggggcgcaatgaggcgctgctctcctctgcga

SEQ ID NO: 30365 - DNA, 2541 bp, Homo sapiens
  misc_feature (33)..(33): n is a, c, g, or t
ccccatcagtacacctacagaaacgcgaactcncgaccggcggaacctccgtagaccacagcctgtggctgggaagggagacagaggcggcggcggctcaggggaaacgaggctgcagtggtggtagtaggaagatgtcgggcgaggacgagcaacaggagcaaactatcgctgaggacctggtcgtgaccaagtataagatggggggcgacatcgccaacagggtacttcggtccttggtggaagcatctagctcaggtgtgtcggtactgagcctgtgtgagaaaggtgatgccatgattatggaagaaacagggaaaatcttcaagaaagaaaaggaaatgaagaaaggtattgcttttcccaccagcatttcggtaaataactgtgtatgtcacttctcccctttgaagagcgaccaggattatattctcaaggaaggtgacttggtaaaaattgaccttggggtccatgtggatggcttcatcgctaatgtagctcacacttttgtggttgatgtagctcaggggacccaagtaacagggaggaaagcagatgttattaaggcagctcacctttgtgctgaagctgccctacgcctggtcaaacctggaaatcagaacacacaagtgacagaagcctggaacaaagttgcccactcatttaactgcacgccaatagaaggtatgctgtcacaccagttgaagcagcatgtcatcgatggagaaaaaaccattatccagaatcccacagaccagcagaagaaggaccatgaaaaagctgaatttgaggtacatgaagtatatgctgtggatgttctcgtcagctcaggagagggcaaggccaaggatgcaggacagagaaccactatttacaaacgagacccctctaaacagtatggactgaaaatgaaaacttcacgtgccttcttcagtgaggtggaaaggcgttttgatgccatgccgtttactttaagagcatttgaagatgagaagaaggctcggatgggtgtggtggagtgcgccaaacatgaactgctgcaaccatttaatgttctctatgagaaggagggtgaatttgttgcccagtttaaatttacagttctgctcatgcccaatggccccatgcggataaccagtggtcccttcgagcctgacctctacaagtctgagatggaggtccaggatgcagagctaaaggccctcctccagagttctgcaagtcgaaaaacccagaaaaagaaaaaaaagaaggcctccaagactgcagagaatgccaccagtggggaaacattagaagaaaatgaagctggggactgaggtgggtcccatctccccagcttgctgctcctgcctcatccccttcccaccaaaccccagactctgtgaagtgcagttcttctccacctaggaccgccagcagagcggggggatctccctgcccccaccccagttccccaacccactcccttccaacaacaaccagctccaactgactctggtcttgggaggtgaggcttcccaaccacggaagactactttaaatgaaaaaaagaaattgaataataaaatcaggagtcaaaattcatcgtcttcaagcccctctttctagccttttctactactctctgcttggtcaaggtttgtgccccactacagaacagggctaaattagccaccaccactgaaaactcagccgaatttttttataccactctgatgtcagcattttttccatctgttggggctttttcctcttttttccattctccccaaatattttatctggcttcaaaattaagaggattatttttcagattgtttttattcagtgtggccgattcctcatctgattcaggctgtccagtcaggcccctcccattttaggagctggagccttcatttatgaagagattctcatctatgaaatggatcctcatttgtaaatcttttttcttccattttcacaaagctgtaaagaaataatccatctcaaccttaccctttttctctggagtcagtggggtctttcctcgctccatcttacacagacctgagctggaagctcaactggttttgttccctgtttgaaatattgtgatctccctcccatgaaagaaaaaccaagaaccagaggcgtagactgactgaagacacaactcctggctttctgaagctatggacttggattggattgctgggggtttgtagagaaaggtgacaaatttcagtacctctggcatgctgtcccaggaaactagggctcccactaacttatgaggtttttaaacacattgaaaatgacatgacattaaaataaatttggatttgctcataaaaaaaaaaaaaaaaagaaaaaagtttgtgcggggcgggccggaaaagcttttacccctctttggggccgggcccctggtaggaccctggccaaccggtccgggggaccggggcggactggtctggtttcccccataaaacccgggcccggctttggacatcgggggcgggctcgggctccggtcacggctaccccccggggggg

SEQ ID NO: 30366 - DNA, 2315 bp, Homo sapiens
  misc_feature (33)..(33): n is a, c, g, or t
  misc_feature (2263)..(2263): n is a, c, g, or t
  misc_feature (2281)..(2281): n is a, c, g, or t
ccccatcagtacacctacagaaacgcgaactcncgaccggcggaacctccgtagaccacagcctgtggctgggaagggagacagaggcggcggcggctcaggggaaacgaggctgcagtggtggtagtaggaagatgtcgggcgaggacgagcaacaggagcaaactatcgctgaggacctggtcgtgaccaagtataagatggggggcgacatcgccaacagggtacttcggtccttggtggaagcatctagctcaggtgtgtcggtactgagcctgtgtgagaaaggtgatgccatgattatggaagaaacagggaaaatcttcaagaaagaaaaggaaatgaagaaaggtattgcttttcccaccagcatttcggtaaataactgtgtatgtcacttctcccctttgaagagcgaccaggattatattctcaaggaaggtgacttggtaaaaattgaccttggggtccatgtggatggcttcatcgctaatgtagctcacacttttgtggttgatgtagctcaggggacccaagtaacagggaggaaagcagatgttattaaggcagctcacctttgtgctgaagctgccctacgcctggtcaaacctggaaatcagaacacacaagtgacagaagcctggaacaaagttgcccactcatttaactgcacgccaatagaaggtatgctgtcacaccagttgaagcagcatgtcatcgatggagaaaaaaccattatccagaatcccacagaccagcagaagaaggaccatgaaaaagctgaatttgaggtacatgaagtatatgctgtggatgttctcgtcagctcaggagagggcaaggccaaggatgcaggacagagaaccactatttacaaacgagacccctctaaacagtatggactgaaaatgaaaacttcacgtgccttcttcagtgaggtggaaaggcgttttgatgccatgccgtttactttaagagcatttgaagatgagaagaaggctcggatgggtgtggtggagtgcgccaaacatgaactgctgcaaccatttaatgttctctatgagaaggagggtgaatttgttgcccagtttaaatttacagttctgctcatgcccaatggccccatgcggataaccagtggtcccttcgagcctgacctctacaagtctgagatggaggtccaggatgcagagctaaaggccctcctccagagttctgcaagtcgaaaaacccagaaaaagaaaaaaaagaaggcctccaagactgcagagaatgccaccagtggggaaacattagaagaaaatgaagctggggactgaggtgggtcccatctccccagcttgctgctcctgcctcatccccttcccaccaaaccccagactctgtgaagtgcagttcttctccacctaggaccgccagcagagcggggggatctccctgcccccaccccagttccccaacccactcccttccaacaacaaccagctccaactgactctggtcttgggaggtgaggcttcccaaccacggaagactactttaaatgaaaaaaagaaattgaataataaaatcaggagtcaaaattcatcgtcttcaagcccctctttctagccttttctactactctctgcttggtcaaggtttgtgccccactacagaacagggctaaattagccaccaccactgaaaactcagccgaatttttttataccactctgatgtcagcattttttccatctgttggggctttttcctcttttttccattctccccaaatattttatctggcttcaaaattaagaggattatttttcagattgtttttattcagtgtggccgattcctcatctgattcaggctgtccagtcaggcccctcccattttaggagctggagccttcatttatgaagagattctcatctatgaaatggatcctcatttgtaaatcttttttcttccattttcacaaagctgtaaagaaataatccatctcaaccttaccctttttctctggagtcagtggggtctttcctcgctccatcttacacagacctgagctggaagctcaactggttttgttccctgtttgaaatattgtgatctccctcccatgaaagaaaaaccaagaaccagaggcgtagactgactgaagacacaactcctggctttctgaagctatggacttggattggattgctgggggtttgtagagaaaggtgacaaatttcagtacctctggcatgctgtcccaaggaaatagggntcccataatttgggtttnaacttgaattggtggttaataattggttgccaaa

SEQ ID NO: 30367 - DNA, 2343 bp, Homo sapiens
  misc_feature (33)..(33): n is a, c, g, or t
  misc_feature (2292)..(2292): n is a, c, g, or t
ccccatcagtacacctacagaaacgcgaactcncgaccggcggaacctccgtagaccacagcctgtggctgggaagggagacagaggcggcggcggctcaggggaaacgaggctgcagtggtggtagtaggaagatgtcgggcgaggacgagcaacaggagcaaactatcgctgaggacctggtcgtgaccaagtataagatggggggcgacatcgccaacagggtacttcggtccttggtggaagcatctagctcaggtgtgtcggtactgagcctgtgtgagaaaggtgatgccatgattatggaagaaacagggaaaatcttcaagaaagaaaaggaaatgaagaaaggtattgcttttcccaccagcatttcggtaaataactgtgtatgtcacttctcccctttgaagagcgaccaggattatattctcaaggaaggtgacttggtaaaaattgaccttggggtccatgtggatggcttcatcgctaatgtagctcacacttttgtggttgatgtagctcaggggacccaagtaacagggaggaaagcagatgttattaaggcagctcacctttgtgctgaagctgccctacgcctggtcaaacctggaaatcagaacacacaagtgacagaagcctggaacaaagttgcccactcatttaactgcacgccaatagaaggtatgctgtcacaccagttgaagcagcatgtcatcgatggagaaaaaaccattatccagaatcccacagaccagcagaagaaggaccatgaaaaagctgaatttgaggtacatgaagtatatgctgtggatgttctcgtcagctcaggagagggcaaggccaaggatgcaggacagagaaccactatttacaaacgagacccctctaaacagtatggactgaaaatgaaaacttcacgtgccttcttcagtgaggtggaaaggcgttttgatgccatgccgtttactttaagagcatttgaagatgagaagaaggctcggatgggtgtggtggagtgcgccaaacatgaactgctgcaaccatttaatgttctctatgagaaggagggtgaatttgttgcccagtttaaatttacagttctgctcatgcccaatggccccatgcggataaccagtggtcccttcgagcctgacctctacaagtctgagatggaggtccaggatgcagagctaaaggccctcctccagagttctgcaagtcgaaaaacccagaaaaagaaaaaaaagaaggcctccaagactgcagagaatgccaccagtggggaaacattagaagaaaatgaagctggggactgaggtgggtcccatctccccagcttgctgctcctgcctcatccccttcccaccaaaccccagactctgtgaagtgcagttcttctccacctaggaccgccagcagagcggggggatctccctgcccccaccccagttccccaacccactcccttccaacaacaaccagctccaactgactctggtcttgggaggtgaggcttcccaaccacggaagactactttaaatgaaaaaaagaaattgaataataaaatcaggagtcaaaattcatcgtcttcaagcccctctttctagccttttctactactctctgcttggtcaaggtttgtgccccactacagaacagggctaaattagccaccaccactgaaaactcagccgaatttttttataccactctgatgtcagcattttttccatctgttggggctttttcctcttttttccattctccccaaatattttatctggcttcaaaattaagaggattatttttcagattgtttttattcagtgtggccgattcctcatctgattcaggctgtccagtcaggcccctcccattttaggagctggagccttcatttatgaagagattctcatctatgaaatggatcctcatttgtaaatcttttttcttccattttcacaaagctgtaaagaaataatccatctcaaccttaccctttttctctggagtcagtggggtctttcctcgctccatcttacacagacctgagctggaagctcaactggttttgttccctgtttgaaatattgtgatctccctcccatgaaagaaaaaccaagaaccagaggcgtagactgactgaagacacaactcctggctttctgaagctatggacttggattggattgctgggggtttgtagagaaaggtgacaaatttcagtacctctggcatgctgtcccagaaactagggctcctactaacttatgaggttttatacacantacccggatacataaatatgagtaggtgggcttggggtgggggtggagagg

SEQ ID NO: 30368 - DNA, 2158 bp, Homo sapiens
  misc_feature (33)..(33): n is a, c, g, or t
  misc_feature (1983)..(1983): n is a, c, g, or t
  misc_feature (1987)..(1987): n is a, c, g, or t
ccccatcagtacacctacagaaacgcgaactcncgaccggcggaacctccgtagaccacagcctgtggctgggaagggagacagaggcggcggcggctcaggggaaacgaggctgcagtggtggtagtaggaagatgtcgggcgaggacgagcaacaggagcaaactatcgctgaggacctggtcgtgaccaagtataagatggggggcgacatcgccaacagggtacttcggtccttggtggaagcatctagctcaggtgtgtcggtactgagcctgtgtgagaaaggtgatgccatgattatggaagaaacagggaaaatcttcaagaaagaaaaggaaatgaagaaaggtattgcttttcccaccagcatttcggtaaataactgtgtatgtcacttctcccctttgaagagcgaccaggattatattctcaaggaaggtgacttggtaaaaattgaccttggggtccatgtggatggcttcatcgctaatgtagctcacacttttgtggttgatgtagctcaggggacccaagtaacagggaggaaagcagatgttattaaggcagctcacctttgtgctgaagctgccctacgcctggtcaaacctggaaatcagaacacacaagtgacagaagcctggaacaaagttgcccactcatttaactgcacgccaatagaaggtatgctgtcacaccagttgaagcagcatgtcatcgatggagaaaaaaccattatccagaatcccacagaccagcagaagaaggaccatgaaaaagctgaatttgaggtacatgaagtatatgctgtggatgttctcgtcagctcaggagagggcaaggccaaggatgcaggacagagaaccactatttacaaacgagacccctctaaacagtatggactgaaaatgaaaacttcacgtgccttcttcagtgaggtggaaaggcgttttgatgccatgccgtttactttaagagcatttgaagatgagaagaaggctcggatgggtgtggtggagtgcgccaaacatgaactgctgcaaccatttaatgttctctatgagaaggagggtgaatttgttgcccagtttaaatttacagttctgctcatgcccaatggccccatgcggataaccagtggtcccttcgagcctgacctctacaagtctgagatggaggtccaggatgcagagctaaaggccctcctccagagttctgcaagtcgaaaaacccagaaaaagaaaaaaaagaaggcctccaagactgcagagaatgccaccagtggggaaacattagaagaaaatgaagctggggactgaggtgggtcccatctccccagcttgctgctcctgcctcatccccttcccaccaaaccccagactctgtgaagtgcagttcttctccacctaggaccgccagcagagcggggggatctccctgcccccaccccagttccccaacccactcccttccaacaacaaccagctccaactgactctggtcttgggaggtgaggcttcccaaccacggaagactactttaaatgaaaaaaagaaattgaataataaaatcaggagtcaaaattcatcgtcttcaagcccctctttctagccttttctactactctctgcttggtcaaggtttgtgccccactacagaacagggctaaattagccaccaccactgaaaactcagccgaatttttttataccactctgatgtcagcattttttccatctgttggggctttttcctcttttttccattctccccaaatattttatctggcttcaaaattaagaggattatttttcagattgtttttattcagtgtggccgattcctcatctgattcaggctgtccagtcaggcccctcccattttaggagctggagccttcatttatgaagagattctcatctatgaaatggatcctcatttgtaaatcttttcttccattttcacaaagctgtaagaataatncatntaacttaacttttctctggagcaggggggtttccccggcgccacttcacaaaactggcggaaagcacacgggttgtgccggtgagatatgggggtccgcctggagaataacgaacacaggtgttggctgggacaacccggtttcacaacacgtaggttgggggggcaaaga

SEQ ID NO: 30369 - DNA, 2684 bp, Homo sapiens
tccccccccccccccccccccgcgccccatcatcggctaggtacgaggctgggtggtgcgcctgcctgcccgctcccttgcttgctcgcgctttcgctcgccctctcctcgaggatcgaggggactctgaccacagcctgtggctgggaagggagacagaggcggcggcggctcaggggaaacgaggctgcagtggtggtagtaggaagatgtcgggcgaggacgagcaacaggagcaaactatcgctgaggacctggtcgtgaccaagtataagatggggggcgacatcgccaacagtgagtgcggcctcgggggtcggggaatcaggctgatagggaaaggtaacaggctggcccggaaggggctggagcggaggggtcatgcggactgagctactgaggggcccgcaccggtccgctgggcacggcgtggtgggaagacccggtgtcgcgcctgggacctgagcgggcaggcccaggctgaagtctatggaggtgcgggtcggcgaccaggatgagcgcagagaggggaccctggcaggctccgacccgaggccgtttgttaggaggggtacttcggtccttggtggaagcatctagctcaggtgtgtcggtactgagcctgtgtgagaaaggtgatgccatgattatggaagaaacagggaaaatcttcaagaaagaaaaggaaatgaagaaaggtattgcttttcccaccagcatttcggtaaataactgtgtatgtcacttctcccctttgaagagcgaccaggattatattctcaaggaaggtgacttggtaaaaattgaccttggggtccatgtggatggcttcatcgctaatgtagctcacacttttgtggttgatgtagctcaggggacccaagtaacagggaggaaagcagatgttattaaggcagctcacctttgtgctgaagctgccctacgcctggtcaaacctggaaatcagaacacacaagtgacagaagcctggaacaaagttgcccactcatttaactgcacgccaatagaaggtatgctgtcacaccagttgaagcagcatgtcatcgatggagaaaaaaccattatccagaatcccacagaccagcagaagaaggaccatgaaaaagctgaatttgaggtacatgaagtatatgctgtggatgttctcgtcagctcaggagagggcaaggccaaggatgcaggacagagaaccactatttacaaacgagacccctctaaacagtatggactgaaaatgaaaacttcacgtgccttcttcagtgaggtggaaaggcgttttgatgccatgccgtttactttaagagcatttgaagatgagaagaaggctcggatgggtgtggtggagtgcgccaaacatgaactgctgcaaccatttaatgttctctatgagaaggagggtgaatttgttgcccagtttaaatttacagttctgctcatgcccaatggccccatgcggataaccagtggtcccttcgagcctgacctctacaagtctgagatggaggtccaggatgcagagctaaaggccctcctccagagttctgcaagtcgaaaaacccagaaaaagaaaaaaaagaaggcctccaagactgcagagaatgccaccagtggggaaacattagaagaaaatgaagctggggactgaggtgggtcccatctccccagcttgctgctcctgcctcatccccttcccaccaaaccccagactctgtgaagtgcagttcttctccacctaggaccgccagcagagcggggggatctccctgcccccaccccagttccccaacccactcccttccaacaacaaccagctccaactgactctggtcttgggaggtgaggcttcccaaccacggaagactactttaaatgaaaaaaagaaattgaataataaaatcaggagtcaaaattcatcgtcttcaagcccctctttctagccttttctactactctctgcttggtcaaggtttgtgccccactacagaacagggctaaattagccaccaccactgaaaactcagccgaatttttttataccactctgatgtcagcattttttccatctgttggggctttttcctcttttttccattctccccaaatattttatctggcttcaaaattaagaggattatttttcagattgtttttattcagtgtggccgattcctcatctgattcaggctgtccagtcaggcccctcccattttaggagctggagccttcatttatgaagagattctcatctatgaaatggatcctcatttgtaaatcttttttcttccattttcacaaagctgtaaagaaataatccatctcaaccttaccctttttctctggagtcagtggggtctttcctcgctccatcttacacagacctgagctggaagctcaactggttttgttccctgtttgaaatattgtgatctccctcccatgaaagaaaaaccaagaaccagaggcgtagactgactgaagacacaactcctggctttctgaagctatggacttggattggattgctgggggtttgtagagaaaggtgacaaatttcagtacctctggcatgctgtcccaggaaactagggctcccactaacttatgaggtttttaaacacattgaaaatgacatgacattaaaataaatttggatttgctcataa

SEQ ID NO: 30370 - DNA, 1908 bp, Homo sapiens
  misc_feature (33)..(33): n is a, c, g, or t
  misc_feature (1589)..(1589): n is a, c, g, or t
ccccatcagtacacctacagaaacgcgaactcncgaccggcggaacctccgtagaccacagcctgtggctgggaagggagacagaggcggcggcggctcaggggaaacgaggctgcagtggtggtagtaggaagatgtcgggcgaggacgagcaacaggagcaaactatcgctgaggacctggtcgtgaccaagtataagatggggggcgacatcgccaacagggtacttcggtccttggtggaagcatctagctcaggtgtgtcggtactgagcctgtgtgagaaaggtgatgccatgattatggaagaaacagggaaaatcttcaagaaagaaaaggaaatgaagaaaggtattgcttttcccaccagcatttcggtaaataactgtgtatgtcacttctcccctttgaagagcgaccaggattatattctcaaggaaggtgacttggtaaaaattgaccttggggtccatgtggatggcttcatcgctaatgtagctcacacttttgtggttgatgtagctcaggggacccaagtaacagggaggaaagcagatgttattaaggcagctcacctttgtgctgaagctgccctacgcctggtcaaacctggaaatcagaacacacaagtgacagaagcctggaacaaagttgcccactcatttaactgcacgccaatagaaggtatgctgtcacaccagttgaagcagcatgtcatcgatggagaaaaaaccattatccagaatcccacagaccagcagaagaaggaccatgaaaaagctgaatttgaggtacatgaagtatatgctgtggatgttctcgtcagctcaggagagggcaaggccaaggatgcaggacagagaaccactatttacaaacgagacccctctaaacagtatggactgaaaatgaaaacttcacgtgccttcttcagtgaggtggaaaggcgttttgatgccatgccgtttactttaagagcatttgaagatgagaagaaggctcggatgggtgtggtggagtgcgccaaacatgaactgctgcaaccatttaatgttctctatgagaaggagggtgaatttgttgcccagtttaaatttacagttctgctcatgcccaatggccccatgcggataaccagtggtcccttcgagcctgacctctacaagtctgagatggaggtccaggatgcagagctaaaggccctcctccagagttctgcaagtcgaaaaacccagaaaaagaaaaaaaagaaggcctccaagactgcagagaatgccaccagtggggaaacattagaagaaaatgaagctggggactgaggtgggtcccatctccccagcttgctgctcctgcctcatccccttcccaccaaaccccagactctgtgaagtgcagttcttctccacctaggaccgccagcagagcggggggatctccctgcccccaccccagttccccaacccactcccttccaacaacaaccagctccaactgactctggtcttgggaggtgaggcttcccaaccacggaagactactttaaatgaaaaaaagaaattgaataataaaatcaggagtcaaaaaaaaanaaagacaccaacaaaaaaaaaacaaaaagcacaaacaaaaacacaaagggcgcgacacccaaaagatacccccaagagagggcgacaaaggaaacgcagaaccacagagaagagaaaaaaagggacgcccaaaaaagagggcagcacaaacacaacgccacgacagccagcagcacgcaacaaccacaccgacacccgggggcaaaacacggcacgcggagcacaacacgatgagaggacaccctacacaccaggggggggggacacaaaggaggacacacataccacaaacgcactcaacgaaccaagcgggcaaaga

SEQ ID NO: 30371 - DNA, 1996 bp, Homo sapiens
  misc_feature (33)..(33): n is a, c, g, or t
  misc_feature (1598)..(1598): n is a, c, g, or t
  misc_feature (1996)..(1996): n is a, c, g, or t
ccccatcagtacacctacagaaacgcgaactcncgaccggcggaacctccgtagaccacagcctgtggctgggaagggagacagaggcggcggcggctcaggggaaacgaggctgcagtggtggtagtaggaagatgtcgggcgaggacgagcaacaggagcaaactatcgctgaggacctggtcgtgaccaagtataagatggggggcgacatcgccaacagggtacttcggtccttggtggaagcatctagctcaggtgtgtcggtactgagcctgtgtgagaaaggtgatgccatgattatggaagaaacagggaaaatcttcaagaaagaaaaggaaatgaagaaaggtattgcttttcccaccagcatttcggtaaataactgtgtatgtcacttctcccctttgaagagcgaccaggattatattctcaaggaaggtgacttggtaaaaattgaccttggggtccatgtggatggcttcatcgctaatgtagctcacacttttgtggttgatgtagctcaggggacccaagtaacagggaggaaagcagatgttattaaggcagctcacctttgtgctgaagctgccctacgcctggtcaaacctggaaatcagaacacacaagtgacagaagcctggaacaaagttgcccactcatttaactgcacgccaatagaaggtatgctgtcacaccagttgaagcagcatgtcatcgatggagaaaaaaccattatccagaatcccacagaccagcagaagaaggaccatgaaaaagctgaatttgaggtacatgaagtatatgctgtggatgttctcgtcagctcaggagagggcaaggccaaggatgcaggacagagaaccactatttacaaacgagacccctctaaacagtatggactgaaaatgaaaacttcacgtgccttcttcagtgaggtggaaaggcgttttgatgccatgccgtttactttaagagcatttgaagatgagaagaaggctcggatgggtgtggtggagtgcgccaaacatgaactgctgcaaccatttaatgttctctatgagaaggagggtgaatttgttgcccagtttaaatttacagttctgctcatgcccaatggccccatgcggataaccagtggtcccttcgagcctgacctctacaagtctgagatggaggtccaggatgcagagctaaaggccctcctccagagttctgcaagtcgaaaaacccagaaaaagaaaaaaaagaaggcctccaagactgcagagaatgccaccagtggggaaacattagaagaaaatgaagctggggactgaggtgggtcccatctccccagcttgctgctcctgcctcatccccttcccaccaaaccccagactctgtgaagtgcagttcttctccacctaggaccgccagcagagcggggggatctccctgcccccaccccagttccccaacccactcccttccaacaacaaccagctccaactgactctggtcttgggaggtgaggcttcccaaccacggaagactactttaaatgaaaaaaagaaattgaataataaaatcaggagtcaaaacacaaaaacaaacancacacacaagcaagcaacacacaatcacagtaacaacacaccacaccacaacacacaagaaacaaatacaaaacaaagcacgcagcggcgcaccaaaaaagcaaccacagggaccacgagaacagaacacacacgacagaacaacgcgcggccaccaacagaggcaaggaaaaaccaaccacgagggcaggagaacaccccacaatgcacccaacacccacagatcaccagcgacagcaaacctgcgtgagcaagaagacaccagcaaagcaaaacgaccgagcaaacacatgagacgaagaaagcagaagccagggaataacacaaccaaacaccaccaccaagcacacacaaacaaagcacacacgaagagaccaaagaacaaacacaggagcagn

SEQ ID NO: 30372 - DNA, 1893 bp, Homo sapiens
cctctactagtgaactctaaaccaactggcttaaatcgccagcccatatccttcacagtagtggctgtggttgatgtagctcagggacccaagtaacagggaggaaagcagatgttattaaggcagctcacctttgtgctgaagctgccctacgcctggtcaaacctggaaatcagaacacacaagtgacagaagcctggaacaaagttgcccactcatttaactgcacgccaatagaaggtatgctgtcacaccagttgaagcagcatgtcatcgatggagaaaaaaccattatccagaatcccacagaccagcagaagaaggaccatgaaaaagctgaatttgaggtacatgaagtatatgctgtggatgttctcgtcagctcaggagagggcaaggccaaggatgcaggacagagaaccactatttacaaacgagacccctctaaacagtatggactgaaaatgaaaacttcacgtgccttcttcagtgaggtggaaaggcgttttgatgccatgccgtttactttaagagcatttgaagatgagaagaaggctcggatgggtgtggtggagtgcgccaaacatgaactgctgcaaccatttaatgttctctatgagaaggagggtgaatttgttgcccagtttaaatttacagttctgctcatgcccaatggccccatgcggataaccagtggtcccttcgagcctgacctctacaagtctgagatggaggtccaggatgcagagctaaaggccctcctccagagttctgcaagtcgaaaaacccagaaaaagaaaaaaaagaaggcctccaagactgcagagaatgccaccagtggggaaacattagaagaaaatgaagctggggactgaggtgggtcccatctccccagcttgctgctcctgcctcatccccttcccaccaaaccccagactctgtgaagtgcagttcttctccacctaggaccgccagcagagcggggggatctccctgcccccaccccagttccccaacccactcccttccaacaacaaccagctccaactgactctggtcttgggaggtgaggcttcccaaccacggaagactactttaaatgaaaaaaagaaattgaataataaaatcaggagtcaaaattcatcgtcttcaagcccctctttctagccttttctactactctctgcttggtcaaggtttgtgccccactacagaacagggctaaattagccaccaccactgaaaactcagccgaatttttttataccactctgatgtcagcattttttccatctgttggggctttttcctcttttttccattctccccaaatattttatctggcttcaaaattaagaggattatttttcagattgtttttattcagtgtggccgattcctcatctgattcaggctgtccagtcaggcccctcccattttaggagctggagccttcatttatgaagagattctcatctatgaaatggatcctcatttgtaaatcttttttcttccattttcacaaagctgtaaagaaataatccatctcaaccttaccctttttctctggagtcagtggggtctttcctcgctccatcttacacagacctgagctggaagctcaactggttttgttccctgtttgaaatattgtgatctccctcccatgaaagaaaaaccaagaaccagaggcgtagactgactgaagacacaactcctggctttctgaagctatggacttggattggattgctgggggtttgtagagaaaggtgacaaatttcagtacctctggcatgctgtcccaggaaactagggctcccactaacttatgaggtttttaaacacattgaaaatgacatgacattaaaataaatttggatttgctcataa

SEQ ID NO: 30373 - DNA, 2203 bp, Homo sapiens
  misc_feature (33)..(33): n is a, c, g, or t
ccccatcagtacacctacagaaacgcgaactcncgaccggcggaacctccgtagaccacagcctgtggctgggaagggagacagaggcggcggcggctcaggggaaacgaggctgcagtggtggtagtaggaagatgtcgggcgaggacgagcaacaggagcaaactatcgctgaggacctggtcgtgaccaagtataagatggggggcgacatcgccaacagggtacttcggtccttggtggaagcatctagctcaggtgtgtcggtactgagcctgtgtgagaaaggtgatgccatgattatggaagaaacagggaaaatcttcaagaaagaaaaggaaatgaagaaaggtattgcttttcccaccagcatttcggtaaataactgtgtatgtcacttctcccctttgaagagcgaccaggattatattctcaaggaaggtgacttggtaaaaatgggacccaagtaacagggaggaaagcagatgttattaaggcagctcacctttgtgctgaagctgccctacgcctggtcaaacctggaaatcaggtatgctgtcacaccagttgaagcagcatgtcatcgatggagaaaaaaccattatccagaatcccacagaccagcagaagaaggaccatgaaaaagctgaatttgaggtacatgaagtatatgctgtggatgttctcgtcagctcaggagagggcaaggccaaggatgcaggacagagaaccactatttacaaacgagacccctctaaacagtatggactgaaaatgaaaacttcacgtgccttcttcagtgaggtggaaaggcgttttgatgccatgccgtttactttaagagcatttgaagatgagaagaaggctcggatgggtgtggtggagtgcgccaaacatgaactgctgcaaccatttaatgttctctatgagaaggagggtgaatttgttgcccagtttaaatttacagttctgctcatgcccaatggccccatgcggataaccagtggtcccttcgagcctgacctctacaagtctgagatggaggtccaggatgcagagctaaaggccctcctccagagttctgcaagtcgaaaaacccagaaaaagaaaaaaaagaaggcctccaagactgcagagaatgccaccagtggggaaacattagaagaaaatgaagctggggactgaggtgggtcccatctccccagcttgctgctcctgcctcatccccttcccaccaaaccccagactctgtgaagtgcagttcttctccacctaggaccgccagcagagcggggggatctccctgcccccaccccagttccccaacccactcccttccaacaacaaccagctccaactgactctggtcttgggaggtgaggcttcccaaccacggaagactactttaaatgaaaaaaagaaattgaataataaaatcaggagtcaaaattcatcgtcttcaagcccctctttctagccttttctactactctctgcttggtcaaggtttgtgccccactacagaacagggctaaattagccaccaccactgaaaactcagccgaatttttttataccactctgatgtcagcattttttccatctgttggggctttttcctcttttttccattctccccaaatattttatctggcttcaaaattaagaggattatttttcagattgtttttattcagtgtggccgattcctcatctgattcaggctgtccagtcaggcccctcccattttaggagctggagccttcatttatgaagagattctcatctatgaaatggatcctcatttgtaaatcttttttcttccattttcacaaagctgtaaagaaataatccatctcaaccttaccctttttctctggagtcagtggggtctttcctcgctccatcttacacagacctgagctggaagctcaactggttttgttccctgtttgaaatattgtgatctccctcccatgaaagaaaaaccaagaaccagaggcgtagactgactgaagacacaactcctggctttctgaagctatggacttggattggattgctgggggtttgtagagaaaggtgacaaatttcagtacctctggcatgctgtcccaggaaactagggctcccactaacttatgaggtttttaaacacattgaaaatgacatgacattaaaataaatttggatttgctcataa

SEQ ID NO: 30374 - DNA, 2731 bp, Homo sapiens
  misc_feature (33)..(33): n is a, c, g, or t
ccccatcagtacacctacagaaacgcgaactcncgaccggcggaacctccgtagaccacagcctgtggctgggaagggagacagaggcggcggcggctcaggggaaacgaggctgcagtggtggtagtaggaagatgtcgggcgaggacgagcaacaggagcaaactatcgctgaggacctggtcgtgaccaagtataagatggggggcgacatcgccaacagggtacttcggtccttggtggaagcatctagctcaggtgtgtcggtactgagcctgtgtgagaaaggtgatgccatgattatggaagaaacagggaaaatcttcaagaaagaaaaggaaatgaagaaaggtattgcttttcccaccagcatttcggtaaataactgtgtatgtcacttctcccctttgaagagcgaccaggattatattctcaaggaaggtgacttggtaaaaattgaccttggggtccatgtggatggcttcatcgctaatgtagctcacacttttgtggttgatgtagctcaggggacccaagtaacagggaggaaagcagatgttattaaggcagctcacctttgtgctgaagctgccctacgcctggtcaaacctggaaatcagaacacacaagtgacagaagcctggaacaaagttgcccactcatttaactgcacgccaatagaaggtatgctgtcacaccagttgaagcagcatgtcatcgatggagaaaaaaccattatccagaatcccacagaccagcagaagaaggaccatgaaaaagctgaatttgaggtacatgaagtatatgctgtggatgttctcgtcagctcaggagagggcaaggccaaggatgcaggacagagaaccactatttacaaacgagacccctctaaacagtatggactgaaaatgaaaacttcacgtgccttcttcagtgaggtggaaaggcgttttgatgccatgccgtttactttaaggtactaagcaatgatagtacttggaaccagtctgactcacagaccatacacccaggaacactttttcctctcccttcctgcctagacttgtagcgtgcatgtgctcactccctccctctctctccccatctccttctcattgaaggtaatgtaaaagagcaatcctaagcatgatttctgcctgagggtaggagctattttaaaatatgagcaaaatggtaagacttgatggggagttaaagatacctctgaatatcatcttccctgccagagcatttgaagatgagaagaaggctcggatgggtgtggtggagtgcgccaaacatgaactgctgcaaccatttaatgttctctatgagaaggagggtgagttccaaaaagagcttcactttggattccctgattataagatatccttcctgtaagttcagaagagctaagtatgacaaaggaactttttatcaaaacacatcttcatttttgccataggtgaatttgttgcccagtttaaatttacagttctgctcatgcccaatggccccatgcggataaccagtggtcccttcgagcctgacctctacaagtctgagatggaggtccaggatgcagagctaaaggccctcctccagagttctgcaagtcgaaaaacccagaaaaagaaaaaaaagaaggcctccaagactgcagagaatgccaccagtggggaaacattagaagaaaatgaagctggggactgaggtgggtcccatctccccagcttgctgctcctgcctcatccccttcccaccaaaccccagactctgtgaagtgcagttcttctccacctaggaccgccagcagagcggggggatctccctgcccccaccccagttccccaacccactcccttccaacaacaaccagctccaactgactctggtcttgggaggtgaggcttcccaaccacggaagactactttaaatgaaaaaaagaaattgaataataaaatcaggagtcaaaattcatcgtcttcaagcccctctttctagccttttctactactctctgcttggtcaaggtttgtgccccactacagaacagggctaaattagccaccaccactgaaaactcagccgaatttttttataccactctgatgtcagcattttttccatctgttggggctttttcctcttttttccattctccccaaatattttatctggcttcaaaattaagaggattatttttcagattgtttttattcagtgtggccgattcctcatctgattcaggctgtccagtcaggcccctcccattttaggagctggagccttcatttatgaagagattctcatctatgaaatggatcctcatttgtaaatcttttttcttccattttcacaaagctgtaaagaaataatccatctcaaccttaccctttttctctggagtcagtggggtctttcctcgctccatcttacacagacctgagctggaagctcaactggttttgttccctgtttgaaatattgtgatctccctcccatgaaagaaaaaccaagaaccagaggcgtagactgactgaagacacaactcctggctttctgaagctatggacttggattggattgctgggggtttgtagagaaaggtgacaaatttcagtacctctggcatgctgtcccaggaaactagggctcccactaacttatgaggtttttaaacacattgaaaatgacatgacattaaaataaatttggatttgctcataa

SEQ ID NO: 30375 - DNA, 1527 bp, Homo sapiens
cggacgcgtgggtcgacccacgcgtcggcaaggccaaggatgcaggacagagaaccactatttacaaacgagacccctctaaacagtatggactgaaaatgaaaacttcacgtgccttcttcagtgaggtggaaaggcgttttgatgccatgccgtttactttaagagcatttgaagatgagaagaaggctcggatgggtgtggtggagtgcgccaaacatgaactgctgcaaccatttaatgttctctatgagaaggagggtgaatttgttgcccagtttaaatttacagttctgctcatgcccaatggccccatgcggataaccagtggtcccttcgagcctgacctctacaagtctgagatggaggtccaggatgcagagctaaaggccctcctccagagttctgcaagtcgaaaaacccagaaaaagaaaaaaaagaaggcctccaagactgcagagaatgccaccagtggggaaacattagaagaaaatgaagctggggactgaggtgggtcccatctccccagcttgctgctcctgcctcatccccttcccaccaaaccccagactctgtgaagtgcagttcttctccacctaggaccgccagcagagcggggggatctccctgcccccaccccagttccccaacccactcccttccaacaacaaccagctccaactgactctggtcttgggaggtgaggcttcccaaccacggaagactactttaaatgaaaaaaagaaattgaataataaaatcaggagtcaaaattcatcgtcttcaagcccctctttctagccttttctactactctctgcttggtcaaggtttgtgccccactacagaacagggctaaattagccaccaccactgaaaactcagccgaatttttttataccactctgatgtcagcattttttccatctgttggggctttttcctcttttttccattctccccaaatattttatctggcttcaaaattaagaggattatttttcagattgtttttattcagtgtggccgattcctcatctgattcaggctgtccagtcaggcccctcccattttaggagctggagccttcatttatgaagagattctcatctatgaaatggatcctcatttgtaaatcttttttcttccattttcacaaagctgtaaagaaataatccatctcaaccttaccctttttctctggagtcagtggggtctttcctcgctccatcttacacagacctgagctggaagctcaactggttttgttccctgtttgaaatattgtgatctccctcccatgaaagaaaaaccaagaaccagaggcgtagactgactgaagacacaactcctggctttctgaagctatggacttggattggattgctgggggtttgtagagaaaggtgacaaatttcagtacctctggcatgctgtcccaggaaactagggctcccactaacttatgaggtttttaaacacattgaaaatgacatgacattaaaataaatttggatttgctcataa

SEQ ID NO: 30376 - DNA, 2053 bp, Homo sapiens
  misc_feature (33)..(33): n is a, c, g, or t
  misc_feature (891)..(891): n is a, c, g, or t
  misc_feature (897)..(897): n is a, c, g, or t
  misc_feature (1655)..(1655): n is a, c, g, or t
  misc_feature (2053)..(2053): n is a, c, g, or t
ccccatcagtacacctacagaaacgcgaactcncgaccggcggaacctccgtagaccacagcctgtggctgggaagggagacagaggcggcggcggctcaggggaaacgaggctgcagtggtggtagtaggaagatgtcgggcgaggacgagcaacaggagcaaactatcgctgaggacctggtcgtgaccaagtataagatggggggcgacatcgccaacagggtacttcggtccttggtggaagcatctagctcaggtgtgtcggtactgagcctgtgtgagaaaggtgatgccatgattatggaagaaacagggaaaatcttcaagaaagaaaaggaaatgaagaaaggtattgcttttcccaccagcatttcggtaaataactgtgtatgtcacttctcccctttgaagagcgaccaggattatattctcaaggaaggtgacttggtaaaaattgaccttggggtccatgtggatggcttcatcgctaatgtagctcacacttttgtggttgatgtagctcaggggacccaagtaacagggaggaaagcagatgttattaaggcagctcacctttgtgctgaagctgccctacgcctggtcaaacctggaaatcagaacacacaagtgacagaagcctggaacaaagttgcccactcatttaactgcacgccaatagaaggtatgctgtcacaccagttgaagcagcatgtcatcgatggagaaaaaaccattatccagaatcccacagaccagcagaagaaggaccatgaaaaagctgaatttgaggtacatgaagtatatgctgtggatgttctcgtcagctcaggagagggcaagccaaggatgcaggacagagaaccactatttacaaacgagacccctctanacagtntggccaaggatgcaggacagagaaccactatttacaaacgagacccctctaaacagtatggactgaaaatgaaaacttcacgtgccttcttcagtgaggtggaaaggcgttttgatgccatgccgtttactttaagagcatttgaagatgagaagaaggctcggatgggtgtggtggagtgcgccaaacatgaactgctgcaaccatttaatgttctctatgagaaggagggtgaatttgttgcccagtttaaatttacagttctgctcatgcccaatggccccatgcggataaccagtggtcccttcgagcctgacctctacaagtctgagatggaggtccaggatgcagagctaaaggccctcctccagagttctgcaagtcgaaaaacccagaaaaagaaaaaaaagaaggcctccaagactgcagagaatgccaccagtggggaaacattagaagaaaatgaagctggggactgaggtgggtcccatctccccagcttgctgctcctgcctcatccccttcccaccaaaccccagactctgtgaagtgcagttcttctccacctaggaccgccagcagagcggggggatctccctgcccccaccccagttccccaacccactcccttccaacaacaaccagctccaactgactctggtcttgggaggtgaggcttcccaaccacggaagactactttaaatgaaaaaaagaaattgaataataaaatcaggagtcaaaacacaaaaacaaacancacacacaagcaagcaacacacaatcacagtaacaacacaccacaccacaacacacaagaaacaaatacaaaacaaagcacgcagcggcgcaccaaaaaagcaaccacagggaccacgagaacagaacacacacgacagaacaacgcgcggccaccaacagaggcaaggaaaaaccaaccacgagggcaggagaacaccccacaatgcacccaacacccacagatcaccagcgacagcaaacctgcgtgagcaagaagacaccagcaaagcaaaacgaccgagcaaacacatgagacgaagaaagcagaagccagggaataacacaaccaaacaccaccaccaagcacacacaaacaaagcacacacgaagagaccaaagaacaaacacaggagcagn

SEQ ID NO: 30377 - DNA, 1187 bp, Homo sapiens
  misc_feature (33)..(33): n is a, c, g, or t
ccccatcagtacacctacagaaacgcgaactcncgaccggcggaacctccgtagaccacagcctgtggctgggaagggagacagaggcggcggcggctcaggggaaacgaggctgcagtggtggtagtaggaagatgtcgggcgaggacgagcaacaggagcaaactatcgctgaggacctggtcgtgaccaagtataagatggggggcgacatcgccaacagggtacttcggtccttggtggaagcatctagctcaggtgtgtcggtactgagcctgtgtgagaaaggtgatgccatgattatggaagaaacagggaaaatcttcaagaaagaaaaggaaatgaagaaaggtattgcttttcccaccagcatttcggtaaataactgtgtatgtcacttctcccctttgaagagcgaccaggattatattctcaaggaaggtgacttggtaaaaattgaccttggggtccatgtggatggcttcatcgctaatgtagctcacacttttgtggttgatgtagctcaggggacccaagtaacagggaggaaagcagatgttattaaggcagctcacctttgtgctgaagctgccctacgcctggtcaaacctggaaatcagaacacacaagtgacagaagcctggaacaaagttgcccactcatttaactgcacgccaatagaaggtatgctgtcacaccagttgaagcagcatgtcatcgatggagaaaaaaccattatccagaatcccacagaccagcagaagtaggtgccaaccctacttattaccttctaccacacaagactagtcatcaggtttttttctatactcccaactgaatcttgtccgccctctactccatgttttcaggagtgacctgttgctcttaatattccctttctctaggccgggcgcggtggctcacgcctgtaatcccagcactttgggaggctgaggcgggtggatcacctgaggtcacgagttcagaaccagcctaaccaacatggcgaaaccctgtctctactaaaaactacaaaaatgagccaggcctggtggtttgtgcctatagtcccagctacttgggaggctgaggcaggagagttgcttggacccgggaggtggaggttgcagtgagctgagattgtgccactgcactccagcctgggtgacagaatgagactctgtgtc

SEQ ID NO: 30378 - DNA, 753 bp, Homo sapiens
  misc_feature (33)..(33): n is a, c, g, or t
ccccatcagtacacctacagaaacgcgaactcncgaccggcggaacctccgtagaccacagcctgtggctgggaagggagacagaggcggcggcggctcaggggaaacgaggctgcagtggtggtagtaggaagatgtcgggcgaggacgagcaacaggagcaaactatcgctgaggacctggtcgtgaccaagtataagatggggggcgacatcgccaacagggtacttcggtccttggtggaagcatctagctcaggtgtgtcggtactgagcctgtgtgagaaaggtgatgccatgattatggaagaaacagggaaaatcttcaagaaagaaaaggaaatgaagaaaggtattgcttttcccaccagcatttcggtaaataactgtgtatgtcacttctcccctttgaagagcgaccaggattatattctcaaggaaggtgacttggtaaaaattgaccttggggtccatgtggatggcttcatcgctaatgtagctcacacttttgtggttgatgtagctcaggggacccaagtaacagggaggaaagcagatgttattaaggcagctcacctttgtgctgaagctgccctacgcctggtcaaacctggaaatcagaacacacaagtgacagaagcctggaacaaagttgcccactcatttaactgcacgccaatagaagatgtgtcacaccagttgaagcggctgtctccatacccattacaatctccagcattccccctcaaaccta

SEQ ID NO: 30379 - DNA, 1072 bp, Homo sapiens
tccccccccccccccccccccgcgccccatcatcggctaggtacgaggctgggtggtgcgcctgcctgcccgctcccttgcttgctcgcgctttcgctcgccctctcctcgaggatcgaggggactctgaccacagcctgtggctgggaagggagacagaggcggcggcggctcaggggaaacgaggctgcagtggtggtagtaggaagatgtcgggcgaggacgagcaacaggagcaaactatcgctgaggacctggtcgtgaccaagtataagatggggggcgacatcgccaacagtgagtgcggcctcgggggtcggggaatcaggctgatagggaaaggtaacaggctggcccggaaggggctggagcggaggggtcatgcggactgagctactgaggggcccgcaccggtccgctgggcacggcgtggtgggaagacccggtgtcgcgcctgggacctgagcgggcaggcccaggctgaagtctatggaggtgcgggtcggcgaccaggatgagcgcagagaggggaccctggcaggctccgacccgaggccgtttgttaggaggcaagacgtgttttctcttgttcctatccttcattcccgattattgcttcctctgattctggcagcggcgaggccacctcgaaaaggaagcgcccagctattggcgacagaagtgcccctctgtttttgtagcgtctccggggcgtcaggagccaagccggcacgtgttgctgggtcccattgcggatggctggcccccttcttactccgctagtgtccctgacaccagcttccccaccaccagcttccccaccacgtgctttgctggagcctttccttctttacttcagctcttaccctggtgggggcccccttctaccttgggccagctaaggagaccgttggagagcactcctggagcttctaatgcaagtcttggagatatatatggcttttcttgaagttactcattactaccacctttccaatctgtgcagatagtcttagttagcattcacatttgttgttctcagtgacttgacaactcaaatgttttggggtct

SEQ ID NO: 30380 - DNA, 926 bp, Homo sapiens
  misc_feature (774)..(775): n is a, c, g, or t
  misc_feature (778)..(778): n is a, c, g, or t
  misc_feature (783)..(783): n is a, c, g, or t
  misc_feature (790)..(790): n is a, c, g, or t
gctacgcctggtcaacctggaaatcagaacagggacccaagtaacagggaggaaagcagatgttattaaggcagctcacctttgtgctgaagctgccctacgcctggtcaaacctggaaatcagaacacacaagtgacagaagcctggaacaaagttgcccactcatttaactgcacgccaatagaaggtatgctgtcacaccagttgaagcagcatgtcatcgatggagaaaaaaccattatccagaatcccacagaccagcagaagaaggaccatgaaaaagctgaatttgaggtacatgaagtatatgctgtggatgttctcgtcagctcaggagagggcaaggccaaggatgcaggacagagaaccactatttacaaacgagacccctctaaacagtatggactgaaaatgaaaacttcacgtgccttcttcagtgaggtggaaaggcgttttgatgccatgccgtttactttaagagcatttgaagatgagaagaaggctcggatgggtgtggtggagtgcgccaaacatgaactgctgcaaccatttaatgttctctatgagaaggagggtgaatttgttgcccagtttaaatttacagttctgctcatgcccaatggccccatgcggataaccagtggtcccttcgagcctgacctctacaagtctgagatggaggtccaggatgcagagctaaaggccctcctccagagttctgcaagtcgaaaaacccagaaaaagaaaaaaaagaagctccagatggagaatgnnccnggggnacattgnagaatgcaactgggctgggggtccatctccaggttgtgttcgactatccttcacaaaccaaattggaaggcgttttcccctagaggcccaaggggttcgggccccatcccactttcaaaacacggctgcggggcca

SEQ ID NO: 30381 - DNA, 2337 bp, Homo sapiens
  misc_feature (33)..(33): n is a, c, g, or t
ccccatcagtacacctacagaaacgcgaactcncgaccggcggaacctccgtagaccacagcctgtggctgggaagggagacagaggcggcggcggctcaggggaaacgaggctgcagtggtggtagtaggaagatgtcgggcgaggacgagcaacaggagcaaactatcgctgaggacctggtcgtgaccaagtataagatggggggcgacatcgccaacagggtacttcggtccttggtggaagcatctagctcaggtgtgtcggtactgagcctgtgtgagaaaggtgatgccatgattatggaagaaacagggaaaatcttcaagaaagaaaaggaaatgaagaaaggtattgcttttcccaccagcatttcggtaaataactgtgtatgtcacttctcccctttgaagagcgaccaggattatattctcaaggaaggtgacttggtaaaaattgaccttggggtccatgtggatggcttcatcgctaatgtagctcacacttttgtggttgatgtagctcaggggacccaagtaacagggaggaaagcagatgttattaaggcagctcacctttgtgctgaagctgccctacgcctggtcaaacctggaaatcagaacacacaagtgacagaagcctggaacaaagttgcccactcatttaactgcacgccaatagaaggtatgctgtcacaccagttgaagcagcatgtcatcgatggagaaaaaaccattatccagaatcccacagaccagcagaagaaggaccatgaaaaagctgaatttgaggtacatgaagtatatgctgtggatgttctcgtcagctcaggagagggcaaggccaaggatgcaggacagagaaccactatttacaaacgagacccctctaaacagtatggactgaaaatgaaaacttcacgtgccttcttcagtgaggtggaaaggcgttttgatgccatgccgtttactttaagagcatttgaagatgagaagaaggctcggatgggtgtggtggagtgcgccaaacatgaactgctgcaaccatttaatgttctctatgagaaggagggtgaatttgttgcccagtttaaatttacagttctgctcatgcccaatggccccatgcggataaccagtggtcccttcgagcctgacctctacaagtctgagatggaggtccaggatgcagagctaaaggccctcctccagagttctgcaagtcgaaaaacccagaaaaagaaaaaaaagaaggcctccaagactgcagagaatgccaccagtggggaaacattagaagaaaatgaagctggggactgaggtgggtcccatctccccagcttgctgctcctgcctcatccccttcccaccaaaccccagactctgtgaagtgcagttcttctccacctaggaccgccagcagagcggggggatctccctgcccccaccccagttccccaacccactcccttccaacaacaaccagctccaactgactctggtcttgggaggtgaggcttcccaaccacggaagactactttaaatgaaaaaaagaaattgaataataaaatcaggagtcaaaattcatcgtcttcaagcccctctttctagccttttctactactctctgcttggtcaaggtttgtgccccactacagaacagggctaaattagccaccaccactgaaaactcagccgaatttttttataccactctgatgtcagcattttttccatctgttggggctttttcctcttttttccattctccccaaatattttatctggcttcaaaattaagaggattatttttcagattgtttttattcagtgtggccgattcctcatctgattcaggctgtccagtcaggcccctcccattttaggagctggagccttcatttatgaagagattctcatctatgaaatggatcctcatttgtaaatcttttttcttccattttcacaaagctgtaaagaaataatccatctcaaccttaccctttttctctggagtcagtggggtctttcctcgctccatcttacacagacctgagctggaagctcaactggttttgttccctgtttgaaatattgtgatctccctcccatgaaagaaaaaccaagaaccagaggcgtagactgactgaagacacaactcctggctttctgaagctatggacttggattggattgctgggggtttgtagagaaaggtgacaaatttcagtacctctggcatgctgtcccaggaaactagggctcccactaacttatgaggtttttaaacacattgaaaatgacatgacattaaaataaatttggatttgctcataa

SEQ ID NO: 30382 - DNA, 2410 bp, Homo sapiens
  misc_feature (33)..(33): n is a, c, g, or t
  misc_feature (2278)..(2278): n is a, c, g, or t
  misc_feature (2283)..(2283): n is a, c, g, or t
ccccatcagtacacctacagaaacgcgaactcncgaccggcggaacctccgtagaccacagcctgtggctgggaagggagacagaggcggcggcggctcaggggaaacgaggctgcagtggtggtagtaggaagatgtcgggcgaggacgagcaacaggagcaaactatcgctgaggacctggtcgtgaccaagtataagatggggggcgacatcgccaacagggtacttcggtccttggtggaagcatctagctcaggtgtgtcggtactgagcctgtgtgagaaaggtgatgccatgattatggaagaaacagggaaaatcttcaagaaagaaaaggaaatgaagaaaggtattgcttttcccaccagcatttcggtaaataactgtgtatgtcacttctcccctttgaagagcgaccaggattatattctcaaggaaggtgacttggtaaaaattgaccttggggtccatgtggatggcttcatcgctaatgtagctcacacttttgtggttgatgtagctcaggggacccaagtaacagggaggaaagcagatgttattaaggcagctcacctttgtgctgaagctgccctacgcctggtcaaacctggaaatcagaacacacaagtgacagaagcctggaacaaagttgcccactcatttaactgcacgccaatagaaggtatgctgtcacaccagttgaagcagcatgtcatcgatggagaaaaaaccattatccagaatcccacagaccagcagaagaaggaccatgaaaaagctgaatttgaggtacatgaagtatatgctgtggatgttctcgtcagctcaggagagggcaaggccaaggatgcaggacagagaaccactatttacaaacgagacccctctaaacagtatggactgaaaatgaaaacttcacgtgccttcttcagtgaggtggaaaggcgttttgatgccatgccgtttactttaagagcatttgaagatgagaagaaggctcggatgggtgtggtggagtgcgccaaacatgaactgctgcaaccatttaatgttctctatgagaaggagggtgaatttgttgcccagtttaaatttacagttctgctcatgcccaatggccccatgcggataaccagtggtcccttcgagcctgacctctacaagtctgagatggaggtccaggatgcagagctaaaggccctcctccagagttctgcaagtcgaaaaacccagaaaaagaaaaaaaagaaggcctccaagactgcagagaatgccaccagtggggaaacattagaagaaaatgaagctggggactgaggtgggtcccatctccccagcttgctgctcctgcctcatccccttcccaccaaaccccagactctgtgaagtgcagttcttctccacctaggaccgccagcagagcggggggatctccctgcccccaccccagttccccaacccactcccttccaacaacaaccagctccaactgactctggtcttgggaggtgaggcttcccaaccacggaagactactttaaatgaaaaaaagaaattgaataataaaatcaggagtcaaaattcatcgtcttcaagcccctctttctagccttttctactactctctgcttggtcaaggtttgtgccccactacagaacagggctaaattagccaccaccactgaaaactcagccgaatttttttataccactctgatgtcagcattttttccatctgttggggctttttcctcttttttccattctccccaaatattttatctggcttcaaaattaagaggattatttttcagattgtttttattcagtgtggccgattcctcatctgattcaggctgtccagtcaggcccctcccattttaggagctggagccttcatttatgaagagattctcatctatgaaatggatcctcatttgtaaatcttttttcttccattttcacaaagctgtaaagaaataatccatctcaaccttaccctttttctctggagtcagtggggtctttcctcgctccatcttacacagacctgagctggaagctcaactggttttgttccctgtttgaaatattgtgatctccctcccatgaaagaaaaaccaagaaccagaggcgtagactgactgaagacacaactcctggctttctgaagctatggacttggattggattgctgggggtttgtagagaaaggtgacaaatttcagtacctctggcatgctgtcccagaaactaggggtccactactttgggtnttaanccccttacatggcttgcttacatacaattggttgtcctactggaaacaaaagagggggcaaatacccaggggccgatccacccactctggaagggccacaaggattaaaaaagggggcaacaggaag

SEQ ID NO: 30383 - DNA, 1583 bp, Homo sapiens
  misc_feature (33)..(33): n is a, c, g, or t
ccccatcagtacacctacagaaacgcgaactcncgaccggcggaacctccgtagaccacagcctgtggctgggaagggagacagaggcggcggcggctcaggggaaacgaggctgcagtggtggtagtaggaagatgtcgggcgaggacgagcaacaggagcaaactatcgctgaggacctggtcgtgaccaagtataagatggggggcgacatcgccaacagggtacttcggtccttggtggaagcatctagctcaggtgtgtcggtactgagcctgtgtgagaaaggtgatgccatgattatggaagaaacagggaaaatcttcaagaaagaaaaggaaatgaagaaaggtattgcttttcccaccagcatttcggtaaataactgtgtatgtcacttctcccctttgaagagcgaccaggattatattctcaaggaaggtgacttggtaaaaattgaccttggggtccatgtggatggcttcatcgctaatgtagctcacacttttgtggttgatgtagctcaggggacccaagtaacagggaggaaagcagatgttattaaggcagctcacctttgtgctgaagctgccctacgcctggtcaaacctggaaatcagaacacacaagtgacagaagcctggaacaaagttgcccactcatttaactgcacgccaatagaaggtatgctgtcacaccagttgaagcagcatgtcatcgatggagaaaaaaccattatccagaatcccacagaccagcagaagaaggaccatgaaaaagctgaatttgaggtacatgaagtatatgctgtggatgttctcgtcagctcaggagagggcaaggccaaggatgcaggacagagaaccactatttacaaacgagacccctctaaacagtatggactgaaaatgaaaacttcacgtgccttcttcagtgaggtggaaaggcgttttgatgccatgccgtttactttaagagcatttgaagatgagaagaaggctcggatgggtgtggtggagtgcgccaaacatgaactgctgcaaccatttaatgttctctatgagaaggagggtgaatttgttgcccagtttaaatttacagttctgctcatgcccaatggccccatgcggataaccagtggtcccttcgagcctgacctctacaagtctgagatggaggtccaggatgcagagctaaaggccctcctccagagttctgcaagtcgaaaaacccagaaaaagaaaaaaaagaaggcctccaagactgcagagaatgccaccagtggggaaacattagaagaaaatgaagctggggactgaggtgggtcccatctccccagcttgctgctcctgcctcatccccttcccaccaaaccccagactctgtgaagtgcagttcttctccacctaggaccgccagcagagcggggggatctccctgcccccaccccagttccccaacccactcccttccaacaacaaccagctccaactgactctggtcttgggaggtgaggcttcccaaccacggaagactactttaaatgaaaaaaagaaattgaataataaaatcaggagtcaaaa

SEQ ID NO: 30384 - DNA, 2283 bp, Homo sapiens
  misc_feature (33)..(33): n is a, c, g, or t
ccccatcagtacacctacagaaacgcgaactcncgaccggcggaacctccgtagaccacagcctgtggctgggaagggagacagaggcggcggcggctcaggggaaacgaggctgcagtggtggtagtaggaagatgtcgggcgaggacgagcaacaggagcaaactatcgctgaggacctggtcgtgaccaagtataagatggggggcgacatcgccaacagggtacttcggtccttggtggaagcatctagctcaggtgtgtcggtactgagcctgtgtgagaaaggtgatgccatgattatggaagaaacagggaaaatcttcaagaaagaaaaggaaatgaagaaaggtattgcttttcccaccagcatttcggtaaataactgtgtatgtcacttctcccctttgaagagcgaccaggattatattctcaaggaaggtgacttggtaaaaattgaccttggggtccatgtggatggcttcatcgctaatgtagctcacacttttgtggttgatgtagctcaggggacccaagtaacagggaggaaagcagatgttattaaggcagctcacctttgtgctgaagctgccctacgcctggtcaaacctggaaatcagaacacacaagtgacagaagcctggaacaaagttgcccactcatttaactgcacgccaatagaaggtatgctgtcacaccagttgaagcagcatgtcatcgatggagaaaaaaccattatccagaatcccacagaccagcagaagaaggaccatgaaaaagctgaatttgaggtacatgaagtatatgctgtggatgttctcgtcagctcaggagagggcaaggccaaggatgcaggacagagaaccactatttacaaacgagacccctctaaacagtatggactgaaaatgaaaacttcacgtgccttcttcagtgaggtggaaaggcgttttgatgccatgccgtttactttaagagcatttgaagatgagaagaaggctcggatgggtgtggtggagtgcgccaaacatgaactgctgcaaccatttaatgttctctatgagaaggagggtgaatttgttgcccagtttaaatttacagttctgctcatgcccaatggccccatgcggataaccagtggtcccttcgagcctgacctctacaagtctgagatggaggtccaggatgcagagctaaaggccctcctccagagttctgcaagtcgaaaaacccagaaaaagaaaaaaaagaaggcctccaagactgcagagaatgccaccagtggggaaacattagaagaaaatgaagctggggactgaggtgggtcccatctccccagcttgctgctcctgcctcatccccttcccaccaaaccccagactctgtgaagtgcagttcttctccacctaggaccgccagcagagcggggggatctccctgcccccaccccagttccccaacccactcccttccaacaacaaccagctccaactgactctggtcttgggaggtgaggcttcccaaccacggaagactactttaaatgaaaaaaagaaattgaataataaaatcaggagtcaaaattcatcgtcttcaagcccctctttctagccttttctactactctctgcttggtcaaggtttgtgccccactacagaacagggctaaattagccaccaccactgaaaactcagccgaatttttttataccactctgatgtcagcattttttccatctgttggggctttttcctcttttttccattctccccaaatattttatctggcctcatctgattcaggctgtccagtcaggcccctcccattttaggagctggagccttcatttatgaagagattctcatctatgaaatggatcctcatttgtaaatcttttttcttccattttcacaaagctgtaaagaaataatccatctcaaccttaccctttttctctggagtcagtggggtctttcctcgctccatcttacacagacctgagctggaagctcaactggttttgttccctgtttgaaatattgtgatctccctcccatgaaagaaaaaccaagaaccagaggcgtagactgactgaagacacaactcctggctttctgaagctatggacttggattggattgctgggggtttgtagagaaaggtgacaaatttcagtacctctggcatgctgtcccaggaaactagggctcccactaacttatgaggtttttaaacacattgaaaatgacatgacattaaaataaatttggatttgctcataa

SEQ ID NO: 30385 - DNA, 1668 bp, Homo sapiens
  misc_feature (33)..(33): n is a, c, g, or t
ccccatcagtacacctacagaaacgcgaactcncgaccggcggaacctccgtagaccacagcctgtggctgggaagggagacagaggcggcggcggctcaggggaaacgaggctgcagtggtggtagtaggaagatgtcgggcgaggacgagcaacaggagcaaactatcgctgaggacctggtcgtgaccaagtataagatggggggcgacatcgccaacagggtacttcggtccttggtggaagcatctagctcaggtgtgtcggtactgagcctgtgtgagaaaggtgatgccatgattatggaagaaacagggaaaatcttcaagaaagaaaaggaaatgaagaaaggtattgcttttcccaccagcatttcggtaaataactgtgtatgtcacttctcccctttgaagagcgaccaggattatattctcaaggaaggtgacttggtaaaaattgaccttggggtccatgtggatggcttcatcgctaatgtagctcacacttttgtggttgatgtagctcaggggacccaagtaacagggaggaaagcagatgttattaaggcagctcacctttgtgctgaagctgccctacgcctggtcaaacctggaaatcagaacacacaagtgacagaagcctggaacaaagttgcccactcatttaactgcacgccaatagaaggtatgctgtcacaccagttgaagcagcatgtcatcgatggagaaaaaaccattatccagaatcccacagaccagcagaagaaggaccatgaaaaagctgaatttgaggtacatgaagtatatgctgtggatgttctcgtcagctcaggagagggcaaggccaaggatgcaggacagagaaccactatttacaaacgagacccctctaaacagtatggactgaaaatgaaaacttcacgtgccttcttcagtgaggtggaaaggcgttttgatgccatgccgtttactttaagagcatttgaagatgagaagaaggctcggatgggtgtggtggagtgcgccaaacatgaactgctgcaaccatttaatgttctctatgagaaggagggtgaatttgttgcccagtttaaatttacagttctgctcatgcccaatggccccatgcggataaccagtggtcccttcgagcctgacctctacaagtctgagatggaggtccaggatgcagagctaaaggccctcctccagagttctgcaagtcgaaaaacccagaaaaagaaaaaaaagaaggcctccaagactgcagagaatgccaccagtggggaaacattagaagaaaatgaagctggggactgaggtgggtcccatctccccagcttgctgctcctgcctcatccccttcccaccaaaccccagactctgtgaagtgcagttcttctccacctaggaccgccagcagagcggggggatctccctgcccccaccccagttccccaacccactcccttccaacaacaaccagctccaactgactctggtcttgggaggtgaggcttcccaaccacggaagactactttaaatgaaaaaaagaaattgaataataaaatcaggagtcaaaaaaaaaaaagataaaacgccaaaaggcccaaaatatgaggtacagcccaggaaaacaaggtaaagtctcacgagacaaaaacccgg

SEQ ID NO: 30386 - DNA, 2503 bp, Homo sapiens
tccccccccccccccccccccgcgccccatcatcggctaggtacgaggctgggtggtgcgcctgcctgcccgctcccttgcttgctcgcgctttcgctcgccctctcctcgaggatcgaggggactctgaccacagcctgtggctgggaagggagacagaggcggcggcggctcaggggaaacgaggctgcagtggtggtagtaggaagatgtcgggcgaggacgagcaacaggagcaaactatcgctgaggacctggtcgtgaccaagtataagatggggggcgacatcgccaacagggtacttcggtccttggtggaagcatctagctcaggtgtgtcggtactgagcctgtgtgagaaaggtgatgccatgattatggaagaaacagggaaaatcttcaagaaagaaaaggaaatgaagaaaggtattgcttttcccaccagcatttcggtaaataactgtgtatgtcacttctcccctttgaagagcgaccaggattatattctcaaggaaggtgacttggtaaaaatgtaaggttaaaccgttttaaagcatttttctttttttaaagcatttacaaaatgccagttcctaatgcagtactctgatcttgcctttcagtgaccttggggtccatgtggatggcttcatcgctaatgtagctcacacttttgtggttgatgtagctcaggggacccaagtaacagggaggaaagcagatgttattaaggcagctcacctttgtgctgaagctgccctacgcctggtcaaacctggaaatcagaacacacaagtgacagaagcctggaacaaagttgcccactcatttaactgcacgccaatagaaggtatgctgtcacaccagttgaagcagcatgtcatcgatggagaaaaaaccattatccagaatcccacagaccagcagaagaaggaccatgaaaaagctgaatttgaggtacatgaagtatatgctgtggatgttctcgtcagctcaggagagggcaaggccaaggatgcaggacagagaaccactatttacaaacgagacccctctaaacagtatggactgaaaatgaaaacttcacgtgccttcttcagtgaggtggaaaggcgttttgatgccatgccgtttactttaagagcatttgaagatgagaagaaggctcggatgggtgtggtggagtgcgccaaacatgaactgctgcaaccatttaatgttctctatgagaaggagggtgaatttgttgcccagtttaaatttacagttctgctcatgcccaatggccccatgcggataaccagtggtcccttcgagcctgacctctacaagtctgagatggaggtccaggatgcagagctaaaggccctcctccagagttctgcaagtcgaaaaacccagaaaaagaaaaaaaagaaggcctccaagactgcagagaatgccaccagtggggaaacattagaagaaaatgaagctggggactgaggtgggtcccatctccccagcttgctgctcctgcctcatccccttcccaccaaaccccagactctgtgaagtgcagttcttctccacctaggaccgccagcagagcggggggatctccctgcccccaccccagttccccaacccactcccttccaacaacaaccagctccaactgactctggtcttgggaggtgaggcttcccaaccacggaagactactttaaatgaaaaaaagaaattgaataataaaatcaggagtcaaaattcatcgtcttcaagcccctctttctagccttttctactactctctgcttggtcaaggtttgtgccccactacagaacagggctaaattagccaccaccactgaaaactcagccgaatttttttataccactctgatgtcagcattttttccatctgttggggctttttcctcttttttccattctccccaaatattttatctggcttcaaaattaagaggattatttttcagattgtttttattcagtgtggccgattcctcatctgattcaggctgtccagtcaggcccctcccattttaggagctggagccttcatttatgaagagattctcatctatgaaatggatcctcatttgtaaatcttttttcttccattttcacaaagctgtaaagaaataatccatctcaaccttaccctttttctctggagtcagtggggtctttcctcgctccatcttacacagacctgagctggaagctcaactggttttgttccctgtttgaaatattgtgatctccctcccatgaaagaaaaaccaagaaccagaggcgtagactgactgaagacacaactcctggctttctgaagctatggacttggattggattgctgggggtttgtagagaaaggtgacaaatttcagtacctctggcatgctgtcccaggaaactagggctcccactaacttatgaggtttttaaacacattgaaaatgacatgacattaaaataaatttggatttgctcataa

SEQ ID NO: 30387 - DNA, 2273 bp, Homo sapiens
  misc_feature (33)..(33): n is a, c, g, or t
ccccatcagtacacctacagaaacgcgaactcncgaccggcggaacctccgtagaccacagcctgtggctgggaagggagacagaggcggcggcggctcaggggaaacgaggctgcagtggtggtagtaggaagatgtcgggcgaggacgagcaacaggagcaaactatcgctgaggacctggtcgtgaccaagtataagatggggggcgacatcgccaacagggtacttcggtccttggtggaagcatctagctcaggtgtgtcggtactgagcctgtgtgagaaaggtgatgccatgattatggaagaaacagggaaaatcttcaagaaagaaaaggaaatgaagaaaggtattgcttttcccaccagcatttcggtaaataactgtgtatgtcacttctcccctttgaagagcgaccaggattatattctcaaggaaggtgacttggtaaaaattgaccttggggtccatgtggatggcttcatcgctaatgtagctcacacttttgtggttgatgtagctcaggggacccaagtaacagggaggaaagcagatgttattaaggcagctcacctttgtgctgaagctgccctacgcctggtcaaacctggaaatcaggtatgctgtcacaccagttgaagcagcatgtcatcgatggagaaaaaaccattatccagaatcccacagaccagcagaagaaggaccatgaaaaagctgaatttgaggtacatgaagtatatgctgtggatgttctcgtcagctcaggagagggcaaggccaaggatgcaggacagagaaccactatttacaaacgagacccctctaaacagtatggactgaaaatgaaaacttcacgtgccttcttcagtgaggtggaaaggcgttttgatgccatgccgtttactttaagagcatttgaagatgagaagaaggctcggatgggtgtggtggagtgcgccaaacatgaactgctgcaaccatttaatgttctctatgagaaggagggtgaatttgttgcccagtttaaatttacagttctgctcatgcccaatggccccatgcggataaccagtggtcccttcgagcctgacctctacaagtctgagatggaggtccaggatgcagagctaaaggccctcctccagagttctgcaagtcgaaaaacccagaaaaagaaaaaaaagaaggcctccaagactgcagagaatgccaccagtggggaaacattagaagaaaatgaagctggggactgaggtgggtcccatctccccagcttgctgctcctgcctcatccccttcccaccaaaccccagactctgtgaagtgcagttcttctccacctaggaccgccagcagagcggggggatctccctgcccccaccccagttccccaacccactcccttccaacaacaaccagctccaactgactctggtcttgggaggtgaggcttcccaaccacggaagactactttaaatgaaaaaaagaaattgaataataaaatcaggagtcaaaattcatcgtcttcaagcccctctttctagccttttctactactctctgcttggtcaaggtttgtgccccactacagaacagggctaaattagccaccaccactgaaaactcagccgaatttttttataccactctgatgtcagcattttttccatctgttggggctttttcctcttttttccattctccccaaatattttatctggcttcaaaattaagaggattatttttcagattgtttttattcagtgtggccgattcctcatctgattcaggctgtccagtcaggcccctcccattttaggagctggagccttcatttatgaagagattctcatctatgaaatggatcctcatttgtaaatcttttttcttccattttcacaaagctgtaaagaaataatccatctcaaccttaccctttttctctggagtcagtggggtctttcctcgctccatcttacacagacctgagctggaagctcaactggttttgttccctgtttgaaatattgtgatctccctcccatgaaagaaaaaccaagaaccagaggcgtagactgactgaagacacaactcctggctttctgaagctatggacttggattggattgctgggggtttgtagagaaaggtgacaaatttcagtacctctggcatgctgtcccaggaaactagggctcccactaacttatgaggtttttaaacacattgaaaatgacatgacattaaaataaatttggatttgctcataa

SEQ ID NO: 30388 - DNA, 2419 bp, Homo sapiens
  misc_feature (33)..(33): n is a, c, g, or t
ccccatcagtacacctacagaaacgcgaactcncgaccggcggaacctccgtagaccacagcctgtggctgggaagggagacagaggcggcggcggctcaggggaaacgaggctgcagtggtggtagtaggaagatgtcgggcgaggacgagcaacaggagcaaactatcgctgaggacctggtcgtgaccaagtataagatggggggcgacatcgccaacagggtacttcggtccttggtggaagcatctagctcaggtgtgtcggtactgagcctgtgtgagaaaggtgatgccatgattatggaagaaacagggaaaatcttcaagaaagaaaaggaaatgaagaaaggtattgcttttcccaccagcatttcggtaaataactgtgtatgtcacttctcccctttgaagagcgaccaggattatattctcaaggaaggtgacttggtaaaaattgaccttggggtccatgtggatggcttcatcgctaatgtagctcacacttttgtggttgatgtagctcaggggacccaagtaacagggaggaaagcagatgttattaaggcagctcacctttgtgctgaagctgccctacgcctggtcaaacctggaaatcagaacacacaagtgacagaagcctggaacaaagttgcccactcatttaactgcacgccaatagaaggtatgctgtcacaccagttgaagcagcatgtcatcgatggagaaaaaaccattatccagaatcccacagaccagcagaagaaggaccatgaaaaagctgaatttgaggtacatgaagtatatgctgtggatgttctcgtcagctcaggagagggcaaggtgaggagagtaccagagttggcaaagaggggtgactgagagtgttcaccagaccaaatgttacttaaattactctttcagggccaaggatgcaggacagagaaccactatttacaaacgagacccctctaaacagtatggactgaaaatgaaaacttcacgtgccttcttcagtgaggtggaaaggcgttttgatgccatgccgtttactttaagagcatttgaagatgagaagaaggctcggatgggtgtggtggagtgcgccaaacatgaactgctgcaaccatttaatgttctctatgagaaggagggtgaatttgttgcccagtttaaatttacagttctgctcatgcccaatggccccatgcggataaccagtggtcccttcgagcctgacctctacaagtctgagatggaggtccaggatgcagagctaaaggccctcctccagagttctgcaagtcgaaaaacccagaaaaagaaaaaaaagaaggcctccaagactgcagagaatgccaccagtggggaaacattagaagaaaatgaagctggggactgaggtgggtcccatctccccagcttgctgctcctgcctcatccccttcccaccaaaccccagactctgtgaagtgcagttcttctccacctaggaccgccagcagagcggggggatctccctgcccccaccccagttccccaacccactcccttccaacaacaaccagctccaactgactctggtcttgggaggtgaggcttcccaaccacggaagactactttaaatgaaaaaaagaaattgaataataaaatcaggagtcaaaattcatcgtcttcaagcccctctttctagccttttctactactctctgcttggtcaaggtttgtgccccactacagaacagggctaaattagccaccaccactgaaaactcagccgaatttttttataccactctgatgtcagcattttttccatctgttggggctttttcctcttttttccattctccccaaatattttatctggcttcaaaattaagaggattatttttcagattgtttttattcagtgtggccgattcctcatctgattcaggctgtccagtcaggcccctcccattttaggagctggagccttcatttatgaagagattctcatctatgaaatggatcctcatttgtaaatcttttttcttccattttcacaaagctgtaaagaaataatccatctcaaccttaccctttttctctggagtcagtggggtctttcctcgctccatcttacacagacctgagctggaagctcaactggttttgttccctgtttgaaatattgtgatctccctcccatgaaagaaaaaccaagaaccagaggcgtagactgactgaagacacaactcctggctttctgaagctatggacttggattggattgctgggggtttgtagagaaaggtgacaaatttcagtacctctggcatgctgtcccaggaaactagggctcccactaacttatgaggtttttaaacacattgaaaatgacatgacattaaaataaatttggatttgctcataa

SEQ ID NO: 30389 - DNA, 1273 bp, Homo sapiens
  misc_feature (33)..(33): n is a, c, g, or t
ccccatcagtacacctacagaaacgcgaactcncgaccggcggaacctccgtagaccacagcctgtggctgggaagggagacagaggcggcggcggctcaggggaaacgaggctgcagtggtggtagtaggaagatgtcgggcgaggacgagcaacaggagcaaactatcgctgaggacctggtcgtgaccaagtataagatggggggcgacatcgccaacagggtacttcggtccttggtggaagcatctagctcaggtgtgtcggtactgagcctgtgtgagaaaggtgatgccatgattatggaagaaacagggaaaatcttcaagaaagaaaaggaaatgaagaaaggtattgcttttcccaccagcatttcggtaaataactgtgtatgtcacttctcccctttgaagagcgaccaggattatattctcaaggaaggtgacttggtaaaaattgaccttggggtccatgtggatggcttcatcgctaatgtagctcacacttttgtggttgatgtagctcaggggacccaagtaacagggaggaaagcagatgttattaaggcagctcacctttgtgctgaagctgccctacgcctggtcaaacctggaaatcagaacacacaagtgacagaagcctggaacaaagttgcccactcatttaactgcacgccaatagaaggtatgctgtcacaccagttgaagcagcatgtcatcgatggagaaaaaaccattatccagaatcccacagaccagcagaagaaggaccatgaaaaagctgaatttgaggtacatgaagtatatgctgtggatgttctcgtcagctcaggagagggcaaggccaaggatgcaggacagagaaccactatttacaaacgagacccctctaaacagtatggactgaaaatgaaaacttcacgtgccttcttcagtgaggtggaaaggcgttttgatgccatgccgtttactttaagagcatttgaagatgagaagaaggctcggatgggtgtggtggagtgcgccaaacatgaactgctgcaaccatttaatgttctctatgagaaggagggtgaatttgttgcccagtttaaatttacagttctgctcatgcccaatggccccatgcggataaccagtggtcccttcgagcctgacctctacaagtctgagatggaggtccaggatgcagagctaaaggctctcagagttggagtgaaaaccgaaaaaaaaaagggggcaacgggatgcctggacataaaaaaagggggggg

SEQ ID NO: 30390 - DNA, 2152 bp, Homo sapiens
  misc_feature (33)..(33): n is a, c, g, or t
ccccatcagtacacctacagaaacgcgaactcncgaccggcggaacctccgtagaccacagcctgtggctgggaagggagacagaggcggcggcggctcaggggaaacgaggctgcagtggtggtagtaggaagatgtcgggcgaggacgagcaacaggagcaaactatcgctgaggacctggtcgtgaccaagtataagatggggggcgacatcgccaacagggtacttcggtccttggtggaagcatctagctcaggtgtgtcggtactgagcctgtgtgagaaaggtgatgccatgattatggaagaaacagggaaaatcttcaagaaagaaaaggaaatgaagaaagtgaccttggggtccatgtggatggcttcatcgctaatgtagctcacacttttgtggttgatgtagctcaggggacccaagtaacagggaggaaagcagatgttattaaggcagctcacctttgtgctgaagctgccctacgcctggtcaaacctggaaatcagaacacacaagtgacagaagcctggaacaaagttgcccactcatttaactgcacgccaatagaaggaaggaccatgaaaaagctgaatttgaggtacatgaagtatatgctgtggatgttctcgtcagctcaggagagggcaaggccaaggatgcaggacagagaaccactatttacaaacgagacccctctaaacagtatggactgaaaatgaaaacttcacgtgccttcttcagtgaggtggaaaggcgttttgatgccatgccgtttactttaagagcatttgaagatgagaagaaggctcggatgggtgtggtggagtgcgccaaacatgaactgctgcaaccatttaatgttctctatgagaaggagggtgaatttgttgcccagtttaaatttacagttctgctcatgcccaatggccccatgcggataaccagtggtcccttcgagcctgacctctacaagtctgagatggaggtccaggatgcagagctaaaggccctcctccagagttctgcaagtcgaaaaacccagaaaaagaaaaaaaagaaggcctccaagactgcagagaatgccaccagtggggaaacattagaagaaaatgaagctggggactgaggtgggtcccatctccccagcttgctgctcctgcctcatccccttcccaccaaaccccagactctgtgaagtgcagttcttctccacctaggaccgccagcagagcggggggatctccctgcccccaccccagttccccaacccactcccttccaacaacaaccagctccaactgactctggtcttgggaggtgaggcttcccaaccacggaagactactttaaatgaaaaaaagaaattgaataataaaatcaggagtcaaaattcatcgtcttcaagcccctctttctagccttttctactactctctgcttggtcaaggtttgtgccccactacagaacagggctaaattagccaccaccactgaaaactcagccgaatttttttataccactctgatgtcagcattttttccatctgttggggctttttcctcttttttccattctccccaaatattttatctggcttcaaaattaagaggattatttttcagattgtttttattcagtgtggccgattcctcatctgattcaggctgtccagtcaggcccctcccattttaggagctggagccttcatttatgaagagattctcatctatgaaatggatcctcatttgtaaatcttttttcttccattttcacaaagctgtaaagaaataatccatctcaaccttaccctttttctctggagtcagtggggtctttcctcgctccatcttacacagacctgagctggaagctcaactggttttgttccctgtttgaaatattgtgatctccctcccatgaaagaaaaaccaagaaccagaggcgtagactgactgaagacacaactcctggctttctgaagctatggacttggattggattgctgggggtttgtagagaaaggtgacaaatttcagtacctctggcatgctgtcccaggaaactagggctcccactaacttatgaggtttttaaacacattgaaaatgacatgacattaaaataaatttggatttgctcataa

SEQ ID NO: 30391 - DNA, 1723 bp, Homo sapiens
aattcggaacgaggcagagaaccactatttacaaacgagacccctctaaacagtatggactgaaaatgaaaacttcacgtgccttcttcagtgaggtggaaaggcgttttgatgccatgccgtttactttaagagcatttgaagatgagaagaaggctcggatgggtgtggtggagtgcgccaaacatgaactgctgcaaccatttaatgttctctatgagaaggagggccaaggatgcaggacagagaaccactatttacaaacgagacccctctaaacagtatggactgaaaatgaaaacttcacgtgccttcttcagtgaggtggaaaggcgttttgatgccatgccgtttactttaagagcatttgaagatgagaagaaggctcggatgggtgtggtggagtgcgccaaacatgaactgctgcaaccatttaatgttctctatgagaaggagggtgaatttgttgcccagtttaaatttacagttctgctcatgcccaatggccccatgcggataaccagtggtcccttcgagcctgacctctacaagtctgagatggaggtccaggatgcagagctaaaggccctcctccagagttctgcaagtcgaaaaacccagaaaaagaaaaaaaagaaggcctccaagactgcagagaatgccaccagtggggaaacattagaagaaaatgaagctggggactgaggtgggtcccatctccccagcttgctgctcctgcctcatccccttcccaccaaaccccagactctgtgaagtgcagttcttctccacctaggaccgccagcagagcggggggatctccctgcccccaccccagttccccaacccactcccttccaacaacaaccagctccaactgactctggtcttgggaggtgaggcttcccaaccacggaagactactttaaatgaaaaaaagaaattgaataataaaatcaggagtcaaaattcatcgtcttcaagcccctctttctagccttttctactactctctgcttggtcaaggtttgtgccccactacagaacagggctaaattagccaccaccactgaaaactcagccgaatttttttataccactctgatgtcagcattttttccatctgttggggctttttcctcttttttccattctccccaaatattttatctggcttcaaaattaagaggattatttttcagattgtttttattcagtgtggccgattcctcatctgattcaggctgtccagtcaggcccctcccattttaggagctggagccttcatttatgaagagattctcatctatgaaatggatcctcatttgtaaatcttttttcttccattttcacaaagctgtaaagaaataatccatctcaaccttaccctttttctctggagtcagtggggtctttcctcgctccatcttacacagacctgagctggaagctcaactggttttgttccctgtttgaaatattgtgatctccctcccatgaaagaaaaaccaagaaccagaggcgtagactgactgaagacacaactcctggctttctgaagctatggacttggattggattgctgggggtttgtagagaaaggtgacaaatttcagtacctctggcatgctgtcccaggaaactagggctcccactaacttatgaggtttttaaacacattgaaaatgacatgacattaaaataaatttggatttgctcataa

SEQ ID NO: 30392 - DNA, 1026 bp, Homo sapiens
  misc_feature (33)..(33): n is a, c, g, or t
ccccatcagtacacctacagaaacgcgaactcncgaccggcggaacctccgtagaccacagcctgtggctgggaagggagacagaggcggcggcggctcaggggaaacgaggctgcagtggtggtagtaggaagatgtcgggcgaggacgagcaacaggagcaaactatcgctgaggacctggtcgtgaccaagtataagatggggggcgacatcgccaacagggtacttcggtccttggtggaagcatctagctcaggtgtgtcggtactgagcctgtgtgagaaaggtgatgccatgattatggaagaaacagggaaaatcttcaagaaagaaaaggaaatgaagaaaggtattgcttttcccaccagcatttcggtaaataactgtgtatgtcacttctcccctttgaagagcgaccaggattatattctcaaggaaggtgacttggtaaaaattgaccttggggtccatgtggatggcttcatcgctaatgtagctcacacttttgtggttgatgtagctcaggggacccaagtaacagggaggaaagcagatgttattaaggcagctcacctttgtgctgaagctgccctacgcctggtcaaacctggaaatcagaacacacaagtgacagaagcctggaacaaagttgcccactcatttaactgcacgccaatagaaggtatgctgtcacaccagttgaagcagcatgtcatcgatggagaaaaaaccattatccagaatcccacagaccagcagaagaaggaccatgaaaaagctgaatttgaggtacatgaagtatatgctgtggatgttctcgtcagctcaggagagggcaagacaagaatgcaggacagagaaccacaaataactgaccgagacatcttctagactatcatggaacttataatgtacagtacaattgctttcataactgaggtgtataaaggatattgatcctcagaccttgtactttaagagcactcaatagatatgagaagaaagggtcgaaatgggtgtgcgg

SEQ ID NO: 30393 - DNA, 1288 bp, Homo sapiens
  misc_feature (33)..(33): n is a, c, g, or t
ccccatcagtacacctacagaaacgcgaactcncgaccggcggaacctccgtagaccacagcctgtggctgggaagggagacagaggcggcggcggctcaggggaaacgaggctgcagtggtggtagtaggaagatgtcgggcgaggacgagcaacaggagcaaactatcgctgaggacctggtcgtgaccaagtataagatggggggcgacatcgccaacagggtacttcggtccttggtggaagcatctagctcaggtgtgtcggtactgagcctgtgtgagaaaggtgatgccatgattatggaagaaacagggaaaatcttcaagaaagaaaaggaaatgaagaaaggtattgcttttcccaccagcatttcggtaaataactgtgtatgtcacttctcccctttgaagagcgaccaggattatattctcaaggaaggtgacttggtaaaaattgaccttggggtccatgtggatggcttcatcgctaatgtagctcacacttttgtggttgatgtagctcaggggacccaagtaacagggaggaaagcagatgttattaaggcagctcacctttgtgctgaagctgccctacgcctggtcaaacctggaaatcagtaagctattttatccaattccaaagctcgtttgaaccaaagatgcattaggcacctatagctactctatatgaaactaccaacctcccctacagaccccttataaaacagctttttaaaattagctatatttagctgggcacagtgactcacatctgtaatcccatcactttggggggccaaggtaggaggatagcttgaggctgggagttcaagaccagcctgggaaacatggtgaaaccccatttctacaaaaaatacaaaaattagctgggcgtggtaacatgtgcctgtattcccagcttccagggaggctgaggtgggagaatcacctgagcctgggagattgaggctgtgctgagctatgatcatgccactgcactccagcctgggcaacaatgaaaccctgtctcacaaaagaaaaaggaaaaataagcatttgctgtccccacaaaacagattagaatgccaggtaaaaaaggataaacactggacttaatattataggcatgtggtggcacatgcctgtaatcccagcactttgggaggccaaggtgggaggattgcttgaacccaggcatttgagaccagcttgggaaacatagcgagacccgtctacaaaaagaaaaaagaaaacccaggtttatgaccaagttctttcacttaaca

SEQ ID NO: 30394 - DNA, 693 bp, Homo sapiens
  misc_feature (683)..(683): n is a, c, g, or t
ctttcaccaacagattaaaaataacagacgaaagagaagaggaaaactggtaaaagcaagcatggtttaccataacaagcaataatgaacaacttggtatcaaagaagaaaaacttaaaaacagagtttaatctggtatcatttagagtgggacacacaggctctgaggactaactgtgaatagtaattgtggttttaaaaaatgaccttgtatcatcaatgaaatctaccctatattctgtttgatttggttaagaaggcagaaattagtattgctctgttcgagaagccttcaaaatgggatggcacttagaggcaaaaatttggtttatttgaaacattcagttttagcaaaaaacattcagtaagcgttgttactgtttaagacaagatctttttcagcaagaaaacagttctaaacaagcttttcagccaaaccaattggccatattgtatatacaactgatgatccatggtcctctgcagctagaactactatgtagtgtacatttatactcatcaccacaaataagttagcaaatatttttctttggtaaaaaaaaaaatttctgtctgggcacggtggctcacacctgtaatcccagcactttgggaggccaaggcaggtggatcacttcaggccaggagttgaagaccaacgtggccaacatagcaaaaccccnatctttacaa

SEQ ID NO: 30395 - DNA, 467 bp, Homo sapiens
taaaaatacaaaaaattagccgggtatggtggtgcgtgcctgtaatcccagctactcaggaggctgaggcaggagaatcgcttgatgcagttaagcgagatcgtgccattgcactccagctggggtgacagagtgaggctccatctcaaaaaaaaaaaagaaaaaaaaaaagaaagagatgtgtttaccataacttactaagaaagactaattaggtgtcattgaaaaggatgctaggccaggcgtgatggctcatgcctgtaattctaacactttggtagaccaaggcaggaggatattttgagcccaggagttcaaaaccagcgtgggcaacatagggagaccccgcctctacaagtaataaaaaaaaattagccaggcatggtagtgcatgtctatggttccagctactctggaggctgaggtggaaggattgcttgagcctgggaagtcaagactgcagtgag

SEQ ID NO: 30396 - DNA, 327 bp, Homo sapiens
tgttcaaatcgctgctgtgtttgaaacaaaatgtcagctggtgttaggtaagaattgctaacttctaaagaatagtgtcatttatagaaccactgcaggggttagaacacagaggatgaccagaaaacacctccaagaagaaagagattgagtgagacttttttgattgcttttgtactcccgagttcctggcacaggcctggcacaagatgggaacttgtctagtgaattaatgaagccatttctaccgttgcctctagggtacctctaagtacgttatattctttgtgggtgttgtttttctgttctgttttttgtttttgtttt

SEQ ID NO: 30397 - DNA, 438 bp, Homo sapiens
acaagtcatattaagctaacttcatgcttactttgccaaagatgtaatagtatttgtatgatactctttgtatagtactactttataacttacagagtacattcccatttattattttatttaaccctgacaacatccctttcaattcgtgtaagatgagaaagacctcaacagtaataatcccaggaaggcgcaaaggggacagatgtgagagattttagaaaggccttgtgtagttatggataaaggagagggaggaatcaaagcaggctttaaggattctagattgtctgagggtgaatggggatgcagataattactcgtaatttaaaaaatacgggtggaggagtggatttggagatgtgaaatccatcagttttcttcagtttggtggaattagctgttttatttcctttgttgaaactgagtcagatatag

SEQ ID NO: 30398 - DNA, 3536 bp, Homo sapiens
atggggacgacggccccagggcccattcacctgctggagctatgtgaccagaagctcatggagtttctctgcaacatggataataaggacttggtgtggcttgaggagatccaagaggaggccgagcgcatgttcaccagagaattcagcaaagagccagagctgatgcccaaaacaccttctcagaagaaccgacggaagaagagacggatttcttatgttcaggatgaaaacagagatcccatcaggagaaggttatcccgcagaaagtctcggagcagccagctgagctcccgacgcctccgcagcaaggacagtgtagagaagctggctacagtggtcggggagaacggctccgttctgcggcgtgtgacccgtgctgcggctgcagctgccgcggctaccatggcattggctgcaccttcttcacccacccctgagtctcccacgatgctgactaagaagcccgaggataaccacacccagtgccagctggtgcctgtggtggagatcggcatcagtgagcgccagaatgctgagcagcatgtcacccagctcatgtccaccgagcctctgccccgcactctgtccccgactccagcttcagccacagctccaacctcccagggcatcccgacatcagatgaggaatcaacacctaagaagtcgaaggccaggatactggagtccatcacagtgagctccctgatggctacaccccaggaccccaagggtcaaggggtcgggacggggcggtctgcgtctaagctcaggattgcgcaggtctcccctggcccacgggactcgccagcctttccagattctccatggcgggagcgggtgctggctcccatcctgccggataacttctccacgcccacgggctctcgcacggactctcaatcggtgcggcacagcccgatcgccccgtcttccccgagtccccaagtcttagcccagaagtactctctggtggccaaacaggaaagtgttgtccgcagggcgagcagaaggcttgccaagaagactgccgaagagccagctgcctctggccgcatcatctgtcacagttacctggagaggctcctgaatgttgaggtgccccagaaagttggttctgagcagaaggaaccccccgaggaggctgagcctgtggcggcagctgagccagaggtccctgagaacaacggaaataactcgtggccccacaatgacacggagattgccaacagcacacccaacccgaagcctgcagccagcagcccggaaacaccctctgcagggcagcaagaggccaagacggaccaagcagatggacccagagagccaccgcagagtgccaggaggaagcgcagctacaagcaggccgtgagtgagctggacgaggagcagcacctggaggatgaggagctgcagccccccaggagcaagaccccttcctcaccctgcccagccagcaaggtggtacggcccctccggacctttctgcacacagtgcagaggaaccagatgctcatgacccctacctcagccccacgcagcgtcatgaagtcctttattaagcgcaacactcccctgcgcatggaccccaaggagaaggagcggcagcgcctggagaatctgcggcggaaggaggaggccgagcagctgcgcaggcagaaggtggaggaggacaagcggcggcggctggaggaggtgaagctgaagcgtgaggaacgcctccgcaaggtgctgcaggcccgcgagcgggtggagcagatgaaggaggagaagaagaagcagattgagcagaagtttgctcagatcgacgagaagactgagaaggccaaggaggagcggctggcagaggagaaggccaagaaaaaggcggcggccaagaagatggaggaggtggaagcacgcaggaagcaggaagaggatgcacgtaggctcaggtggctgcagcaggaggaggaagagcggcggcaccaagagctgctgcagaagaagaaggaagaggagcaggagcggctgcggaaggcggccgaggctaagcggctggcagagcagcgggagcaggagcggcgggagcaggagcggcgggagcaggagcggcgcgagcaggagcggcgcgagcaggagcggcgggagcaggagcggcgcgagcaggagcgacagctggcagagcaggagcgtcggcgggagcaggagcggctccaagccgagagggagctgcaggagcgggagaaggccctgcggctgcagaaggagcagctgcagagggaactggaggagaagaagaagaaggaagagcagcagcgtctggctgagcggcagctgcaggaggagcaagagaagaaagccaaggaggcagcaggggccagcaaggccctgaatgtgactgtggacgtgcagtctccagcttgtacctcatctcccatcactccgcaagggcacaaggcccctccccagatcaacccccacaactacgggatggatctgaatagcgacgactccaccgatgatgaggcccatccccggaagcccatccccacctgggcccgaggcaccccgctcagccaggctatcattcaccagtactaccagccaccgaaccttctggagctctttggaaccattctcccactggacttggaggatatcttcaagaagagcaagccccgctatcacaagcgcaccagctctgctgtctggaactcaccgcccctgcagggcgccagggtccccagcagcctggcctacagcctgaagaagcactgaggctggcctgcggccttcttggcagcctcgcctcctgtccatgtctatctgtctgtctgtcggtctgtgtcttggtctgttgccctccttcttggcatgccattgtggagggcttggccaggtgtatataaacgtcctctgtgctgggtgtttctgctgcaggtggcaggtggccccaggcctgtttggaggatgggctgggtgggtgggtggggaagaaatgggcccagccccacatggcctgcagacagtgctctgtaaatagttgttttaatttagctgaatgttagcattttagtctttggcattttagcgtttgggaggtagattaataaagtatattccttcaagcctgctgttgataccatgaagactgggcgcctcagtcccagccctgtagctgtgtgtcttgggccaccagtggcctgcaggacgaaggtactgttccatcacctgcggtgtgcctcaggatcaccaggtgcaggcccccaccctcggagatgctgctgcagtgagtggttccactgcctggataacccttgaggaacacgtcagttactgtcacgatggggcaggtggagctccttcctattttttggggtgctccctgtttgtaaaggggagtttgttcattgggaaagacctgggtcttgacacggccctgccacttagtcccctaccctctccattccccaggctccacccgtgctgctcaagtgcaaatggacttgagagtatttatgtgctggtgaagtatgaggtctgagtagaaaagg

SEQ ID NO: 30399 - DNA, 1577 bp, Homo sapiens
atggggacgacggccccagggcccattcacctgctggagctatgtgaccagaagctcatggagtttctctgcaacatggataataaggacttggtgtggcttgaggagatccaagaggaggccgagcgcatgttcaccagagaattcagcaaagagccagagctgatgcccaaaacaccttctcagaagaaccgacggaagaagagacggatttcttatgttcaggatgaaaacagagatcccatcaggagaaggttatcccgcagaaagtctcggagcagccagctgagctcccgacgcctccgcagcaaggacagtgtagagaagctggctacagtggtcggggagaacggctccgttctgcggcgtgtgacccgtgctgcggctgcagctgccgcggctaccatggcattggctgcaccttcttcacccacccctgagtctcccacgatgctgactaagaagcccgaggataaccacacccagtgccagctggtgcctgtggtggagatcggcatcagtgagcgccagaatgctgagcagcatgtcacccagctcatgtccaccgagcctctgccccgcactctgtccccgactccagcttcagccacagctccaacctcccagggcatcccgacatcagatgaggaatcaacacctaagaagtcgaaggccaggatactggagtccatcacagtgagctccctgatggctacaccccaggaccccaagggtcaaggggtcgggacggggcggtctgcgtctaagctcaggattgcgcaggtctcccctggcccacgggactcgccagcctttccagattctccatggcgggagcgggtgctggctcccatcctgccggataacttctccacgcccacgggctctcgcacggactctcaatcggtgcggcacagcccgatcgccccgtcttccccgagtccccaagtcttagcccagaagtactctctggtggccaaacaggaaagtgttgtccgcagggcgagcagaaggcttgccaagaagactgccgaagagccagctgcctctggccgcatcatctgtcacagttacctggagaggctcctgaatgttgaggtgccccagaaagttggttctgagcagaaggaaccccccgaggaggctgagcctgtggcggcagctgagccagaggtccctgagaacaacggaaataactcgtggccccacaatgacacggagattgccaacagcaggaagctgcagcgggagctggatgaggccacggagagcaacgaggccatgggccgcgaggtgaacgcactcaagagcaagctcaggcgaggcaacgagacctctttcgctccttctagaaggtctggaggacatagaattattactaatgcagatgcttctgaggagcacacgtacactcgagacgcagacttcactggttccaagtccagttcattatcaacatttttacaaatttgcaccacaacaaatttatcctactactctacccaccactggctatgactcagcgacgaccccagagcactctccttcttcccagtcaccggtaccgactcgaattt

SEQ ID NO: 30400 - DNA, 745 bp, Homo sapiens
atagtcggctactctggaggctgaggcaggaagatccttagagcccaagaaattgaggccgtagtaagctgtgattacaccactgcactccagcctggacaacagagcgagaccttgtctcaaatgagaaaaaaacaaaaagaaatgggagaatccagagagactaggctagatcaagcctgctgggtcctggcaggagccccagggagtagctcatctgcagacatttgcttgaggactaccccctaaacataaaggaagaatgacatccaaagggtgtggagcagccatgagctgagaactagcctggtctacctgagattgatggcaggtcctggtcaacacgtcagctctgcgtcagagtccatgcctcaagcccaagctgaagccccatccctgctgctctcccaagaactcctctgctagggcaggccccttgcccttgggtgccaggtgggacctgcctgatgggatggggtgcttggcatatacaacttgccatgaactcaaggtgaccctgggggcctcctgaattgtgatggggcctagaaccaatgtgctctgatgtgaccatattctgtgacattaccttgccctgtttactccaaagttcccagcctggtgcccagcaggcaatattgcacctacagacacatttactttggtttccaaagtgtttttagacatttgaatttgttgccaacatttaaacattgagagatttcatatttttaaaaatctggaa

SEQ ID NO: 30401 - DNA, 390 bp, Homo sapiens
ttcatacttggctcaaagccactattgtttggaaaaggtataactgccctgctgacgctgtacagatgttcttgggctcggatgggcatggctccacgtggtgtgcactagcacccagagagagtgaagctattgacccctgtaagggagagtgaccatctggcagatagatagaggggagccaggacatggctcagcttgtgcccagagggagagttaagccgctgaccctgtagccagggagtgcacctgcaagcatgggggtggcaggagccacagagctggctgctgagaggagctgcagatctggagaagacagcctaggtaaaggtggacagtgtgagagctgctgatgagatagctgctgaataaaactacattttacctgcc

SEQ ID NO: 30402 - DNA, 2164 bp, Homo sapiens
atagtcggctactctggaggctgaggcaggaagatccttagagcccaagaaattgaggccgtagtaagctgtgattacaccactgcactccagcctggacaacagagcgagaccttgtctcaaatgagaaaaaaacaaaaagaaatgggagaatccagagagactaggctagatcaagcctgctgggtcctggcaggagccccagggagtagctcatctgcagacatttgcttgaggactaccccctaaacataaaggaagaatgacatccaaagggtgtggagcagccatgagctgagaactagcctggtctacctgagattgatggcaggtctggctgctgagaggagctgcagatctggagaagacagcctaggtaaaggtggacagtgtgagagctgctgatgagatagctgctgaataaaactacattttacctgcctatggcccgccaggttttctttcagctatcgcccatccacccagtcccctcgaacctcagcatgggctggaacctgaccctgggcatgacatttggcatagttgtggacctgacacctgtgtttgtcctagtcctgtttctccctgccttcctgttcctctcgctgccctcatggtcactcccaagagatccaacccatgttaagtatgggctggaggactgcatgaatgcctcatgatcttcccagaggcaaaggcacctactgccttccaaggtcagtgggaggttgggatcaacactgtttattatgcttaggacaaaaaagatagggagaaagatgtgcaaccttacaggtcatctttctgggatagaacacaatgggtcttctcctgcctcctggatatgttagtcaaggccagtccatgctacacatctagtctgacttctaaaatagaagcaccagatgaattcagccctgagagaattttcagcagctgtgggggcgctggaggaaacactattaaatagttttgcacctgagacagatagcctcactcgcctcaccctagtcctggtggcatttgtctcaggtgcaaaatttaagaaagaaaccttggagtgctcaccctgtggctgggtagatggtcctaaagtggtggttttcaagcctgagctgtgtatcaggatcatcaggggagcttgctaaagagcagttcctgcggtcagaccctcatgcattttgagcaggtgtggggactgggaaactgcatctgtaacctgctgtaatctaacgcttatctaaatactactgtgctcacacagagaacaccgcaaaagtagaggtgttcctccagagggcaggtgagcagatggcacagtctgcttggaattcagtcaggtgatgagagatgagatgaggcactcctagctttgggaagagggagctgaaagatgaacctttgcaggtgcccacggtcaaagtggtggtttaatgccatgccatgcccattttctgttggccttggcagggagttacagccctaccttaggacctggctccttatttctgctgtaggctctttcctgccctggccgagatggagtggaatgagacctagaaacatcaagctaaatacatgtcctcagaaagataaaggtttacattttcacccccatcaaatctgaaagctctctgcctgtgtttttctaagggatagggacatcattactcagtccacaacctggactcatgtagggtcccctgtcagtaaaggagtcagtcaagcccaccaggtataccaaggactcttaccctcagcccctactccttggaaagctgccccttggcctaatattggtgtttagcttgagcctgactccttctcaacactaagagctgatgaagtcctgaagcagaaagagctctgacctgagagtcaaacatccttattctgatctcagctcagcccctgatttgttgtgtgaccctggatatgtcacttcctgtctttttgactttttaaaatgaagggtagactagaggagagcttctaaaactttaatgtggtcaacgaaatggaataggaaattccacaagtctgtccttccacaaaagcagcaaataaggtggcaaaaactcaaatttatgggaactctggaaacgaattgaaagtttacagcaatcaggtgaatacctaagaataaaagctggatttagtaaga

SEQ ID NO: 30403 - DNA, 2112 bp, Homo sapiens
ttcatacttggctcaaagccactattgtttggaaaaggtataactgccctgctgacgctgtacagatgttcttgggctcggatgggcatggctccacgtggtgtgcactagcacccagagagagtgaagctattgacccctgtaagggagagtgaccatctggcagatagatagaggggagccaggacatggctcagcttgtgcccagagggagagttaagccgctgaccctgtagccagggagtgcacctgcaagcatgggggtggcaggagccacagagctggctgctgagaggagctgcagatctggagaagacagcctaggtaaaggtggacagtgtgagagctgctgatgagatagctgctgaataaaactacattttacctgcctatggcccgccaggttttctttcagctatcgcccatccacccagtcccctcgaacctcagcatgggctggaacctgaccctgggcatgacatttggcatagttgtggacctgacacctgtgtttgtcctagtcctgtttctccctgccttcctgttcctctcgctgccctcatggtcactcccaagagatccaacccatgttaagtatgggctggaggactgcatgaatgcctcatgatcttcccagaggcaaaggcacctactgccttccaaggtcagtgggaggttgggatcaacactgtttattatgcttaggacaaaaaagatagggagaaagatgtgcaaccttacaggtcatctttctgggatagaacacaatgggtcttctcctgcctcctggatatgttagtcaaggccagtccatgctacacatctagtctgacttctaaaatagaagcaccagatgaattcagccctgagagaattttcagcagctgtgggggcgctggaggaaacactattaaatagttttgcacctgagacagatagcctcactcgcctcaccctagtcctggtggcatttgtctcaggtgcaaaatttaagaaagaaaccttggagtgctcaccctgtggctgggtagatggtcctaaagtggtggttttcaagcctgagctgtgtatcaggatcatcaggggagcttgctaaagagcagttcctgcggtcagaccctcatgcattttgagcaggtgtggggactgggaaactgcatctgtaacctgctgtaatctaacgcttatctaaatactactgtgctcacacagagaacaccgcaaaagtagaggtgttcctccagagggcaggtgagcagatggcacagtctgcttggaattcagtcaggtgatgagagatgagatgaggcactcctagctttgggaagagggagctgaaagatgaacctttgcaggtgcccacggtcaaagtggtggtttaatgccatgccatgcccattttctgttggccttggcagggagttacagccctaccttaggacctggctccttatttctgctgtaggctctttcctgccctggccgagatggagtggaatgagacctagaaacatcaagctaaatacatgtcctcagaaagataaaggtttacattttcacccccatcaaatctgaaagctctctgcctgtgtttttctaagggatagggacatcattactcagtccacaacctggactcatgtagggtcccctgtcagtaaaggagtcagtcaagcccaccaggtataccaaggactcttaccctcagcccctactccttggaaagctgccccttggcctaatattggtgtttagcttgagcctgactccttctcaacactaagagctgatgaagtcctgaagcagaaagagctctgacctgagagtcaaacatccttattctgatctcagctcagcccctgatttgttgtgtgaccctggatatgtcacttcctgtctttttgactttttaaaatgaagggtagactagaggagagcttctaaaactttaatgtggtcaacgaaatggaataggaaattccacaagtctgtccttccacaaaagcagcaaataaggtggcaaaaactcaaatttatgggaactctggaaacgaattgaaagtttacagcaatcaggtgaatacctaagaataaaagctggatttagtaaga

SEQ ID NO: 30404 - DNA, 496 bp, Homo sapiens
cagcgattgagataaatatattttgttattggtaatcttaagtgatgtatttttaaggctattttatatatcttctagttacatttaagtagatatcacaaatacagtatattttcccatctgctgcactcacgcttgaagctctgtgctggagacaggttggtggctgtttagtggcattggccttgacagcatgtgcaaggagcagcaaaatgtgagaagtcttccccgccaaggtgaggcaggtgtgaggagtggtagcatatggacacatgattaactggctgggtatgtatgacaaaaataattctactttaagctagttaaaattaattatcctaccttgccttatgccagatagaatgaattcatttttttctaaatatatggtttatttggcacaatttgggtgaatgtagttgagatgctttttacccatattaatgagcatttcataatgaatactttgtcctttggctgtatatacaatatagaa

SEQ ID NO: 30405 - DNA, 263 bp, Homo sapiens
atagatgaagtgaagagtgtatgctaagttgaatacagattggaaatgtcactgaaaatttatgtaggattttgaaaatagatgcatttggtgatttgatgacatttacaacattttaaaaataagaaatagttttcaaaaataagaaaccatgtgtaccatgatgtcatttaaaaaattcttttcattgctcactcttgtctaagaggaggatctgccaatatctgtgcttaatcgtttacttaataaatactttattaatt

SEQ ID NO: 30406 - DNA, 593 bp, Homo sapiens
ccgaaggtggcggcagcgggggcgtacgcacgggggcgtacgcacgggggcgtgtctggggagctctcgaggagcctccagccagcgctcctatacctgcgcgttccctgtttgcccccccctttgaagtcagtcgcccaatctgaaagccgtggatgcgcctgcgccctccatctcgtcaggtgtggctgtgagcgccgcgcattttccgataccgcgagacttctctgtttccgagcgctgtgaaggaactgagtgaattgaggctttgagttttcgttagccaagacgttgtgttgctctgtgttctttttggccgggagtggttatgtccgtgtcctactgttaggtcttttaggctgaagaatgcgttccttcccgctttggcaccagcgtcactggcaccgtttttgtcctgtgcttactgaccattctgcatcttttgtgaagtttcagttccagtcttctgcccgtttttaaatctggtccttcgtgtttaacagttctggatacaaatgttttgttagatatatgtatgctctgaatgaaaatcttttgttacataaatgattgcgaagtctttttcccaaact

SEQ ID NO: 30407 - DNA, 914 bp, Homo sapiens
  misc_feature (914)..(914): n is a, c, g, or t
ccgaaggtggcggcagcgggggcgtacgcacgggggcgtacgcacgggggcgtgtctggggagctctcgaggagcctccagccagcgctcctatacctgcgcgttccctgtttgcccccccctttgaagtcagtcgcccaatctgaaagccgtggatgcgcctgcgccctccatctcgtcaggtgtggctgtgagcgccgcgcattttccgataccgcgagacttctctgtttccgagcgctgtgaaggaactgagtgaattgaggctttgagttttcgttagccaagacgttgtgttgctctgtgttctttttggccgggagtggttatgtccgtgtcctactgttaggtcttttaggctgaagaatgcgttccttcccgctttggcaccagcgtcactggcaccgtttttgtcctgtgcttactgaccattctgcatcttttgtgaagtttcagttccagtcttctgcccgtttttaaatctggtccttcgtgtttaacagttctggatacaaatgttttgttagatatatgtatgctctgaatgaaaatcttttgttacacttaaaagaatatagaaaagcataaaaataataaaaaggaatttgttgggcgagagatgtgcgtggcctgttgagaaactctttttcaaaccgtctatctgtggggacggggggcccagtatgtgtttgtacaattggttcacccatgtgtccccggaaagatcaaccgggggagcaagataacagggggctggagtgtgtctcacgcatatataaaaaatcgccacggtgcggataaacaggtggttttctgtgaaaacacctggatgtggcaacaggagaaggcacgcatacgggggatttcacccccagggggaccgctaaagaggtcccagaaatttaaatggtccn

SEQ ID NO: 30408 - DNA, 343 bp, Homo sapiens
tatgtactgccatttgaggaaatggataagaatggtggacaccgagaagggctctggtgtaaatgggagaaatgggcaagaaaattacttacttttttaaaaattgaatttttagaacacaaacataactcttgctggttttttttcccaaatcattgtaacgcttttatttttatatctttgagtttctgcattcctaaagaataaaatgggtaagtggtatcttgaaaaattagccaggcattggtggtgtgtgcttgtattcctagctacttgggaggctggggtgggagaattgcttaagcccgggaggcagtagggttgtaatgaggactctttcaaa

SEQ ID NO: 30409 - DNA, 344 bp, Homo sapiens
agaagggaccatttgaaatattggtattagagaagtctcctctggtcaagccttcttaaggttttttgtttgttttattttctttgctttacacatatttccatcaaaagcaaagcatgccatagaaatgaggtattttgccttgtgttgtgatggtctgaattcaaatttactgtagagtgggcagtggaataatgataattttcattcaataaccttgtccttcttcccttctccaactaatgtcactgaatgtagtgtccctgagggagagtcacttaagaacagtagaattttagaaagaaacagggagggaagttggccttactgcattcagcaacaaa

SEQ ID NO: 30410 - DNA, 323 bp, Homo sapiens
gcagttttgcaataacatttatactcacctttaataacatgcagattaaagggcggtttatgcagaaaattctagggaagaggtagtaacttttgggtcatcgggtcatttccatagaaaggggtggtaactcccaggtgttgccacggcacaccagggggtgtgtctgattggaaagctgcttccacccaggccctgtttttgctagttctcagtctggtccggtgtctgagccccacctctggagtcaagtcctgcctcctacctcactatgactgtaccactgaactccagcctaggccacagagggagacccagtcttt

SEQ ID NO: 30411 - DNA, 461 bp, Homo sapiens
ctggaattataggcatgagccaccatgccctgcccaggcaccattcttgactgcgagaaagtcactgtgatggtttctccagcctgagttttctcctgtataaaatggaccttgttttgaggagagaatgaggtatgtggtactcgtgagcaggattttcaatgcctggctggttgttacttatccatttagtccgagcttcagggaaagaacatgacaccggcctccagcagagcctgctcttggtccactgtttatcctgggtgaccttaggcaagtcatttaatttccttgagttttggtgtaagtattgatggagcagaccatcaataactgttcttatgtctattattaccatgtgtctgtctacatgtttgtttgtaaattctctgtgggtaaaagttctcttttcatccccttgcctcagcacggagcccagagccagactgcaggtaggcact

SEQ ID NO: 30412 - DNA, 515 bp, Homo sapiens
atttctttccttctgcttgctttgggtttatattgctcttccttttccagattcttgaggtaggagcttcgattattgaattcagacttccttttttctagtatcaacatttaatgccatatattttattttaatttccattcaggtcagtgtgtgtttaaaacaaaattttcttgaggcttgctctttgacccatggattacttagaagtgtgttgtttaatttctaagtgcttgggtgtttgcctgttgtctagttcgagtccattttggttagaaaaccagtctgtatgatttcagtccttttacatttgttgaggtttgttttatggctcaggatatggtttatcttggtatatattcttgaaaagattgtatattttgctagaaagagatttcaaaaatagtaaatatgaatcaacctgaaggataaaaataaatgatttttctttcctttggcaatagaaatattgttactagttggacaagttatctttattcacagcctgagttata

SEQ ID NO: 30413 - DNA, 167 bp, Homo sapiens
tatattctaacattctcatttatagtgctttaatatatgagattattcagtattgataaaattgaaagtcaatttaattatgtgatactacattttgctttgggtaaatgatggattctagaagatctaaaggggtggctgctatattacctacatgtttggtttta

SEQ ID NO: 30414 - DNA, 373 bp, Homo sapiens
agaaaagtcagaaggtctacgtacaactttaagagttcagccaaaagagaccagtatctactaccgtggacaaccctatttaacatggaggagataagcagaaactgaaaagaggagcctgttttctctctggcagattaattttctttctttcttcacccatgccttggacatgaaacacaagtacaaaggttcagagaaaatcaaaacaagactgtggtttacaaataagtagtactagtaacatctcactgttggctgggcacagtgactcatgcctgtaaccctagcactttgggaggcagaagtgggaggatcacttaagcctagggttgaagaccagcctgggcaacatggtgaaacctcatttcta

SEQ ID NO: 30415 - DNA, 355 bp, Homo sapiens
ctgtgaagaaattttcaccctgtggggaaaaagttttgaatagatgtaatctcttgattctcaatattgcttaagatgagttcatctctcttagaacaaaggcaatgagaggtttgatgccaggaaagttgggagagctgggcaatcttagaaagagacctgggcactaagaggaatttgcatccaggcagtagttccagaattggcaaatcagtattatgtttgtgtatatattatatacacatcttggcaatgtagaacaagataagctacattttatcttctagaatttgatagccaaaatcacaggtcagaattttaaagtaaacagttttactatttcctcttcttgtag

SEQ ID NO: 30416 - DNA, 465 bp, Homo sapiens
tttttttcctactcggtaattgcatatcaataattctatagcacagaagtaataaaaataaaaacacatctatctgtcaattcatctgtcattgcttatagaagcttaaatatacaaaaataaggaagtggttacataataaaaaaattattcaatggattagtaagcagattaactatcatgatcagcaggaatattaaaatgaggaaataaatataattttaagagtaaactgcatgcataactctataaataaaatatataaattttggataataaaaactgtctaaaaggactatagcagttttttaagtggctattcctgagggaaataaaataatgattttatgtttttctttgtacttgaacctatttctaaattttctacaatgaatatttactacttttaaaatagcaattaaaaagaagaaagaaaatacatccttatctacaaaattcagcatg

SEQ ID NO: 30417 - DNA, 879 bp, Homo sapiens
ctcatagccagttgtgctgcagacagacaaaaccagagaagccgcttttcacggacatttttcttttttgcagatacctaggggttatcatggggaaacaaaggcatgtataaacctcattcagcagtcttttcagatagagtctgaaaagagtctatcaccaatctatctgaggtcagcttaatccatacccacagagatgatgagccaaaggcttccctaagctagggtcccatagtcttccccaagctagggtcccagcgctgggtgggggacaggagaaaaggcctgaggcacgggggagaaaaaggcagttgcagatagtaatgtttggaggcatgctcagttattcagaagaaatggaatgacgttaaaattctcccaaaaaaggttggaaccacctctgcttccctttccccactctgtaatcagtaatcattgtctggtgtgttcagatgataatccagttggccaccaaggggttgtgcttccttactgactgtatttgtgatctgtaagacttttcaaacacaggtttaaacatccagagactccagcctctttgacagtcattctcccactgtgtcccttttgacttcttttgtcatgtctctagtgcagatttcccagctgcccaatttgagcccttttgagttgacctcccttggatgagtagctctttgaaagctgatttaaagtgagtgttgctccacctaagagctgttggctgaaaaaagcactatctacaacagcagaggtggccgagaaaggcagacaggctctcctgaggctggtgttgcagatttgcattggtctagtaggaattatgcatcattagactgaacttcttatgtttgcatccaggtcatttctccataa

SEQ ID NO: 30418 - DNA, 1857 bp, Homo sapiens
ttctaagcaagagcaaaggatacttcatacttttttcgttatatgattgatcttcaaattgggatttacctttttcaatatgttttaaagtagtcttattcctcttttgatttgttaaacaagcattttagttcagctattgaatagccttccaaaaaattaattcagccttgcaggtaagtaccatactaagactttaacccaatagtttttaatcattctgcctttattccaaactgtaaatctgtacacataagataaaacatactaagtattgcataaattgttaacgttacagtaaattgttatctgcagggctgacagacataatgttggtgggcaactgtgatcctatacatacatatatgcaaaaggggattttaaaagtgcagattatagagtagattgacaaattttattttatattcagttgtcctctctgcttccatctgtgttgctctcttagttgagagagagttagccatttgacgattttaagtcagtgggaacttatttttagttactcaataaaattaatattttatttgtattttaacttacagagtaggttggtaataacagctgaactgtgtaacattgttgcttcaaattgaagtttatattatgaacattcagaatcaatgctcatgtagcagcatattattgagctattttgagtttgaaatgtggagaaacgctaaaccatgtactatgtgttaacataatcccaccttcttagagctttgttccttctgaaggtgtatagatacagcttgtcttgaaatgtctttctccacataatgaagcatgctgaatgctgggaatctggagcagcagccctgggagccctgagttttgaagtgttttggtttgcttcaaaggttagaagaacttgatatgtatggcaaacaactttagaatactagttactcactaacatgaggcgggtaatgttgctctagattctatattccagtaaagccagcttttcttattattggagtaggcaaatgaatggcattagaattagtgggtggcttgtaagttgtagttataggcactttaccacttcctgccattagcaggcatccttgttttttcttcttttccctctttgttccttcttttccctttctccttatacattttctttctctactttaattctccttcctccttactgtagatcccaagcttctagcttaggtttgcaagtcatattgcttggccctccacattcactgagaggtgaagataggctgaccccctgtcctcttacatttgagggatcatagactgctgtgtgaattctggaaagtctcaggtccctaccagggcactgaatggcttctcaatggctgtagagacagtacagttttccaaagcagcctaattcatctggacagctaccaggcactttggaaagttggttcagttactactatgaggccataatatatttgctggtattaaaattcttcagaattggaattactatttgaaataatattttggttgacttaagttttgagagacaattctaaaattgatctagagactcattcaatagcaatgtgaccttttaaatacttacattaagtaaaactgccagtagattaaatcatatatatatatatatatatatatatatgtaagagcttcctctatttactactgttgaacttcagtaatttttagaggctaaataatggtcagaatgtttttaagtgtgctcttttattacatgcttgtgcaggttttgtaattcagtacagaaaagtttaaccttgtacatttttgtatgtaaaaagtcttttaagtagtcttatccttatttaaataaacagaataaaatta

SEQ ID NO: 30419 - DNA, 2300 bp, Homo sapiens
ttctaagcaagagcaaaggatacttcatacttttttcgttatatgattgatcttcaaattgggatttacctttttcaatatgttttaaagtagtcttattcctcttttgatttgttaaacaagcattttagttcagctattgaatagccttccaaaaaattaattcagccttgcaggtaagtaccatactaagactttaacccaatagtttttaatcattctgcctttattccaaactgtaaatctgtacacataagataaaacatactaagtattgcataaattgttaacgttacagtaaattgttatctgcagggctgacagacataatgttggtgggcaactgtgatcctatacatacatatatgcaaaaggggattttaaaagtgcagattatagagtagattgacaaattttattttatattcagttgtcctctctgcttccatctgtgttgctctcttagttgagagagagttagccatttgacgattttaagtcagtgggaacttatttttagttactcaataaaattaatattttatttgtattttaacttacagagtaggttggtaataacagctgaactgtgtaacattgttgcttcaaattgaagtttatattatgaacattcagaatcaatgctcatgtagcagcatattattgagctattttgagtttgaaatgtggagaaacgctaaaccatgtactatgtgttaacataatcccaccttcttagagctttgttccttctgaaggtgtatagatacagcttgtcttgaaatgtctttctccacataatgaagcatgctgaatgctgggaatctggagcagcagccctgggagccctgagttttgaagtgttttggtttgcttcaaaggttagaagaacttgatatgtatggcaaacaactttagaatactagttactcactaacatgaggcgggtaatgttgctctagattctatattccagtaaagccagcttttcttattattggagtaggcaaatgaatggcattagaattagtgggtggcttgtaagttgtagttataggcactttaccacttcctgccattagcaggcatccttgttttttcttcttttccctctttgttccttcttttccctttctccttatacattttctttctctactttaattctccttcctccttactgtagatcccaagcttctagcttaggtttgcaagtcatattgcttggccctccacattcactgagaggtgaagataggctgaccccctgtcctcttacatttgagggatcatagactgctgtgtgaattctggaaagtctcaggtccctaccagggcactgaatggcttctcaatggctgtagagacagtacagttttccaaagcagcctaattcatctggacagctaccaggcactttggaaagttggttcagttactactatgaggccataatatatttgctggtattaaaattcttcagaattggaattactatttgaaataatattttggttgacttaagttttgagagacaattctaaaattgatctagagactcattcaatagcaatgtgaccttttaaatacttacattaagtaaaactgccagtagattaaatcatatatatatatatatatatatatatatgtaagagcttcctctatttactactgttgaacttcagtaatttttagaggctaaataatggtcagaatgtttttaagtgtgctcttttattacatgcttgtgcaggttttgtaattcagtacagaaaagtttaaccttgtacatttttgtatgtaaaaagtcttttaagtagtcttatccttatttaaataaacagaataaaattaccttgagtaggtctgttattcttattaaaatggaaaaatgctctgtaatgacttgatctgtttttatttgagtgaacaattttggaaagtattctttatagtacaactttctatacctggattgattaagatcagatgtgattcgagtagtccagccatatcttgtagcccttctttgaatgagagggtggctggagtggtctggtgctgggatatcacggtgctacagagcctgacatgttgactgtcactacatgttgagggatggaaatagaagtctctgaacttcccatgtaatattaaagctcttaacaaaatgagacaaactagagattcagttgagagattttatgttagagtgatctgaaaaaaagttaatttctaaactgctatcttaatattattatatttggagactgatgctgtaaattaaataacttgga

SEQ ID NO: 30420 - DNA, 2246 bp, Homo sapiens
ttctaagcaagagcaaaggatacttcatacttttttcgttatatgattgatcttcaaattgggatttacctttttcaatatgttttaaagtagtcttattcctcttttgatttgttaaacaagcattttagttcagctattgaatagccttccaaaaaattaattcagccttgcaggtaagtaccatactaagactttaacccaatagtttttaatcattctgcctttattccaaactgtaaatctgtacacataagataaaacatactaagtattgcataaattgttaacgttacagtaaattgttatctgcagggctgacagacataatgttggtgggcaactgtgatcctatacatacatatatgcaaaaggggattttaaaagtgcagattatagagtagattgacaaattttattttatattcagttgtcctctctgcttccatctgtgttgctctcttagttgagagagagttagccatttgacgattttaagtcagtgggaacttatttttagttactcaataaaattaatattttatttgtattttaacttacagagtaggttggtaataacagctgaactgtgtaacattgttgcttcaaattgaagtttatattatgaacattcagaatcaatgctcatgtagcagcatattattgagctattttgagtttgaaatgtggagaaacgctaaaccatgtactatgtgttaacataatcccaccttcttagagctttgttccttctgaaggtgtatagatacagcttgtcttgaaatgtctttctccacataatgaagcatgctgaatgctgggaatctggagcagcagccctgggagccctgagttttgaagtgttttggtttgcttcaaaggttagaagaacttgatatgtatggcaaacaactttagaatactagttactcactaacatgaggcgggtaatgttgctctagattctatattccagtaaagccagcttttcttattattggagtaggcaaatgaatggcattagaattagtgggtggcttgtaagttgtagttataggcactttaccacttcctgccattagcaggcatccttgttttttcttcttttccctctttgttccttcttttccctttctccttatacattttctttctctactttaattctccttcctccttactgtagatcccaagcttctagcttaggtttgcaagtcatattgcttggccctccacattcactgagaggtgaagataggctgaccccctgtcctcttacatttgagggatcatagactgctgtgtgaattctggaaagtctcaggtccctaccagggcactgaatggcttctcaatggctgtagagacagtacagttttccaaagcagcctaattcatctggacagctaccaggcactttggaaagttggttcagttactactatgaggccataatatatttgctggtattaaaattcttcagaattggaattactatttgaaataatattttggttgacttaagttttgagagacaattctaaaattgatctagagactcattcaatagcaatgtgaccttttaaatacttacattaagtaagcttcctctatttactactgttgaacttcagtaatttttagaggctaaataatggtcagaatgtttttaagtgtgctcttttattacatgcttgtgcaggttttgtaattcagtacagaaaagtttaaccttgtacatttttgtatgtaaaaagtcttttaagtagtcttatccttatttaaataaacagaataaaattaccttgagtaggtctgttattcttattaaaatggaaaaatgctctgtaatgacttgatctgtttttatttgagtgaacaattttggaaagtattctttatagtacaactttctatacctggattgattaagatcagatgtgattcgagtagtccagccatatcttgtagcccttctttgaatgagagggtggctggagtggtctggtgctgggatatcacggtgctacagagcctgacatgttgactgtcactacatgttgagggatggaaatagaagtctctgaacttcccatgtaatattaaagctcttaacaaaatgagacaaactagagattcagttgagagattttatgttagagtgatctgaaaaaaagttaatttctaaactgctatcttaatattattatatttggagactgatgctgtaaattaaataacttgga

SEQ ID NO: 30421 - DNA, 1015 bp, Homo sapiens
caatttgcagggctacaccttcacagggctaccatgtctgatatcagtcattttttcaggacaggtacagagggagcgagtttctgcatgcctaaaaagcctttattttactgtcactttttttttctttcttttttgtagagacagggcgagtccatacagtaaagtgaaagcaagtttattagcaaagtaaaggactaaagaaaagctgctccatagagcagccccgagcgctgctggttgcccatttttatggttatttcttgattatatgctaaacaagaggcggattattcatgccacccttttttagaccatattaagtaacttcctggcattgccatggcatctgtaacctgtcatggcgctggcaggagtgtggcagtgaggacgaccaagatcactctggttgccatcttggttttggtgggttttgggctgccttctttaccgcaacctgttttatcagcaaggtctttacgacctgtatcttgtgatgacctcctatctcatcctattacttagaatgccttcaccattggcattggcagtgcagcccagtaggtctcagcctcattttaccccgcccctactcaagatgaagttgctctggttcaaacgcctctgataccatgagattttgaatctcgatactttcttctgggaacttgttcttcttttacttcttcattctcacatcccagcccctgattttctctgtttcctctttctgaaacttctagtagacactgtacttcctggcacagtatcctccctcaatttttcacttatatactcttttagtgtcttcgtattctaggaattttttttttacttaatcctctagctcttctacaaaatgttctgttttgttaatcatgtttaacataattttgatccttttaaatgtattgagacctatcttggtgaatgttccatgtgcaattgaaaagaatatgtactgtgctgttgctgggcggagtgttctataaatgtcacttaggtcaagttgttt

SEQ ID NO: 30422 - DNA, 1343 bp, Homo sapiens
gagtggacttagcagcttactagcaagcttatcttgtctttatagaaaatgtaagaataaatgtgtagaagatagagataattcccattctgcagacccttacctttcatcaaaggaagggaaatattgtctacttctagcctgcctttataaactttataagctctcaacattaaaggataaataaactttagtttttcactgagaatcttatggcactgaggaatggactgacttactcttcagtccaatcacatttgggaagacacaggtctctgatgtataaagcagaaggccactaagaattttattaaatttcaaacttattatatgccacccctttttaaaactaaatccaggtataaaagtccatcatgtagacttgaattttactattaaatccactaatacgaacaaattctgggacataattatctgagttatgaattgagagtgaaaataagatcctcattaacaactctaaggctaaaagattcaccaaatcttacagaataaggtcagtgctgctgacctttatagatccctggatgtggtgggagttgcctatagtcctagtacgtgggaggatgaagcaggaagatcacttgagcaaaggagttcaagtccaacctgggcaacatagcaagacccgatctcttttaaaaaaaaaaaaaaaaaaaagtatacattccagacagctttctgattgggttttgaaaatctccctcaaattacacagcagtgaagcaatgtacacaactgggaaagctttttaacctctaaaactattcaaagacttacttatagggatctgtttgccagcatactaatcaattctgtgtatgattttgttgtactaatcaatcctaggtatgatctggtcgaacccaatatgcagttattcatcttgaaaaaacagctgttttcttcagttgtctactagttaaaataattaggcatgccatctaaaaggtacacacagttcgtcttgaaaacttacaaatgcctgtagaatgattatatttcagttaaaaaaaaaaaaagaaaatgagctctgcataatctacatgtatatgcttgtgtgtgtatatatatacatatataaacaatgataaatgggataaagtatacataccaggctcttaacattgcttttcctcatcagactgggattgggttagaaaagagggctgagaaacacaattagcttgcctttatttgtatttttattgtattgtttcatttgttttaaaaagagagtaagataattatgcaggatttcagtttaatagtaagcgtgatcttcgtttgttgtaaggcattctactaattgttgacttgat

SEQ ID NO: 30423 - DNA, 340 bp, Homo sapiens
tgtattacttttttaaaatgcaaaaagttatttgtttcaaactctggttccagttgtttctgttaaagaaccagggcctcactgcagtgagctatggtcataccactgcactccagcctgggcaacagcaagatcctgtttcccaaaaagaatcatggcctcacagtaagggtaacagatttctggttagacctggatttaaattctaatagcgggctgggcactctggctcatgtctataatcccagcactttaggaggccgaggtgagcggatcacccgaggtcaggagttcaataccagcctggccaacgtggtgaaacactgtctctactaaaaat

SEQ ID NO: 30424 - DNA, 1645 bp, Homo sapiens
ggattgaattgcactgaaatgaaataactgcttaggcatgtatctttacatatgatcccagtattgcaaagtacaagagagaaaaagttattttatagctaaaatcaggaaattataaaaacaggaaataataacaagagttttaatgaaagataagtgaaaatgctgtaactttttgtttgcatgtttgtctgtttaaaattgaggtataattatgtaaactaaaaaatcatctattttggctggacgcagtggcttacgcctgtaatcccagcactttgggaggccgaggcgggcagatcacttgagatcaggagttcgagaccagcctgaccaacacagtgaaaccccatctctactaaaaatacaaaaattagcagggcgtggtggcacacacttgcaatcccatctgctcaagaggctgaggcatgagaactgcttgaacccagaggcagaggttgcagtgagcggagaccatgccactgccctccagtcagggtggcagagcaagactccgtctcaaaaaaaaaagagagagaaaatatatatatattttactgttcaatttgatgagtttcagcaattttatatatctttgttaaccaccatgcaacacaacatacagaacatttccatcacacttcaaaattcccttgcgtctttttccagtcgatactgcccctccccactagtaatcattcttctgactcctctcactgtagatttgctgtgcctgttcatgaatggaatcatacaatatttgttcttttgtgtttggcttctttcattcaatacagtgtttttgagattcatctgttttgttgcttatattagcagttcattcgtttttattgagcaatacttcattgtatgaatacaccacaatttatttctgtaatgataggcattaggattggttccagtttttgactactatgaatacaaattcagtgaaaattcttatgcaacttttttttagccacatttttatttcttttgggtcaatacctagaagtagaattgtcctgtcgtgtaaatatatgtttaactttataagaaactgaccagtagttttctgaaacgattgcatcattttacacccccgtcagcaatgtatgaaagttctagttgctcttcatgctcactaacatctgatattgttctccatttgattttagtcatgttagtagatgtaagatgttagttgcatttccctgatgagtactgatgttgagaacttttcatttgcttgttagccagtcacatattttcttttgtaaattgactgttccaatcttttacatgttcttaaatctcattatttttgttattcatatcaacagttaccaatagggcatttttatattttatcactagaaatcctttgtcacatatacatacctatattgcagatatttttcctcaaaggcatgtcttgcttattcattttcttttccttagtgatgtcttttgatgagcagaaatgtcttgatcatggtagttttatagtagtcttgaaatcaggtgatgtaagttatctttttcaagattgttttgactaatatagattctttgatttttccctaatgtggcaatcaacctttcctgccaccagaggtatgctagaagaaaaaaaaaaaagaag

SEQ ID NO: 30425 - DNA, 1159 bp, Homo sapiens
  misc_feature (32)..(32): n is a, c, g, or t
  misc_feature (42)..(42): n is a, c, g, or t
  misc_feature (101)..(101): n is a, c, g, or t
  misc_feature (204)..(204): n is a, c, g, or t
  misc_feature (320)..(323): n is a, c, g, or t
  misc_feature (1041)..(1041): n is a, c, g, or t
ggctcttcgcgcgcagtcccttagggggcgcntggaagcccnggcatgcgccctgagggctcgctgacctaccgggtgccagagaggctgcggcagggttnctgtggcgtgggtcgggcagcacaggccttggtgtgtgcgagtgccaaggagggcaccgccttcaggatggaggctgtgcaggagggggcggccggggtgganagtgagcaggcggctttgggggaggaggcggtgctgctgttggatgacataatggcggaggtggaggtggtggcggaggaggagggcctcgtggagcggcgggaggaggcccagcnnnnacagcaggctgtgcctggccctgggcccatgaccccagagtctgcactggaggagctgctggccgttcaggtggagctggagccggttaatgcccaagccaggaaggccttttctcggcagcgggaaaagatggagcggaggcgcaagccccacctagaccgcagaggcgccgtcatccagagcgtccctggcttctgggccaatgttattgcaaaccacccccagatgtcagccctgatcactgacgaagatgaagacatgctgagctacatggtcagcctggaggtggaagaagagaagcatcgtgttcatctctgcaagatcatgttgttctttcggagtaacccctacttccagaataaagtgattaccaaggaatatctggtgaacatcacagaatacagggcttctcattccactccaattgagtggtatccggattatgaagtggaggcctatcgccgcagacaccacaacagcagccttaacttcttcaactggttctctgaccacaacttcgcaggatctaacaagattgctgagatcctatgtaaggacctgtggcgcaatcccctgcaatactacaagaggatgaagccacctgaagagggaacagagacgtcaggggactcccagttgttgagttgaatatgatggagcatcagattttacctaatacagcagaactcctaaaaagttacagccatatgcaggacngcagtactcagcatggtcttatgcacaggaactaaaggaaaaagagatcgagtcacaaaaattcaggaagagggggtaaatgtggattgtatggaatgaaaaataaacattctcaagg

SEQ ID NO: 30426 - DNA, 1748 bp, Homo sapiens
tcccacacccgacgctctggcccacacagacgctactctgtagcatctcaggttccctctggctgcactctggaggaccacactcgttttctttttggctgccagaggcccccgcatccaccgctgagctgggagaaagatggcggcagccgtgcgacaggatttggcccagctcatgaattcgagcggctctcataaagatctggctggcaagtatcgtcagatcctggaaaaagccattcagttatctggagcagaacaactagaagctttgaaagcttttgtggaagcaatggtaaatgagaatgtcagtctcgtgatctcgcggcagttgctgactgatttttgcacacatcttcctaacttgcctgatagcacagccaaagaaatctatcacttcaccttggaaaagatccagcctagagtcatttcatttgaggagcaggttgcttccataagacagcatcttgcatctatatatgagaaagaagaagattggagaaatgcagcccaagtgttggtgggaattcctttggaaacaggacaaaaacagtacaatgtagattataaactggagacttacttgaagattgctaggctatatctggaggatgatgatccagtccaggcagaggcttacataaatcgagcatcgttgcttcagaatgaatcaaccaatgaacaattacagatacattataaggtatgctatgcacgtgttcttgattatagaagaaaattcattgaagctgcacaaaggtacaatgagctctcttacaagacaatagtccacgaaagtgaaagactagaggccttaaaacatgctttgcactgtacgatcttagcatcagcagggcagcagcgttctcggatgctagctactctttttaaggatgaaaggtgccagcaacttgctgcctatgggatcctagagaaaatgtatctagataggatcatcagaggaaatcaacttcaagaatttgctgccatgctgatgcctcaccaaaaagcaactacagctgatggttccagcatcttggacagagctgttattgaacacaatttgttgtctgcaagcaaattatataataatattaccttcgaagaacttggagctcttttagagatccctgcagctaaggcggaaaagatagcatctcaaatgataaccgaaggacgtatgaatggatttattgaccagattgatggaatagttcattttgaaacacgagaagccctgccaacgtgggataagcagatccaatcactttgtttccaagtgaataaccttttggagaaaattagtcaaacagcaccagaatggacagcacaagccatggaagcccagatggctcagtgaatccttgcagaacttctgtgcacatgacatctttttccatgttgtgcagatcagtttcactatctccaaagcatttgcatcatgaccttatacatttcaatcccttttatgctggattccgtttaaagaagacattattagagcaggaagtacaagcatttaaaatatgtagttcccatatatttcagggtctctgtgtattaagctaactcagatgttttgaaagctttttctttaaacagaggtgaaatatctgtggctaaaaagtttgagatttgtgataactttgtagtcatgtaaaacttaagtgcttcatgcctctccaaatgtggttattctaataaatggagaaatgagccaaataaaagtagtactttgtttttagata

SEQ ID NO: 30427 - DNA, 845 bp, Homo sapiens
agtcacggtggcaggtgcctgtaatctcagctgcttgggaggctgagtcaggagaatcgcttgaactcaggaggtggaggttgcagtgagccgagatcctgccactgcagtctagcctgagtgacagagcaagactccatctcaaaaaagaaaagtatttattgtttttattttttttgaatagcttttttctgttttttaggtatttaaaaggaacatgcctcttccaagaataggcatgtaaaaagtatatatcttttaactcacagttgctgtgaatacaaaggaataattttaattttgtacattttttttccccttagcacgagaagccctgccaacgtgggataagcagatccaatcactttgtttccaagtgaataaccttttggagaaaattagtcaaacagcaccagaatggacagcacaagccatggaagcccagatggctcagtgaatccttgcagaacttctgtgcacatgacatctttttccatgttgtgcagatcagtttcactatctccaaagcatttgcatcatgaccttatacatttcaatcccttttatgctggattccgtttaaagaagacattattagagcaggaagtacaagcatttaaaatatgtagttcccatatatttcagggtctctgtgtattaagctaactcagatgttttgaaagctttttctttaaacagaggtgaaatatctgtggctaaaaagtttgagatttgtgataactttgtagtcatgtaaaacttaagtgcttcatgcctctccaaatgtggttattctaataaatggagaaatgagccaaataaaagtagtactttgtttttagata

SEQ ID NO: 30428 - DNA, 567 bp, Homo sapiens
attcacttggaaacaaagtgattaaccctttggagaaaattaatcactttgtttccaagtgactaattttctccaaaaggttattcactggaaacaaagtgaataaccttttggagaaaattagtcaaacagcaccagaatggacagcacaagccatggaagcccagatggctcagtgaatccttgcagaacttctgtgcacatgacatctttttccatgttgtgcagatcagtttcactatctccaaagcatttgcatcatgaccttatacatttcaatcccttttatgctggattccgtttaaagaagacattattagagcaggaagtacaagcatttaaaatatgtagttcccatatatttcagggtctctgtgtattaagctaactcagatgttttgaaagctttttctttaaacagaggtgaaatatctgtggctaaaaagtttgagatttgtgataactttgtagtcatgtaaaacttaagtgcttcatgcctctccaaatgtggttattctaataaatggagaaatgagccaaataaaagtagtactttgtttttagata

SEQ ID NO: 30429 - DNA, 333 bp, Homo sapiens
tcccacacccgacgctctggcccacacagacgctactctgtagcatctcaggttccctctggctgcactctggaagacattattagagcaggaagtacaagcatttaaaatatgtagttcccatatatttcagggtctctgtgtattaagctaactcagatgttttgaaagctttttctttaaacagaggtgaaatatctgtggctaaaaagtttgagatttgtgataactttgtagtcatgtaaaacttaagtgcttcatgcctctccaaatgtggttattctaataaatggagaaatgagccaaataaaagtagtactttgtttttagata

SEQ ID NO: 30430 - DNA, 1672 bp, Homo sapiens
ggacgcgtgggtcgacccacgcgatcgagaggcccccgcatccaccgctgagctgggagaaagatggcggcagccgtgcgacaggatttggcccagctcatgaattcgagcggctctcataaagatctggctggcaagtatcgtcagatcctggaaaaagccattcagttatctggagcagaacaactagaagctttgaaagcttttgtggaagcaatggtaaatgagaatgtcagtctcgtgatctcgcggcagttgctgactgatttttgcacacatcttcctaacttgcctgatagcacagccaaagaaatctatcacttcaccttggaaaagatccagcctagagtcatttcatttgaggagcaggttgcttccataagacagcatcttgcatctatatatgagaaagaagaagattggagaaatgcagcccaagtgttggtgggaattcctttggaaacaggacaaaaacagtacaatgtagattataaactggagacttacttgaagattgctaggctatatctggaggatgatgatccagtccaggcagaggcttacataaatcgagcatcgttgcttcagaatgaatcaaccaatgaacaattacagatacattataaggtatgctatgcacgtgttcttgattatagaagaaaattcattgaagctgcacaaaggtacaatgagctctcttacaagacaatagtccacgaaagtgaaagactagaggccttaaaacatgctttgcactgtacgatcttagcatcagcagggcagcagcgttctcggatgctagctactctttttaaggatgaaaggtgccagcaacttgctgcctatgggatcctagagaaaatgtatctagataggatcatcagaggaaatcaacttcaagaatttgctgccatgctgatgcctcaccaaaaagcaactacagctgatggttccagcatcttggacagagctgttattgaacacaatttgttgtctgcaagcaaattatataataatattaccttcgaagaacttggagctcttttagagatccctgcagctaaggcggaaaagatagcatctcaaatgataaccgaaggacgtatgaatggatttattgaccagattgatggaatagttcattttgaaacacgagaagccctgccaacgtgggataagcagatccaatcactttgtttccaagtgaataaccttttggagaaaattagtcaaacagcaccagaatggacagcacaagccatggaagcccagatggctcagtgaatccttgcagaacttctgtgcacatgacatctttttccatgttgtgcagatcagtttcactatctccaaagcatttgcatcatgaccttatacatttcaatcccttttatgctggattccgtttaaagaagacattattagagcaggaagtacaagcatttaaaatatgtagttcccatatatttcagggtctctgtgtattaagctaactcagatgttttgaaagctttttctttaaacagaggtgaaatatctgtggctaaaaagtttgagatttgtgataactttgtagtcatgtaaaacttaagtgcttcatgcctctccaaatgtggttattctaataaatggagaaatgagccaaataaaagtagtactttgtttttagata

SEQ ID NO: 30431 - DNA, 1637 bp, Homo sapiens
aggctagtagagccgcgggtgaatcggccgaggggcagccgtgcgacaggatttggcccagctcatgaattcgagcggctctcataaagatctggctggcaagtatcgtcagatcctggaaaaagccattcagttatctggagcagaacaactagaagctttgaaagcttttgtggaagcaatggtaaatgagaatgtcagtctcgtgatctcgcggcagttgctgactgatttttgcacacatcttcctaacttgcctgatagcacagccaaagaaatctatcacttcaccttggaaaagatccagcctagagtcatttcatttgaggagcaggttgcttccataagacagcatcttgcatctatatatgagaaagaagaagattggagaaatgcagcccaagtgttggtgggaattcctttggaaacaggacaaaaacagtacaatgtagattataaactggagacttacttgaagattgctaggctatatctggaggatgatgatccagtccaggcagaggcttacataaatcgagcatcgttgcttcagaatgaatcaaccaatgaacaattacagatacattataaggtatgctatgcacgtgttcttgattatagaagaaaattcattgaagctgcacaaaggtacaatgagctctcttacaagacaatagtccacgaaagtgaaagactagaggccttaaaacatgctttgcactgtacgatcttagcatcagcagggcagcagcgttctcggatgctagctactctttttaaggatgaaaggtgccagcaacttgctgcctatgggatcctagagaaaatgtatctagataggatcatcagaggaaatcaacttcaagaatttgctgccatgctgatgcctcaccaaaaagcaactacagctgatggttccagcatcttggacagagctgttattgaacacaatttgttgtctgcaagcaaattatataataatattaccttcgaagaacttggagctcttttagagatccctgcagctaaggcggaaaagatagcatctcaaatgataaccgaaggacgtatgaatggatttattgaccagattgatggaatagttcattttgaaacacgagaagccctgccaacgtgggataagcagatccaatcactttgtttccaagtgaataaccttttggagaaaattagtcaaacagcaccagaatggacagcacaagccatggaagcccagatggctcagtgaatccttgcagaacttctgtgcacatgacatctttttccatgttgtgcagatcagtttcactatctccaaagcatttgcatcatgaccttatacatttcaatcccttttatgctggattccgtttaaagaagacattattagagcaggaagtacaagcatttaaaatatgtagttcccatatatttcagggtctctgtgtattaagctaactcagatgttttgaaagctttttctttaaacagaggtgaaatatctgtggctaaaaagtttgagatttgtgataactttgtagtcatgtaaaacttaagtgcttcatgcctctccaaatgtggttattctaataaatggagaaatgagccaaataaaagtagtactttgtttttagata

SEQ ID NO: 30432 - DNA, 2140 bp, Homo sapiens
tgaggtcggctggggaggcaaatgttgggagaagcagaaagctggaggggaccttgtgcaggggccttcgaggctatagacttgaaatgattgtcagcttgttcagttcttgatagaatctttctggtcccttaggattttggaacagcggtctgagagacgactgctaccctggccttagtagccttccctggtacctcttcccatcgctggccggcctcacaccgaatctggcctctctttggaccttcctcctctttttttttgattcagagaaatgtatattctggggccttgatgctgcgtttttcggggagatggcttcttggggctggctgaggttgaggcggtatggccgctgtcatgtcgtccagaccattcagactgtcttctgtgggtccttgtgtttcgggtattttctctgccaccaactctgatggcacataggcggaatgtgctcatatcgtgggtcaggatgtctacagtagtgatgtttgcaggaatctgaattttgtcgaaatttatatagaatgcttaggttcactccaagttaaaatgtgtgacgtgcctgttctgcaagcagttgtcaacagtattaagcataggtatcgtcagatcctggaaaaagccattcagttatctggagcagaacaactagaagctttgaaagcttttgtggaagcaatggtaaatgagaatgtcagtctcgtgatctcgcggcagttgctgactgatttttgcacacatcttcctaacttgcctgatagcacagccaaagaaatctatcacttcaccttggaaaagatccagcctagagtcatttcatttgaggagcaggttgcttccataagacagcatcttgcatctatatatgagaaagaagaagattggagaaatgcagcccaagtgttggtgggaattcctttggaaacaggacaaaaacagtacaatgtagattataaactggagacttacttgaagattgctaggctatatctggaggatgatgatccagtccaggcagaggcttacataaatcgagcatcgttgcttcagaatgaatcaaccaatgaacaattacagatacattataaggtatgctatgcacgtgttcttgattatagaagaaaattcattgaagctgcacaaaggtacaatgagctctcttacaagacaatagtccacgaaagtgaaagactagaggccttaaaacatgctttgcactgtacgatcttagcatcagcagggcagcagcgttctcggatgctagctactctttttaaggatgaaaggtgccagcaacttgctgcctatgggatcctagagaaaatgtatctagataggatcatcagaggaaatcaacttcaagaatttgctgccatgctgatgcctcaccaaaaagcaactacagctgatggttccagcatcttggacagagctgttattgaacacaatttgttgtctgcaagcaaattatataataatattaccttcgaagaacttggagctcttttagagatccctgcagctaaggcggaaaagatagcatctcaaatgataaccgaaggacgtatgaatggatttattgaccagattgatggaatagttcattttgaaacacgagaagccctgccaacgtgggataagcagatccaatcactttgtttccaagtgaataaccttttggagaaaattagtcaaacagcaccagaatggacagcacaagccatggaagcccagatggctcagtgaatccttgcagaacttctgtgcacatgacatctttttccatgttgtgcagatcagtttcactatctccaaagcatttgcatcatgaccttatacatttcaatcccttttatgctggattccgtttaaagaagacattattagagcaggaagtacaagcatttaaaatatgtagttcccatatatttcagggtctctgtgtattaagctaactcagatgttttgaaagctttttctttaaacagaggtgaaatatctgtggctaaaaagtttgagatttgtgataactttgtagtcatgtaaaacttaagtgcttcatgcctctccaaatgtggttattctaataaatggagaaatgagccaaataaaagtagtactttgtttttagata

SEQ ID NO: 30433 - DNA, 1701 bp, Homo sapiens
ggacgcgtgggtcgacccacgcgatcgagaggcccccgcatccaccgctgagctgggagaaagatggcggcagccgtgcgacaggatttggcccagctcatgaattcgagcggctctcataaagatctggctggcaaaacattattttcatttggtattgttgtaggtatcgtcagatcctggaaaaagccattcagttatctggagcagaacaactagaagctttgaaagcttttgtggaagcaatggtaaatgagaatgtcagtctcgtgatctcgcggcagttgctgactgatttttgcacacatcttcctaacttgcctgatagcacagccaaagaaatctatcacttcaccttggaaaagatccagcctagagtcatttcatttgaggagcaggttgcttccataagacagcatcttgcatctatatatgagaaagaagaagattggagaaatgcagcccaagtgttggtgggaattcctttggaaacaggacaaaaacagtacaatgtagattataaactggagacttacttgaagattgctaggctatatctggaggatgatgatccagtccaggcagaggcttacataaatcgagcatcgttgcttcagaatgaatcaaccaatgaacaattacagatacattataaggtatgctatgcacgtgttcttgattatagaagaaaattcattgaagctgcacaaaggtacaatgagctctcttacaagacaatagtccacgaaagtgaaagactagaggccttaaaacatgctttgcactgtacgatcttagcatcagcagggcagcagcgttctcggatgctagctactctttttaaggatgaaaggtgccagcaacttgctgcctatgggatcctagagaaaatgtatctagataggatcatcagaggaaatcaacttcaagaatttgctgccatgctgatgcctcaccaaaaagcaactacagctgatggttccagcatcttggacagagctgttattgaacacaatttgttgtctgcaagcaaattatataataatattaccttcgaagaacttggagctcttttagagatccctgcagctaaggcggaaaagatagcatctcaaatgataaccgaaggacgtatgaatggatttattgaccagattgatggaatagttcattttgaaacacgagaagccctgccaacgtgggataagcagatccaatcactttgtttccaagtgaataaccttttggagaaaattagtcaaacagcaccagaatggacagcacaagccatggaagcccagatggctcagtgaatccttgcagaacttctgtgcacatgacatctttttccatgttgtgcagatcagtttcactatctccaaagcatttgcatcatgaccttatacatttcaatcccttttatgctggattccgtttaaagaagacattattagagcaggaagtacaagcatttaaaatatgtagttcccatatatttcagggtctctgtgtattaagctaactcagatgttttgaaagctttttctttaaacagaggtgaaatatctgtggctaaaaagtttgagatttgtgataactttgtagtcatgtaaaacttaagtgcttcatgcctctccaaatgtggttattctaataaatggagaaatgagccaaataaaagtagtactttgtttttagata

SEQ ID NO: 30434 - DNA, 1699 bp, Homo sapiens
tcccacacccgacgctctggcccacacagacgctactctgtagcatctcaggttccctctggctgcactctggaggaccacactcgttttctttttggctgccagaggcccccgcatccaccgctgagctgggagaaagatggcggcagccgtgcgacaggatttggcccagctcatgaattcgagcggctctcataaagatctggctggcaagtatcgtcagatcctggaaaaagccattcagttatctggagcagaacaactagaagctttgaaagcttttgtggaagcaatggtaaatgagaatgtcagtctcgtgatctcgcggcagttgctgactgatttttgcacacatcttcctaacttgcctgatagcacagccaaagaaatctatcacttcaccttggaaaagatccagcctagagtcatttcatttgaggagcaggttgcttccataagacagcatcttgcatctatatatgagaaagaagaagattggagaaatgcagcccaagtgttggtgggaattcctttggaaacaggacaaaaacagtacaatgtagattataaactggagacttacttgaagattgctaggctatatctggaggatgatgatccagtccaggcagaggcttacataaatcgagcatcgttgcttcagaatgaatcaaccaatgaacaattacagatacattataaggtatgctatgcacgtgttcttgattatagaagaaaattcattgaagctgcacaaaggtacaatgagctctcttacaagacaatagtccacgaaagtgaaagactagaggccttaaaacatgctttgcactgtacgatcttagcatcagcagggcagcagcgttctcggatgctagctactctttttaaggatgaaaggtgccagcaacttgctgcctatgggatcctagagaaaatgtatctagataggatcatcagaggaaatcaacttcaagaatttgctgccatgctgatgcctcaccaaaaagcaactacagctgatggttccagcatcttggacagagctgttattgaacacaatttgttgtctgcaagcaaattatataataatattaccttcgaagaacttggagctcttttagagatccctgcagctaaggcggaaaagatagcatctcaaatgataaccgaaggacgtatgaatggatttattgaccagattgatggaatagttcattttgaaacacgagaagccctgccaacgtgggataagcagatccaatcactttgtttccaagtgaataaccttttggagaaaattagtcaaacagcaccagaatggacagcacaagccatggaagcccagatggctcagtgaatccttgcagaacttctgtgcacatgacatctttttccatgttgtgcagatcagtttcactatctccaaagcatttgcatcatgaccttatacatttcaatcccttttatgctggattccgtttaaagaagacattattagagcaggaagtacaagcatttaaaatatgtagttcccatatatttcagggtctctgtgtattaagctaactcagatgttttgaaagctttttctttaaacagaggtgaaatatctgtggctaaaaagtttgagattgtttaaaacttgttatccattaaaacgaattcccaccccccaagggtttttataaggaaaccc

SEQ ID NO: 30435 - DNA, 1388 bp, Homo sapiens
aatgtgataggtcgcccggtgtgattcatgcagaggctcgcttggaaaatatccagtcctacagtgatttcctttgagagagcaggttgcttccataagacagcatcttgcatctatatatgagaaagaagaagattggagaaatgcagcccaagtgttggtgggaattcctttggaaacaggacaaaaacagtacaatgtagattataaactggagacttacttgaagattgctaggctatatctggaggatgatgatccagtccaggcagaggcttacataaatcgagcatcgttgcttcagaatgaatcaaccaatgaacaattacagatacattataaggtatgctatgcacgtgttcttgattatagaagaaaattcattgaagctgcacaaaggtacaatgagctctcttacaagacaatagtccacgaaagtgaaagactagaggccttaaaacatgctttgcactgtacgatcttagcatcagcagggcagcagcgttctcggatgctagctactctttttaaggatgaaaggtgccagcaacttgctgcctatgggatcctagagaaaatgtatctagataggatcatcagaggaaatcaacttcaagaatttgctgccatgctgatgcctcaccaaaaagcaactacagctgatggttccagcatcttggacagagctgttattgaacacaatttgttgtctgcaagcaaattatataataatattaccttcgaagaacttggagctcttttagagatccctgcagctaaggcggaaaagatagcatctcaaatgataaccgaaggacgtatgaatggatttattgaccagattgatggaatagttcattttgaaacacgagaagccctgccaacgtgggataagcagatccaatcactttgtttccaagtgaataaccttttggagaaaattagtcaaacagcaccagaatggacagcacaagccatggaagcccagatggctcagtgaatccttgcagaacttctgtgcacatgacatctttttccatgttgtgcagatcagtttcactatctccaaagcatttgcatcatgaccttatacatttcaatcccttttatgctggattccgtttaaagaagacattattagagcaggaagtacaagcatttaaaatatgtagttcccatatatttcagggtctctgtgtattaagctaactcagatgttttgaaagctttttctttaaacagaggtgaaatatctgtggctaaaaagtttgagatttgtgataactttgtagtcatgtaaaacttaagtgcttcatgcctctccaaatgtggttattctaataaatggagaaatgagccaaataaaagtagtactttgtttttagata

SEQ ID NO: 30436 - DNA, 1470 bp, Homo sapiens
tcccacacccgacgctctggcccacacagacgctactctgtagcatctcaggttccctctggctgcactctggaggaccacactcgttttctttttggctgccagaggcccccgcatccaccgctgagctgggagaaagatggcggcagccgtgcgacaggatttggcccagctcatgaattcgagcggctctcataaagatctggctggcaagtatcgtcagatcctggaaaaagccattcagttatctggagcagaacaactagaagctttgaaagcttttgtggaagcaatggtaaatgagaatgtcagtctcgtgatctcgcggcagttgctgactgatttttgcacacatcttcctaacttgcctgatagcacagccaaagaaatctatcacttcaccttggaaaagatccagcctagagtcatttcatttgaggagcaggttgcttccataagacagcatcttgcatctatatatgagaaagaagaagattggagaaatgcagcccaagtgttggtgggaattcctttggaaacaggacaaaaacagtacaatgtagattataaactggagacttacttgaagattgctaggctatatctggaggatgatgatccagtccaggcagaggcttacataaatcgagcatcgttgcttcagaatgaatcaaccaatgaacaattacagatacattataaggtatgctatgcacgtgttcttgattatagaagaaaattcattgaagctgcacaaaggtacaatgagctctcttacaagacaatagtccacgaaagtgaaagactagaggccttaaaacatgctttgcactgtacgatcttagcatcagcagggcagcagcgttctcggatgctagctactctttttaaggatgaaaggtgccagcaacttgctgcctatgggatcctagagaaaatgtatctagataggatcatcagaggaaatcaacttcaagaatttgctgccatgctgatgcctcaccaaaaagcaactacagctgatggttccagcatcttggacagagctgttattgaacacaatttgttgtctgcaagcaaattatataataatattaccttcgaagaacttggagctcttttagagatccctgcagctaaggcggaaaagatagcatctcaaatgataaccgaaggacgtatgaatggatttattgaccagattgatggaatagttcattttgaaacacgagaagccctgccaacgtgggataagcagatccaatcactttgtttccaagtgaataaccttttggagaaaattagtcaaacagcaccagaatggacagcacaagccatggaagcccagatggctcagtgaatccttgcagaacttctgtgcacatgacatctttttccatgttgtgcagatcagtttcactatctccaaagcatttgcatcatagcacctgcccgggatcctctagacga

SEQ ID NO: 30437 - DNA, 1259 bp, Homo sapiens
taacataccccattcaaattctagacttatcgagaaaacaatgaaaagaaagtcatacgaacagtacaatgtagattataaactggagacttacttgaagattgctaggctatatctggaggatgatgatccagtccaggcagaggcttacataaatcgagcatcgttgcttcagaatgaatcaaccaatgaacaattacagatacattataaggtatgctatgcacgtgttcttgattatagaagaaaattcattgaagctgcacaaaggtacaatgagctctcttacaagacaatagtccacgaaagtgaaagactagaggccttaaaacatgctttgcactgtacgatcttagcatcagcagggcagcagcgttctcggatgctagctactctttttaaggatgaaaggtgccagcaacttgctgcctatgggatcctagagaaaatgtatctagataggatcatcagaggaaatcaacttcaagaatttgctgccatgctgatgcctcaccaaaaagcaactacagctgatggttccagcatcttggacagagctgttattgaacacaatttgttgtctgcaagcaaattatataataatattaccttcgaagaacttggagctcttttagagatccctgcagctaaggcggaaaagatagcatctcaaatgataaccgaaggacgtatgaatggatttattgaccagattgatggaatagttcattttgaaacacgagaagccctgccaacgtgggataagcagatccaatcactttgtttccaagtgaataaccttttggagaaaattagtcaaacagcaccagaatggacagcacaagccatggaagcccagatggctcagtgaatccttgcagaacttctgtgcacatgacatctttttccatgttgtgcagatcagtttcactatctccaaagcatttgcatcatgaccttatacatttcaatcccttttatgctggattccgtttaaagaagacattattagagcaggaagtacaagcatttaaaatatgtagttcccatatatttcagggtctctgtgtattaagctaactcagatgttttgaaagctttttctttaaacagaggtgaaatatctgtggctaaaaagtttgagatttgtgataactttgtagtcatgtaaaacttaagtgcttcatgcctctccaaatgtggttattctaataaatggagaaatgagccaaataaaagtagtactttgtttttagata

SEQ ID NO: 30438 - DNA, 1002 bp, Homo sapiens
gctgtatatttagtagacaaaaatgaggtcataagataggtttttttttcctgaagaaacattgtgaaaataacattgtgaaatttgatgctcatttatttctcttagggcagcagcgttctcggatgctagctactctttttaaggatgaaaggtgccagcaacttgctgcctatgggatcctagagaaaatgtatctagataggatcatcagaggaaatcaacttcaagaatttgctgccatgctgatgcctcaccaaaaagcaactacagctgatggttccagcatcttggacagagctgttattgaacacaatttgttgtctgcaagcaaattatataataatattaccttcgaagaacttggagctcttttagagatccctgcagctaaggcggaaaagatagcatctcaaatgataaccgaaggacgtatgaatggatttattgaccagattgatggaatagttcattttgaaacacgagaagccctgccaacgtgggataagcagatccaatcactttgtttccaagtgaataaccttttggagaaaattagtcaaacagcaccagaatggacagcacaagccatggaagcccagatggctcagtgaatccttgcagaacttctgtgcacatgacatctttttccatgttgtgcagatcagtttcactatctccaaagcatttgcatcatgaccttatacatttcaatcccttttatgctggattccgtttaaagaagacattattagagcaggaagtacaagcatttaaaatatgtagttcccatatatttcagggtctctgtgtattaagctaactcagatgttttgaaagctttttctttaaacagaggtgaaatatctgtggctaaaaagtttgagatttgtgataactttgtagtcatgtaaaacttaagtgcttcatgcctctccaaatgtggttattctaataaatggagaaatgagccaaataaaagtagtactttgtttttagata

SEQ ID NO: 30439 - DNA, 818 bp, Homo sapiens
tgccccactgaaggtgtctccaccggcacgttgaaatcaacttcaagaatttgctgccatgctgatgcctcaccaaaaagcaactacagctgatggttccagcatcttggacagagctgttattgaacacaatttgttgtctgcaagcaaattatataataatattaccttcgaagaacttggagctcttttagagatccctgcagctaaggcggaaaagatagcatctcaaatgataaccgaaggacgtatgaatggatttattgaccagattgatggaatagttcattttgaaacacgagaagccctgccaacgtgggataagcagatccaatcactttgtttccaagtgaataaccttttggagaaaattagtcaaacagcaccagaatggacagcacaagccatggaagcccagatggctcagtgaatccttgcagaacttctgtgcacatgacatctttttccatgttgtgcagatcagtttcactatctccaaagcatttgcatcatgaccttatacatttcaatcccttttatgctggattccgtttaaagaagacattattagagcaggaagtacaagcatttaaaatatgtagttcccatatatttcagggtctctgtgtattaagctaactcagatgttttgaaagctttttctttaaacagaggtgaaatatctgtggctaaaaagtttgagatttgtgataactttgtagtcatgtaaaacttaagtgcttcatgcctctccaaatgtggttattctaataaatggagaaatgagccaaataaaagtagtactttgtttttagata

SEQ ID NO: 30440 - DNA, 754 bp, Homo sapiens
cttggcttcccaaagtgctgggatgataggggttccagcatcttggacagagctgttattgaacacaatttgttgtctgcaagcaaattatataataatattaccttcgaagaacttggagctcttttagagatccctgcagctaaggcggaaaagatagcatctcaaatgataaccgaaggacgtatgaatggatttattgaccagattgatggaatagttcattttgaaacacgagaagccctgccaacgtgggataagcagatccaatcactttgtttccaagtgaataaccttttggagaaaattagtcaaacagcaccagaatggacagcacaagccatggaagcccagatggctcagtgaatccttgcagaacttctgtgcacatgacatctttttccatgttgtgcagatcagtttcactatctccaaagcatttgcatcatgaccttatacatttcaatcccttttatgctggattccgtttaaagaagacattattagagcaggaagtacaagcatttaaaatatgtagttcccatatatttcagggtctctgtgtattaagctaactcagatgttttgaaagctttttctttaaacagaggtgaaatatctgtggctaaaaagtttgagatttgtgataactttgtagtcatgtaaaacttaagtgcttcatgcctctccaaatgtggttattctaataaatggagaaatgagccaaataaaagtagtactttgtttttagata

SEQ ID NO: 30441 - DNA, 522 bp, Homo sapiens
gggtgctctagaggtcccgggcaggtgctatgatccaatcactttgtttccaagtgaataaccttttggagaaaattagtcaaacagcaccagaatggacagcacaagccatggaagcccagatggctcagtgaatccttgcagaacttctgtgcacatgacatctttttccatgttgtgcagatcagtttcactatctccaaagcatttgcatcatgaccttatacatttcaatcccttttatgctggattccgtttaaagaagacattattagagcaggaagtacaagcatttaaaatatgtagttcccatatatttcagggtctctgtgtattaagctaactcagatgttttgaaagctttttctttaaacagaggtgaaatatctgtggctaaaaagtttgagatttgtgataactttgtagtcatgtaaaacttaagtgcttcatgcctctccaaatgtggttattctaataaatggagaaatgagccaaataaaagtagtactttgtttttagata

SEQ ID NO: 30442 - DNA, 1189 bp, Homo sapiens
tcccacacccgacgctctggcccacacagacgctactctgtagcatctcaggttccctctggctgcactctggaggaccacactcgttttctttttggctgccagaggcccccgcatccaccgctgagctgggagaaagatggcggcagccgtgcgacaggatttggcccagctcatgaattcgagcggctctcataaagatctggctggcaagtatcgtcagatcctggaaaaagccattcagttatctggagcagaacaactagaagctttgaaagcttttgtggaagcaatggtaaatgagaatgtcagtctcgtgatctcgcggcagttgctgactgatttttgcacacatcttcctaacttgcctgatagcacagccaaagaaatctatcacttcaccttggaaaagatccagcctagagtcatttcatttgaggagcaggttgcttccataagacagcatcttgcatctatatatgagaaagaagaagattggagaaatgcagcccaagtgttggtgggaattcctttggaaacaggacaaaaacagtacaatgtagattataaactggagacttacttgaagattgctaggctatatctggaggatgatgatccagtccaggcagaggcttacataaatcgagcatcgttgcttcagaatgaatcaaccaatgaacaattacagatacattataaggtatgctatgcacgtgttcttgattatagaagaaaattcattgaagctgcacaaaggtacaatgagctctcttacaagacaatagtccacgaaagtgaaagactagaggccttaaaacatgctttgcactgtacgatcttagcatcagcagggctacagcgttctcgatgctacatctctttttaaggtgaaaggggccacaacctgctgcctttgggatcctcaaaaaagttctttatgggttcttaagggaatcaaccttataaattgatgccttcttatgcttaccaaaaacacctccagtgttggttccccccttctggcactgactttattgaacccatattggtgtctgcagccaagtcttttaaaatataaccttgcagatcctgggagcttttttaagaatcctcgcatctagtgtgtgaacgattcctttataattatccctcagggcgtctaaatgttttttgccccatagaggta

SEQ ID NO: 30443 - DNA, 1101 bp, Homo sapiens
ggacgcgtgggtcgacccacgcgatcgagaggcccccgcatccaccgctgagctgggagaaagatggcggcagccgtgcgacaggatttggcccagctcatgaattcgagcggctctcataaagatctggctggcaagtatcgtcagatcctggaaaaagccattcagttatctggagcagaacaactagaagctttgaaagcttttgtggaagcaatggtaaatgagaatgtcagtctcgtgatctcgcggcagttgctgactgatttttgcacacatcttcctaacttgcctgatagcacagccaaagaaatctatcacttcaccttggaaaagatccagcctagagtcatttcatttgaggagcaggttgcttccataagacagcatcttgcatctatatatgagaaagaagaagattggagaaatgcagcccaagtgttggtgggaattcctttggaaacaggacaaaaagagaagagaagggaaaaccaaatagaaacaaaacaaaaacaggtacaaaaatagaaaatagagacgagaaataactaaaccaagaagaaagagctaagctaaagacaaggataaggagaaatggccagacccgaaacagagagcaacgaaaaggacgagcatacgtttagcatcgatgagtacaatccaatgaacaaaaaacagatactagaacagagaaacgagatctcgagacgaagaaatgatgaaggaaactcaagaaggccagccaaaggaccatagagccgactcttactggagaagaagtcatcatcttaggactcatattagctgcaagggggcagacgattccaagggcaaagcattgcaacggcgagtcttcccgcgatgcacgaaaagaattacccccttcaccaggaaggcagggcccggccaatgctccgaaaaatcacattgcactatgccaaggtgcggcgctgcggcccaccacgggagagagaaggccccccatcgcactgcaaaaccccaagaaggccggagacccatgaacgccgtaaaagaagagaaaagggaacccacgggacacagaaaacatgggccggatctccccaacacggagggcggccc

SEQ ID NO: 30444 - DNA, 810 bp, Homo sapiens
ggacgcgtgggtcgacccacgcgatcgagaggcccccgcatccaccgctgagctgggagaaagatggcggcagccgtgcgacaggatttggcccagctcatgaattcgagcggctctcataaagatctggctggcaagtatcgtcagatcctggaaaaagccattcagttatctggagcagaacaactagaagctttgaaagcttttgtggaagcaatggtaaatgagaatgtcagtctcgtgatctcgcggcagttgctgactgatttttgcacacatcttcctaacttgcctgatagcacagccaaagaaatctatcacttcaccttggaaaagatccagcctagagtcatttcatttgaggagcaggtaaaaatctagagaagtggttttttaacttgagatagcagcagttattttgagaatctgatattagtaaattcttaaaggagataatcatccaatttcatttttgacaaaacagtgtgccaaacgacattttatgatgcaaaatcaagtaaatattaggttgttacaactccaactgacatttgcttataaagtaaaatttgattttgtgaatcaaatattgctctctagacaattttttaaaatcagtaaaattggtatttcagctgaaaacacaggaaaactccagcatcgtgtatgcaggaacatacaagctaaatttaatgtttaaactacagtattgtaccataatccacattgcagaaatgtgttgcttccgttcactagtttgatattctgtaaatgcaaaattcgtaggaaaacttgggtggtcttgataaa

SEQ ID NO: 30445 - DNA, 277 bp, Homo sapiens
tgacctcatgatccgcctgcctcggcctcccaaagtgctgggattacagatgtgagccactgcacccagacttactgatgctttttaacaataagagttgctttggaaagattgtctccaactttataaaagtagtagcctatgaaaagaaaaacaagagccgggtgcagtggctcactcctgtaatcccagcactttgggattccgaggcaggtggatcacctgaggtcgggagttcaagatcagcccgaccaacatggagaacaccgtctctact

SEQ ID NO: 30446 - DNA, 365 bp, Homo sapiens
gatttgtgagaacagacaaaagatattgaaagccgactccagcaaacaatgcagataactctgcaggatgacaatggatccggaataggaaatgttacaatggtaacagccagctgagacctgaccaggggcccggagacatttccaagaggatggaggagcccttctcagctacatctcagaaataaatgcacagccttctaagggactactgtgaaagacaaggtgttctggactacatattacaaaagtgccatgttttactatgaaacctgtctcattgccttgtagccacattgcacttttctttggtaaccatcaaaatattttgcattgtgtcaggcacatgatggaaacaaaaaaaa

SEQ ID NO: 30447 - DNA, 520 bp, Homo sapiens
taatgatgcatttctcagagcgtatcaccgttgtgaggcttagcatgactggtctcatttcacttacacgaggtacctaaaatacattcatagatgcacaaaatagagtgctgggtgttgcgctgagagagggaagaaatggagaatcagtgtttagtgggcacattgttttagttttagaagatgaagagttctggaaatggatggtggcgatggttgcacacattgttaatgtacacagtacccctgagcactactgtttgtgccacagggctgagcagggcaaaagctggacccacgggcctcacaccatcctctgggctccatccctgtcctcctacctctcagcctgcctccctctgaaatttttcctcactgcctcagctacagctccctcatcttcctccatcctttattgaattggaagtcattgttatccaactagacaataagctctctgaggccagagcctggcctattctaaattttttttttttaagtcctgacagttgccaaaaaa

SEQ ID NO: 30448 - DNA, 482 bp, Homo sapiens
tggaaactgtgggccattacagtagtcccccgcaatccaaggttttgcttttcatggttgtccacggtccaccatggtctgaaaatattaaatgaaaactttcagaaataagcgattcataagttttaaattgtataccactctgagtactagaccgtgatgaaatcacccaggacacagattccccctttgtcctgttgtagacactgcccacccatgggtcacttagtagctgcctcagtgaccagatcaacagttgtggcatcaaagcgcttgtgttcaagccacacttattttactcaataatgtctccaaagtgatggcaagagtggtgatgctggcccttcagatatgtcatagagaagctgtagagtgctccttttaagtgaaaaagtgaaagttcttcacttaaggaaggaaaataatcgtatatggaggttgctaagatctatagtaagaacaaatcttctctcttgaaattg

SEQ ID NO: 30449 - DNA, 519 bp, Homo sapiens
ttaaacccttcccttccatggctggaagttctgtgccccagaattcccttggttcctgcatgttctccaagctgttctacatctaagagctcatcacgtctggtttccaggtgggtttggccagtgggaaacccaggcaggagatcagagaggatgaggagaatggggtcaggacaactatttcctcccttgtggtgacataaggtaggctgttaacagagggaaactgtcagaagtatttgaaccagagcaactccatcttgaatgggggctgggtaaaataaggctgagacctactgggctccattcctaggaggctaggcattcttagtcaaaggatgagataagaggttggcacaagatacaggtcacaaagacaccactggccaagacccaccaacactaagatggtgataaaagggacctctgttcgtccccactgctcattatatgctcattataatgcattagcatgcgaaagggctgctattctctaataaacttgctttcactttaaaa

SEQ ID NO: 30450 - DNA, 806 bp, Homo sapiens
tgccctgtggagagcccacccaccgggcttgggcggcctctttcctgtgatctggccatgaggcgctgcagagagccccagggtgtgatcctaacacagtgtctcttgaggcttctttccctgtagctagattgttagtcgaggaaccaggaacagtgagaatcaaaagccccgatctcttccgctgtctgtgcctccctcagtcgcctctgggcacactcatgctcatttacattcttattttttttaattgaaattctatgttggaaaatccagctcatggccatgcatgtccctgagtgtacaggtgtagttttctccacctactttaaaatgattaaagttgagagttcctggggagaaaaataaacggttagctgttgatatatttgagaagcgcagattctcccagcctctccgactggtttgcagaagtaactattctacccgaatttctctagcatctgtcaggacacaggcagacgtcttcatgtgtgatgagtccacactggcttataaacgaaggggctggagcttggattcctaaggatagaacacccagaaactcatacctggggggctggaaaccttccggttttcaaccagcaatgagcagggcttcttcagcctgcgggtgttcccctcaagccttgacttgagagcgaggcagggctgagcttcctgctgtcccggagcctgggcctggctgccgtgcacggctcagctcagagctccgagcacactgtccttctggggttaagtgctgggtctggccacatctggttttggcagtatgttgttaggga

SEQ ID NO: 30451 - DNA, 468 bp, Homo sapiens
agcattctcacgtgatatgaaacaattgataattaggatacaatttataatccgaaactgatgtgtttgcctttgaattactcattcatctataagtttagtccttttattagatgaattctgtgtttattggatgcaaaaaagaataagacaaaagcaaaagagtatcaccttaggggaaatacatatatatcaaagataattagcacaaagtagttcctgctatttatacttttccagcagatttactttcttagttttttttttttttttggccgatgcttttactaaaagtactttgctttgttagcattcatgctaccaagagtaaacagtcaatgattgttatttataattattgttgttattattttactgctatcacccaataaaagagatcactctgaaggcatatggggacagggagggaaaatcagtaaacttttaggtatatttattataaataat

SEQ ID NO: 30452 - DNA, 412 bp, Homo sapiens
gccaagagctaggaccagagtctgactcttttctggtttggggaggagatgcgagggtggggagggtgtccatgttcattgagtttctggacttctagatggtgcggggcagttgctggctctcacccaggttgagattttgctgggcttgttctcaaagttattggcagctcccaaaaatgatggagaaaggagatgcatagtgatggctgccttctttgactctgaaattggccaatggacaacagataaagtgaccagcagctccattttgtcccaaatgtgacatctggtttaccatgttgtcccagtggaataatgaattgttccttttttcccactctcagaggcctggtttgggcagtaaattatatggtcatccgagggaccctccaataaagaatcaagtgca

SEQ ID NO: 30453 - DNA, 2879 bp, Homo sapiens
agccgaacctcgggagcccaggacgccctcctgcacatgcgcaggaggctcaatgacagtcgagctttggctaaggctccggggaaagggtctagccatgctgcatgtgacccggggggtctgggggtccagggtccgagtatggccactgttgcccgcgctcctcgggcccccccgggccctctcatcgctggcagccaaaatgggggagtatcgcaagatgtggaaccccagggagccccgcgactgggcccagcagtaccgcgagcgcttcattcccttctccaaggagcagctgctccgcctcctaatacagacaggaattccactcgagtccggcagagaaggcggctttggaggcgttctcagcccacgtggacttctgcaccctgttccactaccaccaaatcctggcccggctgcaggccttatatgaccccatcaaccctgacagggagaccctcgatcagccatcactaacggatccccagcgtctgtctaatgagcaggaggtgcttcgggctctggagcccctgctggcccaggccaacttctccccgctgtctgaggacaccctggcctacgcgctggtggtccaccaccctcaggatgaggtccaggtgacagtaaatttggatcagcctggttgggagtcttggctccatggcacggccccctcctgtcattctttcctctacctgagctgacactctccctacaagagatcctgcgcgctccctgtgtgggctccaggtggtccccttgcctacaggagcccccaccttccctgcccaagagcccctgactggtccccagacgaaagccccagagctgggccttctggccctctcgaccctcctgggccttgttccgctcccctccaagcctcaagatcactcctaggcttctcccaaacccaggcccttcctgttctttgccctacgcccctccttgctgctccctcgaatcttccccgatctcagtgtgacctcagaacacctgcctctccccttgcagagacctccaggtggctccggtcggaggtggagaactggctcctagccaagtcaggctgtgaggtgaccttcaacggaactcgggccctggcgcatctgcaggccctgacccccagcatgggattgtacccacccccgggtttccccaaactagacccagtggctccgatcacttccgagcccccgcaagccacgcccagcagtaacatctcctgagtagaacctacctccctgcccagtcagcaggctaggaactaagccccgcctccttcacgacaggctgtcaattacggttattatacttttcactccaacttccaataactgacaggtgattatttttgctgcactgtgtgcttaagcaaagcagccaatcaaagcagctagcagttgttaagtcttccccgccccttcgatgaacagccaatcaaagcgatttagctctgcttctgttccatttcttagtcccaccctcaccataaacatccaagtgtggtttggctgaggagctgagggtgtctgccaatcacagctgctcagctctggcttctgtaaaccgccaggtagaagagttaaagctgcgccctcccgagactatatatcattgtcgttttcagcccgctccgggcaaactgcccatcatgtgcaccaaggccgttagccctgcctcctggcaaacgtccagtgacagctgctgggttccatcaactttgggcagccggttgtcgctgcagggaaggaaccaataagaatttctaaaggaaacctgatcttgctatcaattgctgctgcttaaatggcaggccaactggtcagctgctgatcagggtgtctaggctgaaggagttggagaccttgtgctaggtaggtgaaccagaaaccaccctcgccaccaagactcgctcccaacctggctcccggcaacctcaggtgccttcctcgcccaggtctttcaccctttctacagaaactacctcggtctggatctccccaccaccagcagcctgtgcaatatttattggtctatcaatttctcccgtctcctgtcccaaagtaataaatcatgtttaataagtctggatgaggctactcttaacgcactgcctttagggtaaccctgctctgtaggagtggttaaaaaattatttttaaaaatctagatgagtgggatggctgcaggagttggagggaaggaaagcatttgaatcctggaaagaggggagggactctagctaggtcttggggtcccagacagagaaagctgtagtcctaaaaagaggctgggttcatggtcggtgaaacaaagacagtcatagaagaggatcttagaaggatctgattccagaggagtcccagggcctgatgaacagaggagatagcgtagccatgtgcgattgtgcagatttgcagatttttttttgttcttgagatggagtttcgcgcttgttgcccaggctggaatgcaatggcgtgatcttggctcactgcaacctccgcctcctgggttcgggtgattctcctgcctcagcctcccgagtagctgggaccgcgggtgtgtgccaccacaccaggctaatttttttgtatttttttgtagagacggggttttgtctcattgcccaggctggtctcaaactcctgagcacaagcaatacgcttgccttagccacccaaagtgctggaattacatgggtgagctaccgtgtccagcctcaatttaaaaataaagagcataattgcattgtttgtaacacaaagaataaatgcttgaggggatggataccccctttaccctgtgattattatgcattgcatacctgtatcaaagtatcccataaatatatacacctactatctacccac

SEQ ID NO: 30454 - DNA, 3505 bp, Homo sapiens
agccgaacctcgggagcccaggacgccctcctgcacatgcgcaggaggctcaatgacagtcgagctttggctaaggctccggggaaagggtctagccatgctgcatgtgacccggggggtctgggggtccagggtccgagtatggccactgttgcccgcgctcctcgggcccccccgggccctctcatcgctggcagccaaaatgggggagtatcgcaagatgtggaaccccagggagccccgcgactgggcccagcagtaccgcgagcgcttcattcccttctccaaggagcagctgctccgcctcctaatacagacaggaattccactcgagtccggcagagaaggcggctttggaggcgttctcagcccacgtggacttctgcaccctgttccactaccaccaaatcctggcccggctgcaggccttatatgaccccatcaaccctgacagggagaccctcgatcagccatcactaacggatccccagcgtctgtctaatgagcaggaggtgcttcgggctctggagcccctgctggcccaggccaacttctccccgctgtctgaggacaccctggcctacgcgctggtggtccaccaccctcaggatgaggtccaggtgacagtaaatttggatcagtatgtctacattcacttctgggccctgggccagcgagtcgggcagatgcccctgaagtccagcgtgggctccaggcgtggcttcttcaccaagctgccccctgcggagaggtgaggcggcccttgttccccagctgcagcaagagggagcaaggttagagtcaagaggggactgacagggaaagtgagtactacacttgattcccaggggaagagaaaggatggggacagttctccccattttccaataaggaaaactgaggctcggcagagggaggtccacattctgaagatgcggcacggccaggattccaacaaacaatctgcacgtccaataccagggatcgatggcgcgattgaaccgatcccctgtggttggacacagctgatccctggtttcttccccatgattactgagtcgcttttaagatggttgtgcgactgtagagccagagtgagcgtcctaggattggagggggctccccgggcagtgcagtcccgatcctgctcctgcctctgtctctgtccctcaggagatactttaagcgggtggtcctggcagcccggaccaaacggggacacctggtactgaagagtttcaaggacacgccgctggaaggcctggagcagctgctgccggagctgaaggtgcgcacgcccaccctgcagcgcgccctgctcaacctcatgctggtagtctccggcgtggcgatcttcgtcaacgtgggcatggtggtgctaaccgacctcaaggtggccacctccctgctgctgctgctcttcgccatcttcatgggcctgcgggcctccaagatgttcgggcagcggcgcagcgcgcaggcgttggagctggcgcacatgctgtactatcgcagtacgtccaacaactcggagctgctcagcgccctggccctgcgcgcgcaggacgagcacaccaaggaggcgctgctggctcacagcttcctggcccggcggccagggggcactcaaggctcgcccgaagagacctccaggtggctccggtcggaggtggagaactggctcctagccaagtcaggctgtgaggtgaccttcaacggaactcgggccctggcgcatctgcaggccctgacccccagcatgggattgtacccacccccgggtttccccaaactagacccagtggctccgatcacttccgagcccccgcaagccacgcccagcagtaacatctcctgagtagaacctacctccctgcccagtcagcaggctaggaactaagccccgcctccttcacgacaggctgtcaattacggttattatacttttcactccaacttccaataactgacaggtgattatttttgctgcactgtgtgcttaagcaaagcagccaatcaaagcagctagcagttgttaagtcttccccgccccttcgatgaacagccaatcaaagcgatttagctctgcttctgttccatttcttagtcccaccctcaccataaacatccaagtgtggtttggctgaggagctgagggtgtctgccaatcacagctgctcagctctggcttctgtaaaccgccaggtagaagagttaaagctgcgccctcccgagactatatatcattgtcgttttcagcccgctccgggcaaactgcccatcatgtgcaccaaggccgttagccctgcctcctggcaaacgtccagtgacagctgctgggttccatcaactttgggcagccggttgtcgctgcagggaaggaaccaataagaatttctaaaggaaacctgatcttgctatcaattgctgctgcttaaatggcaggccaactggtcagctgctgatcagggtgtctaggctgaaggagttggagaccttgtgctaggtaggtgaaccagaaaccaccctcgccaccaagactcgctcccaacctggctcccggcaacctcaggtgccttcctcgcccaggtctttcaccctttctacagaaactacctcggtctggatctccccaccaccagcagcctgtgcaatatttattggtctatcaatttctcccgtctcctgtcccaaagtaataaatcatgtttaataagtctggatgaggctactcttaacgcactgcctttagggtaaccctgctctgtaggagtggttaaaaaattatttttaaaaatctagatgagtgggatggctgcaggagttggagggaaggaaagcatttgaatcctggaaagaggggagggactctagctaggtcttggggtcccagacagagaaagctgtagtcctaaaaagaggctgggttcatggtcggtgaaacaaagacagtcatagaagaggatcttagaaggatctgattccagaggagtcccagggcctgatgaacagaggagatagcgtagccatgtgcgattgtgcagatttgcagatttttttttgttcttgagatggagtttcgcgcttgttgcccaggctggaatgcaatggcgtgatcttggctcactgcaacctccgcctcctgggttcgggtgattctcctgcctcagcctcccgagtagctgggaccgcgggtgtgtgccaccacaccaggctaatttttttgtatttttttgtagagacggggttttgtctcattgcccaggctggtctcaaactcctgagcacaagcaatacgcttgccttagccacccaaagtgctggaattacatgggtgagctaccgtgtccagcctcaatttaaaaataaagagcataattgcattgtttgtaacacaaagaataaatgcttgaggggatggataccccctttaccctgtgattattatgcattgcatacctgtatcaaagtatcccataaatatatacacctactatctacccac

SEQ ID NO: 30455 - DNA, 2293 bp, Homo sapiens
agccgaacctcgggagcccaggacgccctcctgcacatgcgcaggaggctcaatgacagtcgagctttggctaaggctccggggaaagggtctagccatgctgcatgtgacccggggggtctgggggtccagggtccgagtatggccactgttgcccgcgctcctcgggcccccccgggccctctcatcgctggcagccaaaatgggggagtatcgcaagatgtggaaccccagggagccccgcgactgggcccagcagtaccgcgagcgcttcattcccttctccaaggagcagctgctccgcctcctaatacagacaggaattccactcgagtccggcagagaaggcggctttggaggcgttctcagcccacgtggacttctgcaccctgttccactaccaccaaatcctggcccggctgcaggccttatatgaccccatcaaccctgacagggagaccctcgatcagccatcactaacggatccccagcgtctgtctaatgagcaggaggtgcttcgggctctggagcccctgctggcccaggccaacttctccccgctgtctgaggacaccctggcctacgcgctggtggtccaccaccctcaggatgaggtccaggtgacagtaaatttggatcagtatgtctacattcacttctgggccctgggccagcgagtcgggcagatgcccctgaagtccagcgtgggctccaggcgtggcttcttcaccaagctgccccctgcggagaggagatactttaagcgggtggtcctggcagcccggaccaaacggggacacctggtactgaagagtttcaaggacacgccgctggaaggcctggagcagctgctgccggagctgaaggtgcgcacgcccaccctgcagcgcgccctgctcaacctcatgctggtagtctccggcgtggcgatcttcgtcaacgtgggcatggtggtgctaaccgacctcaaggtggccacctccctgctgctgctgctcttcgccatcttcatgggcctgcgggcctccaagatgttcgggcagcggcgcagcgcgcaggcgttggagctggcgcacatgctgtactatcgcagtacgtccaacaactcggagctgctcagcgccctggccctgcgcgcgcaggacgagcacaccaaggaggcgctgctggctcacagcttcctggcccggcggccagggggcactcaaggctcgcccgaagagacctccaggtggctccggtcggaggtggagaactggctcctagccaagtcaggctgtgaggtgaccttcaacggaactcgggccctggcgcatctgcaggccctgacccccagcatgggattgtacccacccccgggtttccccaaactagacccagtggctccgatcacttccgagcccccgcaagccacgcccagcagtaacatctcctgagtagaacctacctccctgcccagtcagcaggctaggaactaagccccgcctccttcacgacaggctgtcaattacggttattatacttttcactccaacttccaataactgacaggtgattatttttgctgcactgtgtgcttaagcaaagcagccaatcaaagcagctagcagttgttaagtcttccccgccccttcgatgaacagccaatcaaagcgatttagctctgcttctgttccatttcttagtcccaccctcaccataaacatccaagtgtggtttggctgaggagctgagggtgtctgccaatcacagctgctcagctctggcttctgtaaaccgccaggtagaagagttaaagctgcgccctcccgagactatatatcattgtcgttttcagcccgctccgggcaaactgcccatcatgtgcaccaaggccgttagccctgcctcctggcaaacgtccagtgacagctgctgggttccatcaactttgggcagccggttgtcgctgcagggaaggaaccaataagaatttctaaaggaaacctgatcttgctatcaattgctgctgcttaaatggcaggccaactggtcagctgctgatcagggtgtctaggctgaaggagttggagaccttgtgctaggtaggtgaaccagaaaccaccctcgccaccaagactcgctcccaacctggctcccggcaacctcaggtgccttcctcgcccaggtctttcaccctttctacagaaactacctcggtctggatctccccaccaccagcagcctgtgcaatatttattggtctatcaatttctcccgtctcctgtcccaaagtaataaatcatgtttaata

SEQ ID NO: 30456 - DNA, 2929 bp, Homo sapiens
gacccctgcacagtcgttcctttggctaaggctccggggaaagggtctagccatgctgcatgtgacccggggggtctgggggtccagggtccgagtatggccactgttgcccgcgctcctcgggcccccccgggccctctcatcgctggcagccaaaatgggggagtatcgcaagatgtggaaccccagggagccccgcgactgggcccagcagtaccgcgagcgcttcattcccttctccaaggagcagctgctccgcctcctaatacaggccttatatgaccccatcaaccctgacagggagaccctcgatcagccatcactaacggatccccagcgtctgtctaatgagcaggaggtgcttcgggctctggagcccctgctggcccaggccaacttctccccgctgtctgaggacaccctggcctacgcgctggtggtccaccaccctcaggatgaggtccaggtgacagtaaatttggatcagtatgtctacattcacttctgggccctgggccagcgagtcgggcagatgcccctgaagtccagcgtgggctccaggcgtggcttcttcaccaagctgccccctgcggagaggagatactttaagcgggtggtcctggcagcccggaccaaacggggacacctggtactgaagagtttcaaggacacgccgctggaaggcctggagcagctgctgccggagctgaaggtgcgcacgcccaccctgcagcgcgccctgctcaacctcatgctggtagtctccggcgtggcgatcttcgtcaacgtgggcatggtggtgctaaccgacctcaaggtggccacctccctgctgctgctgctcttcgccatcttcatgggcctgcgggcctccaagatgttcgggcagcggcgcagcgcgcaggcgttggagctggcgcacatgctgtactatcgcagtacgtccaacaactcggagctgctcagcgccctggccctgcgcgcgcaggacgagcacaccaaggaggcgctgctggctcacagcttcctggcccggcggccagggggcactcaaggctcgcccgaagagacctccaggtggctccggtcggaggtggagaactggctcctagccaagtcaggctgtgaggtgaccttcaacggaactcgggccctggcgcatctgcaggccctgacccccagcatgggattgtacccacccccgggtttccccaaactagacccagtggctccgatcacttccgagcccccgcaagccacgcccagcagtaacatctcctgagtagaacctacctccctgcccagtcagcaggctaggaactaagccccgcctccttcacgacaggctgtcaattacggttattatacttttcactccaacttccaataactgacaggtgattatttttgctgcactgtgtgcttaagcaaagcagccaatcaaagcagctagcagttgttaagtcttccccgccccttcgatgaacagccaatcaaagcgatttagctctgcttctgttccatttcttagtcccaccctcaccataaacatccaagtgtggtttggctgaggagctgagggtgtctgccaatcacagctgctcagctctggcttctgtaaaccgccaggtagaagagttaaagctgcgccctcccgagactatatatcattgtcgttttcagcccgctccgggcaaactgcccatcatgtgcaccaaggccgttagccctgcctcctggcaaacgtccagtgacagctgctgggttccatcaactttgggcagccggttgtcgctgcagggaaggaaccaataagaatttctaaaggaaacctgatcttgctatcaattgctgctgcttaaatggcaggccaactggtcagctgctgatcagggtgtctaggctgaaggagttggagaccttgtgctaggtaggtgaaccagaaaccaccctcgccaccaagactcgctcccaacctggctcccggcaacctcaggtgccttcctcgcccaggtctttcaccctttctacagaaactacctcggtctggatctccccaccaccagcagcctgtgcaatatttattggtctatcaatttctcccgtctcctgtcccaaagtaataaatcatgtttaataagtctggatgaggctactcttaacgcactgcctttagggtaaccctgctctgtaggagtggttaaaaaattatttttaaaaatctagatgagtgggatggctgcaggagttggagggaaggaaagcatttgaatcctggaaagaggggagggactctagctaggtcttggggtcccagacagagaaagctgtagtcctaaaaagaggctgggttcatggtcggtgaaacaaagacagtcatagaagaggatcttagaaggatctgattccagaggagtcccagggcctgatgaacagaggagatagcgtagccatgtgcgattgtgcagatttgcagatttttttttgttcttgagatggagtttcgcgcttgttgcccaggctggaatgcaatggcgtgatcttggctcactgcaacctccgcctcctgggttcgggtgattctcctgcctcagcctcccgagtagctgggaccgcgggtgtgtgccaccacaccaggctaatttttttgtatttttttgtagagacggggttttgtctcattgcccaggctggtctcaaactcctgagcacaagcaatacgcttgccttagccacccaaagtgctggaattacatgggtgagctaccgtgtccagcctcaatttaaaaataaagagcataattgcattgtttgtaacacaaagaataaatgcttgaggggatggataccccctttaccctgtgattattatgcattgcatacctgtatcaaagtatcccataaatatatacacctactatctacccac

SEQ ID NO: 30457 - DNA, 3083 bp, Homo sapiens
agccgaacctcgggagcccaggacgccctcctgcacatgcgcaggaggctcaatgacagtcgagctttggctaaggctccggggaaagggtctagccatgctgcatgtgacccggggggtctgggggtccagggtccgagtatggccactgttgcccgcgctcctcgggcccccccgggccctctcatcgctggcagccaaaatgggggagtatcgcaagatgtggaaccccagggagccccgcgactgggcccagcagtaccgcgagcgcttcattcccttctccaaggagcagctgctccgcctcctaatacagacaggaattccactcgagtccggcagagaaggcggctttggaggcgttctcagcccacgtggacttctgcaccctgttccactaccaccaaatcctggcccggctgcaggccttatatgaccccatcaaccctgacagggagaccctcgatcagccatcactaacggatccccagcgtctgtctaatgagcaggaggtgcttcgggctctggagcccctgctggcccaggccaacttctccccgctgtctgaggacaccctggcctacgcgctggtggtccaccaccctcaggatgaggtccaggtgacagtaaatttggatcagtatgtctacattcacttctgggccctgggccagcgagtcgggcagatgcccctgaagtccagcgtgggctccaggcgtggcttcttcaccaagctgccccctgcggagaggagatactttaagcgggtggtcctggcagcccggaccaaacggggacacctggtactgaagagtttcaaggacacgccgctggaaggcctggagcagctgctgccggagctgaaggtgcgcacgcccaccctgcagcgcgccctgctcaacctcatgctggtagtctccggcgtggcgatcttcgtcaacgtgggcatggtggtgctaaccgacctcaaggtggccacctccctgctgctgctgctcttcgccatcttcatgggcctgcgggcctccaagatgttcgggcagcggcgcagcgcgcaggcgttggagctggcgcacatgctgtactatcgcagtacgtccaacaactcggagctgctcagcgccctggccctgcgcgcgcaggacgagcacaccaaggaggcgctgctggctcacagcttcctggcccggcggccagggggcactcaaggctcgcccgaagagacctccaggtggctccggtcggaggtggagaactggctcctagccaagtcaggctgtgaggtgaccttcaacggaactcgggccctggcgcatctgcaggccctgacccccagcatgggattgtacccacccccgggtttccccaaactagacccagtggctccgatcacttccgagcccccgcaagccacgcccagcagtaacatctcctgagtagaacctacctccctgcccagtcagcaggctaggaactaagccccgcctccttcacgacaggctgtcaattacggttattatacttttcactccaacttccaataactgacaggtgattatttttgctgcactgtgtgcttaagcaaagcagccaatcaaagcagctagcagttgttaagtcttccccgccccttcgatgaacagccaatcaaagcgatttagctctgcttctgttccatttcttagtcccaccctcaccataaacatccaagtgtggtttggctgaggagctgagggtgtctgccaatcacagctgctcagctctggcttctgtaaaccgccaggtagaagagttaaagctgcgccctcccgagactatatatcattgtcgttttcagcccgctccgggcaaactgcccatcatgtgcaccaaggccgttagccctgcctcctggcaaacgtccagtgacagctgctgggttccatcaactttgggcagccggttgtcgctgcagggaaggaaccaataagaatttctaaaggaaacctgatcttgctatcaattgctgctgcttaaatggcaggccaactggtcagctgctgatcagggtgtctaggctgaaggagttggagaccttgtgctaggtaggtgaaccagaaaccaccctcgccaccaagactcgctcccaacctggctcccggcaacctcaggtgccttcctcgcccaggtctttcaccctttctacagaaactacctcggtctggatctccccaccaccagcagcctgtgcaatatttattggtctatcaatttctcccgtctcctgtcccaaagtaataaatcatgtttaataagtctggatgaggctactcttaacgcactgcctttagggtaaccctgctctgtaggagtggttaaaaaattatttttaaaaatctagatgagtgggatggctgcaggagttggagggaaggaaagcatttgaatcctggaaagaggggagggactctagctaggtcttggggtcccagacagagaaagctgtagtcctaaaaagaggctgggttcatggtcggtgaaacaaagacagtcatagaagaggatcttagaaggatctgattccagaggagtcccagggcctgatgaacagaggagatagcgtagccatgtgcgattgtgcagatttgcagatttttttttgttcttgagatggagtttcgcgcttgttgcccaggctggaatgcaatggcgtgatcttggctcactgcaacctccgcctcctgggttcgggtgattctcctgcctcagcctcccgagtagctgggaccgcgggtgtgtgccaccacaccaggctaatttttttgtatttttttgtagagacggggttttgtctcattgcccaggctggtctcaaactcctgagcacaagcaatacgcttgccttagccacccaaagtgctggaattacatgggtgagctaccgtgtccagcctcaatttaaaaataaagagcataattgcattgtttgtaacacaaagaataaatgcttgaggggatggataccccctttaccctgtgattattatgcattgcatacctgtatcaaagtatcccataaatatatacacctactatctacccac

SEQ ID NO: 30458 - DNA, 3441 bp, Homo sapiens
gacccctgcacagtcgttcctttggctaaggctccggggaaagggtctagccatgctgcatgtgacccggggggtctgggggtccagggtccgagtatggccactgttgcccgcgctcctcgggcccccccgggccctctcatcgctggcagccaaaatgggggagtatcgcaagatgtggaaccccagggagccccgcgactgggcccagcagtaccgcgagcgcttcattcccttctccaaggagcagctgctccgcctcctaatacaggccttatatgaccccatcaaccctgacagggagaccctcgatcagccatcactaacggatccccagcgtctgtctaatgagcaggaggtgcttcgggctctggagcccctgctggcccaggccaacttctccccgctgtctgaggacaccctggcctacgcgctggtggtccaccaccctcaggatgaggtccaggtgacagtaaatttggatcagtatgtctacattcacttctgggccctgggccagcgagtcgggcagatgcccctgaagtccagcgtgggctccaggcgtggcttcttcaccaagctgccccctgcggagaggtgaggcggcccttgttccccagctgcagcaagagggagcaaggttagagtcaagaggggactgacaggtcagtgtctggtttgggtgtctgggccccaggcgggaagttgagaaatgggaggcgtgactcatccaaatgctgtcttttcttctcaagggaaagtgagtactacacttgattcccaggggaagagaaaggatggggacagttctccccattttccaataaggaaaactgaggctcggcagagggaggtccacattctgaagatgcggcacggccaggattccaacaaacaatctgcacgtccaataccagggatcgatggcgcgattgaaccgatcccctgtggttggacacagctgatccctggtttcttccccatgattactgagtcgcttttaagatggttgtgcgactgtagagccagagtgagcgtcctaggattggagggggctccccgggcagtgcagtcccgatcctgctcctgcctctgtctctgtccctcaggagatactttaagcgggtggtcctggcagcccggaccaaacggggacacctggtactgaagagtttcaaggacacgccgctggaaggcctggagcagctgctgccggagctgaaggtgcgcacgcccaccctgcagcgcgccctgctcaacctcatgctggtagtctccggcgtggcgatcttcgtcaacgtgggcatggtggtgctaaccgacctcaaggtggccacctccctgctgctgctgctcttcgccatcttcatgggcctgcgggcctccaagatgttcgggcagcggcgcagcgcgcaggcgttggagctggcgcacatgctgtactatcgcagtacgtccaacaactcggagctgctcagcgccctggccctgcgcgcgcaggacgagcacaccaaggaggcgctgctggctcacagcttcctggcccggcggccagggggcactcaaggctcgcccgaagagacctccaggtggctccggtcggaggtggagaactggctcctagccaagtcaggctgtgaggtgaccttcaacggaactcgggccctggcgcatctgcaggccctgacccccagcatgggattgtacccacccccgggtttccccaaactagacccagtggctccgatcacttccgagcccccgcaagccacgcccagcagtaacatctcctgagtagaacctacctccctgcccagtcagcaggctaggaactaagccccgcctccttcacgacaggctgtcaattacggttattatacttttcactccaacttccaataactgacaggtgattatttttgctgcactgtgtgcttaagcaaagcagccaatcaaagcagctagcagttgttaagtcttccccgccccttcgatgaacagccaatcaaagcgatttagctctgcttctgttccatttcttagtcccaccctcaccataaacatccaagtgtggtttggctgaggagctgagggtgtctgccaatcacagctgctcagctctggcttctgtaaaccgccaggtagaagagttaaagctgcgccctcccgagactatatatcattgtcgttttcagcccgctccgggcaaactgcccatcatgtgcaccaaggccgttagccctgcctcctggcaaacgtccagtgacagctgctgggttccatcaactttgggcagccggttgtcgctgcagggaaggaaccaataagaatttctaaaggaaacctgatcttgctatcaattgctgctgcttaaatggcaggccaactggtcagctgctgatcagggtgtctaggctgaaggagttggagaccttgtgctaggtaggtgaaccagaaaccaccctcgccaccaagactcgctcccaacctggctcccggcaacctcaggtgccttcctcgcccaggtctttcaccctttctacagaaactacctcggtctggatctccccaccaccagcagcctgtgcaatatttattggtctatcaatttctcccgtctcctgtcccaaagtaataaatcatgtttaataagtctggatgaggctactcttaacgcactgcctttagggtaaccctgctctgtaggagtggttaaaaaattatttttaaaaatctagatgagtgggatggctgcaggagttggagggaaggaaagcatttgaatcctggaaagaggggagggactctagctaggtcttggggtcccagacagagaaagctgtagtcctaaaaagaggctgggttcatggtcggtgaaacaaagacagtcatagaagaggatcttagaaggatctgattccagaggagtcccagggcctgatgaacagaggagatagcgtagccatgtgcgattgtgcagatttgcagatttttttttgttcttgagatggagtttcgcgcttgttgcccaggctggaatgcaatggcgtgatcttggctcactgcaacctccgcctcctgggttcgggtgattctcctgcctcagcctcccgagtagctgggaccgcgggtgtgtgccaccacaccaggctaatttttttgtatttttttgtagagacggggttttgtctcattgcccaggctggtctcaaactcctgagcacaagcaatacgcttgccttagccacccaaagtgctggaattacatgggtgagctaccgtgtccagcctcaatttaaaaataaagagcataattgcattgtttgtaacacaaagaataaatgcttgaggggatggataccccctttaccctgtgattattatgcattgcatacctgtatcaaagtatcccataaatatatacacctactatctacccac

SEQ ID NO: 30459 - DNA, 329 bp, Homo sapiens
tttttttcaatttgagagcaggtactgtttattaactggctagattacaaaaaataattgtggtaggcatgtttattcttctaataagcctgttgatctggtcttccctgttgtcagcatctccaccttctacaaaattggtggtctttttcttcattctaacttgtcgagaggataatttgaagggccacaggaagttatttgcttctttaagcattttccaacagtatagatctcatgaatcagatcctccatgcagatgaggccatatttaccaagagatcgagcaatcaaagtattatctgttggagcaagtagcttcttattca

SEQ ID NO: 30460 - DNA, 145 bp, Homo sapiens
agaggagggaatcccacttaacgaaaacttaagtcattctcaaatttattcaaatcatacttgaaaaggcggaatgaaatttagggggatatgttttaactatataagcctttgctaataaaagattaagaagtatgtggcttag

SEQ ID NO: 30461 - DNA, 781 bp, Homo sapiens
ctggatagtaaggatgtttatcttactctgtcttcattgtcctcaaacctcaagtagtcactaataccctggctatgacagcttttatcgtagtgttaaatggcagatttatttacttggcaaacattgtcaagtctcagaaaaattaccccatggtcttgccttcttccctcgtgaattgccttccactgatggagaggatttgatctgttccctgctcatcaatttttctagcttctttggggatgtccgctctgcatatctactaaggaattaagaaataatggcttcagcaagaaacaaggcagggaaagtgccagtgacatgaggaccatacaggggaagggagctgttcccccaaaggtgagaatggccctggacaagggttcttgctgtgacttcactcaagaccagaccaccttgaccttttcgtcaccgtgcctcagcgaagtcagtcgttgattctctgatccgttacctgagatcatcatgaaatctccctcgtacgagagttgcagaactctgcagtgtcaatcatagtgtttgggagagaggactttctacctccatcctttttctgaacctaaatggaatgaaaattagaactgttgcttattctttgaggtaatttcaaattcccttatccaaaccagtgttacaaaaggactccagtttgccccccaaatcggtctattaagaatgtaatgatgaattttcatccaaatcccacaatatgagcttttctaaaataactctagaaacaaatatgacaatattccaa

SEQ ID NO: 30462 - DNA, 786 bp, Homo sapiens
ctggatagtaaggatgtttatcttactctgtcttcattgtcctcaaacctcaagtagtcactaataccctggctatgacagcttttatcgtagtgttaaatggcagatttatttacttggcaaacattgtcaagtctcagaaaaattaccccatggtcttgccttcttccctcgtgaattgccttccactgatggagaggatttgatctgttccctgctcatcaatttttctagcttctttggggatgtccgctctgcatatctactaaggaattaagaaataatggcttcagcaagaaacaaggcagggaaagtgccagtgacatgaggaccatacaggggaagggagctgttcccccaaagcagggtctttgtgacttgtaccttgtgcggacctcctactcatcctgtgactaagaacactgaacttcctggggttacagcccacaggtctcagcctcatttcatccagcccctattcaagatggagtcgctctggttcaaatgcctctgacactagtaaggatcacaggtggcatcaacaggtttggagcaaacctgagtgtctcccggttggtcacatctcaactgacgaaatccacgaccagcagagagcagcctccttgccccctgtgctcactgagtcatccagcccattttgaccaagattatgtgagttgctggagcagaggttggttgagggagctcccactgtatgtaatcaccgtgtcttgcacaaaataaatagaaaacacaagaatacactcttatgcatgatcctaaaaa

SEQ ID NO: 30463 - DNA, 729 bp, Homo sapiens
ctggatagtaaggatgtttatcttactctgtcttcattgtcctcaaacctcaagtagtcactaataccctggctatgacagcttttatcgtagtgttaaatggcagatttatttacttggcaaacattgtcaagtctcagaaaaattaccccatggtcttgccttcttccctcgtgaattgccttccactgatggagaggatttgatctgttccctgctcatcaatttttctagcttctttggggatgtccgctctgcatatctactaaggaattaagaaataatggcttcagcaagaaacaaggcagggaaagtgccagtgacatgaggaccatacaggggaagggagctgttcccccaaagcacgatgagccacttgaggccaggtacagccatggcgtgtatcccagagcacctgtgagaatgtctcacagacagtccgtctctcctgaatatgaagggatgggcaccagccggagccaccatccgtgtgactggcccgtggccgcctccagctcacacagaacctctgcacgcaacggaaaaaggtctcccctgggtgaatggggtgggaaacgtgtgcccctccaggcggctggtgagcagagtgctcccctcggcagggtgtgacttgtacagctccaccacgggccctgtaacaagacaggcttcgaccctgccctcttgcagctcgtatgtatgaggggcagcccaataaataaataagca

SEQ ID NO: 30464 - DNA, 452 bp, Homo sapiens
gaagaggccaccacaccccaggggccgggaaaggggtgacctgtgtcttgctgcttgcctagtgcttcctggatcccaggttcataccatctttgccagactggaaagaatggatgcaggctgggtgtagtggctcgtgcctgtaatcctgcactagagaggccaagacaggaggatcctttgatctcttgtttgagaccagcctgagcaacatagtgagagcttgtctctacaaaaaataaacaaaattagctgggcatggtggcgagcacctgtggtcccagctacttgggaggctgaagtgggagaatcacctgaacccaggaggtcaaggctgtggtggaccgacatcgcaccattgcactccagcctgggtgatggagcaagaccctgtctcaaaaataaataaataaataaataaataaataaataaataaataagaaagaaagaa

SEQ ID NO: 30465 - DNA, 387 bp, Homo sapiens
cgctgccacccccacagcgcgcacagtgatttcaggaaggaggtttgattggtttgttgtgtgttgccctgcaagggccccaatcagcttcctgctcatcagccccatctcaggcaagtcccacatctgtgatgtcaagccctgagccgggtaattggacttggatacctgcttgactcatctttccagtgaggttcctaaggagcatccccaaccccacctcccagggggagctctcgatgtcacctgaagaacaaacaaacaaaaactgtgttgatggtacagtcccagggctccgtgactggacaggctccctgcgtgatacacctgtgtatgtcactacagaaatacagctggtgcaggcctgtccgcctctctcacaggtca

SEQ ID NO: 30466 - DNA, 350 bp, Homo sapiens
gacactgcatggtccctgtccttgttagcggtagtgacttctgccttaactgaatttctggctacctgttagagacttccccctaaatccttcaatagccttttccataggaagacatcttgctgcaatatccctggtaaggaggtatgaagggtgctttaaatataaggaaattcatttacatacaagtgtttcattgtaatttctttcatttagatgttaattttttttcctaagctaatgtttgaattggtattaacattaaaaataaaaagttgcattaatatgcaacttttaaacatactctttatagtcattgaccatttgcaaaccaaatgcattttttatac

SEQ ID NO: 30467 - DNA, 114 bp, Homo sapiens
ggaacactgcctggtctagagtaagccctaaacaagtgcaagcaatctaataaccacctcattggtgccttctgtgggccaagcactgggttagcctcagggatttgggagggg

SEQ ID NO: 30468 - DNA, 831 bp, Homo sapiens
atatttttgaggttagagggataagtttagtaaattattattcaggagcccctacgcccttccttgcctctcttccatttaggagggttggctttgtgtttctgggtgctaaccctcctgtaagccccttataattgtagctgcccttcacagcttcacacacaggcttcacacacatgtgttagctcttccataagtgtctctgattggctggttcaatctcattgcctgggaagttaagggagtcaaaatttccacagcctcggtgcttcttattgcattgtatttttctttcaaattaatgggagaaaaagctgaataaggagtttgtgtgctttaaagtgtaccatttgttaatctggaaacctgaatgttgtgagcattggtaagtgacccatggtcacttttaaaaaataattttgtgctcatagtatggtactataccagggatttttagaacaaaaattctaattattacataactttcttattgtagtgggcaggcttggctgaaatgagaactgctgaagcaagacagatagcttgtgatgaactattcacaaatgaggcggaggaatatagcctctatgaagctgtaaaatttctaatgctaaacagagccattgaactatataatgataaagagaaaggaaaggaagtaccatttttctctgtgcttctgtttgctcgggacacatcaaatgacccaggacagcttctgaggaaccacctcaaccaggtgggacacactggtggtcttgaacaggtaagttgtgcttttgagcatgtattaccccaaaataaagcagctttactgatcaaacttgatgt

SEQ ID NO: 30469 - DNA, 3021 bp, Homo sapiens
agaggccgtggggcgggccacggtgacgcgcgcggaagcgctctgcgggccctcggaaaccgccccggcggctgagaggctgcggccactgcctggcaccccgacgggaggggctccggatcgttcggagccggctgaaccccttcggccgcgagcgaccgcatgagtcgggggactatgccccagcccgaagcgtggccaggcgcgagctgcgccgagacgccggcgcgggaggcggcggccacggcgcgggacggcgggaaggcggcggccagcgggcagccgcggcccgagatgcagtgcccggccgagcatgaggaggacatgtaccgtgctgcagatgaaatagaaaaggagaaagaattgcttatacatgaaagaggggcatcagaaccgagattaagcgtagctcctgaaatggatatcatggactactgcaaaaaagaatggagaggaaatacacagaaagcaacgtgtatgaaaatgggctatgaagaggtttctcagaagttcacctccatacggcgagtccgtggtgataattactgtgcactgagggccacgctgttccaggccatgagccaggctgtggggctgccgccctggctgcaggacccggagctcatgctggtacgttaccagaaaaactcataagcaaatacaactggatcaagcaatggaaacttggactgaaatttgatgggaagaatgaggacctggttgataaaattaaagagtcccttactctgctgaggaagaagtgggcaggcttggctgaaatgagaactgctgaagcaagacagatagcttgtgatgaactattcacaaatgaggcggaggaatatagcctctatgaagctgtaaaatttctaatgctaaacagagccattgaactatataatgataaagagaaaggaaaggaagtaccatttttctctgtgcttctgtttgctcgggacacatcaaatgacccaggacagcttctgaggaaccacctcaaccaggtgggacacactggtggtcttgaacaggttgaaatgttccttcttgcctatgctgtgcgccacaccatccaggtgtaccggctctccaagtacaacacggaagaattcatcacagtctaccccaccgacccacccaaggactggccagtggtaacgctcattgctgaggacgatcggcactataacatccccgtcagagtgtgtgaggagaccagtctatgagagacgcatgctcctgacagcctggcgacgtggcgaagatgcacaggtggctcctgggcttgggctgcaggtttgggggtctctaagaacaatctctgagaagaacccttgggcccctgggagccaagttggacaggatgtcctgaagactagcttttgataagagaaattaaccaagtctttcccctcatctatgatgcaatatatttcagtgggggccttcagagcacacctgttggacggtgcaaaccatatcttctccagaaggcaaatacttttgtatcagaggaaactcagttttggagaggaatatgttctttatatctcaaatcaaaactctctctaatggtaaactggcttctaatttttttaagtacagtatttttttttcccctttagtagtaacgggtttctatagatcttcctatacagtctgctttaactcaggaccttgagattatgagactgacgtgctgcccactgcactgagggggcttctaacagtctgctttaagtggtataattctgggatagatctgttactggcatagtcatgacaacctctggtaatcttaccttctcctttttatgaagggaagagcaatggtttggacttacatcttaattaaggctattttaagcagattgttttgcaacagattaagaattgggtcccaaagtgggttatttcaaggcatttttgaagactggaggagcgtaggagggagtggtgagggaacctagaacttcttgctccttgtgactatgacagatgtctgatgcccccagcgcactggagtctggggcttggtgcaggtggtgccccatcagtgtggacagacactacttgcctttgtggtttagtgttggaagctttaattattctacagttccatagattcacaattttatagccaaacagtttgtatccacctgctttcagaggaggaaccaaaggccaaattactttgaggtagggcttagctggacctgggttttcctatgctcttttcatgctgtgttggagggtgtgtccactgccagatctgtgtaacccgtctgggtcaggggatgagtgacagcaaaccatcttaaaatttttcatgagtacatttaagcggaagcatacgggaatatgagtgcaaaagtgtggctgagccgcgtatgcccttgattggttttgggaagcctgagggaggcagccttcctggctatgagccatcgcctgcccaatcaggctaagggtggtgactggggtggtgaaggggcagctctgctgagcatggtctgccttatggcctgaattgtcctcaaggggtgtggactgcagatggtgttcacatgaaccggagacatcactctttaggattctactggcagcccctgaattggctcaacgtttgtggaggtggtatttccctgaagtactgagctttgttttataataattaaaatccttatttggtccaatttaatatagtttagaagctattttttttgaggcaaaccgtttttgaaaatgtaaattttgtttttaattaaaaataaagtcttagttaagaaaactcaggatgcacaaaactattcagactgttactttagctttctcccattacctcatcagtaatattcaccacattttgctaaatatttattgattagagtgttgaaatcaaattctgctctaaatgtgtgtgaatatgttggagaggctttgtgttcttcactgtgaaatgcaattgtgccttgaataagaaggtacctagaagccaaattaaagtaataatgacttctt

SEQ ID NO: 30470 - DNA, 4052 bp, Homo sapiens
agaggccgtggggcgggccacggtgacgcgcgcggaagcgctctgcgggccctcggaaaccgccccggcggctgagaggctgcggccactgcctggcaccccgacgggaggggctccggatcgttcggagccggctgaaccccttcggccgcgagcgaccgcatgagtcgggggactatgccccagcccgaagcgtggccaggcgcgagctgcgccgagacgccggcgcgggaggcggcggccacggcgcgggacggcgggaaggcggcggccagcgggcagccgcggcccgagatgcagtgcccggccgagcaaaccgagattaagcgtagctcctgaaatggatatcatggactactgcaaaaaagaatggagaggaaatacacagaaagcaacgtgtatgaaaatgggctatgaagaggtttctcagaagttcacctccatacggcgagtccgtggtgataattactgtgcactgagggccacgctgttccaggccatgagccaggctgtggggctgccgccctggctgcaggacccggagctcatgctggtacgttaccagaaaaactcataagcaaatacaactggatcaagcaatggaaacttggactgaaatttgatgggaagaatgaggacctggttgataaaattaaagagtcccttactctgctgaggaagaagtgggcaggcttggctgaaatgagaactgctgaagcaagacagatagcttgtgatgaactattcacaaatgaggcggaggaatatagcctctatgaagctgtaaaatttctaatgctaaacagagccattgaactatataatgataaagagaaaggaaaggaagtaccatttttctctgtgcttctgtttgctcgggacacatcaaatgacccaggacagcttctgaggaaccacctcaaccaggtgggacacactggtggtcttgaacaggttgaaatgttccttcttgcctatgctgtgcgccacaccatccaggtgtaccggctctccaagtacaacacggaagaattcatcacagtctaccccaccgacccacccaaggactggccagtggtaacgctcattgctgaggacgatcggcactataacatccccgtcagagtgtgtgaggagaccagtctatgagagacgcatgctcctgacagcctggcgacgtggcgaagatgcacaggtggctcctgggcttgggctgcaggtttgggggtctctaagaacaatctctgagaagaacccttgggcccctgggagccaagttggacaggatgtcctgaagactagcttttgataagagaaattaaccaagtctttcccctcatctatgatgcaatatatttcagtgggggccttcagagcacacctgttggacggtgcaaaccatatcttctccagaaggcaaatacttttgtatcagaggaaactcagttttggagaggaatatgttctttatatctcaaatcaaaactctctctaatggtaaactggcttctaatttttttaagtacagtatttttttttcccctttagtagtaacgggtttctatagatcttcctatacagtctgctttaactcaggaccttgagattatgagactgacgtgctgcccactgcactgagggggcttctaacagtctgctttaagtggtataattctgggatagatctgttactggcatagtcatgacaacctctggtaatcttaccttctcctttttatgaagggaagagcaatggtttggacttacatcttaattaaggctattttaagcagattgttttgcaacagattaagaattgggtcccaaagtgggttatttcaaggcatttttgaagactggaggagcgtaggagggagtggtgagggaacctagaacttcttgctccttgtgactatgacagatgtctgatgcccccagcgcactggagtctggggcttggtgcaggtggtgccccatcagtgtggacagacactacttgcctttgtggtttagtgttggaagctttaattattctacagttccatagattcacaattttatagccaaacagtttgtatccacctgctttcagaggaggaaccaaaggccaaattactttgaggtagggcttagctggacctgggttttcctatgctcttttcatgctgtgttggagggtgtgtccactgccagatctgtgtaacccgtctgggtcaggggatgagtgacagcaaaccatcttaaaatttttcatgagtacatttaagcggaagcatacgggaatatgagtgcaaaagtgtggctgagccgcgtatgcccttgattggttttgggaagcctgagggaggcagccttcctggctatgagccatcgcctgcccaatcaggctaagggtggtgactggggtggtgaaggggcagctctgctgagcatggtctgccttatggcctgaattgtcctcaaggggtgtggactgcagatggtgttcacatgaaccggagacatcactctttaggattctactggcagcccctgaattggctcaacgtttgtggaggtggtatttccctgaagtactgagctttgttttataataattaaaatccttatttggtccaatttaatatagtttagaagctattttttttgaggcaaaccgtttttgaaaatgtaaattttgtttttaattaaaaataaagtcttagttaagaaaactcaggatgcacaaaactattcagactgttactttagctttctcccattacctcatcagtaatattcaccacattttgctaaatatttattgattagagtgttgaaatcaaattctgctctaaatgtgtgtgaatatgttggagaggctttgtgttcttcactgtgaaatgcaattgtgccttgaataagaaggtacctagaagccaaattaaagtaataatgacttcttattggctttgatttttcattgcagtatatgggattgtacagcaggaaatgcttatcattaatttctgatgttttttaaagcacaactcgaaacatttcgatcatacatacatagcagtagagatctgtgcccttcaggtacattgaatctgaccatcagtttatatatgtcattgaattttaagaatactcatgttaataatagtcatctatccttgcattttgaaactgttctaatcttagtgaacttgaattggatttctgggtaaaagaatgtgtttcttttatgttgcttatgtccgaaggccttgtcagaatctgtcagactcttgtttaggtttagtgtgatcatggcgtcagagaagcaaagctttcaaataaatagtacttcaggaaatagaaatgattgaccaactttaaaaataatttttttttaattgcaatatgcagcttcagttgcccagaatcttagttccgtttctcattcttggtcttgagctggtcaggtgacatcagcagattagaagttgaatggagattaagtggattcaggaggatgttccacttagagcagtcttcaaaatgataaggtgttctagaagaaaggaatgtagtaggaactatactatgcctaactttctatcccagagtgtcttgcaagagtttaggagttttggaccctgtgtattggcagaaaagttatctccatcttaagcaggcatgacttttatacctgtgagctcatttaaggtgcatttaaacctaaaataatttccctgtattatgcttcatgggattaacactgcttttccagaacattttcagattcccctccttacatcctgagctccttctgtatatacatctgttgattttatccatccacaaggaacaatgatagtcacattagagaacaagaaaccagtaatacatggtctctaactgatgattcgggcctggatttgattgaaagtgtttgcagttcctcttccgtagaatacagagtggatgaaaatgttttcaatgcacagaacaggatgaatccttttttctttatttagcgatttacacttttgttactctattatatattcagttagtgtctgata

SEQ ID NO: 30471 - DNA, 3231 bp, Homo sapiens
ggcccaaagcaggaggaaaaaacgttgtggcttcaccattgctgtgcactgtgggataatggatggaacatggtgttaagccacgtttttcagtgtgatcttcctcagaatacccgtttgctcttcttcccaggttgaaatgttccttcttgcctatgctgtgcgccacaccatccaggtgtaccggctctccaagtacaacacggaagaattcatcacagtctaccccaccgacccacccaaggactggccagtggtaacgctcattgctgaggacgatcggcactataacatccccgtcagagtgtgtgaggagaccagtctatgagagacgcatgctcctgacagcctggcgacgtggcgaagatgcacaggtggctcctgggcttgggctgcaggtttgggggtctctaagaacaatctctgagaagaacccttgggcccctgggagccaagttggacaggatgtcctgaagactagcttttgataagagaaattaaccaagtctttcccctcatctatgatgcaatatatttcagtgggggccttcagagcacacctgttggacggtgcaaaccatatcttctccagaaggcaaatacttttgtatcagaggaaactcagttttggagaggaatatgttctttatatctcaaatcaaaactctctctaatggtaaactggcttctaatttttttaagtacagtatttttttttcccctttagtagtaacgggtttctatagatcttcctatacagtctgctttaactcaggaccttgagattatgagactgacgtgctgcccactgcactgagggggcttctaacagtctgctttaagtggtataattctgggatagatctgttactggcatagtcatgacaacctctggtaatcttaccttctcctttttatgaagggaagagcaatggtttggacttacatcttaattaaggctattttaagcagattgttttgcaacagattaagaattgggtcccaaagtgggttatttcaaggcatttttgaagactggaggagcgtaggagggagtggtgagggaacctagaacttcttgctccttgtgactatgacagatgtctgatgcccccagcgcactggagtctggggcttggtgcaggtggtgccccatcagtgtggacagacactacttgcctttgtggtttagtgttggaagctttaattattctacagttccatagattcacaattttatagccaaacagtttgtatccacctgctttcagaggaggaaccaaaggccaaattactttgaggtagggcttagctggacctgggttttcctatgctcttttcatgctgtgttggagggtgtgtccactgccagatctgtgtaacccgtctgggtcaggggatgagtgacagcaaaccatcttaaaatttttcatgagtacatttaagcggaagcatacgggaatatgagtgcaaaagtgtggctgagccgcgtatgcccttgattggttttgggaagcctgagggaggcagccttcctggctatgagccatcgcctgcccaatcaggctaagggtggtgactggggtggtgaaggggcagctctgctgagcatggtctgccttatggcctgaattgtcctcaaggggtgtggactgcagatggtgttcacatgaaccggagacatcactctttaggattctactggcagcccctgaattggctcaacgtttgtggaggtggtatttccctgaagtactgagctttgttttataataattaaaatccttatttggtccaatttaatatagtttagaagctattttttttgaggcaaaccgtttttgaaaatgtaaattttgtttttaattaaaaataaagtcttagttaagaaaactcaggatgcacaaaactattcagactgttactttagctttctcccattacctcatcagtaatattcaccacattttgctaaatatttattgattagagtgttgaaatcaaattctgctctaaatgtgtgtgaatatgttggagaggctttgtgttcttcactgtgaaatgcaattgtgccttgaataagaaggtacctagaagccaaattaaagtaataatgacttcttattggctttgatttttcattgcagtatatgggattgtacagcaggaaatgcttatcattaatttctgatgttttttaaagcacaactcgaaacatttcgatcatacatacatagcagtagagatctgtgcccttcaggtacattgaatctgaccatcagtttatatatgtcattgaattttaagaatactcatgttaataatagtcatctatccttgcattttgaaactgttctaatcttagtgaacttgaattggatttctgggtaaaagaatgtgtttcttttatgttgcttatgtccgaaggccttgtcagaatctgtcagactcttgtttaggtttagtgtgatcatggcgtcagagaagcaaagctttcaaataaatagtacttcaggaaatagaaatgattgaccaactttaaaaataatttttttttaattgcaatatgcagcttcagttgcccagaatcttagttccgtttctcattcttggtcttgagctggtcaggtgacatcagcagattagaagttgaatggagattaagtggattcaggaggatgttccacttagagcagtcttcaaaatgataaggtgttctagaagaaaggaatgtagtaggaactatactatgcctaactttctatcccagagtgtcttgcaagagtttaggagttttggaccctgtgtattggcagaaaagttatctccatcttaagcaggcatgacttttatacctgtgagctcatttaaggtgcatttaaacctaaaataatttccctgtattatgcttcatgggattaacactgcttttccagaacattttcagattcccctccttacatcctgagctccttctgtatatacatctgttgattttatccatccacaaggaacaatgatagtcacattagagaacaagaaaccagtaatacatggtctctaactgatgattcgggcctggatttgattgaaagtgtttgcagttcctcttccgtagaatacagagtggatgaaaatgttttcaatgcacagaacaggatgaatccttttttctttatttagcgatttacacttttgttactctattatatattcagttagtgtctgata

SEQ ID NO: 30472 - DNA, 1384 bp, Homo sapiens
  misc_feature (1382)..(1382): n is a, c, g, or t
  misc_feature (1384)..(1384): n is a, c, g, or t
agaggccgtggggcgggccacggtgacgcgcgcggaagcgctctgcgggccctcggaaaccgccccggcggctgagaggctgcggccactgcctggcaccccgacgggaggggctccggatcgttcggagccggctgaaccccttcggccgcgagcgaccgcatgagtcgggggactatgccccagcccgaagcgtggccaggcgcgagctgcgccgagacgccggcgcgggaggcggcggccacggcgcgggacggcgggaaggcggcggccagcgggcagccgcggcccgagatgcagtgcccggccgagcaaaccgagattaagcgtagctcctgaaatggatatcatggactactgcaaaaaagaatggagaggaaatacacagaaagcaacgtgtatgaaaatgggctatgaagaggtttctcagaagttcacctccatacggcgagtccgtggtgataattactgtgcactgagggccacgctgttccaggccatgagccaggctgtggggctgccgccctggctgcaggacccggagctcatgctggtacgttaccagaaaaactcataagcaaatacaactggatcaagcaatggaaacttggactgaaatttgatgggaagaatgaggacctggttgataaaattaaagagtcccttactctgctgaggaagaagtgggcaggcttggctgaaatgagaactgctgaagcaagacagatagcttgtgatgaactattcacaaatgaggcggaggaatatagcctctatgaagctgtaaaatttctaatgctaaacagagccattgaactatataatgataaagagaaaggaaaggaagtaccatttttctctgtgcttctgtttgctcgggacacatcaaatgacccaggacagcttctgaggaaccacctcaaccaggtgggacacactggtggtcttgaacaggttgaaatgttccttcttgcctatgctgtgcgccacaccatccaggtgtaccggctctccaagtacaacacggaagaattcatcacagtctaccccaccgacccacccaaggactggccagtggtaacgctcattgctgaggacgatcggcactataacatccccgtcagagtgtgtgaggagaccagtctatgagagacgcatgctcctgacagcctggcgacgtggcgaagatgcacaggtggctcctgggcttgggctgcaggtttgggggtctctaagaacaatctctgagaagaacccttgggcccctgggagccaagttggacaggatgtcctgaagactagcttttgataagagaaattaaccaagcaaacctgggtacgagctcgattcctggcgcgttaaaaagctgggtgggggggtnan

SEQ ID NO: 30473 - DNA, 470 bp, Homo sapiens
aaagagtttagggtcatttgaaacacagagtaaacccttcaaaatgttgtttgccagtgagtaagtgttaaaacaattgcttagaaagggacataaaactccaactttgggcatcctcccagtgatcccaggccaagctttttccacaggaatgaaactttctctgctatctcaagtcagtaacgaccattttgaattctttcataccttttcccagggctatgaagaggtttctcagaagttcacctccatacggcgagtccgtggtgataattactgtgcactgagggccacgctgttccaggccatgagccaggctgtggggctgccgccctggctgcaggacccggagctcatgctggtacgctgctgctgcaggtttgagtccaaaatgtttcaaacaatttttgtgagaaaactttccctttctgtccatgctaccttctagtatcgtctgcagtatgatgtca

SEQ ID NO: 30474 - DNA, 1576 bp, Homo sapiens
agaggccgtggggcgggccacggtgacgcgcgcggaagcgctctgcgggccctcggaaaccgccccggcggctgagaggctgcggccactgcctggcaccccgacgggaggggctccggatcgttcggagccggctgaaccccttcggccgcgagcgaccgcatgagtcgggggactatgccccagcccgaagcgtggccaggcgcgagctgcgccgagacgccggcgcgggaggcggcggccacggcgcgggacggcgggaaggcggcggccagcgggcagccgcggcccgagatgcagtgcccggccgagcatgaggaggacatgtaccgtgctgcagatgaaatagaaaaggagaaagaattgcttatacatgaaagaggggcatcagaaccgagattaagcgtagctcctgaaatggatatcatggactactgcaaaaaagaatggagaggaaatacacagaaagcaacgtgtatgaaaatgggctatgaagaggtttctcagaagttcacctccatacggcgagtccgtggtgataattactgtgcactgagggccacgctgttccaggccatgagccaggctgtggggctgccgccctggctgcaggacccggagctcatgctggtacgttaccagaaaaactcataagcaaatacaactggatcaagcaatggaaacttggactgaaatttgatgggaagaatgaggacctggttgataaaattaaagagtcccttactctgctgaggaagaagtgggcaggcttggctgaaatgagaactgctgaagcaagacagatagcttgtgatgaactattcacaaatgaggcggaggaatatagcctctatgaagctgtaaaatttctaatgctaaacagagccattgaactatataatgataaagagaaaggaaaggaagtaccatttttctctgtgcttctgtttgctcgggacacatcaaatgacccaggacagcttctgaggaaccacctcaaccaggtgggacacactggtggtcttgaacaggttgaaatgttccttcttgcctatgctgtgcgccacaccatccaggtgtaccggctctccaagtacaacacggaagaattcatcacagtctaccccaccgacccacccaaggactggccagtggtaacgctcattgctgaggacgatcggcactataacatccccgtcagagtgtgtgaggagaccagtctatgagagacgcatgctcctgacagcctggcgacgtggcgaagatgcacaggtggctcctgggcttgggctgcaggtttgggggtctctaagaacaatctctgagaagaacccttgggcccctgggagccaagttggacaggatgtcctgaagactagcttttgataagagaaattaaccaagtctttcccctcatctatgatgcaatatatttcagtgggggccttcagagcacacctgttggacggtgcaaaccatatcttctccagaaggcaaatacttttgtatcagaggaaactcagttttggagaggaatatgttctttatatctcaaatcaaaactctctctaatggt

SEQ ID NO: 30475 - DNA, 2944 bp, Homo sapiens
agaggccgtggggcgggccacggtgacgcgcgcggaagcgctctgcgggccctcggaaaccgccccggcggctgagaggctgcggccactgcctggcaccccgacgggaggggctccggatcgttcggagccggctgaaccccttcggccgcgagcgaccgcatgagtcgggggactatgccccagcccgaagcgtggccaggcgcgagctgcgccgagacgccggcgcgggaggcggcggccacggcgcgggacggcgggaaggcggcggccagcgggcagccgcggcccgagatgcagtgcccggccgagcaaaccgagattaagcgtagctcctgaaatggatatcatggactactgcaaaaaagaatggagaggaaatacacagaaagcaacgtgtatgaaaatgggctatgaagaggtttctcagaagttcacctccatacggcgagtccgtggtgataattactgtgcactgagggccacgctgttccaggccatgagccaggctgtggggctgccgccctggctgcaggacccggagctcatgctggtacgttaccagaaaaactcataagcaaatacaactggatcaagcaatggaaacttggactgaaatttgatgggaagaatgaggacctggttgataaaattaaagagtcccttactctgctgaggaagaagtgggcaggcttggctgaaatgagaactgctgaagcaagacagatagcttgtgatgaactattcacaaatgaggcggaggaatatagcctctatgaagctgtaaaatttctaatgctaaacagagccattgaactatataatgataaagagaaaggaaaggaagtaccatttttctctgtgcttctgtttgctcgggacacatcaaatgacccaggacagcttctgaggaaccacctcaaccaggtgggacacactggtggtcttgaacaggttgaaatgttccttcttgcctatgctgtgcgccacaccatccaggtgtaccggctctccaagtacaacacggaagaattcatcacagtctaccccaccgacccacccaaggactggccagtggtaacgctcattgctgaggacgatcggcactataacatccccgtcagagtgtgtgaggagaccagtctatgagagacgcatgctcctgacagcctggcgacgtggcgaagatgcacaggtggctcctgggcttgggctgcaggtttgggggtctctaagaacaatctctgagaagaacccttgggcccctgggagccaagttggacaggatgtcctgaagactagcttttgataagagaaattaaccaagtctttcccctcatctatgatgcaatatatttcagtgggggccttcagagcacacctgttggacggtgcaaaccatatcttctccagaaggcaaatacttttgtatcagaggaaactcagttttggagaggaatatgttctttatatctcaaatcaaaactctctctaatggtaaactggcttctaatttttttaagtacagtatttttttttcccctttagtagtaacgggtttctatagatcttcctatacagtctgctttaactcaggaccttgagattatgagactgacgtgctgcccactgcactgagggggcttctaacagtctgctttaagtggtataattctgggatagatctgttactggcatagtcatgacaacctctggtaatcttaccttctcctttttatgaagggaagagcaatggtttggacttacatcttaattaaggctattttaagcagattgttttgcaacagattaagaattgggtcccaaagtgggttatttcaaggcatttttgaagactggaggagcgtaggagggagtggtgagggaacctagaacttcttgctccttgtgactatgacagatgtctgatgcccccagcgcactggagtctggggcttggtgcaggtggtgccccatcagtgtggacagacactacttgcctttgtggtttagtgttggaagctttaattattctacagttccatagattcacaattttatagccaaacagtttgtatccacctgctttcagaggaggaaccaaaggccaaattactttgaggtagggcttagctggacctgggttttcctatgctcttttcatgctgtgttggagggtgtgtccactgccagatctgtgtaacccgtctgggtcaggggatgagtgacagcaaaccatcttaaaatttttcatgagtacatttaagcggaagcatacgggaatatgagtgcaaaagtgtggctgagccgcgtatgcccttgattggttttgggaagcctgagggaggcagccttcctggctatgagccatcgcctgcccaatcaggctaagggtggtgactggggtggtgaaggggcagctctgctgagcatggtctgccttatggcctgaattgtcctcaaggggtgtggactgcagatggtgttcacatgaaccggagacatcactctttaggattctactggcagcccctgaattggctcaacgtttgtggaggtggtatttccctgaagtactgagctttgttttataataattaaaatccttatttggtccaatttaatatagtttagaagctattttttttgaggcaaaccgtttttgaaaatgtaaattttgtttttaattaaaaataaagtcttagttaagaaaactcaggatgcacaaaactattcagactgttactttagctttctcccattacctcatcagtaatattcaccacattttgctaaatatttattgattagagtgttgaaatcaaattctgctctaaatgtgtgtgaatatgttggagaggctttgtgttcttcactgtgaaatgcaattgtgccttgaataagaaggtacctagaagccaaattaaagtaataatgacttctt

SEQ ID NO: 30476 - DNA, 3864 bp, Homo sapiens
atatttttgaggttagagggataagtttagtaaattattattcaggagcccctacgcccttccttgcctctcttccatttaggagggttggctttgtgtttctgggtgctaaccctcctgtaagccccttataattgtagctgcccttcacagcttcacacacaggcttcacacacatgtgttagctcttccataagtgtctctgattggctggttcaatctcattgcctgggaagttaagggagtcaaaatttccacagcctcggtgcttcttattgcattgtatttttctttcaaattaatgggagaaaaagctgaataaggagtttgtgtgctttaaagtgtaccatttgttaatctggaaacctgaatgttgtgagcattggtaagtgacccatggtcacttttaaaaaataattttgtgctcatagtatggtactataccagggatttttagaacaaaaattctaattattacataactttcttattgtagtgggcaggcttggctgaaatgagaactgctgaagcaagacagatagcttgtgatgaactattcacaaatgaggcggaggaatatagcctctatgaagctgtaaaatttctaatgctaaacagagccattgaactatataatgataaagagaaaggaaaggaagtaccatttttctctgtgcttctgtttgctcgggacacatcaaatgacccaggacagcttctgaggaaccacctcaaccaggtgggacacactggtggtcttgaacaggttgaaatgttccttcttgcctatgctgtgcgccacaccatccaggtgtaccggctctccaagtacaacacggaagaattcatcacagtctaccccaccgacccacccaaggactggccagtggtaacgctcattgctgaggacgatcggcactataacatccccgtcagagtgtgtgaggagaccagtctatgagagacgcatgctcctgacagcctggcgacgtggcgaagatgcacaggtggctcctgggcttgggctgcaggtttgggggtctctaagaacaatctctgagaagaacccttgggcccctgggagccaagttggacaggatgtcctgaagactagcttttgataagagaaattaaccaagtctttcccctcatctatgatgcaatatatttcagtgggggccttcagagcacacctgttggacggtgcaaaccatatcttctccagaaggcaaatacttttgtatcagaggaaactcagttttggagaggaatatgttctttatatctcaaatcaaaactctctctaatggtaaactggcttctaatttttttaagtacagtatttttttttcccctttagtagtaacgggtttctatagatcttcctatacagtctgctttaactcaggaccttgagattatgagactgacgtgctgcccactgcactgagggggcttctaacagtctgctttaagtggtataattctgggatagatctgttactggcatagtcatgacaacctctggtaatcttaccttctcctttttatgaagggaagagcaatggtttggacttacatcttaattaaggctattttaagcagattgttttgcaacagattaagaattgggtcccaaagtgggttatttcaaggcatttttgaagactggaggagcgtaggagggagtggtgagggaacctagaacttcttgctccttgtgactatgacagatgtctgatgcccccagcgcactggagtctggggcttggtgcaggtggtgccccatcagtgtggacagacactacttgcctttgtggtttagtgttggaagctttaattattctacagttccatagattcacaattttatagccaaacagtttgtatccacctgctttcagaggaggaaccaaaggccaaattactttgaggtagggcttagctggacctgggttttcctatgctcttttcatgctgtgttggagggtgtgtccactgccagatctgtgtaacccgtctgggtcaggggatgagtgacagcaaaccatcttaaaatttttcatgagtacatttaagcggaagcatacgggaatatgagtgcaaaagtgtggctgagccgcgtatgcccttgattggttttgggaagcctgagggaggcagccttcctggctatgagccatcgcctgcccaatcaggctaagggtggtgactggggtggtgaaggggcagctctgctgagcatggtctgccttatggcctgaattgtcctcaaggggtgtggactgcagatggtgttcacatgaaccggagacatcactctttaggattctactggcagcccctgaattggctcaacgtttgtggaggtggtatttccctgaagtactgagctttgttttataataattaaaatccttatttggtccaatttaatatagtttagaagctattttttttgaggcaaaccgtttttgaaaatgtaaattttgtttttaattaaaaataaagtcttagttaagaaaactcaggatgcacaaaactattcagactgttactttagctttctcccattacctcatcagtaatattcaccacattttgctaaatatttattgattagagtgttgaaatcaaattctgctctaaatgtgtgtgaatatgttggagaggctttgtgttcttcactgtgaaatgcaattgtgccttgaataagaaggtacctagaagccaaattaaagtaataatgacttcttattggctttgatttttcattgcagtatatgggattgtacagcaggaaatgcttatcattaatttctgatgttttttaaagcacaactcgaaacatttcgatcatacatacatagcagtagagatctgtgcccttcaggtacattgaatctgaccatcagtttatatatgtcattgaattttaagaatactcatgttaataatagtcatctatccttgcattttgaaactgttctaatcttagtgaacttgaattggatttctgggtaaaagaatgtgtttcttttatgttgcttatgtccgaaggccttgtcagaatctgtcagactcttgtttaggtttagtgtgatcatggcgtcagagaagcaaagctttcaaataaatagtacttcaggaaatagaaatgattgaccaactttaaaaataatttttttttaattgcaatatgcagcttcagttgcccagaatcttagttccgtttctcattcttggtcttgagctggtcaggtgacatcagcagattagaagttgaatggagattaagtggattcaggaggatgttccacttagagcagtcttcaaaatgataaggtgttctagaagaaaggaatgtagtaggaactatactatgcctaactttctatcccagagtgtcttgcaagagtttaggagttttggaccctgtgtattggcagaaaagttatctccatcttaagcaggcatgacttttatacctgtgagctcatttaaggtgcatttaaacctaaaataatttccctgtattatgcttcatgggattaacactgcttttccagaacattttcagattcccctccttacatcctgagctccttctgtatatacatctgttgattttatccatccacaaggaacaatgatagtcacattagagaacaagaaaccagtaatacatggtctctaactgatgattcgggcctggatttgattgaaagtgtttgcagttcctcttccgtagaatacagagtggatgaaaatgttttcaatgcacagaacaggatgaatccttttttctttatttagcgatttacacttttgttactctattatatattcagttagtgtctgata

SEQ ID NO: 30477 - DNA, 1057 bp, Homo sapiens
agaggccgtggggcgggccacggtgacgcgcgcggaagcgctctgcgggccctcggaaaccgccccggcggctgagaggctgcggccactgcctggcaccccgacgggaggggctccggatcgttcggagccggctgaaccccttcggccgcgagcgaccgcatgagtcgggggactatgccccagcccgaagcgtggccaggcgcgagctgcgccgagacgccggcgcgggaggcggcggccacggcgcgggacggcgggaaggcggcggccagcgggcagccgcggcccgagatgcagtgcccggccgagcatgaggaggacatgtaccgtgctgcagatgaaatagaaaaggagaaagaattgcttatacatgaaagaggggcatcagaaccgagattaagcgtagctcctgaaatggatatcatggactactgcaaaaaagaatggagaggaaatacacagaaagcaacgtgtatgaaaatgggctatgaagaggtttctcagaagttcacctccatacggcgagtccgtggtgataattactgtgcactgagggccacgctgttccaggccatgagccaggctgtggggctgccgccctggctgcaggacccggagctcatgctggtacgttaccagaaaaactcataagcaaatacaactggatcaagcaatggaaacttggactgaaatttgatgggaagaatgaggacctggttgataaaattaaagagtcccttactctgctgaggaagaaggtttggaacctgtagtgtcctgtctgataagggtgaagctctcgttcttgcttgccccagaagaccagtttttagtcttcactcagtggattttcaaatgctcttggctgatttttaggcaaaatggttttaaatgaattcaaactcttcccacgagggctttagtaaaatgggaagtaccaacattatatattcttagagcagatgccatgtactagggtatcaaataatgaagtgtttgactttcttaaaaggaaaccttaacaaatatagtctttgttccaagtcaaaaaaat

SEQ ID NO: 30478 - DNA, 582 bp, Homo sapiens
accttggggaagaggaattcaagtttctgtggcttgccttcagggagaatgaggctgagacaggagggcaggataacatcagagaaaaactttgcttctgaggccttcactttgggttttctgagccccaacatctgctagtgttgtaaagagaacaattagggaccaagtgaggggaggaaagcatccatctctgcattctgatgctgggagactatttccttgaaatgcaattgattttgcctctgctaagaggctctgctggctacccatgtactagccagtgtcctgcatgggtgctaggctgaattatttgtaattgtgcttaggtgatttgtaactcaggtatagggtatttaaatagtaggcaccctttttgcaccatgtgttttttttttttatctagttcttgtatactacagataatatttgaactttgtcatctcactgtaaaacttttgttcatttctcattatggtaataaatagctattataaccaacccatttattcaaatatgttatttccctaagtgttattttgacattttgttttggaaaaaataaatcaccatagataataa

SEQ ID NO: 30479 - DNA, 500 bp, Homo sapiens
accttggggaagaggaattcaagtttctgtggcttgccttcagggagaatgaggctgagacaggagggcaggataacatcagagaaaaactttgcttctgaggccttcactttgggttttctgagccccaacatctgctagtgttgtaaagagaacaattagggaccaagtgaggggaggaaagcatccatctctgcattctgatgctgggagactatttccttgaaatgcaattgattttgcctctgctaagaggctctgctggctacccatgtactagccagtgtcctgcatgggtgctaggctgaattatttgtaattgtgcttaggtgatttgtaactcaggtatagggtatttaaatagtaggcaccctttttgcaccatgtgttttttttttttatctagttcttgtatactacagataatatttgaactttgtcatctcactgtaaaacttttgttcatttctcattatggtaataaatagctattataacca

SEQ ID NO: 30480 - DNA, 310 bp, Homo sapiens
aagacccagatgtctgtctccaaggcttatagctactattctacagtactatcagaaaattctttaaaagaaacagtggatttatataaaaggacttttttggaaaatttggccctcctcaaagcagctgtcttcttaggaaaggtgttctaggaatacccatgcctatgtgtagctggcaaagtggtgatgtatgtcatgccctgcagatagcaatcctgcattcagagacaaaacagacagtggactgtagactttttcccgctctttgggtgcttggcataatataactgttgcaaggatatagctc

SEQ ID NO: 30481 - DNA, 180 bp, Homo sapiens
gccatagctaaactgagtccataagcacaagctgattggcctttattcaagatcacaccaagagtccctaaagtaatttaaaacttggcaaatagcacagttactaactggcaataaggaaaacacactcgctgctgtagatctccttagttgccctttatatgatatcaccttttcttc

SEQ ID NO: 30482 - DNA, 353 bp, Homo sapiens
agatcgacaaaagtcatggtgggggtgggagtaatttgatggggacaaaagtgcaataaaaataaagaaaaatcagtagctcggctgagcacggtggctcatgcctgtaatcccagcactgcaggaggccgagttgggtggatcacctgaggtcaggatttcaagacaagcctggcccaggtgtggtggcacgcacctgtagtcccagctactcgagaggctgaggcaggaggatcacctgagcctgggagacagaggttgctgtgagccaaaatcacgccactgcactccaacctggtcgacagagcgagactccatctcaaaaattttttttaagaaaaggaaaaaaaaaa

SEQ ID NO: 30483 - DNA, 472 bp, Homo sapiens
tctaatgaaaaaatcgaatgttaaaaaaccaagaaagtagaagatatttgacattaactttactaatcattgataataatctaataatcataacattattcttaaaacctgaaagaatggattcctgctcccaatgtgtttttaatatcaacttaaactaaaataatttttttacctatttttggaagcttggaaattgagatgtagttgtctaatgttaacctaattaagagagcttggtgtgatttctcatatacagcatctaaatatttaagttttaatgtcttctaaaatattattacattcttcatactatagttttttaacatcctttagaaaacttgtatcagcttcactttcaaaccatgctggcatcgaactcaggtgtagtggtatcagaatgttatgaaataattttttattttcattataaactccatttttacaataaacacttctcaaccaaaaaaaa

SEQ ID NO: 30484 - DNA, 443 bp, Homo sapiens
cccctttccccactcaggagatgtgcattcacttttaaaatagctgctgttatttagtattcatatatgtagaataggctcttaaatgcttctaataacagtatcatagaagttcacattgcctgcctggctgagtatcctaacttacagctaaagagagattgttctctagctctatttggaaataaaggatgtggtgtatgaccagatgttggaagcctcccttcttgtaatatcaaataagtataattataatatatgttaactatttacaatcactaaaatgtttcttggaaagactaggaatgactaaattagtaaactaatagaatgaaaaataaaaatggtcaaatgtatagaagcaaagagaaattgtctgaaataagatattacacattgaaatatttatagtatctattatcaaataaatgcaaatgtcaaat

SEQ ID NO: 30485 - DNA, 449 bp, Homo sapiens
gagcaactcaatcatgacatctttattataccatagatgaatatttgttaaataaaaataggtacagcaagtgtacaataagaccagtagttctccttcagaactctacccatttttcagaggaaggaaacacttttccagaatacaatgctcaagaaatgtaagccagatcccgcttgtatgaggtatcttaagtagtcagactctcaaaaacagaaagcagaataatggtgccaagagctggggcaggcagggggaaggggaaaagaggagttgttcggtgggtatagaacttcagaattacaagatgagaaagttccgggggtctgtttcacaacatgcatggagttaacactgctgtaccatatgcttaaaaatggttaagatggtacattttacctgatgtgttttttaccacaataaaaaaaataagattgaaatggattagg

SEQ ID NO: 30486 - DNA, 703 bp, Homo sapiens
gtcttaatctcctgacctcgtgatctgcccgcctcggcctcccaaagtgctgggattacacgcgtgagccaccgcgcccggcctctgatgagaatttttaaggacaatctggagggagcaaatgctctttaataatcgtcttcttcctccattgcctgggtcagccttgggtcccgtcttttatcctcagcaagaatctttcttctacttctaaattaagagtgatcacatcttaaaggagtgaagcagtgtcaagattacttaaagaaccttggtgtagtgattcagaccgggttttcagagtgagagaaacttggatctcagtaccatttctgccaattgtgggcagtgtaacgttatgcatagcttcctgaaaagccttcagttttctcttctagaaaatgtaaataatactaattaccacattgctttgttaggattcaaagggagatgtaaatcgcttagctactgctactgttctattaacaaaaatgtaatattaccttctcacatcttagctttataatatttactttctcacaccgattagcctcttcaaatttagtgacagtcctactctacttaaatcatgctaggatttttaggaattgctctactcacaatatactgagctgagatgcctgactcattggggaggggtcccctccccactctccccttttaaaattaacccaactctttc

SEQ ID NO: 30487 - DNA, 395 bp, Homo sapiens
gactttggaggttgaaggttaaaagaaaaatgtttaattaagtttcttttctgttttatgttaagttgccctgaaatatccccctgggccactgtatttgttttgacatctgatgtttgaaggagcatgtttttcccccgtagaaaatcttacataatctcaactatatcacctctgtgtgggagagataatttattcttttacttattatatattgtgtacaagttagttcttgaatgcggtcttgactacagtatatattgaatagtttatcatacgggaaatgtaaggaagccatatgtaacgtctagtatcttagatttagtcctggtctttagatgctaactttagggggaaacaaaataaacaaacctctagactaaagatttgttttt

SEQ ID NO: 30488 - DNA, 584 bp, Homo sapiens
gcaccattgcactccatactggatgacagagtgagaccccgtctcaaaaaaacaaaaaggtgggattacaggcgtgagccaccatgcccggcctagtggttagctatacattaacagccatttaccaaggaaggactggaaaagttaatcctgatgtatatcaatcactattggcagcttgatttcgttgtggagattatcaggtgacagtgttcttttttgatctttataattggtggcctagaatctgatctgtcctggttatgaacaccccagggataggatctgtaccgtccagtgtctgctgaatgggctgttttctaaccatgcctccttgcctctggagactcttgttggttggagcagtagttggcactttaatgtttctatgctgcctatgtacctcaggcagcagtcaccagtccataatttctaaacttacatagcagatcttctaatagcaaaccttaaaaagggcaagggagagaggacttaaaaatgaaagaaaaaaaaagatagggagaatgaagattttttttaaagctgttttagatcagggtaagaccaaaaaaaaaaaaaaaaaa

SEQ ID NO: 30489 - DNA, 289 bp, Homo sapiens
atttgacagataaatgtttgcaactattttcttctggcctgtggcttgcttttttattaactgtatttcagagggcagtttttaattttgatgaaatctattttatcaatttttgctgttatgatttctgcctttcttatgctgtttaagaaatctttcagctgggcaggctgggcgcggtggcccacgcctgtaatcccagcgctttgggggaggccaaggcgggcagatcacaaggtcaggaaatcgagaccatcctggctaacacggtgaaaccccatctctacta

SEQ ID NO: 30490 - DNA, 234 bp, Homo sapiens
tgtttttaagattgatatgcttgtaatatttatataggttttagttcaaataaaaatttctttaaactttttgtttctggataataagaaaaaatgagaaaatgacagactccttgtaagatttctctcacaaggtaatttgtatgctaattaaacctatttaatcattttatatgtataaatatttaaaaacaacatgtacatgataataaatatatacaaattttgtcaatt

SEQ ID NO: 30491 - DNA, 669 bp, Homo sapiens
cctgagtttttagatttcagaaagaattatgaggggttagtaattgccatatttcatttaggagaagccacaccgccttggcctcccaaagtgctgggattactggcatgagccaccgctcccagcccattttttttttttataattgaagaacttacctgacacatcattatcacccagagtccatagtttccattagggttcattcttgcacttgtgtattctgtggcttttggccaacatagaatgacagtgatccacctttgcagtgtcatacagaagagtttcactactggaaaaatcctttgtgctccccctccctccctccgcctaagtcctggcaacccctgatctttcttctgtctccagggttttggcttttcagaatgttggaatcacacagcgtatacagtaggtagcaatgttcaggttggctctttcacttagtaatgtttcctctgcatcttttcatggcttgctggttcatttctccatttttagtgctgagtaatattccattgtctggatgtcccatggtgtgtttatccagttaccccgtcagatatttttgtgtgtggctgtggcggtcagtgtgattagtcctgtcatcttgcttggaaacaaaagcctcagtgcacatgcattcttgacttttactgaagaaatgag

SEQ ID NO: 30492 - DNA, 464 bp, Homo sapiens
ttttaggtgtcttctcagccacgtgaactaggtgggactgcaaagcagcaagataggtttgcatgtgcagggcaggtcctgggactttgtagctgtagctcttattcctcttgtttttcatctttctttcacccagagcccagggcagggagaggcctgagaggatcctgtaggtgtcttcattgaggctgcagagcagaagaccaggattcccttccctccttggtcacttagcagtcagagaactttgaccagttcactcagtttctctacacctcggttacctcatttatatcacagacctcagagctccctggcccacttcatagaatggttgtaaaggcaggggcgatcacaccagctctgaggtctgtgcagattcggagcattgcagttcctctagatggccttcggaacaggctgtggagataggtgttggggtcagggcccaggcccttactgtg

SEQ ID NO: 30493 - DNA, 356 bp, Homo sapiens
tagtcttgaactcctgacctcaagtgatccacccatctcggcgtcccaaagtgctgggattacaggcgtgggccactgcgcccggccctatttttagtagagatggggttttaccatgttggccaggctggtcttgaacttttgacctcaggcgatcctcccgcctcagcctcccaaagtgctgggattacaggcgtgagccactgcacctggccaacaccttcattttaaagatccccacttcctttctttcttcctcactagccaattttgatgctaagcttagaaagctgtggtcacatgcttagttagtagcaaaggctcctgatcttcaaatttatcccatctcactttcc

SEQ ID NO: 30494 - DNA, 286 bp, Homo sapiens
tattgtaaggacaccaaaccctaaatgataaggatgttgacatcctgagtagctactttttgtgttctgtcttccatacttacatttatgcagacaagtcttagtatttttaatagttttctcagtttataatggctttaaagctatccagatgatgccagtttatccaaggaaaggacatacccaacctgaattcatacttgggttgctgtctaaaaccccaaccaaagagttaagtcatgagtactctgtccccctgccctctgctaaatgcaacaaaacatca

SEQ ID NO: 30495 - DNA, 418 bp, Homo sapiens
cagaacagccatagcaattcctgggtggtgtggagtggaaggctctggccttaactgctacacattgtctctggtaacaaggccctgcctgaagtatattccggcttctagaggttgcaaggaaatggaccactcatcagttcttgcagcctccttatgatctacagtgggacttcgcaaaggcaggcctagtaggaaaccaaagagaacagcgttggacgaagggaaggattggggctcagaaattatgagggaatggactagaccggatagaaacaaagctcttgggcaggtgtcagtggctcacacctgtaatcccagcactttgtggagggcaagatgggagaatcaattgaggtcagaagttctaggccagcctggccaacatggtgaaaccccatctctactaaaaatacaa

SEQ ID NO: 30496 - DNA, 320 bp, Homo sapiens
atcacatacataaacatctagacagaaaaagaccttagagcttttattcaaaaattttagccatgtgtcaggtacaataatgcaaactcactaatttattaaagagtatctgggctcaaattgtttttctagaccatagaacaagatttccagcacagatggctaaagcttttgactaataattattaaaaagacttttaagatttgttttcatttgtcttttttaaggaaacttttaaagaggcaaactttgatttaatttaaatgtttagatacttctatgcaccaattaaagaatgtatcacctttcttttttggca

SEQ ID NO: 30497 - DNA, 385 bp, Homo sapiens
ttttattttgagacggagttcgctctgtcccccaggctggagtgcagagtgagactccatctttaaaacaaaacaaaaaaaaaatcaacatatcatctgaatagttaaatctccaagacagccagaaactaggctagtttcagaggagaaagagtttttacatccaactcacaaattttgaaccccactgtggtataagattctcatctctgtcctttaacccaccttagaccccaagagccctggcagtgaacaccaggcctgggatgtctctaaggtaatgatggccttccaaaattttgctcttgctctgaagaagtttaccaagattctaaactagccccggcaaacagggaagtgggggtgaggagaagaagacagacgc

SEQ ID NO: 30498 - DNA, 409 bp, Homo sapiens
attacccagccttttatgttctgttccgtaacctgggaagctaacctctatgaactaaccaagattccttgttctctggcttctagatgggttcagccatggaaagcactggcagaagatcaaaggtgagggagacaggttggaatattattcctcccaaatacttctctgttaggccacagcttggaattggctgcactcttccaccaaaagttacatcttttgtcagacagccctactcctgtagttcttactaggttggtaactgcccagggcaccttgttccttcaaccttagggtgggtaacaactttgtaaccgcccaacgggtttcaccttgcccgctgcctaggacaaagctgatttatcaagacgggaattgcaatggatagagacgcagagccagctgt

SEQ ID NO: 30499 - DNA, 211 bp, Homo sapiens
ttttgtgtttcctctttaatgtctttagtcactattttataattttctttgtatagatttttcacatctttggttaaattgattcatagttattttgtgtacttgaagttattgtaaaagaaattagtttcttgatttcttttcagatatttactgctggcatatataaatgctactgatttttgttatgttgattttgtatccgtcgacg

SEQ ID NO: 30500 - DNA, 443 bp, Homo sapiens
gagttattcctaggacatgtccttttcttaggaatttaaactccatggttcaggtgaatctatgactattaatcacacaaccatttaacaaatatttattgattattccatcattcttttgttctctattgtacatgttatagatttttaagttgtctggaagtcaagatgcatatgcaagtatacaaaagggtttatatatttgtagtaagatatgtatatcatatggaatgcctataacatgaagtggaaacaattattttgttatttttttcttctatatttgggagttttttaaacttaatttttatagaaaaactaaaaatcaacccaaggtcataattctgagatctaagtagttaatacctaattgtgattattgattccaagaaataacaggagttgaaaatgtaaagtttaatttctctgattaaatttatatt

SEQ ID NO: 30501 - DNA, 512 bp, Homo sapiens
tggtggctctttccctgctgccaccaagtcatgcagagacggaggctcaggctcagttgcgttcaagattcggcttcacccgtaacccactgccatggccgaggaaggcattgctgctggaggggtaatggacattaatgctgctttacaagagctgttgaagacagccctcatccacgatggcctagcacatggaattcgcaaagctaccaaagccttagacaagcgccaagcccatctttgtgtgcttgcatccaacggtgatgagactgtgtatgtcaagttggtggaagccctttgtgctgagcaccaaatcaacctaattaaggttgatgacaaaagaaactgggggaatgggtaggtctctgtcaaattgacagagaggggaaaccccgtaaagtggttggttgcagttgtatagtagttaaggactatggcaaggagtctcaggccaagcatgtcatcagagagaacttctaatgcaagaaatgaagaaaatatctttggctcac

SEQ ID NO: 30502 - DNA, 477 bp, Homo sapiens
agtcattttgctgatgttggattgtttgctatgtgtaagaaattaggtggttacaaatgtagagaatatttttttctaaaacatgtttagaaaatataaatatttaatgtgtaattctggtttttaagaaatataaattgcaaacttcttagattttgttatagtatatgtattatagcagtttttaacctaatgtaaaaataacctagagattccagtcttggaacctgtgctatacataagaaatgtagctggctaggcacagtggctcacgcctgtaattccagcactttgagaggccaaggcaggcatcacaaggtgaggagttcgagaccagcctaacatggtgaaaccctgtctctactaaaaatacaaaaattagtcgagcgtggtggctcatgcttgtaatcccagctactcgggaggctgaggcaggagaattgcttaaacctgggaggcggtggttgcggtgagcta

SEQ ID NO: 30503 - DNA, 567 bp, Homo sapiens
gatagacaaacaccagttccaagtcctcaggccccagaaacctctcaggacccaatctcatttgttcaactccaagtcaaccatgacccatggaaagctcatgaatccgtggtggccagcaggcaagaaacaatgttgctatatactggtgtttgccatcggtggaaattcatactacggaatgatctcatccgtgtgcatctgctccagctgccctaacaaagtagcacactggggccttaaacaacagagatgcaattcctcacagttccggaggcgggaagtccgagatcacagtgttggcaggtctgattcctcccaaggcctctctccctggactgcagaggctgattcctacctttgtccacacatggtcgtccctttgtgtgtgtctgtgtcctaatctctattcttacaaggacaccagtcacagcagattagggcccaccctgatgacctcattttaatttaatgaacctctttttttttaatcggcatacattacttatttttattaatgtaaaataaaatatattaacattctattcgctacatgtcaaaacacaa

SEQ ID NO: 30504 - DNA, 312 bp, Homo sapiens
gtttactaaaaaagcaaaactggcacatggacgtgtcaattgccttaaactgccggattcaatctgccaatgtcaatcaaaggtctctacattgtacactttctttgagatatcaattttgtttagagaattttctctttgggaaataatgaatgatttgtgattggatttagctacagatgttttctggtagcattttaataataaatacctgtaaataactgaagtagccaacattgtatcacggctataaaaaaaaacctaagataatctgcataatgaaataaaacttcaatgcatattatgttttaa

SEQ ID NO: 30505 - DNA, 673 bp, Homo sapiens
ataacctactcaatctcctcagctgagccctgcacagccgaaaaaaggggttcaggctgcttcatgctgactgatatcgggtgagcctctctatacggaggtgaggataaaaatcaggagcagaacagggcatgaggtgagctgtcctcgtgtgtacaaaacagggcagatatgtgtttgccggtatgtgctggaaggagctaggagggtgcgtttcactgcagaccgtgttaacacagctaaaaagcaaacaaaaactgggcaacatagtgagtatacaaaaaatacaaaaaaatgaactgggtgtgatggctggtgcctgtagacccaggaactcaggaggctgaggtgggaggatcattgcagcccaagaaggcaagtctgcagtgaggtatgattgcgtcactgcagtccagcctgggtgacagagcgagaccttatctcaaaacaagcaaagaaacaaacaaaaaggcgccggcgtctttgaaataacccaaaagcgaagtgggaagagaatacaggcaggaggccgggtgggtgcggtggctcacgtctgtaatctcagcactttgggaggccgacgcgggtggatcacctgaggtcaggagttcgagaccagcctgaccactatggtgaaaccccgtctctactaaaaatacaaaaattagccagg

SEQ ID NO: 30506 - DNA, 568 bp, Homo sapiens
ataacctactcaatctcctcagctgagccctgcacagccgaaaaaaggggttcaggctgcttcatgctgactgatatcgggtgagcctctctatacggaggtgaggataaaaatcaggagcagaacagggcatgaggtgagctgtcctcgtgtgtacaaaacagggcagatatgtgtttgccggtatgtgctggaaggagctaggagggtgcgtttcactgcagaccgtgttaacacagctaaaaagcaaacaaaaactgggcaacatagtgagtatacaaaaaatacaaaaaaatgaactgggtgtgatggctggtgcctgtagacccaggaactcaggaggctgaggtgggaggatcattgcagcccaagaaggcaagtctgcagtgaggtatgattgcgtcactgcagtccagcctgggtgacagagcgagaccttatctcaaaacaagcaaagaaacaaacaaaaaggcgccggcgtctttgaaataacccaaaagcgaagtgggaagagaatacaggcaggattacaggcgtgagccaccacgcctggcctataagatacggt

SEQ ID NO: 30507 - DNA, 1291 bp, Homo sapiens
tgaaaaattttacagttaaaggaacattagtgttgcatttgcaataactaggacaagagccagtcacatgctgatcttttaagtaatgagaatactaagtaaattaacaccataacatagatttaaagaaaaaaagccattagaactaaattaatataataacgtccagttacagcctctggttctgcttaaaatttatcagattctatttacacgtagggaaaaggacataaaatgaatcttagccttgaatatattcatacttaattaacgcatcctaaaaaaccattaacttaaacatcttaaagtgttctataatgttggctttatatgttttaaagtaagaaactttctgccagtggctttctttcttttttttttttttttttaaagagaaagcatcttgttctgttgcccaagctggaatgcaagagcagagtaacagctcactgcagccactgcagccttgatcccctcacttcagcctcccgagcagctacaatcacaagcacgggccaccaaggccggctaacctttatttcttgtagacatggggtcttgctatgttgcccaggctggtctcaaactcccgtcctcaagcaatccacctgattacaggcatgagccactgcaactagcccagtggcttaatttctgcttagaaaaatataatacctatcatacttaataaacagatagcttaaaagcactgttctaataagagaatttaacatacaaaaacagtattcattttggtttatactcttaaaagattaaatattctggttgtatttaaaaataaatttttaaactttcatgaaagaatgtacggccaggcatggtggctcacgcctgtaatcccagcaccttgagaggccaaagtgggtggatcacctgaggtcgggagttcaagaccagcctgaccaacatgaagaaacctcatctctattaaaaatacaaaaaattagctgggactacaggtgcatgccacgacgcccagctgatttttgtgtttttagtagagacggggtttcaccatgttggccaagatggtctcaatctcttgaccttgtgatccacctgccttggccttccaaagtgttggaattacaggcgtgagccaccgcgcctggtctatatgtgatttcaaattaggtggccttataaatataagcagatggtttctgggcaaaatcaaatgatttctgtctctattttcttgagtaccaattgtaaaaactgaaattaggttgaggaaagtgctttagaaataataaagatgtacaaatac

SEQ ID NO: 30508 - DNA, 294 bp, Homo sapiens
gagcttttagtatggctgaaattgaatctcttattcccctttctccaaaattgtacactttccatatgccccttatctcagtgtcaccaatatctacccagacttctaagtcagacatgaaatcatcgtgacatttcccgctccttcattcttacatccaattaatcaccaagtcccagagaatttactgcctgaaaccttcaccatcctgttcacttttttctgtcctacccatattccttagttcttcacatagttattgaaataacttcttgactggtttctctgtttatc

SEQ ID NO: 30509 - DNA, 318 bp, Homo sapiens
taaagtgatgacaccatgttggagatgtctttcgtaagtctggcataacttttttccctcaagcactggaacagatcactgtatctttgcattgaaacaaagcaaagcaatttgcttttatttaagggccatgttacatacaacttactcatctttaaccattagaatcacacttttcattgagaggtatgcggtttgagagctgaaaccaaatgagatgactagagatttacatcttgcatctcatgctctctacaaggctcactgtggcttagtggtggcatgttggtttgcagaatcttttgcactaattgtttt

SEQ ID NO: 30510 - DNA, 288 bp, Homo sapiens
tacagtattttcccccctgttaaacagctattttttacacatctgtttggcccttttgcacgacatgcagtcaggaggtgtaacgaatacaggtttgaaacaacatgtggccaccatttctttcagtttcatcttcaaggggatctcttgaaagttgtgatatcattttcatcacagtacaagtgaagtatgttaatggctagttatctgacactgggtgttgactgatgagtcataaatatgccttctggtggtaggaaagcatgatgacaaagctaagtaatgaaa

SEQ ID NO: 30511 - DNA, 967 bp, Homo sapiens
tgaaacggaaatatgttggggacggaacaactgcttcctttgaatctcttcgggtgctaatcaaatggccgctgtaagggatctccacaaagccacgaagaagccaggcctttccgagactgtaaccgctgtgcagatagcgccgatccctgggtggccgctctctcgttctgcgcgtgcgctcgttctgggctgggagcggatgggtgctgaggcgtgtgacgtctctagtagtgtcgtaactgggtgtgctgccttttccaggtgtactgaggtcttcgtgagattcagggctaggactcgtgtggctgtgtcatgttccgaatgaagcttaaaaggtgatctttgagaactgaagacttgagacccctccatgggcccaggggctgccaacactaataatttcagagacttagaatctgaggagaatctccaatctaaggggaaacggaagagggtcaggaaagagaaggggcaagcttaagtgactcagaatccaagaagcaagtctcataggagagctgcgatcgaggttaccatacagtatccaatcgtctcaaccttcccatccatacttccatgctgtctttcctctgaatgcaaggaaaaccggttacacaaacgctgacaaaagaatgtcagacttgaatggaaattcggagcagtacccatctggtccatacagcgaactcccagtgagcaccacggcaatgtaactaattcatgtttccctcttggcagtgcgggaaaggcagcaaagagccaagttttgtatcttaacagttctttagttaagaggcacacgctattttgcattcttccctacttttgataatttttggctgcactagtaatgcatgagtatctgctcatttaaaaaactcaaactttttcagtgaaaagtatgcccttttcttcagaaagtcttaattaaaaaaaaaaatcattgcccagaccaacattttca

SEQ ID NO: 30512 - DNA, 986 bp, Homo sapiens
taaggcaggcagtctactttccaggggtgagcaagccccagacggtatctcctggatgccagtgagcggctgagagctgaagctccctggacactcaaggctcttgtggtgacagtctgacgtaaaggcgtgcagggaggcctagctctgtctcctggacttagagatttcagacacagaagtctgtccatggctccttgtcacatccgcaaataccaggagagcgaccgccagtgggttgtgggcttgctctcccgggggatggccgagcatgccccagccaccttccggcaattgctgaagctgcctcgaaccctcatactcttacttggggggcccctcgccctactcctggtctctggatcctggcttctagccctcgtgttcagcatcagcctcttccctgccctgtggttccttgccaaaaaaccctggacggagtatgtggacatgacattgtgcacagacatgtctgacattaccaaatcctacctgagtgagcgtggctcctgcttctgggtggctgagtctgaagagaaggtggtgggcatggtaggagctctgcctgttgatgatcccaccttgagggagaagcggttgcagctgtttcatctctttgtggacagtgagcaccgtcgtcaggggatagcaaaagccctggtcaggactgtcctccagtttgcccgggaccagggctacagtgaagttatcctggacaccggcaccatccagctctctgctatggccctctaccagagcatgggcttcaagaagacgggccagtccttcttctgtgtgtgggccaggctagtggctcttcatacagttcatttcatctaccacctcccttcttctaaggtagggagtctgtgatctctttctgtgtgtattggtcagaatagaatccattcagctgtagcagcaagcaatccccaacctttcactgcaatgacctttcaatgcaataaaagcttattgtccattca

SEQ ID NO: 30513 - DNA, 1039 bp, Homo sapiens
taaggcaggcagtctactttccaggggtgagcaagccccagacggtatctcctggatgccagtgagcggctgagagctgaagctccctggacactcaaggctcttgtggtgacagtctgacgtaaaggcgtgcagggaggcctagctctgtctcctggacttagagatttcagacacagaagtctgtccatggctccttgtcacatccgcaaataccaggagagcgaccgccagtgggttgtgggcttgctctcccgggggatggccgagcatgccccagccaccttccggcaattgctgaagctgcctcgaaccctcatactcttacttggggggcccctcgccctactcctggtctctggatcctggcttctagccctcgtgttcagcatcagcctcttccctgccctgtggttccttgccaaaaaaccctggacggagtatgtggacatgacattgtgcacagacatgtctgacattaccaaatcctacctgagtgagcgtggctcctgcttctgggtggctgagtctgaagagaaggtggtgggcatggtaggagctctgcctgttgatgatcccaccttgagggagaagcggttgcagctgtttcatctctttgtggacagtgagcaccgtcgtcaggggatagcaaaagccctggtcaggactgtcctccagtttgcccgggaccagggctacagtgaagttatcctggacaccggcaccatccagctctctgctatggccctctaccagagcatgggcttcaagaagacgggccagtccttcttctgtgtgtgggccaggctagtggctcttcatacagttcatttcatctaccacctcccttcttctaaggtagggagtctgtgatctctttctgtgtgtattggtcagaatagaatccattcagctgtagcagcaagcaatccccaacctttcactgcaatgacctttcaatgcaataaaagcttattgtccattcactccaaatcaacgtaacaccaaaacaaagggagggccaccaaaaatacccgga

SEQ ID NO: 30514 - DNA, 947 bp, Homo sapiens
ccttgagcaggtctccctgttcctgcaaggctgggagccatgcaggcactcacatgattttctctctcttccccagtctgacgtaaaggcgtgcagggaggcctagctctgtctcctggacttagagatttcagacacagaagtctgtccatggctccttgtcacatccgcaaataccaggagagcgaccgccagtgggttgtgggcttgctctcccgggggatggccgagcatgccccagccaccttccggcaattgctgaagctgcctcgaaccctcatactcttacttggggggcccctcgccctactcctggtctctggatcctggcttctagccctcgtgttcagcatcagcctcttccctgccctgtggttccttgccaaaaaaccctggacggagtatgtggacatgacattgtgcacagacatgtctgacattaccaaatcctacctgagtgagcgtggctcctgcttctgggtggctgagtctgaagagaaggtggtgggcatggtaggagctctgcctgttgatgatcccaccttgagggagaagcggttgcagctgtttcatctctttgtggacagtgagcaccgtcgtcaggggatagcaaaagccctggtcaggactgtcctccagtttgcccgggaccagggctacagtgaagttatcctggacaccggcaccatccagctctctgctatggccctctaccagagcatgggcttcaagaagacgggccagtccttcttctgtgtgtgggccaggctagtggctcttcatacagttcatttcatctaccacctcccttcttctaaggtagggagtctgtgatctctttctgtgtgtattggtcagaatagaatccattcagctgtagcagcaagcaatccccaacctttcactgcaatgacctttcaatgcaataaaagcttattgtccattca

SEQ ID NO: 30515 - DNA, 378 bp, Homo sapiens
taaggcaggcagtctactttccaggggtgagcaagccccagacggtatctcctggatgccagtgagcggctgagagctgaagctccctggacactcaaggctcttgtggtgacaggtgaggggactgggtggaaggacagtgctctgagcatgcaccttccttgggatctggaggctgggctgttttttatgcttggctcttatgccacttcagcaacctaaaaacttacaataaagctggagggagcctttcctgaaacttgtgttggacagagaatttttgcgatgtatggtccctggagaaggacaaaagggttgcacgtgtggcctgcctgaggtaggtgccccctcaatgcacggagaagctgagagagccag

SEQ ID NO: 30516 - DNA, 1047 bp, Homo sapiens
taaggcaggcagtctactttccaggggtgagcaagccccagacggtatctcctggatgccagtgagcggctgagagctgaagctccctggacactcaaggctcttgtggtgacagtctgacgtaaaggcgtgcagggaggcctagctctgtctcctggacttagagatttcagacacagaagtctgtccatggctccttgtcacatccgcaaataccaggagagcgaccgccagtgggttgtgggcttgctctcccgggggatggccgagcatgccccagccaccttccggcaattgctgaagctgcctcgaaccctcatactcttacttggggggcccctcgccctactcctggtctctggatcctggcttctagccctcgtgttcagcatcagcctcttccctgccctgtggttccttgccaaaaaaccctggacggagtatgtggacatgacattgtgcacagacatgtctgacattaccaaatcctacctgagtgagcgtggctcctgcttctgggtggctgagtctgaagagaaggtggtgggcatggtaggagctctgcctgttgatgatcccaccttgagggagaagcggttgcagctgtttcatctctttgtggacagtgagcaccgtcgtcaggggatagcaaaagccctggtcaggactgtcctccagtttgcccgggaccagggctacagtgaagttatcctggacaccggcaccatccagctctctgctatggccctctaccagagcatgggcttcaagaagacgggccagtccttcttctgtgtgtgggccaggctagtggctcttcatacagttcatttcatctaccacctcccttcttctaaggtagggagtctgtgatctctttctgtgtgtattggtcagaatagaatccattcagctgtagcagcaagcaatccccaacctttcactgcaatgacctttcaatgcaataaaagcttattgtccattcaaaaaacaaactaaaagaagaaaaaggggggcgtcggggtaacccacgggggcccattggac

SEQ ID NO: 30517 - DNA, 708 bp, Homo sapiens
atgcaagcatgtggggagggtgaagaaaaagacgcaaagatgttgtattcagtccagttgacggcttccagggaatggaaaaaggaaaggaccccatgagccagccaacaggtaccactgccgaaatctctgctggaggatggcctttggaacacgtgcttatgctgtgattggaggccagtggtgtgatgagcaccttttaagagtttgggagcagagggaaaatttctccaaaagccacccaagccaggcttctgacctgaagcccagtatgtgtcaccccctctctgagctcagaactacaaaggctgactggcattctccaacccgcccagctcctttcaaacccacagactgtgccagactggccccacctcccactgcagcaaatgctgtagccccgctccatgctgtgttgtaaggagccagacttccgttttaattgtcctacctggccgtcccctctgccactacccctggctcttggttcctggcatggtttcaaaggcccaatcaatggctttccctcccccatcggaatcttaaacactgctagttctcccttttccaaattttatctctttcaaacttaaatgtttttatgtcttgtactttgtttcatgtctagccaccaccacctcgtttctttggccactctcattctcttgtttgacacttttttttgccatgtcttttctcatattagga

SEQ ID NO: 30518 - DNA, 192 bp, Homo sapiens
catgagccactgcactgggcctaggggtccatttttaattatgaacagataaccaaggtttagcagacacctgaagaaaatagagaccaacaagaagagaccgctacagagaaaccaactatacaaagaaaagaaaacaaaaacaaacaaacaaaaaactacctaatctatcaaaaaaataagatagtacat

SEQ ID NO: 30519 - DNA, 385 bp, Homo sapiens
gtcttgaatgttatttatttgcatatgagtgatatttcagtttgtggctgatacccttttggtattaaatggaagatgacaaatcattcaatattaattttagagggagacatctattgaaacttttgtgcagtcaggtcaagtttctgtgtacaaaaattagcagagaggttgctgctggttgacttcccctaggatggtgtctttctgaacattttgaaatgtagattgaaaaggtggatttgtcaactaactctgaagtgctgtagttagttgtgttttcatcattgttttattatttattttatttttaagatggagttttcgctcttgttgcccaggctggagtgcagttggtgcgatcttggctcactgcaacctctgc

SEQ ID NO: 30520 - DNA, 453 bp, Homo sapiens
tggcatgaaaattttcgattaatggaatctgattcagtcttttaaaacattacttggaggggtattttaaagatctcaagtatccatgctattgctgcccctccactgcatgaacaattgagagcacgtgggaggcagaatgaaaatggcaatattccagttctcttgctcaagttctcatgggtacagatgttcctaattcagtgtgtgggaccaacgtttccccgccccttctataatttcaaacaaaggctttatcccagatgattagagattcatgagttatctacttttctctctcattctataagtcttctattcaacatgtacggctagataaaaaggaagggaaaaatgattcgaatatggattaaaaatacgacaaccatattcttggtcacagctcctatttcgggacagatgcacattccaaaactattaagtaacccccta

SEQ ID NO: 30521 - DNA, 635 bp, Homo sapiens
tttttgtattttagtagagacggggtttcaccatgttgcccaggctggtctccaactcctgagctcaggcaatccgcctgcctcagcttcctgaagtgctaggattacaggcgtgagccatggcgcctggccaacttcattttttatttttttggaaagtgtacgtgacttcatattcatccatttggaagtgtacaattcagtgcattacatgtattcacagtgttatataatcattttctataccaaagtttttcaatatccccaacataaactatccattaaatagtaattcctaatagttccctattcctactccttggtaacctaaattctttctctccctttgaatttgcctgttttattttagataatataagtagtatcatataatatttatctgtttatatctggcttattaacataaagtggagccaattttagcacatttttgtcacttcaaaatgaaaccttcttgcttgataatttaccatgttaaaaaaaaaaaaaaaggaaaccgggcggggcgtggtggctcaggcctgtaatcccaggactttgggaggccgaggtggacagatcacaaggtcaagagattgagaccgtcctggccaacgtggtgaaaccgtctctaa

SEQ ID NO: 30522 - DNA, 983 bp, Homo sapiens
ttttagtagagatgggttttgcaatgttggccaggctggtctcaaactcctgacctcaagtgatctgcctgcctcggcctctcaaattgctggaattacagttgtgagccaccacacctggcttgaatgtagattttaataattgaatttattctgccgtgttgatagaataactgaatatcagtaaattgtgtaacagtggtggatactgttgcataagatgagctcctgaagagtgaagctaattctttggtcaatgttcttttcccctcagtgtctagtttaaggcttttagaagattgatctgtagcaattatttaatgaattgaatatttaaaaaattttttatttgctgtctttggtaattatctctctgcttgaaattaaatgcactataagttaatataacaagtaaaatacattgtcttttgaaaatagtttctttttaaaggaatactaattaattgtaacttgtaaaaccaaaagttctaatggtttttaaaaaccagtgttgagtggaaaagtgtttctttagtttggaaagacctgtgaagtatcctagtcagggaaagaacctgttttctggaagaatgtaagttgctatatgtggaggggcatgtaggacaggggttctaattactgtctgtgagagttactactttgtaacttatggtttctgcttcagtattgtgttggttctgtattataaattgcaccttaatagaccaaaaatatctatacagcactgatttccttgaatattgtgtgttaattgatatatcttctagaggcaaaaggtttaaatgtgttaaaatggttatattgcctcctttttaaacaaattaaagagttgtaaatactagtgtagatctcttttgtttaccacagcaaatactgattttatgattgttaagcatttcatattttaatttaaattggattcaaccacaataaagaaaatgagaaaagctttaaaaaaaaca

SEQ ID NO: 30523 - DNA, 805 bp, Homo sapiens
ttttagtagagatgggttttgcaatgttggccaggctggtctcaaactcctgacctcaagtgatctgcctgcctcggcctctcaaattgctggaattacagttgtgagccaccacacctggcttgaatgtagattttaataattgaatttattctgccgtgttgatagaataactgaatatcagtaaattgtgtaacagtggtggatactgttgcataagatgagctcctgaagagtgaagctaattctttggtcaatgttcttttcccctcagtgtctagtttaaggcttttagaagattgatctgtagcaattatttaatgaattgaatatttaaaaaattttttatttgctgtctttggtaattatctctctgcttgaaattaaatgcactataagttaatataacaagtaaaatacattgtcttttgaaaatagtttctttttaaaggaatactaattaattgtaacttgtaaaaccaaaagttctaatggtttttaaaaaccagtgttgagtggaaaagtgtttctttagtttggaaagacctgtgaagtatcctagtcagggaaagaacctgttttctggaagaatgtaagttgctatatgtggaggggcatgtaggacaggggttctaattactgtctgtgagagttactactttgtaacttatggtttctgcttcagtatagatatgtcggtatagataggtcagtatagataggtcagtatagataagtagtatagataggtcagtatagataagtagtatagataggtcagtatagataggtcagtatagatagg

SEQ ID NO: 30524 - DNA, 139 bp, Homo sapiens
gtaggtaagcaagtccttgttccacacccaacacattctcctcactaaacctgccagtccttttgctgtgcattttcatctttcttttcttttcttttctttttttgacacagggtttcactctgttgctgctggggtg

SEQ ID NO: 30525 - DNA, 329 bp, Homo sapiens
gaaaacaaagaccccatctctacgaaaacatagatagatagatagatagatagatagatagatagatagatagatagatagatagatagagataaagatagatgatggagattagatagttttaaacagacattaatgagtctggaccttggaaaaaacttatgcaactttaggaacataacatcacacagtcatgggaaattttggtgaagaaaaggggagatgaccgttcatccggaattgtttagctaaattcttccccaggaaactcttcagagattatgtgatctttacaaattttttttagctcaaggtaggattgtagaata

SEQ ID NO: 30526 - DNA, 324 bp, Homo sapiens
aaaaaaatcagtaaacttgaagatagaatagaaattacgcaaattgaaccaacagggataaaacctcacccgaaaaatatatatcagtccttatgggacatgtgagactatagcagatcctaatattcatgttgttaaagtcaagaaggaaaagacaaagagggtggggctgaaaaagtattcatagaattaatagccgaaatgttcccaaatttgccaaacaacataaacatacagattcaagctgagaaaaccctaaatgggataaacccaaagaaatccatgccaagatatattacaaactgaaaactgcaggccaaagga

SEQ ID NO: 30527 - DNA, 441 bp, Homo sapiens
ctactactactaaattcgcggctgctcgaccggaatctctggatagtgtcaaccctacccattccaggaaaaagggacctagtcagctagtaaaatctgggcatgatgacctgtcttctctctggtacttggaatgggtatctaaactcactaagcaggcactcataggtgctctcaggtatgtgagatcctatcttcttttggcagtcgggaaattagtagtgctatgtttttgtttttgttttgttttttcactattgtgatttaagctgttaggaaatttgagatcagctagggattctaagtgatgatcatcttacatggagataaataaatgtcccttccatcaggactgcatttgatgggttgaaaattattgggcatcaattacaatgacaaagataatgtatcagtgtatgtgggagctctccctcacatggc

SEQ ID NO: 30528 - DNA, 354 bp, Homo sapiens
gttttatggtactatagtgggtttctggggtatggaacacactcccagttagctctgatattggctggatgagccacactgcatgctgaagtgtggattccccatcgcctttcatgatttttcataagggtttggaaataaggaaaaagtgtggtttattttaccaagtattatgggaaagaacatagacacaaattggcaaaattaatactacacagggaccctaggaagtaccctttgagcctaaagagagttttccaaggtgaggccagttatctgagcagatcagggaatgggaagcattgcagttatttttatttgacccctttttctaatcacatctttcttcgtgag

SEQ ID NO: 30529 - DNA, 669 bp, Homo sapiens
tttttttttgtaaagacagggtctcaccatattgctcaaactggtctcgaactcctggcctcgagtgatcctcccgcctcagcctcccaaagtgctggggttacatgtgagccactgtgtcagccactgtgtctggcctgtccacccatctgatcccttctctctggcctcaggaaaacagcactctggcaaactccttcctcctttcatgactctcccaagcacctccctgagctgtcggtttcatacttggcttcttagtcttagcaataaataggatcaagtttcttctgtcctaaaaaaaaagtcttccttcatccccatctcctcctgaggccacctccttaccccgaccacctgccattgggccacgtcctcaagccctccagggcatcccgctccgttcatcagtgacctccctgagcccagcccgatgacgtcttcccttgtgcctccctgcccatgacctgttgcctggacccacatggctggccaaggcctccctggaatctgcaatctcccgcacggtctcctctgacgtcttggacactgacagtcctctgcttcctgtggtggctgctcttctcctccccagcgtaggcagctctcaaggggtcgtctctcatctcctattacaccctctccccagatgctcactcctgggcttcc

SEQ ID NO: 30530 - DNA, 1969 bp, Homo sapiens
agaaatctcctaaagccagagcctgtgctgtgaggggcttcgggaccttggggcagctcctgagttcagacagagttcaggaagggagacaggggcacagagagacagaggttcatggactgaggcaaaggctgggccaggctcagcaacccaggcctcccgcaggcaggcagaggctgccctgtaacccatggagaccagaccaacagctctgatgagctccacagtggctgcagctgcgcctgcagctggggctgcctccaggaaggagtctccaggcagatggggcctgggggaggatcccacaggcgtgagcccctcgctccagtgccgcgtgtgcggagacagcagcagcgggaagcactatggcatctatgcctgcaacggctgcagcggcttcttcaagaggagcgtacggcggaggctcatctacaggtgccaggtgggggcagggatgtgccccgtggacaaggcccaccgcaaccagtgccaggcctgccggctgaagaagtgcctgcaggcggggatgaaccaggacgccgtgcagaacgagcgccagccgcgaagcacagcccaggtccacctggacagcatggagtccaacactgagtcccggccggagtccctggtggctcccccggccccggcagggcgcagcccacggggccccacacccatgtctgcagccagagccctgggccaccacttcatggccagccttataacagctgaaacctgtgctaagctggagccagaggatgctgatgagaatattgatgtcaccagcaatgaccctgagttcccctcctctccatactcctcttcctccccctgcggcctggacagcatccatgagacctcggctcgcctactcttcatggccgtcaagtgggccaagaacctgcctgtgttctccagcctgcccttccgggatcaggtgatcctgctggaagaggcgtggagtgaactctttctcctcggggccatccagtggtctctgcctctggacagctgtcctctgctggcaccgcccgaggcctctgctgccggtggtgcccagggccggctcacgctggccagcatggagacgcgtgtcctgcaggaaactatctctcggttccgggcattggcggtggaccccacggagtttgcctgcatgaaggccttggtcctcttcaagccagagacgcggggcctgaaggatcctgagcacgtagaggccttgcaggaccagtcccaagtgatgctgagccagcacagcaaggcccaccaccccagccagcccgtgaggtttgggaaattgctcctgctcctcccgtctttgaggtttatcactgcggaacgcatcgagctcctctttttccgcaagaccatagggaatactccaatggagaagctcctttgtgatatgttcaaaaactagtgggggtggaggtgaaatgtttccaagcactctggaaaacaatctactgaaacgaaacatttgcctactctttgccccagcaattcctcgtaggtgtgtgtacccagcagaaatgcccaccgaaagatattgtaagaatattcatagcagctttattcataatagccccaaactgtatattgatggtaggatgaattaacaagttgtggtatattcatataatgaaaaataatttaaaaagaatgaattacggatacatgtggcaacacaggtaaacttcacagacataaaagttgaatgaaagaagccaggccgaagttccatttatgcagagttcaggaacaggcaagactaattgacaataatagaagttggaatagtggttacttctgggtggtgggggattgatacagagggggctcatgggagccctctggtgtaccagaaatgttgattttgatctgggcagtggtttcacaaatgtattcatacgtaataattcattgagctgtgcactttattttgttagacctcaataaaaaagtt

SEQ ID NO: 30531 - DNA, 2102 bp, Homo sapiens
agaaatctcctaaagccagagcctgtgctgtgaggggcttcgggaccttggggcagctcctgagttcagacagagttcaggaagggagacaggggcacagagagacagaggttcatggactgaggcaaaggctgggccaggctcagcaacccaggcctcccgcaggcaggcagaggctgccctgtaacccatggagaccagaccaacagctctgatgagctccacagtggctgcagctgcgcctgcagctggggctgcctccaggaaggagtctccaggcagatggggcctgggggaggatcccacaggcgtgagcccctcgctccagtgccgcgtgtgcggagacagcagcagcgggaagcactatggcatctatgcctgcaacggctgcagcggcttcttcaagaggagcgtacggcggaggctcatctacaggtgccaggtgggggcagggatgtgccccgtggacaaggcccaccgcaaccagtgccaggcctgccggctgaagaagtgcctgcaggcggggatgaaccaggacgccgtgcagaacgagcgccagccgcgaagcacagcccaggtccacctggacagcatggagtccaacactgagtcccggccggagtccctggtggctcccccggccccggcagggcgcagcccacggggccccacacccatgtctgcagccagagccctgggccaccacttcatggccagccttataacagctgaaacctgtgctaagctggagccagaggatgctgatgagaatattgatgtcaccagcaatgaccctgagttcccctcctctccatactcctcttcctccccctgcggcctggacagcatccatgagacctcggctcgcctactcttcatggccgtcaagtgggccaagaacctgcctgtgttctccagcctgcccttccgggatcaggtgatcctgctggaagaggcgtggagtgaactctttctcctcggggccatccagtggtctctgcctctggacagctgtcctctgctggcaccgcccgaggcctctgctgccggtggtgcccagggccggctcacgctggccagcatggagacgcgtgtcctgcaggaaactatctctcggttccgggcattggcggtggaccccacggagtttgcctgcatgaaggccttggtcctcttcaagccagagacgcggggcctgaaggatcctgagcacgtagaggccttgcaggaccagtcccaagtgatgctgagccagcacagcaaggcccaccaccccagccagcccgtgaggtgacctgagcatgcgcccacccactcatctgtccctgacctctaacctttctctgcctctcccacactctcccagagctcactgattagacagcacaagggtctcagttcaacagcatacagccaacatctatggtgtcccaggcacagtgccaggccccgggagtggggaccaagatgtacataagacaaagctactgccttctagagacaaccggcagtgacctcactgaagacaaaaactgccctagccaggtactgagggttgcatgaatctgcaggagacagagatccccttgcatgggaaacataaagcagaattgggagggactttgtggagacagggctggacttgaaaggaagaagaagtctaaaagaaaacatcatttgcaaagggagagaggggcaagcatgatatgttgttagaacaggagcccactttgaaggtataacaggttcctgccagtgagaaatggggagaataagccagaaaagtaccctaggaccagcccgttcaggactttgaatgccagccaaaggccacgtctgacttgggaggcagagggcagctactgcaggtttccgagcagagggtcatacacagggctggacctcacgcagactggcatggccatgggtccagaggatactactgggaaggggatggcagctactgccaccttccagatggttccatggagttctgatctttgggcatggccaggggaagcagaagggagactctaggagttgaaatgggtcagacccggtgtttgggtgaaggtaaggaatgagggaagaggagctctttg

SEQ ID NO: 30532 - DNA, 1984 bp, Homo sapiens
tattgctttaattgcaacaagctgagctaatgtgggaagaatgcagtagagtggcacagaagaatgctaacccgaaactctaagcctgttccctggaatcttccatctggatggaggagagaaagttgacctggagtgaggttcaatgtaaggacaagatctgcacccggagaagctctctctcggagagcacaggcggcctgaggagtcaaaacaggtggcctgtggagtcagcacaggcagcctggaggaggtgaggaactgaagtttggacagattgagtcactttctcagggacacatggctggccggtgatggagaaggcgtgagcccctcgctccagtgccgcgtgtgcggagacagcagcagcgggaagcactatggcatctatgcctgcaacggctgcagcggcttcttcaagaggagcgtacggcggaggctcatctacaggtgccaggtgggggcagggatgtgccccgtggacaaggcccaccgcaaccagtgccaggcctgccggctgaagaagtgcctgcaggcggggatgaaccaggacgccgtgcagaacgagcgccagccgcgaagcacagcccaggtccacctggacagcatggagtccaacactgagtcccggccggagtccctggtggctcccccggccccggcagggcgcagcccacggggccccacacccatgtctgcagccagagccctgggccaccacttcatggccagccttataacagctgaaacctgtgctaagctggagccagaggatgctgatgagaatattgatgtcaccagcaatgaccctgagttcccctcctctccatactcctcttcctccccctgcggcctggacagcatccatgagacctcggctcgcctactcttcatggccgtcaagtgggccaagaacctgcctgtgttctccagcctgcccttccgggatcaggtgatcctgctggaagaggcgtggagtgaactctttctcctcggggccatccagtggtctctgcctctggacagctgtcctctgctggcaccgcccgaggcctctgctgccggtggtgcccagggccggctcacgctggccagcatggagacgcgtgtcctgcaggaaactatctctcggttccgggcattggcggtggaccccacggagtttgcctgcatgaaggccttggtcctcttcaagccagagacgcggggcctgaaggatcctgagcacgtagaggccttgcaggaccagtcccaagtgatgctgagccagcacagcaaggcccaccaccccagccagcccgtgaggtttgggaaattgctcctgctcctcccgtctttgaggtttatcactgcggaacgcatcgagctcctctttttccgcaagaccatagggaatactccaatggagaagctcctttgtgatatgttcaaaaactagtgggggtggaggtgaaatgtttccaagcactctggaaaacaatctactgaaacgaaacatttgcctactctttgccccagcaattcctcgtaggtgtgtgtacccagcagaaatgcccaccgaaagatattgtaagaatattcatagcagctttattcataatagccccaaactgtatattgatggtaggatgaattaacaagttgtggtatattcatataatgaaaaataatttaaaaagaatgaattacggatacatgtggcaacacaggtaaacttcacagacataaaagttgaatgaaagaagccaggccgaagttccatttatgcagagttcaggaacaggcaagactaattgacaataatagaagttggaatagtggttacttctgggtggtgggggattgatacagagggggctcatgggagccctctggtgtaccagaaatgttgattttgatctgggcagtggtttcacaaatgtattcatacgtaataattcattgagctgtgcactttattttgttagacctcaataaaaaagtt

SEQ ID NO: 30533 - DNA, 124 bp, Homo sapiens
aagtgttgggattacaggcatgagccaccatgcccagcccatattgtagtctttggaaggaagtcactctgcacagcccatatttaaggagtggagaattatgatccacctccttgagagcaga

SEQ ID NO: 30534 - DNA, 217 bp, Homo sapiens
aggagaaataaatatttgtttaaaaaaatgcctaaatacaattttgtcaagaatgcataattttttaaaattgtaggcagattaaatttaaagaaataaggccaggcctgatggctcacatttgtaatctcagcactttgggaggccgaagtgggaggactgtttgagcccaggagtttgagaccagcctgggcaacagaacaagaccctgtcttta

SEQ ID NO: 30535 - DNA, 893 bp, Homo sapiens
aattccttcagctcaaaatattcaatatgctggggtgccatattttcaagtagcatgtcctgaaccctgtgatagttataaaaaagaataaaagattgagatgtatatttcttggcagggacagtatgagcaaaaccaagagctggccatgagtgtgggacacttagggagttctttggagagcaaatagtaaattcaatggctgttgagtcagtgaggagaatggattgactcaggagcaaatggtttcactttaattggacagtctatcccacccttccaggactgtttcagtatgaaagaattttattgtcatgtgaagagtgaaaacaaactgaattttcaattaaaatggagagactatatgtcagtatttgcctgccagccagtcccctaacgaaatcactgtcaggatcgattaccagcttcagaccaaggaagagccccagacacagatgatgtttctccaggtggcacgttctaagcatgccccacatcagttctgatttgaacacataaatatcatctccctcttggctccgaaaccctccttcatcactgtgtgccaagcaaggtttgtgagcgtcatgccagtcatcttggcagctctggtgaatggtgctgaatatgaattcctacacttcagagtctctaccctttgatgtagacagcgcatgtttccaagttaatccaaggttgtgcaggagtgcagcccagaaccctaaaatggatggaaactgaaacttcagctgttatctgttgttatacaaaacatggactgctagtccaagtctttacttccatatgtggctagctgaggtgagcgacacagcagagactctctacaagaccgggtaattaaagtaaattcatttttcttttcatgaaaaaaa

SEQ ID NO: 30536 - DNA, 495 bp, Homo sapiens
acccattcactcacccccaaaactgggttcagtacaaaatcaaagtgctgggcctcgtgtttaaaaattaagaatttcaagataatgatggtacaaaccaagtgcagggcccttctgtgcaatgcaggtcacaggcccaggaaggctcattcccatgcacagaatgacacagagcagggtatttataatagctaagtcagggggttagaaggaaggtggggagggaataaggactcttctctagttaaaccgaacacaatttctgggatttactaaggtagctggtagggatgttggtaccctacagcaaagctctctgtatatgggaatttgggagacccccagtttaacagtaggcttcctgtcagcttactctaaagcaaagtctctaggcagttttatgcttcattcttaaacatgaaaaggacaataattaatcaccagatatttgacaatattctttcacatgacaagaaagagcaagctaaaaaaata

SEQ ID NO: 30537 - DNA, 853 bp, Homo sapiens
ctggatacttgctgctctactgctagactctcctcctctacaggagtcaggaatgaattcctggccattgcattaatccctttagacccaagcatgaattagctgacctgtggttatttccccttgccctggctgccaggctgctggcaaagtgaccatttgcccacttacatcctcattatgggaggtagagccctcccgatgcctgtgctgattccctccgtgtaagaaggatgcgtagttgttggtagtcccacgaggcaaatagctacactcctttgcctgggctctctggattcttgcctcttttgtttttaccctctctgtgcttatggctctacccttctccaccttccatttcgctcagtttggtttccttactctctctagaccatgtctttttcatttccatgtacttaccattagtcatgtgtgcctcttacctaaaagtgtgtccgtctttcatttccttcgtaaatttaggcaactatatgagtattcctgggttgttttggattgagtgagccttaagatatgacagctcctagcacacagtaggtactcagaaaatgttagcctctgtgctggactgatttcatattttaccccaagtggttcatgtaactagggggagttttgcttcacactattaaatccactttaaagaattagtattcatgaagcacttagaactgtgcttggcacatagtaagcactatgtgtttgtaaaataaaacttctaccttatttgactttttaaaaattgtaatttatttttatgagaataatgcagctctggttttgttacctatctcaaaaacttacttataaatgggtacagtaataatttata

SEQ ID NO: 30538 - DNA, 390 bp, Homo sapiens
caatcccagccactcaggaggctgaggcaggagaatcacttgaacccggtaggtggaggtttcagtgagccgagatcatgccactgcactacagcctgggtgacagagcgaggttccatttctaaaaaaaaaaggtcggggggaaatccaactgtaaaactgtggaccttgaagatggtaccctatattgaataactcctcaatagacaggtgtttgttaagtaaaggaatacaatgtgtgcgtcccggctttgtacagaaactagaatgttgcagcctctgtttcctgaaagacccatcaagcaaaggggcagtgtgccccatttcccagctcccatcccgattcagccctgctctgcggggagcctgccatgtgctatgttttacttc

SEQ ID NO: 30539 - DNA, 381 bp, Homo sapiens
ctgtttccggcacaggccagctgctgtgaatacagctgccttctgagtgcccgtcggggatgctgatgggctgaaacaattttattttcctgctgtcagggcaggatctgctcgtggctcccccataggcctggggagcaggaccctgcccgcccgctgtgctcccgacacctttggtcatcacgccttggctcggacgtcggtttcagatgtgcagttctggggatggggatgccggggtcggtggaggcagctcagggtggccgggccacgcgattgcagaagggacatgtatccaggctgtagtgaccttcccgtgttcttgagggactgctccccggcaagtcttcatctccagcaagactgaccagaggggccaat

SEQ ID NO: 30540 - DNA, 427 bp, Homo sapiens
cctgggggacagagtgagactctgtctcaaaaaaaaaaaaaaaaagttatatctaatgtgctcagaagttaacaatagagcaaaatttcatcaaggctgtgtgtgagggtattatctagttacagattacagaggcttggctgggcatggtgacttaacacctataatttcagcactttcggaggcccaggcaggaggatcgcttgagcccaggagttcaagaccagcctgggcatcacagcaacaccttgtctctgcaaaaaataaaaataaaaaattaactgggtgtggtggcatgcgcctgtagtctcagctactcaggaggctgaggtgggaggagtgcctgaacccgggagttcaaggcagcagtgacctatgatcgagcccctgcactccagcctgggcaaccaagcgagaccctgtctct

SEQ ID NO: 30541 - DNA, 845 bp, Homo sapiens
tcctccctccctccccatccccaatcctgattcctgtttacaaagaatgttgaaaaacaaggaattatgtataacagttcccagtttgctcaggaaattctcagattataaagagacattacaaatgaacaagtgaagagaagaaccttggtggttccaacatagtatggccattgttttatactcaaaatatagaaagacaacctcagaataagaaaacttttggaatggaataaatcaagtttatcattaaaatgcaaagaaaaaaactctccaaatgttgctgatcttctattttaaactactgttagaccggagaagcggagagcaggggaatccgccaaagagttttggatgaaaattaatcagccctgtctaccgtagtcacaccccactgcccttgagacccaatccttcggaaggagtgtccaagaggtataaagcaaaacgaaaaaacagttcgcaaattccagagttcgttttctctcattaaaaatataaatatcaggctaacacatgttgacacacaataacagggacacagaatccctcctggaagaccgacgggcccacggaccccacgggtgccacggtggtggacgaggttaagtaacttggttcagggtgtctgggcacacctctgcgtgagactctgtctctgctgctcctctcatctctacgccgattcctccccacaatcctcccttttccttgggcccccgacgcctctccgaccaacagtctccccagccccgcagcttctctctttcagacctttacttcttgatcctcactccatagtgagatgtggcctttcagcaaataaattgtgctcagggagactg

SEQ ID NO: 30542 - DNA, 164 bp, Homo sapiens
gcaagggccacaaactaccattgtcctgaagggcacatccctcagaagaaaaaagcctttcaggagaggcttgcattgtgtggacaaggcatgatattctagaccagtgctgtctaatagaattttctacaatgatggaaatgttctatacctgagctgttcaa

SEQ ID NO: 30543 - DNA, 418 bp, Homo sapiens
actatttctcatttctttggtatggctgactgattcctcataattagtttgctccttgtcaaactttctatatcccccatccttagtatgagagcagcatgctggtcctcctcctttcctattggagaaggctgcccattgactctcacatattgctgtttcttttattcatgacttgtcactcacagaccaagcagcaatgacctgtttgctttagcaaataaacaaatggagtaccagcccagcttgcctcctgaccaccctttcatgaagaacattcacatctgagcaaataatcccttaggagaaaagactacttacaaaccaaaaccaaaacaaaacatcattggccatgagatatgattctattctctttcttctgctaattctcagaaacttgggtagtcaccagtataac

SEQ ID NO: 30544 - DNA, 436 bp, Homo sapiens
tgaagaagaaaaagaagcccttttgaatgtgtcaaatttggtattctagtatgaaatcaatgaaggcttgcttaataccattccatgcaactctaatagcatttctagatgtcttgtgaagccactggagactttgaaggtgtctacttgttgccatcgtctcatttgcctgtgtttgtggtcagtgtcttggatgtaagacataccagaatacttctcagtgtggaatcatgaaaacatatagcagctcacgaatgcttctcaaatttctgagtgaaatcagtattgtcaaatagctgactattttcatgacagtgtcatacaaactcacaggaactgagtgtaaaagaagagcgttacaatgcttttccgggcatgctccatcgtctgggggacttctgactagctggattaaagaaatgcaaagtcggataga

SEQ ID NO: 30545 - DNA, 753 bp, Homo sapiens
ggaaaaagcaggaaaagaagggctcaaccgccaatgagagattcatttcagtggccactgaatgcccctcaccaactcccatacttgctggcctaggacttctcgtgtgacagtcactgagctccaggctgtgcccgacccagagaggagcaagcccagccctgccctcaagttcctccagcagctgagaggggagaggaataagcaacgcatcttcagggcacgacttgctgccagggtgggtttaacggtgttactgcagtttttcagggatatggagtgatactaatttgtattccctactccaccctacacatgtcaaatgaggccattttccccaagtcttgatagggtaggaggagtttgggctctttttctatgaaaaatcaatatctccttggagaattattaaaattataaattgaggccaggtgcggtggctcacacccacaatcccaacattttgggaggccgaggcaggaggattgcttgagccctagaatttgggaccagtcctagcaatagagtaagatgccatctctacaaaaattagctggttgtggtggcatacgtctgtagtcccagctatttgggagactgaggcaggagaattgcttgagcccaggaggtcaaggctgcagtgagccatgatcacgccactgtactccagcctggtcaacagagcgagaccttgtctcaaaaataaataaataaataaataaataaataaataaataagattataaatggaga

SEQ ID NO: 30546 - DNA, 523 bp, Homo sapiens
ttctcagtgtaacaaatgtttattcctatgtaattaagggcgtatttcctgtacagaatattcatattacctaattgaaaattatatgatacaaaaatataatactatttttagccaggcatggtggctcatacctgtaatcccaacattttgagaggccacgtttgggagaatcatttgagtccaggagttgaccagcctgggcaacatagtgaggaccttgtccttattaaataaataaataaataaataggttgggcactgtggctcatatctgtcatcccagcattttgggggttgccaatgcagggaggattgcttgagcccaggagtttgagaccagcctgggcagaatagcaagactccatctctacaaataataaaatattaaccaggtgtggtggtgtgcacctggggtcccagccacctgggaggctaaggtgggaggtttgctcgaggctgcagtgaactgtgaatgcaccactgcattccagcctaggccacagaacaggaccttgtctat

SEQ ID NO: 30547 - DNA, 995 bp, Homo sapiens
cacatacttttaaaccgccagatctcacaggaactcattatcacaaggacagcaccaagtcatgagggatctgccctcatgagccaaatacttccctccacgccacacctccaacattgggatcacatttcaacatgagatttggaggggacaaatatccaaaacatatcaataaatattgcattgaatctgtagatcactatgagtagtattgacacatttactatattaactattccaatccatgaacatggaatgtgttttcatttatttatttatatcgtctataatttctttcagcaatgtttgtagattttagtttataggtctttccctttcatggttaattcctacatattttattctttttgatgctagtataaatagaattgttttttaaatttccttttcaattggttcattttcagtgtatagaaatgaaacttatttttgcatgttttatatcctgcatctttgctaaattcatttattagtttttacagagtttttaaaatgtggaatctctaggggtttctatattaagatcatgttctctgcaaacagataattttacttcatcctttccaatttcagtgccttttctttttttttcttgcctaattgctctggctagaacttctgttagtgttgaatggaaatggtgaaagcaggcatgtcttgttcctgatcttagaagaaaggcttttagtctgtaatcattaaatatgatgttaattatgtttttttaatatattgcctttattatgttgaggtagtttccattcctagtttgttgattgttcttattgtaaaagagtgttgaattttttgtcagattctttttctgcagcaaatgagatgatcatgtggtttctgtcctttattcttttaatgtggtgtattacaatgatccatttttatatgttgaatcatgcttgtattccaggaataaatacaactttgtcatagtgcataatcctttaatatgctgctga

SEQ ID NO: 30548 - DNA, 386 bp, Homo sapiens
gctctgatcctaaccaatcttagtgtatgggatatttataaattcaaagaatcttttttttattcttctctcacattacaattcaaaaatgagagatggggctgggtgctgtgactcacgcctataatcccagcactttgggaggctgaggcaggtggatcacaaggtcaggagttcaagaccagcctggccaatatggtaaaaccctggctctactaaaaatacaaaaatcagccaggtatggtggcacgcacctgtagtcccagctacttgggaggctgaggcagaagaattgcttgaacccaggaggtggaggttacagtgagccaagattgtgccactgcactccagcctgggcaacagagcaagactgtctgaaaaaaaaa

SEQ ID NO: 30549 - DNA, 440 bp, Homo sapiens
gctccagaattcaggtccacagggtaggttggatggggatggcgctaagtaagggtttgtgtggctgctgtttcccttttgttggtaaggacttaaattaagcatcactgtgacctgcaggctgactatgacatgaatccctcccggtggatggtgttgccagagtcctgatggtcttggatgagcagtttgcccagggaagagcagggaggtaactgtgactgcagttcacatcttggtgatattttccaacctgtcatcacaaggaagcctatggggcctttccctctcctccttgaaaagctctgcagtttactcccttcagcatgtggcatcttcagtgggatgggcaaggccaccaacctgcaaacatgcatagagggacccatcttcagatgcctctctgggcacagcagggttgctcttatcaaacagaatga

SEQ ID NO: 30550 - DNA, 543 bp, Homo sapiens
aatgagtagaggatgaaagggttattctatatgggatggtcaaggaaggcctctcctgtgaggtgacattggaatgacatcttactggtaaaacagtcagatatgaaacagggaagagtgttgcaggcagaggagtaattgcagaaggtcttggactgttttagcatgctccagggtgggaggaggtcatccaggagggtgtgggtgggaagaagtagttggaaaggaggtcagagggcctggcgtcaactcttccagggctctcagatttcatcctgggtgaaaaaggaagccgtatgtttgtgtatatattgcatgtattcacacacagaagaaacactgaagtgtatacaacagaattttgaaagttgttgttgaagctaggtaaccgtggaagagagtatagataactgtttctcctttcttttctccaccttccaccacattagcagtaacctattctgaatgtgagattataattcctatgtatctcttaatagttttactgtgtttatatttatcattaaaacaatatgcaatatt

SEQ ID NO: 30551 - DNA, 536 bp, Homo sapiens
gattctggctttttgcagccctagcacaatgcctgtccccaagtaagtgctcccagagtgtttgttgacctaaactgttgaaccaaatagtgacaaagaggatggattttaactgagcattagaatgcaccacagaaactcatggattctttgtatttttggtggttaggcccattctaaaggaatgctacaagtaaacaactatagtaagctagtattgacttccttgggcatttcatattgcttgcaataaggtggacagcaaggtagggtagagaattggcggagtaacttcagcatatatacatgtgaaagaagttgagtggcacttcagctgctcctcaccactcttaaaggttttccatgaaatggaggggagaaggaaacttcacttcctgttagtgaaattccatagcaatataagacacgcaagagcaacatagtagtacaaaagtccctacatctcattgattatctttaagtgtttggatttgaagtaagaatatgtgttcttctaccctctgcagaaaaaaaaa

SEQ ID NO: 30552 - DNA, 343 bp, Homo sapiens
taatccatgttctacttcattttccatttgtctgatattgcttttgaaactcattttaccaggccaggcgtggtggctcatgcctataatcccaacactttgggaggccgaggcaggtggatcacctgaggtcaagaccagcctggccaatatggtgaaatcccacctctactaaaaatacaaaaattagccagatgtggtggtgcatgcctataatcccaggtactcaggaggctgaggcaggggaatcacttgaacccaggaggcggaggtcacactgagccgagatcgcgccattgcactccagcctgggcgacacagtgagactccatctcaaaaaaaa

SEQ ID NO: 30553 - DNA, 392 bp, Homo sapiens
  misc_feature (322)..(322): n is a, c, g, or t
  misc_feature (327)..(327): n is a, c, g, or t
  misc_feature (336)..(336): n is a, c, g, or t
  misc_feature (349)..(349): n is a, c, g, or t
  misc_feature (365)..(365): n is a, c, g, or t
  misc_feature (381)..(381): n is a, c, g, or t
gtgtgattatgcatatttgcatctgaattaattttgacttataataataattaaaactttaagatttgtttttggtattattcaagtatgaaccattcactgaagacttattctaaagccagctctatcccaagttaaataacttgataagtataatattttcagtttataggccattgtttaaaattgtgtatataacttcatatgcttatgaagtaaattagaagcattttacatacatttgtttccaattctttttcaccaagtatcttatccccagcccccccatcttcccccacccccagcccttggccacagaccngcagngaacttttngcgtactcttttnaggcctcacctgttangttagtttcctctttntccagtacctt

SEQ ID NO: 30554 - DNA, 402 bp, Homo sapiens
tttttttttttttttttttttttgagacagagtcttactctgtcgctaggctagagtgcaatggcatgatctccctgctcagtgcaactcccaggttcaagcgattctcctgcctcagcctcccaagtagctgggatcacaggcacgtgccaccacacccagctaatttttgtgtttttagtagagacagggttgtaccatgttggtcaggatggtctcgatctcctgacctcgtgatccgcccaccttggcctcccaaagtgctgggatttctggtgtgagccactgcacctggctgcaaaacttactcctaaactaagaatgcttttgtttttaagatattgggacatcagggcatttcctgggtctattaagtcctgagtctgttggagaaacattatt

SEQ ID NO: 30555 - DNA, 527 bp, Homo sapiens
cacgtcccctcccggtctcatctgccgcttgctcaccttggctgtccatgcacccgtagctgtgaccatgggcggtggcgccagctcggacttcaccccgttggagcgggcaggatgtcacactgagctaatgtgagattgttcatgaagctacagatcttagtgctacttgggcttctcacagcacagaggaggattctgaagtgagagataaattggcttcatgtatgagcaagggggaaagtgttttattttactaggaagattttactgaaagaccaatcccgaaacggcccttgcttcggccacagctgctgggatgtcctcgggcctcccctgtttgtctgcatgtcttcttgttgccatcggggcagtggggtccccggaaacagtccaaggccctggggtgggggatttaaattttttggcttccctcagacctcagaccgtgtgggtttttttttctttctttctttcctgttcatgggcatttgattaaaagtttgtgtttaaagaaaaaaaaaaca

SEQ ID NO: 30556 - DNA, 726 bp, Homo sapiens
attattttgctcagaggtttgtggactttgcatactgattctttcctgtttccaagtacatttgcttttaggctatttttattcactttaaaggaattttaataactttctgttgacagcatggacagctggtcttgagaattaaagaaaattcacttgctgactgaggaaggaagtgacatcaatgagcttctaaagtcagcccagcgggggaaattggctggtgagagagtagcctttcattgcactgtatttatcgagcgatgccttgagatgcaaattgctgtatcaatcaaacctgtggtgcctacctccaaccaacccagtgcaaactgaaggaacaatgccctgaaacactgagaataaaaaggatgaggggtgcaggagcccagaggctaagtgaattacggagctcagaatgctctctcaccaagcctatacttcattctctgtcaaacctcagtttctttgtctagaaaatgagttttatggaaactgttggttgaagtcagtctgtttctttgacagatggctaagaggaccaggtactaatatagatagtgtagacatgctatctcagtacgtttgtcccaaagagagctatcaattgctttttatcccctactgagagctatttagaaataggaatttttagctgtcatacttagctactaccttgatcctttgttttaaaaccctgtattcattgtttataactacactgca

SEQ ID NO: 30557 - DNA, 672 bp, Homo sapiens
attattttgctcagaggtttgtggactttgcatactgattctttcctgtttccaagtacatttgcttttaggctatttttattcactttaaaggaattttaataactttctgttgacagcatggacagctggtcttgagaattaaagaaaattcacttgctgactgaggaaggaagtgacatcaatgagcttctaaagtcagcccagcgggggaaattggctggtgagagagtagcctttcattgcactgtatttatcgagcgatgccttgagatgcaaattgctgtatcaatcaaacctgtggtgcctacctccaaccaacccagtgcaaactgaaggaacaatgccctgaaacactgagaataaaaaggatgaggggtgcaggagcccagaggctaagtgaattacggagctcagaatgctctctcaccaagcctatacttcattctctgtcaaacctcagtttctttgtctagaaaatgaaggaccaggtactaatatagatagtgtagacatgctatctcagtacgtttgtcccaaagagagctatcaattgctttttatcccctactgagagctatttagaaataggaatttttagctgtcatacttagctactaccttgatcctttgttttaaaaccctgtattcattgtttataactacactgca

SEQ ID NO: 30558 - DNA, 672 bp, Homo sapiens
attattttgctcagaggtttgtggactttgcatactgattctttcctgtttccaagtacatttgcttttaggctatttttattcactttaaaggaattttaataactttctgttgacagcatggacagctggtcttgagaattaaagaaaattcacttgctgactgaggaaggaagtgacatcaatgagcttctaaagtcagcccagcgggggaaattggctggtgagagagtagcctttcattgcactgtatttatcgagcgatgccttgagatgcaaattgctgtatcaatcaaacctgtggtgcctacctccaaccaacccagtgcaaactgaaggaacaatgccctgaaacactgagaatatgctctctcaccaagcctatacttcattctctgtcaaacctcagtttctttgtctagaaaatgagttttatggaaactgttggttgaagtcagtctgtttctttgacagatggctaagaggaccaggtactaatatagatagtgtagacatgctatctcagtacgtttgtcccaaagagagctatcaattgctttttatcccctactgagagctatttagaaataggaatttttagctgtcatacttagctactaccttgatcctttgttttaaaaccctgtattcattgtttataactacactgca

SEQ ID NO: 30559 - DNA, 396 bp, Homo sapiens
  misc_feature (112)..(112): n is a, c, g, or t
  misc_feature (163)..(163): n is a, c, g, or t
atggagatgggcaaatggattcatttagagctgcggaacaggacgccctccgatgtgaaagaacttttcctggacaacagtcagtcaaatgaaggcaaattggaaggcctcncagatgaatttgaagaactggaattattaaatacaatcaacataggcctcncctcaattgcaaacttgccaaagttaaacaaacttaagaagcttgaactaagcagtaacagagcctcagtgggcctagaagtattggcagaaaagtgtccaaacctcatacatctaaatttaagtggcaacaaaattaaagacctcagcacaatagagcccctgaaaaagttagaaaacctcgagagcttagaccttttcacttgcgaggtaaccaacctgaacaactactga

SEQ ID NO: 30560 - DNA, 326 bp, Homo sapiens
gcctggattttccaccactgcccaaagaaaatgaggcttgcctcatagtgtgtgaagccacatgtcaagtactaatgagacaccccttctctctctgatctagagtatgttagcacaggcttagtgggagcctaaactcctacctcctccaagtagtaactgaccctcctaccctgtgtcaccggagactgagtagggaaacctgggacttttaggccccatcttgacatcaatgaagtgactaccccatactcttcacccactggtagatagtcaggaggaggcctgctaaaaatgctagatttaaatatgatccagaatataat

SEQ ID NO: 30561 - DNA, 1024 bp, Homo sapiens
aaataaccgcaggatgggctcagggacctgctaggcccactgagacagacctgagctaaaactccattgatcacttgacttcataagcccctactctgactgctggaccacagcgaagtttgggtcccctagaattagtgttagttcagaagccagtgtctagtaatccccaaaaaatcattgtttccccttctgcaaggcaaatagccataggtcctttggggaagggtaggagaaagataaacaggaaagtctcctcaagaggacacagcttccctttcattaaggagattctgggtctgtaaactagctcatttctgggaattgcttaaggggccatgactctcttcaggtgattcaagttatacttctgtttaccagacctagaattcttctgcttatacagatcaagtaagagttagtagactgcccatctatttcttttttagggacaccatgatcaaccacccaatgctataggtctcagcaagtcagactattctgattactgctttggctccactatttattatggtaactatgcccaccttggatttggcatggtgctgctacttggggccctgccaaccccgggattcctttatccccattgcatttagggatcccagttgatggtagcagttcccactgtaatttctgacctacaaagagaagcaaccacagagcaaagatgctgggcctcacctcacaaattgatttctcacagtggtggtgaagggtgcgtcctcctaacccttcccagggtgacctgtcagttctttgctccttttttcttcttcctgctttcttttggattaataattttttattggccgagccaccgcacctggccggttttcaattgataatattttcctgtggtgtcagaaccttaaaagagtatgcatttattttgtatactccccatttttgctattgttgttatacattttactgctacatacattataaattcttgtatatattggtatatttgttttagataattatctcttaaggagaa

SEQ ID NO: 30562 - DNA, 1075 bp, Homo sapiens
aaataaccgcaggatgggctcagggacctgctaggcccactgagacagacctgagctaaaactccattgatcacttgacttcataagcccctactctgactgctggaccacagcgaagtttgggtcccctagaattagtgttagttcagaagccagtgtctagtaatccccaaaaaatcattgtttccccttctgcaaggcaaatagccataggtcctttggggaagggtaggagaaagataaacaggaaagtctcctcaagaggacacagcttccctttcattaaggagattctgggtctgtaaactagctcatttctgggaattgcttaaggggccatgactctcttcaggtgattcaagttatacttctgtttaccagacctagaattcttctgcttatacagatcaagtaagagttagtagactgcccatctatttcttttttagggacaccatgatcaaccacccaatgctataggtctcagcaagtcagactattctgattactgctttggctccactatttattatggtaactatgcccaccttggatttggcatggtgctgctacttggggccctgccaaccccgggattcctttatccccattgcatttagggatcccagttgatggtagcagttcccactgtaatttctgacctacaaagagaagcaaccacagagcaaagatgctgggcctcacctcacaaattgatttctcacagtggtggtgaagggtgcgtcctcctaacccttcccagggtgacctgtcagttctttgctccttttttcttcttcctgctttcttttggattaataattttttattggccgaggcacagtggctcacgcctgtaatccccaaagtgctggattacaggtgtgagccaccgcacctggccggttttcaattgataatattttcctgtggtgtcagaaccttaaaagagtatgcatttattttgtatactccccatttttgctattgttgttatacattttactgctacatacattataaattcttgtatatattggtatatttgttttagataattatctcttaaggagaa

SEQ ID NO: 30563 - DNA, 313 bp, Homo sapiens
gacttacagcactttggtctacagtgtcttcagggtcacttgggtgaaagaggcattatgggtccagaggtgtttggctcttcttttctggaggctactgctagagttgtgggtgtcctatagtcattgattgctaagagtgtatcacttaaatgaatgtgcagtcagcaagacctgaggagtttactgcatgaggaagccaattgaatggccttttcccaagtcatgttttgtgagctgtaaatctagagcagtgaggagggggcttgaacccaggaggttgcagtgaggccagatcacgccattgcactca

SEQ ID NO: 30564 - DNA, 640 bp, Homo sapiens
aaccacatcagcttagaatttagagtcctatttaagcaaagagtttagaataactccctcaattcttgattaaatctatattgatcataactaagttaataataagtaacagtttctttgtgtggtggtgagaagatgcatctgtgatgctgaatttggaatatcatgggatatgtagctaacactgtctaataggcaattggttatatatctcatgctcagcagagaggtctggcctggagtagagctctggtgtcatcagtagagagactgatatatagcagcagaggagtctgtctaaagaaggtgtgttgggggccttgtccattctttcccacttaaaagtgcagtttttcggatgtggtggctcatgtctataattctaccactttgggaggccgaagtgggaggattgcttgagactgggagttcaagaccagcatgagcaacatagggagaccctgtctctacaaaaaattaaaaaattagctaggtgtcatggtatgtgcctgtagtcccagcttcttgggaggctgagctgggaggattgcttgagcaaaggagtttgaggttatagtgagctatgattgtgccactatactctggcctgggagtcaaagtgagactctgtcttttaaaa

SEQ ID NO: 30565 - DNA, 587 bp, Homo sapiens
aaccacatcagcttagaatttagagtcctatttaagcaaagagtttagaataactccctcaattcttgattaaatctatattgatcataactaagttaataataagtaacagtttctttgtgtggtggtgagaagatgcatctgtgatgctgaatttggaatatcatgggatatgtagctaacactgtctaataggcaattggttatatatctcatgctcagcagagaggtctggcctggagtagagctctggtgtcatcagtagagagactgatatatagcagcagaggagtctgtctaaagaaggtgtgttgggggccttgtccattctttcccacttaaaagccgaagtgggaggattgcttgagactgggagttcaagaccagcatgagcaacatagggagaccctgtctctacaaaaaattaaaaaattagctaggtgtcatggtatgtgcctgtagtcccagcttcttgggaggctgagctgggaggattgcttgagcaaaggagtttgaggttatagtgagctatgattgtgccactatactctggcctgggagtcaaagtgagactctgtcttttaaaa

SEQ ID NO: 30566 - DNA, 1219 bp, Homo sapiens
atcacactgagagatttttaacatatcagtggggaaatggggttcttgaacctctggaaaacttgaagctgagattgttcaggggtccatgagtctgatgttggtaaacattcctcatgtacaagccaaagattatttgtataaattttggaatggtgatgtgaaccttaggtatgaaaaggcagtaacatataacaagaaaataattttctagatctggggcaacagtgtgcaaataatgtccccagtagagaagcaaatccttttcatggactctagggcttgctactctgagatacaatgcctctaatttcatgctatgtggctgctttgtctttgatcagatttagtgtcttaggtaattaaatcagaaagtctatttagctattctagaagtgtatgtgtaggtattgggtgggtggggttctttgagcgaacttgtcagaaactccattcttaacatcagaatcagggcaggattgaaaacattgtggctggatcttgaaattgctataacatctattgcagaaaatgataggtcagatggatagcaataataattatatatcagatcttagtaacaaaattaccaagctttatctagtggatatatgtaaaagaatatttttaaatgtccagcattgatgtattttctttaagaattattacagtatataagcattctttgggaatacagtataaaaacataaattttttcttatttttaattttttttatttttttgttcaaggatgaatcttccctttaaatattaattttctcttaatttcgtgtttccttgcacataatagcactgcccctaacttcagagatgctgattgcagttaaaaaatcaaaaagaaatgatgtgaatcagaaaataccatgttgtattgaaagcaaatcaaatagtgtaaacaccatcaccagaactctgtgcgaacaagctcccaagaggagggcagcttgtaacttacaaaggctgttagagaactcagagcatcagagcataaagcatgtgggatccaaagagacacatttggaattccagtttggggatggtagttgcaagcacctaaacagtttgccaaggaatgtttctcctgagtttgttccttgtgaaggtgaaggaggctttggtttgcacaagaagaaagacctactcagtgataatggttctgaatcacttccgcattcagctgcatacccctttcttgga

SEQ ID NO: 30567 - DNA, 330 bp, Homo sapiens
aggtggaggaaaagggcaggactcagttatgcgactgaagtctaatggaccattatataacatagttttgagcaagagtgacatgtcacactaactgaggttcaagggagctactctgggagacacaagtggacagaaggttagttaggagactatgtcaatacatagagcttaacctgatatcctcaaaatgctttcaccctttaggttttacagggagggtggaaggtaggaaactactttttaaatttcattatatctaaacaaatacacgtaaagtcatgtatacacgctgtaacacacattcctctcagtgactttgttagtcag

SEQ ID NO: 30568 - DNA, 330 bp, Homo sapiens
tgtgcttcctggaaagttgacatggggatagggagctttcctggaagttggggctaagtatgggagtagggtgcaggctcaaggataacattttttgggtgtttggggtaaagataggatagttgtgagccaagcagagaggaggcagagctgggggcaggggtgggcccaagagggtgcccgggaagtggagtttagagaagctgcctgtgtgcagggagggggctgttgaggatgccccaccacttccaatgtcatctcataatgtgattggcaaacgtgaggttacatttcacaatgtgtttctttaatgatctataagccagttat

SEQ ID NO: 30569 - DNA, 644 bp, Homo sapiens
cttactttcaggcaagcaggggtgtttttctatgatgtgtctttctcttaaaagcacctctgattaagtttagcacagtcaggacaatctccattttgataaacacaaagtcaacacatgagtaacctaatttcttgagtgattttcccaccagttgcacatttttttacactcaaggaaaaagtattacacagcaggtgtgcaacagactgggaatccagcgtattatcttagaatgttacctacccacttgaataaaattttaaaatagtctttctgctgttttgttatctacgtaaacaaagacattatgtgcaaataataattaactactttccagttttattcattacaaatattagctaacatctttttttctggcttaaattattttgtccttatgtaccaatttatacattcgcacacacatagaacaacaaaaatatacccaattatatacttttggttacattttcattaaaataagtgttataaataatttgtttgtttgaagagggcttttattgttgtactcaagagtgttatttatggagacaaaattgcctgtgcttcaataggcagattctggaaagaatttgaaacataagctataaaattttacattaataaattcaatacaaagc

SEQ ID NO: 30570 - DNA, 409 bp, Homo sapiens
aaaaccacacactaatatccctcataaatatagatgcaaaaatccaaatagaatgcaacattgtatgaaaataattggatgctgtgaccactcaaggctggtcagagtttggaaatcaattaatgtggccgggtacgttggcttatgcttgtaatcctagcactttgggatgctgacgcagatggattacctgatgtcaggagtttgagaccagcctggccaacgtggtaaaaccctgtctactaaaaatactaaataagctgggcgtggtggaatgcgcctgtaatcccagctcctctgaaggctgaggcaggagaatcgcttagaacctggaacgcagaggttgcagtgagctgagattgcaccattgcacttcagcctgggtgatagagcaagattctgtctcaaa

SEQ ID NO: 30571 - DNA, 473 bp, Homo sapiens
tgaagacacttgctctcttatctcctagcctgagtgctccctcctctgtgacaatctgtctcttccttgagggctgcatggaacagggatgttaataaagagaagaatgggtgtgtagtaagtttcctacaatgaaaccctctggttttacatgctccagtgacttcctgctgatcataaggtaaagttcagaactcttaatttggcttgactccttgccctgtgctccgctgtctatgccttggtcctgctggccttcctgtttgcccctgagttacactcacatccactcctgagcctcaagcctgtgattctctctgcactgacacttgctctcccccatcccaccctgtaccaggtttgcttttatttctccatctgcatcagctaaaagtcacttcctcagggagtcctccctgaccatcctggctctcaggccttggaatgagccccacagcttcctttcctcatgg

SEQ ID NO: 30572 - DNA, 442 bp, Homo sapiens
gtgagccaccgggcccagcctgctttatatctttgatatgatttttctgtgtgtaaataaatgtatacagttttacaaatatggggccgtttactatatgtagttatgatgctttttttttttttttgagacagaggagtctctctctgttgcccaggctggagtgcagtggcgtgatctcggctcaccgcaacctctacctcacgggttcaagtgattctcctgcctcagtctcccaagtagctgggactacaggcgcatgccacaattgtctagctaatttttttgtatttttagtagagatggggtttcactatgttggccaggctggactcgaactcctgaccgcgtgatctgcccgccttggcctcccaaagtgctgggattacaggcgtgagcctccgtgtccagactatgatgcatttttaataatacaaatata

SEQ ID NO: 30573 - DNA, 1098 bp, Homo sapiens
atggccagtacagagtcctccctgttgagatccctaggcctcagcccaggtcctggcagcagtgaggtggagctggactgttggtttgatgaggatttcaagttcatcctgctgcctgtgagctatgcagttgtctttgtgctgggcttgggccttaacgccccaaccctatggctcttcatcttccgcctccgaccctgggatgcaacggccacctacatgttccacctggcattgtcagacaccttgtatgtgctgtcgctgcccaccctcatctactattatgcagcccacaaccactggccctttggcactgagatctgcaagttcgtccgctttcttttctattggaacctctactgcagtgtccttttcctcacctgcatcagcgtgcaccgctacctgggcatctgccacccacttcgggcactacgctggggccgccctcgcctcgcaggccttctctgcctggcagtttggttggtcgtagccggctgcctcgtgcccaacctgttctttgtcacaaccagcaacaaagggaccaccgtcctgtgccatgacaccactcggcctgaagagtttgaccactatgtgcacttcagctcggcggtcatggggctgctctttggcgtgccctgcctggtcactcttgtttgctatggactcatggctcgtcgcctgtatcagcccttgccaggctctgcacagtcgtcttctcgcctccgctctctccgcaccatagctgtggtgctgactgtctttgctgtctgcttcgtgcctttccacatcacccgcaccatttactacctggccaggctgttggaagctgactgccgagtactgaacattgtcaacgtggtctataaagtgactcggcccctggccagtgccaacagctgcctggatcctgtgctctacttgctcactggggacaaatatcgacgtcagctccgtcagctctgtggtggtggcaagccccagccccgcacggctgcctcttccctggcactagtgtccctgcctgaggatagcagctgcaggtgggcggccaccccccaggacagtagctgctctactcctagggcagatagattgtaa

SEQ ID NO: 30574 - DNA, 266 bp, Homo sapiens
aaagtttttgtttctgaaattgctctaaaaatgtagcttttgactttttttgaggtgaaattcacataacataaaattaactattttaaagtgaacaattcagtggcacttagtgtcttcacagtgatgcgtaaccgccacctctatctagttccaaacattttcactactccaaaagaaaatcctgtacccattaggcagctgcttcctatttctccctctccccagccctgtactttgattttattttgagatggagtatcact

SEQ ID NO: 30575 - DNA, 334 bp, Homo sapiens
tggctgctctggtttcagaatccagaggatcagtcacaggcctaagcgcctgtccctggtccctccacggtctctcctgctggggacacgacgggctgtgaagagggtaaaaataatacacgcactgtactttaggcactaactgtcagcatgtggtataaagttagacgttaagagaaattcctgtgctcctagctgcttcatcatacagtgatgaaagcagaaagcacaaacacagggtcaaagtggagaccggaatcacaggtgtgcatcccaacccaccatgactggcaaaccagcagtgggttcaagggcactgctggcctcttcctct

SEQ ID NO: 30576 - DNA, 222 bp, Homo sapiens
atatcttttggccatttgtgtgtcttctttggagagatgtctattcatgccctttgaccacttttttaatagaattactttgttgttgtttttgtcattgtttttactatggtgttgagttccttatatattttgaatattaaacccttatcagatacctagtttgcaaatgtttttctcattccgtaggttgcctttttattttgtgtttcctttgctatg

SEQ ID NO: 30577 - DNA, 212 bp, Homo sapiens
agagccgcggcaggagaggtagaggtacaatctcccgggccccgtctggcgtctgcttcaagtgaggcaactcaggacactgggccagccggtgccctagccaacagcaaccgtcctgcccgccttgcaactgtttcaagtgtggcaatccaggtcattgggcaaaacagtgcccaaaccccaagccgccaacacacccgtgccctaactgc

SEQ ID NO: 30578 - DNA, 873 bp, Homo sapiens
ctttctagggaactctgttaggtgtttagagagatactaaaaataatagtaattagcaaaaagggtgcttactgtatgctaggcactatgtactttacacgtattaattcttttaatattcataacaaccttaagaagtggttattgttattccaagatgaggaaatagaaacaaaggttcaataacttgcctaaagtcaaataggtagtaactggggaaactggaattccaaccgaggcagtctggctccatatccaacctcttaaaacacttcactttgctgctctaatttctgcctatccaggaacttaatctagttgctaaaaacaaatgttgttagctatctcttacattaggcactaagctccactgggcattggccctgcttgtctcctttgccaccataggggtttttttgttttgttttgtttgagacagagttttcctcttattgctcaggctggagtgcaatggcgcaatcttggctcactgcaacctctgcactcccaggttcaagtgattctcctgccttggccccccaaatagcttggattacaggcatgagccactatgacccggctaattttgtatttttagtagagtagtttctacatgttggtcaggccggtctcgaactcccgacctcaggtgatttcgcccacctcagcctcccaaaatggtgggattacaagtgtgagcctccgcgccccagccaggggtttttaattctactaaccagatatctattagtgcccagcatggttgtctggcatacactatgaagaaagaaaccaaaggaatgcaaggaggtaggaaggataaggaagaagaaagaaggaaggatttccacatataagacagtatatagttag

SEQ ID NO: 30579 - DNA, 286 bp, Homo sapiens
cccaggcatcaggactcagagtgaacccgaacaagaaagcaaagggcccaaagggccgcctgcctcccggtggctctccccagtggggacaggtgtcaccatgatttgcaagtgacacagcccagctcaagctcacagcccaaactcttggtggaaggaagtaaggtggagcagagagaaaatgacgatcacaacaataaccagccctcccaattatcattattatttttttgagacagagtctcactctgttgcccaggctggagtgcagtggcgcaatctcagc

SEQ ID NO: 30580 - DNA, 317 bp, Homo sapiens
tgtgccacacacatcacatgcatccaagtagacggaagccaagggactgctttcctcctctgtggcttagtgcactttcagaaaggtgctagcaaacaggcatgatatcacaatagttacatctactttctaatggcaaaaatgaagtagtgatttactagatcctgtattgagaacatctgtgtcttagatgaatagttgtcttacgactcttttcttcatcctataaaatacttctaggctgggcatagtggcttatgcctgtaatcccaacactttgggaggctgaggtgggaggatcacttgatgccaggagt

SEQ ID NO: 30581 - DNA, 301 bp, Homo sapiens
taccactagagtttgtgttataattattttaagagtgttaaatgcttttggaatttcaagattttgcaattgtagtttaagagatccctgggatataagtgctattatgctgaagcatgaatgtgcatcacagctgctttgaaatcaggttatcttcatcagtatttagcttgtgagtgaacttgggtgcctattcatcatcaaaacacttcagtttggttttgtcttcccatatgctcatgaaatttgggaaggattactaaaagttcttagttagaatttacttcatttaaaattttat

SEQ ID NO: 30582 - DNA, 619 bp, Homo sapiens
acagacagaaaaagaagaagcagatatgcgattaaaaatgaaaataacataacaacacggattattgtgatagatcctgtacctttttaaagactctgacattccacttaggagtaagatggaaaagtcccttgttctaaaatttgaaaatgataaaaataagtcatattaatggaaattaaagaaagaatatgtccattgttaggttatgtaaagggtacacatctcacttctttcacatcgttttttgatttaaattaatgtaactaaattttaaaatgacggatttaatattcatgctagcagtttatttttaatgtgaataaaattaacagtaaaactatcataaaagatagatggggccgggcacggtggctcacacctgtaatacccagcactttgggaggccacagcaggcgaatcacctgaggtcaggagttcgagaccagcctgggcaacagggtgaaaccccatctctactaaaaatacaaaaataagctggacatggtcgtgggcacctgtaaacccagctactcaggaggctgagacaggagaatcacttgaacttgggaggtggaggttgcagcgagccaagatcacgccattgcaccccagcctg

SEQ ID NO: 30583 - DNA, 328 bp, Homo sapiens
tcaccagagaaacgtaaataaaaataatatactggccagacacagtggctcacaccccaaacactttgggaggctgaggctcatggatcacttgaggccaggagttcaagaccagcccggacaacatggcaaaaccccactcctactaaaaatacaaaagttagcttggcatggtggcaggcggctgtagtcctagctactcaggaggctgaggtgagaggatcacttgagtccgggaggtggaggttgcagtgagctgagattgtaccactgcaacactctgggcaacagagcaacactccatctcaaaaacaaatataaaataaaa

SEQ ID NO: 30584 - DNA, 397 bp, Homo sapiens
atgcacactgtgacttcacattttctcttggagatgagtgtactaaattaaacttctaaggaggtgatagtcaaggagctcagagccccctcttctgttatagagccttctctcacacctgcttgttaattcttattgtgtccttttctcagaagtctgtacttgaattttaagaaactggacttctctactagatctcaggccagacgagttgtgcttggctagttctggtggtgttaagaactaatggaggcattgtttttcactctgaaagtgatctgaactagagattccaattaaaaattcttctagaaacatggtagtatagtaaaataaatgcaaagacccagatctagatgaagatggtaaagtagcaaaatgaaatttaaaaaaagaa

SEQ ID NO: 30585 - DNA, 402 bp, Homo sapiens
tcaaaaaaaaaaaaaaaggtatatccctgccccataaaatgcatacaacaaatgctcactacacagctttatggattaagagtcaggaagtcttttctttttactgaaattaacttttaaaagtgtcaataggccgggtgaggtggctcactcctgtaagcccagcactttgggaggccaaggcgggcggatcacaaggtcaggagtttgagaccagcctgtccaatatgttgaaaccccgtctctactaaaaatacaaaaattagccgggcatggtggcaggcacctgtagtcccagctagaagcaggagaattgcttgaacccgtgaggcagaggttgcagtgagccaagattgtgccactgcactccagcctgggagacaaagcaagactccatctcaa

SEQ ID NO: 30586 - DNA, 289 bp, Homo sapiens
gtcacagctggcttggctctgagcccgctcgactccaccccctgcactgaagcctcttctgggcatgcagggacacccccaaatttgcctgcagggcatgcgctctgggcaggtctctggcccacagcagtagcctctgattccttccttccttctttccctccctccctccctccctccctccttccctcccttccttccttcccttcttccttctttgcttccttccttccttctttccttccttccttccttttttttcttttctttcttttgctttcttttttgg

SEQ ID NO: 30587 - DNA, 618 bp, Homo sapiens
aagattctctctttttttttttaagattatataagcatttcagtatctatttaactccttacatgattagtttggttcttgccagtcttggattttagtttaggttagatcattctaggtttttgaaaagaccactaaatttgcaggttctgtggtagctggggtcactatttagagtaggccactgcatagaagattcaaagattcatctatattcccaaaaagtcttagaataaggatgacacagctagttagacttcctggggaatatttttgatcacaatagattggtctgaagttcaggtgttcgttaagaaccatactagcctcaagaatatagtgaatagggccggacatggtggttcgcacctgtaatcccagcactttgggaggccgaggcgggtggatcacctgaggtcaggagttcgagaccagcttggccaacatagtgaaaccccgtctctatttaaaatacaaaaattagctgggtgtggtaatgggtgtctataatcctagctactcaggaggctgaggcaggagaatcgcttgaacccagcaggtggaggttgcagtgagccgagatcgcgccactgcactttgactgggtgacacagagaa

SEQ ID NO: 30588 - DNA, 407 bp, Homo sapiens
aggctctaatcaactaagcagctaataaactcctgcctcatttcatccagccagagccctgatctcaggggatgatagtgaggaaacgatcctttcacatgcctggctcctgcaaaattgtgctaagaggattttcctcaaacattttagcacaaagcgagttttcctaatccagttagcaaatattcttctatttgaactcattgaccctccttcttctgaagatgtattttaaattggatttgcttcactgacacaaatggaaaacttgataagaaaatcggtggggttttgctgcacccactgctgatatcaaaagactcaactctgtattacagcaatgaaagctctgttctgtagctacaggatacaagctgagctcccagccaccagccctgccaatgtgc

SEQ ID NO: 30589 - DNA, 512 bp, Homo sapiens
atattatatttgcataggaatatccatattacacattatattgcagagttttacagtttaaaaagtgctttaaaatgtccctcctttaattctcacaaccccaggggttacgtatcaccttcatcttacagagaggaaacctttgtttccaaggagttgagcggcatgtgtaaaattgcagggccagtgaaggagctcagcctgaacttgggcccagggagcagtcaggacttggagaaggttctctctctcaccctgcaacccaaacaacgagcaggggggaggcatcacataggggaggagatgcaggaagaaaaggaaagctcaggccacgaggacacaacttcctcaaaacccagccctaaagccggacggggtactcacgcctgtaatcccagcactctggaaggcagaggtggagagatggcttgagcccaggagttcaaggctgtagcgggctatgattgcaccactgcactccagcctgggtgacagaatgagaccctcttaaa

SEQ ID NO: 30590 - DNA, 91 bp, Homo sapiens
cactggtccatatatctgtccgtatgtattttggttattgtagctttgtaagatattttaaaataaaaatgtaatacagtcagctttgtta

SEQ ID NO: 30591 - DNA, 439 bp, Homo sapiens
attaatattcataactacctggtgagttaggtaatactatctctattttataggaaggaaattgcatatcagagatgttctaacctcagtgtcaaacatggttcaatccatgtctgtctgagtccaagcttgtgtttttttatatcacaccctgttacctctgaataaaaatagaagtgatttactaagaattaggattatgagcatttttggaactagaaacaacgttgaaacaccatttgtttggttccactattgtagagacaagaaactggggtcccagaaaatttgtgatttgtgtaaagttccagggttgtttagtagtggggccactttgacaactgggcattcaattcctagtttaggtctttctaccacgttatacctgaggtgaagctaagtatctggtttatacttttatatctctaaaggagaaaaa

SEQ ID NO: 30592 - DNA, 840 bp, Homo sapiens
atgtagcatactttattttccgttccttagttgatggatatttaaagtgcttctaattttttctttttgctattaaaagtaccatggcaaagaattgagcctgtaatcccagctgcttggaagctgagaggtgggagtaccttgagcccagaagttagagtccatcaacctgggcaacatgatgtagtgagaggccaggtgcagaggctcacacctgtaatcccagcactctgggaggctgaggtgggcaggtggcttgagcccaggagttcaagaccagcctgcgcaacatgacaaaatcccgtctctacaaaaaatacaaatgtcagccaggcatggtggtgcatgcctgtagtcccagctactcgggaggcccaggtgggaggatcacctgagcccagaaggtgtcggctcctgtgggctgtgattgtgccgctgcactccagcctgggtgacagagcgagaccttgtctcaaaacaaaacatattgagaccctgtctctaaaaaaagacacagaaaaaaaaagaaaaaaaagaccttcgcaatgtttgcacaagtgcctgtgttcgatgactcttctcaaaggtggcagaagaagatgacatgcttggttatagggccaatgccctctaaacaggttgaaatcttacgaaggggatatgagccaagccaccatctcaccccaggctcagtaaccggcccttacagcccagcccattctctccttaatctttttgacacccacgtgaggtttatatttttttcatgtcctactctagctatgagaaaaccgaagtttacagatataactttaaacaagttagaaatagacaagcgga

SEQ ID NO: 30593 - DNA, 323 bp, Homo sapiens
cactgcattccagcctgagggacagagaagggccctgtctcaaaaacaaaaaccacaaaccaaacaaacataaaggatccacaaaagttctctagggacatagtcaaaaactggtccgaaataaatatccttccagtgttcagttttactgaacacatctcatggctttgggtttaactgaataattcctcactgggcacggtggttcatgcctgtaatcccaacactttgggaagccaaggagcatcacctgagcccaggagttcgagactagcctgtgcaacatagtgagaccaccccaccaccgccatctctaccgaaaa

SEQ ID NO: 30594 - DNA, 452 bp, Homo sapiens
ccatctctctgacgtcaccaatcactcgcgtctcaccacgctccactagagacgcgagcgtggaagatgtagtgaagtggatgaagtgagggaatgaagtgaaggcagactacgctttattacagaaacaccaaaagaactccttttgctctttctataaagtgcatgtgtgtctatataatttatcattatgtccatttgtgataaaatgactagctttccttgatacaggacaaacttgctgtgacaaagctggcacaaactgcatcgaaggattctgcaaaggaacctacaagccattctggcttgttcccatgaaattcacattaattatgctcctttaaatggaaaaaggcaccttaaagagatccaggctgaggctcatattatttcaaacccaaactataacagaatctagtaaataagagcatatatctgaaattatttggtag

SEQ ID NO: 30595 - DNA, 512 bp, Homo sapiens
agactgtgttttgccacgttgcccaggctattctcgaaactcctgagctcaagtgatcctcccacctcagcctcccaaagtgctgggattacagatgtaatccaccacacccagccaaatgcattcatgtctacaatagaaatacatctctttgctgctatcttgaatttgtagactcccacaaatcaataaaaaagaagacatccaataaaaaaatgggtagaggccaggcagtggctaacacctgtaatccaagcactttgggaggcccaggcgggcagatcacttgaggtcagaagttcaagaccagcctggccaacatgacaaaaccctgtctctactaaaaatataaaaattagccagacgtggtggcacgtacctgtagtcacaactactcgggaggctgagacaggagaattgcttgaacccaggaggcagaagttgcagtgagccaagatcgtgccactgcactccagcctgggcgacaaagcaagactccatctcaaaaaaaa

SEQ ID NO: 30596 - DNA, 752 bp, Homo sapiens
ttatcatattacataaaagtacctatggtctcacagatgaagggagtcagaagaaccaaactcccagaagacatataaatctaaatgccttttttactttagagtgaaaactgtaatagctaaattataatggacatctgctcattttctccctccatgtagacatggaaagctacacggaaataaccgagtttatagtagctaccatatattaaacgtttcctgtatgccagccactgtgcaaagcatattatatatattgtctcatttaatcctcacaactctgtaaaataagtattgtttgccccatttttccaatgaagaaaccgaggctaaaataggttgaataacttacctaaattcaccatcctcagaatactactttgaaatgagagacctgtactgtatctgttaattccaaattccctggcataaagactcagtacattgtttaaagagaatgcatgaagttaactgcattaccttttggagggttcatttgtgaatttggggccaaagtaaggggagttactggtattctaatagcatcaaacaaatgaattcatttcatcttttggggaggtggagggaataaggtctcaccttgtcgcccatgcaggctggagggccgtgatgtgatctcagctcgctgcagcctcaacctgggctcaagcgatcctcccctctggccctgaggaactttgaattggggcccaacaccgggcccggtgattttttgatgtttggcgggg

SEQ ID NO: 30597 - DNA, 776 bp, Homo sapiens
gcatattatatatattgtctcatttaatcctcacaactctgtaaaataagtattgtttgccccatttttccaatgaagaaaccgaggctaaaataggttgaataacttacctaaattcaccatcctcaaaggtgttaaagacaggattccagtacaggtctctcatttccttcatgattaggaatactactttgaaatgagagacctgtactgtatctgttaattccaaattccctggcataaagactcagtacattgtttaaagagaatgcatgaagttaactgcattaccttttggagggttcatttgtgaatttggggccaaagtaaggggagttactggtattctaatagcatcaaacaaatgaattcatttcatcttttggggaggtggagggaataaggtctcaccttgtcgcccatgcaggctggagggccgtgatgtgatctcagctcgctgcagcctcaacctgggctcaagcgatcctcccacctcagcctcctgagtagctgggactacaggtgcacaccaccacgcccagctcatttttgtatgttttgtagagactgtgttttgccacgttgcccaggctattctcgaaactcctgagctcaagtgatcctcccacctcagcctcccaaagtgctgggattacagatgtaatccaccacacccagccaaatgcattcatgtctacaatagaaatacatctctttgctgctatcttgaatttgtagactcccacaaatcaataaaaaagaagacatccaataaa

SEQ ID NO: 30598 - DNA, 939 bp, Homo sapiens
  misc_feature (74)..(74): n is a, c, g, or t
  misc_feature (297)..(297): n is a, c, g, or t
atggatggaggcaaccagagtgaaggttcagagttccttctcctggggatgtcagagagtcctgagcagcagcngatcctgttttggatgttcctgtccatgtacctggtcacggtggtgggaaatgtgctcatcatcctggccatcagctctgattcccgcctgcacacccccgtgtacttcttcctggccaacctctccttcactgacctcttctttgtcaccaacacaatccccaagatgctggtgaacctccagtcccataacaaagccatctcctatgcagggtgtctgacncagctctacttcctggtctccttggtggccctggacaacctcatcctggctgtgatggcatatgaccgctatgtggccatctgctgccccctccactacaccacagccatgagccctaagctctgtatcttactcctttccttgtgttgggtcctatccgtcctctatggcctcatacacaccctcctcatgaccagagtgaccttctgtgggtcacgaaaaatccactacatcttctgtgagatgtatgtattgctgaggatggcatgttccaacattcagattaatcacacagtgctgattgccacaggctgcttcatcttcctcattccctttggattcgtgatcatttcctatgtgctgattatcagagccatcctcagaataccctcagtctctaagaaatacaaagccttctccacctgtgcctcccatttgggtgcagtctccctcttctatgggacactttgtatggtatacctaaagcccctccatacctactctgtgaaggactcagtagccacagtgatgtatgctgtggtgacacccatgatgaatcccttcatctacagcctgaggaacaaggacatgcatggggctctgggaagactcctagataaacactttaagaggctgacatga

SEQ ID NO: 30599 - DNA, 411 bp, Homo sapiens
gtgccgtacctaagaaatcattgcctaaccaagattacatagattttcacctaagtctctttctaagagtttcatagttttagtttatccatttaggtctttaatctgttttgagttaattattgtatatagtgtgaggtggggtccagattcattttttttacatgtagacatccagttgtctctgcagcacttagtgaaaagggtattttccgtgtattgactttaagtgtaaagtttatttgaggactctcaattctattccactgacctatgtacctgtccttatcccagcaccaccctgtctcggattactgcagctttgcagtaagttttggaaattgaggaaatatgaatccttcaacttgcttctttctcaaaattgttttggctatttggagtcccttgtaa

SEQ ID NO: 30600 - DNA, 365 bp, Homo sapiens
ccaatattgcacacatatacagcagtgattcattatagtgttgtttgtcttacaaatatccttatattagaaaaattaggccttgtgtggtagtgcatgcctgtgattccaacactttgggaggctgaggcaggaggatcacttgaagcctggagttggagaccagcctgggcaacatagcaatctctacaaaaaaaatttaaaattagctgttgtggtggcatgtgcctgtagtcctagctactcaggaggctgaagcaggaggattgcttgagtccaggagtctgaggctgcagtgggctatgatcactcccttgtactccagcctgggctagagtgagagcctgtctcagaaaaaaaaaaaa

SEQ ID NO: 30601 - DNA, 2550 bp, Homo sapiens
acactataatgcctggctgtaaataatattttcataggcacaacatggtaaaagtgactataaatttaataaaatgttatctctaactattttgggagaatgaaagaagggaagaaaagggaagagggagaaaggtgcaataatatataaatagtaacattatcacaaaatatttaaacacaaggaaggaattcccaaaagaaatgcctaaaagaggtgaatgtggctgtctctgtgacattagacttggataagaaaaagcagggcactggcatttttcttatatttagctttttaaattatttacctctattactttgaaaaatattttcaattacataaaaaggatttcaataaagaaaagttatctaatgacataaaatctttctcaaatcagagatgagatctaatggtgttatctgcaaaataaattaatattaatgatgttttgaaggatacattgcaaaagacaaaacaagtaggcaccagactaagctgatattcatttcctgtgtaggcttcataaaattgtagtagacttcagttactagatacacaactgtagcagccactgtgaaatccaccagccactggtattctggaaagtaatgcaatgctggaaagaaaaaaaaaaaaaaaaaaaaaaaaaaaggtcaaaaaaaacagtttcacttacattttcataaataacttatgaggatttatttataattaaaatacgctagactttatttgttcatttgcaatgtaagatttacaaatatatgaatctaaaaatgcaagaaatagactgaggatgttagcatcccaaactaaattttaatacctcacaaattaaaataaacgttaaaagattaccaaaagttatttaagttgttggtaaagtatgattgcaaatttactggtattgtcttaactgattagctactttttacagaaattattagtaaatattttcttttaaatatctagctatgataccttaacttcagaaaacaacttagtctggaacacaacaatttagttatactgttcacttttgtgaagtaagagtttaactttatgttacaattattggctgtactaattgtaaactagtaattctgtgagatactacagattaaaataataaacaagaacagacgcggtggctaggtaaaaaaagatggtaacgataatgcagagaaaaaaacagaactttaaaaaaaaatcagatggctgggcgcaatggcttacacctgtaatctcagcactctggaaggccaaggcaggaacctggaggccaggagttgacaccagcctgggcaagctggggagaccctgtctctacagaaaataaagagagatgtgattgcaccactgcactccagcctaggcaacagagtgagaccctgtctcaaaagaaaaagaaaataaatcagaaattggattggcagctgcagttcttaagagtaagaatggaacttcaaagacaaaaacataattttcggcctggaattctattctcagccaaaggaaaaattaattcttagggtaaatttaaaatattttcaaaagcgcaaggtcacaaaaaatgtagttcccatgcaacctttttgaagatgatactggagaatatgctctgccaaaatcggaaagtaaaccaagtaggaggcagacatagaatatctttaaaagagctccaatttgagggagatgcaaagagaatctctaagaagatgacaatcagtgataccaggggcataggtgcacatcaggtgggaaggtcaaccaatctagactggggcttatctgagggttccaggaggaaaactctactcaagatgaaattgacatattacttgatacttctgaatatattaaggcaagtattcatctgtgaatggtgtttacatgatcataacataaacactgaatactgttctaaaaacatgacatcactatatgtggaagatgaaatgaatagaaactgatcagtggctaactgccagcccaaagatacgtgcttaatccttatttccaaagtgaaatggcaatagttaaagcttaaaactaaaatcaaggaatggccttgaaagtacatagaaatataaaagtaagcatgaaacagagaagagcaagaagaagttgcctctggagagatggaaatagagaaaagagtagggaacatatataattttaataaaaataagaaaacaaaaatatctcccagtagtaaaagacatgagttttcagatttaaagggtaaatctagaacttagcacaaggataaaatgtcagaaaccagaagaataaaaagaaaaaagcttccagagggtttatgtacaaggcgaaggataggtatacatgaaaagcaaaaggatatccaatttctcaagagacttcaaaattctgaagaaaacctatttctttcttagaattttctactgagccaacctatctatcaagtatgagggaaaaaataaagataattccaggcaagcaagatttcaaaaaacaatttagcaccctttctaaggacaccataggagaatgtactctgcactctgc

SEQ ID NO: 30602 - DNA, 840 bp, Homo sapiens
ggtctcgctctctgtcacccaggctggagtgcagtggcacaatcatagctcactgcagtctcgaactcctgggctcaagccatcttctcacttcagcctcctgagtagtaggaactacaggcatgtgccaccatacccagctaattttttttttttctggagagacagggtttcaccatgttgcccaggctggtctcaactcctagtgcttaagtgatccacctgcggtggcctcccaaactgctgagattacaggtgtgagccatcatgcacagcctccaagatccttatttaccagccaggcgttcatgctcttagagcctcaaccccacacggtgccttctcaggtctccaacacttgcctgatcagataccctctcctgtgacccccttcttcctcttctctggttttccaaggcctcctggttccctgacacccacctcagcccagcccttcccaacattcttgcccttgaactcctcaaggacattctgccaagtcctgttgccaggcctggagttactctctccctcccagccccactctgctgccatgagcctaaccttccccttacctggcccagccatggctccagggcaggggctgggcctcagtgtccctgtgtgcccccttgaaatgtggtacacagtcccaaagcagcaggaggttaaaaaaggaaccaggaggcccgcagcctggccccgaatccctgcgctgtcatttcagactagatgacctcaggcaattctccccgaatccaccccacccctgccagttctgtgcctccctctgaaaagtggggctataccacccccgcctacctgctcacaagtgagaat

SEQ ID NO: 30603 - DNA, 458 bp, Homo sapiens
agaggaggggagaggactggggagccgagccagagccgggctgcctgccacccggctgctcgtccgctagctggggaggagcgctccacccgcaactgacaaaggatgggagaatgcccgcgccccgggatgccggccgcacgcagcctggcggccgcctgagctacttcaccctccgccggtaagtgactgcaaacatcattcattcaatcagcctcactgggagccccttctctccggctggtagtcctgggcggcttgtccctgatcccgagcggggcttggcacagcatcagccctggagggcaggcagcaggtgcctttgcctggtgggtccactggggagcgtggctggggttcgcggcgggtgctgccacccaacctgcgggcggcgggctcgcccagtaggcgcctctctggtgagaggaggcggctccagcccgcagcctggggtagtt

SEQ ID NO: 30604 - DNA, 250 bp, Homo sapiens
tttaccgcagcatctgtgtctgaaagccaaaggagagagggaaagtagaggacagagaaacatgttgctttattctggcagcctcatctccttgcccttggtgacagcaggagggcactgctcctgctcttggtctgtggcaagcagaggatgaaagcaaaggaggatgctttctatggtgcttcagctcactgccaccaggagagcccttcccagagattgttatctgagaaatgagctgtataatcta

SEQ ID NO: 30605 - DNA, 449 bp, Homo sapiens
ataataatagaaataaagtgcacaataaatgtaatgcgcttgaatcatcccaaaactccctcgcgcccgccccccgccccccaccaccatctgtggaaaacttgtcttccgaaactagtccctggtgccaaaaaggttgaggatcactgttctaggctatgtgtattctgtggttaggaacccatggaagagatattttagcagtttcaggaattactaaataccactgagaacttatattaaagtaatacctcatctctctagggaatacaattaggtacagatactttgggttggatcaggtcagttttaacatccaaaatattatttttaaagcttttttagtatcaattaaaatttttgttttttttaaattacagttatacatgcatagttttaaaaactaaacatttcagtctgggcacagtgcctaacacaaacattatggg

SEQ ID NO: 30606 - DNA, 442 bp, Homo sapiens
gaaaactgttggtcctgatagatcccttcctgttctttcaaaagtcatatccagtgtagatgagtgccccaatgcacaggaaagtgctaggagaaataaaacaaaaaactgctgtcctgtgaaatagtaatatttttcaatagctagggaccacgccttgctgatgagggaagccaggctgaactgagcattgtaaacagactgtgacaatctaccggaagaaaagaagggatgggaggaatcagtaaacaagattcaaggaatgggtaaatctttcattaaatactatggactaaacctcctcagtggagcgactagcaatatttcactgaaacaggtagtgacaatatgcaagcagattgctttttatccaggatggaattcagaaacctttgttttccctgttctctgacatgtggcactttacttaactaggaattta

SEQ ID NO: 30607 - DNA, 619 bp, Homo sapiens
gagtaaactcagaaccatttcaacacttcttttgggattttgtggcctaactcagacgagtgtctcccagcacgtccttgggaaggcaggactgctttcagactgcagctgaggggttggagctgacttacagggctatttcgggatctgcagtggaaccaaggttggtgggcctgccttcaggggggatggactggggtatcttccaggagatccctgggcagatggttcctgtgtcaggagagccaaacaaggctgccattgagtccatagggggatgaggccatttctggatctgcaaaggaccccatttggcgagctgcaacctgggtgcaaacctgccctcttaaaacagcccttctcagttgggctccatcaggatttcccagcctcctaccagagtcctgaggctcccacgaaggcacttttgtgtgtggatggctgccaaattcttgttgcaatgggtggctaaaagcagggggtcccctgttctgccatcttgctgacattacttccattgggaggctgaggcaggagaatcgcttgaacccgggaggcagaggtcgcagtgagctgagatcacaccactgcactccagcctggtgacagacagatactc

SEQ ID NO: 30608 - DNA, 315 bp, Homo sapiens
gtcactgttattttctatgccaagcatttgacaactgtgactatcccctactttctaagttgtctgtccttttttcttaggttcccacttagactataaatttcatgaaaataggtcatgtgtccccattttcttccttaagcaaaataaaattatacaactttagggctgaagagatcacagaaactctctgataccatagccttcccattttttctcctctccctttctccagaatacatcagttgtggcttagagagggggaagtagtcacccagtgacaggaagaaagctagaactgaagtcttctgagtt

SEQ ID NO: 30609 - DNA, 480 bp, Homo sapiens
  misc_feature (104)..(105): n is a, c, g, or t
  misc_feature (115)..(115): n is a, c, g, or t
  misc_feature (118)..(118): n is a, c, g, or t
  misc_feature (123)..(124): n is a, c, g, or t
  misc_feature (144)..(145): n is a, c, g, or t
  misc_feature (155)..(155): n is a, c, g, or t
  misc_feature (162)..(162): n is a, c, g, or t
  misc_feature (164)..(164): n is a, c, g, or t
tggacatgactacaatgtgtccccacatggcacctggctgcttgggatttgtgcatggctgatatggtgggatctctggttttatttttcccccgcatctcttnnatctcttccntcnggggnncactcctctcttctcttgannctgtcagtcnccggacngnccctcatgggaaggcacctgaccccggctggcccatatttgcagagattgatctggagtgggcatatgatcaacccggacccatccaaatcctctcctgggctttttttttttttttttttgacagagtctcactccgtcacccaggctggaggtgtttcttccctgacccttcccctgcctaccctggccactgagaagggctgaacaggagctaaatctggagggtacaaatgttatttcccttgttctttaagattaccaccaaaaagggaaaagaaaaaaagccccacaataaactactctctgatttaccc

SEQ ID NO: 30610 - DNA, 300 bp, Homo sapiens
attggtagagaactttgaactggaaagaaccctaaagaaatctcctgtctacccctgttattacagattagaaaccgaagtccaggaaggttgagcaggcaagtctccaggctgagttcctgatgtccaggctggaggtgtttcttccctgacccttcccctgcctaccctggccactgagaagggctgaacaggagctaaatctggagggtacaaatgttatttcccttgttctttaagattaccaccaaaaagggaaaagaaaaaaagccccacaataaactactctctgatttaccc

SEQ ID NO: 30611 - DNA, 172 bp, Homo sapiens
cagaaacaatgttaaggtcaaaatcatggagctcttgccaagccatcagacttgatattcactggaatatcttaaggaaggacaactaatgaaaacagctaacaattctgcagcacttgctacacatcatgccctaagagtttcgtttatgatcatggtatctccccaccag

SEQ ID NO: 30612 - DNA, 351 bp, Homo sapiens
ccaggtttattgtggtttttcttcaaacacagtccataactgcagaaatggcatagtgcaagtgtcaaaaacattgataggaagcccttcatcattctagccagaagaatcagggaaaggagcccagacaacaaacatcactgagaagtgagagagaaattccagaaggaagagacccagagaagataatccccaaattctatctaaaccccacacgtctccgactgacctttgattcacgtatatgcaggacaaactcaaagtagcacagtaaaggcttaaagagctgaactgaaccaccaaccacagagtaagacaagacttacagtgagtttaactgactggtgaaat

SEQ ID NO: 30613 - DNA, 409 bp, Homo sapiens
gcagccaaaagaaaggaataaatgttagaaatattagcaatagaattaaaagtcatgggaactatttgaaaatgcagcatgaaggaagaggtaaaggaagcatcaaagacaattcaggattctagcttggatgattggttggatgttgatatgtaaccaaaataaggaatgtaggtaaaaaggaccaggtttgttcggaaaaagatggcggtcaggatttggacctgttggggtcaaatttggctacactgaatttgaggtctctgtgagttatctaagcagatatacctaataggcatcaggtaatttgggtcttttcctcagaataaagaatataaagatttgggagccatcagcatttgaggtaatacctatccagcacatcagtgagctaaggagaataagtata

SEQ ID NO: 30614 - DNA, 439 bp, Homo sapiens
tgagtttaacagtgccaaatttaatgacagttacattgtaccaagtcagaccattttagagaaagatgcctgcagctgctgagttactgtttcacaacaaagattcttactaattagctttcagccaagatggcctacctagagaaacttggcacagcctttctgtatggccctgggaattctggttggctttggaaaaaacaaagcttgactttggtggctcatattgaaaacctcatcctattagaagtcttaactatttttttaagacagggtctcgctctgttacccaggctggagtgcaatggcataatcatagctcactgtaactttgaactcccagcacattgggaggtcaaggcaggtggatcacttgagcccaggagttcgaaaccagcctcggcaacatggtgaaaccctgtctttacaaaaaatacaa

SEQ ID NO: 30615 - DNA, 469 bp, Homo sapiens
ggggacaaactccaaagaattagcccaggatactcagtaaacaaaacaaaaggagaaaaatggcaacggcaaccatggcctggaaggtagaaatcagaatccacagctgctacagtgtatgatctaaaatgttcagtgttcaacaacaaaacaaactgaggctgggtgaggtggctcacgcttgtaatcccaacactctggaaagccaaggcaggaggatcgcttgagcccaggagtctgagaccagcctggacaagataggaagaccccatccctacacgtatgcatgtgtgtgcacaccctcgccaaacacacaaagctgggcatggtgttgcatgcctatagtcccagcaactcaggaggctgaggcaagagaatcatttgagcccaggaagtcaaggctgagaagagccatgatcctgccactgcactctggcctgggcaacagagtggaaccctatctcaaaaa

SEQ ID NO: 30616 - DNA, 3729 bp, Homo sapiens
  misc_feature (2)..(2): n is a, c, g, or t
  misc_feature (163)..(163): n is a, c, g, or t
  misc_feature (168)..(168): n is a, c, g, or t
gncgtccgcgcacacctccccgcgccgccgccgccaccgcccgcactccgccgcctctgcccgcaaccgctgagccatccatgggggtcgcgggccgcaaccgtcccggggcggcctgggcggtgctgctgctgctgctgctggcgccactgctgctgctgcnggggncgtcgccgggtcgggccgtgcccggggccgcaggaggatgtagatgagtgtgcccaagggctagatgactgccatgccgacgccctgtgtcagaacacacccacctcctacaagtgctcctgcaagcctggctaccaaggggaaggcaggcagtgtgaggacatcgatgaatgtggaaatgagctcaatggaggctgtgtccatgactgtttgaatattccaggcaattatcgttgcacttgttttgatggcttcatgttggctcatgacggtcataattgtcttgatgtggacgagtgcctggagaacaatggcggctgccagcatacctgtgtcaacgtcatggggagctatgagtgctgctgcaaggaggggtttttcctgagtgacaatcagcacacctgcattcaccgctcggaagagggcctgagctgcatgaataaggatcacggctgtagtcacatctgcaaggaggccccaaggggcagcgtcgcctgtgagtgcaggcctggttttgagctggccaagaaccagagagactgcatcttgacctgtaaccatgggaacggtgggtgccagcactcctgtgacgatacagccgatggcccagagtgcagctgccatccacagtacaagatgcacacagatgggaggagctgccttgagcgagaggacactgtcctggaggtgacagagagcaacaccacatcagtggtggatggggataaacgggtgaaacggcggctgctcatggaaacgtgtgctgtcaacaatggaggctgtgaccgcacctgtaaggatacttcgacaggtgtccactgcagttgtcctgttggattcactctccagttggatgggaagacatgtaaagatattgatgagtgccagacccgcaatggaggttgtgatcatttctgcaaaaacatcgtgggcagttttgactgcggctgcaagaaaggatttaaattattaacagatgagaagtcttgccaagatgtggatgagtgctctttggataggacctgtgaccacagctgcatcaaccaccctggcacatttgcttgtgcttgcaaccgagggtacaccctgtatggcttcacccactgtggagacaccaatgagtgcagcatcaacaacggaggctgtcagcaggtctgtgtgaacacagtgggcagctatgaatgccagtgccaccctgggtacaagctccactggaataaaaaagactgtgtggaagtgaaggggctcctgcccacaagtgtgtcaccccgtgtgtccctgcactgcggtaagagtggtggaggagacgggtgcttcctcagatgtcactctggcattcacctctcttcagatgtcaccaccatcaggacaagtgtaacctttaagctaaatgaaggcaagtgtagtttgaaaaatgctgagctgtttcccgagggtctgcgaccagcactaccagagaagcacagctcagtaaaagagagcttccgctacgtaaaccttacatgcagctctggcaagcaagtcccaggagcccctggccgaccaagcacccctaaggaaatgtttatcactgttgagtttgagcttgaaactaaccaaaaggaggtgacagcttcttgtgacctgagctgcatcgtaaagcgaaccgagaagcggctccgtaaagccatccgcacgctcagaaaggccgtccacagggagcagtttcacctccagctctcaggcatgaacctcgacgtggctaaaaagcctcccagaacatctgaacgccaggcagagtcctgtggagtgggccagggtcatgcagaaaaccaatgtgtcagttgcagggctgggacctattatgatggagcacgagaacgctgcattttatgtccaaatggaaccttccaaaatgaggaaggacaaatgacttgtgaaccatgcccaagaccaggaaattctggggccctgaagaccccagaagcttggaatatgtctgaatgtggaggtctgtgtcaacctggtgaatattctgcagatggctttgcaccttgccagctctgtgccctgggcacgttccagcctgaagctggtcgaacttcctgcttcccctgtggaggaggccttgccaccaaacatcagggagctacttcctttcaggactgtgaaaccagagttcaatgttcacctggacatttctacaacaccaccactcaccgatgtattcgttgcccagtgggaacataccagcctgaatttggaaaaaataattgtgtttcttgcccaggaaatactacgactgactttgatggctccacaaacataacccagtgtaaaaacagaagatgtggaggggagctgggagatttcactgggtacattgaatccccaaactacccaggcaattacccagccaacaccgagtgtacgtggaccatcaacccaccccccaagcgccgcatcctgatcgtggtccctgagatcttcctgcccatagaggacgactgtggggactatctggtgatgcggaaaacctcttcatccaattctgtgacaacatatgaaacctgccagacctacgaacgccccatcgccttcacctccaggtcaaagaagctgtggattcagttcaagtccaatgaagggaacagcgctagagggttccaggtcccatacgtgacatatgatgaggactaccaggaactcattgaagacatagttcgagatggcaggctctatgcatctgagaaccatcaggaaatacttaaggataagaaacttatcaaggctctgtttgatgtcctggcccatccccagaactatttcaagtacacagcccaggagtcccgagagatgtttccaagatcgttcatccgattgctacgttccaaagtgtccaggtttttgagaccttacaaatgactcagcccacgtgccactcaatacaaatgttctgctatagggttggtgggacagagctgtcttccttctgcatgtcagcacagtcgggtattgctgcctcccgtatcagtgactcattagagttcaatttttatagataatacagatattttggtaaattgaacttggtttttctttcccagcatcgtggatgtagactgagaatggctttgagtggcatcagcttctcactgctgtgggcggatgtcttggatagatcacgggctggctgagctggactttggtcagcctaggtgagactcacctgtccttctggggtcttactcctcctcaaggagtctgtagtggaaaggaggccacagaataagctgcttattctgaaacttcagcttcctctagcccggccctctctaagggagccctctgcactcgtgtgcaggctctgaccaggcagaacaggcaagaggggagggaaggagacccctgcaggctccctccacccaccttgagacctgggaggactcagtttctccacagccttctccagcctgtgtgatacaagtttgatcccaggaacttgagttctaagcagtgctcgtgaaaaaaaaaagcagaaagaattagaaataaataaaaactaagcacttctggagacat

SEQ ID NO: 30617 - DNA, 434 bp, Homo sapiens
ggttttcacgcatgcctcactgtcctaaccagtcggtccctgtggggcctgctagctcttgcagctacctccatgctcatccctgaggcccagaaatcactggcagcctcactttcatgtctacttgactgctgtctccccatgacagtacacagagcttatggaggctaacaaagcttccagggtaccagagaagaaacagggtacatgtctccaaacctgaatagacttcgtagtgggcaaataatggtcacccaaagatgcccacatcctcatctctagaacctatggctatgttgttacatggcaagggtgaattaaagtatagtggaattaagattgctaatcagctgaccttgagataggaagagcgtcccaaattatccaggtgggtccagtggaatcccaagggcccttaaatgtggacgaagcag

SEQ ID NO: 30618 - DNA, 446 bp, Homo sapiens
gaccataaacagtatcaatgtatcactgaggccaccgaaaaggacatttctacctaggcaatcagtcagattcacagaaaaaagttgtttgttgttgtaaaggctcaagatgaaactctttccccagcagtttagtgcctgctgaaaagatccctgatggacaatacttcttggtggactccagctgccccttttattattattagagacaaggtctcactctgttgctaggctggagtgcagtggcacaatcatggctcactgcagccccgaactactgggctcaagccttcctcccgcctcagcctgcccagtaactggtactacagatgtgcacacctggctaagtctttaattttttcgtagagatgaggtcttgctatgttgcccaagctagtttcaaactcctgggctcaagcgatgctcctgcttcagcctcccaaagt

SEQ ID NO: 30619 - DNA, 706 bp, Homo sapiens
ccctacctcatgcaaaatacaaaaattaactcaaaataggccaaagactcaaatataagggttacactataaaactcttgggaggaaatatagaataaatttttgtgaccttgaattaagtattagatttttaattcttacaccaaagcacaagttaataaaggaaaaaaaagataaactggacataattaaaattgaaaaaaaatttgcttcagtgaacacagtcaagaaatttgaaagacagccacagtgcaagattatttttgcaaataatatgtctcataaatgacttgtatctaaaatatataagaccaggcatggtggctcatcctgtaatcccagcactttgggaggctgaggcagggggatcacttgaggtcaggagtttgacaccagcctggccaacatgatgaaaccccatctttactaaaaatacacacacaaaaaaaattagcagggtgtggtggtgtatgcctgtaatcttagctactcaggaggctgaggtgggaggatagcttgaacctgggaggcagaggttgcagtgagccaaaattgcaccaatgcacactccagcctaagcaacagggcaagacgccatctcaaaaaataaaacaaaataataaaataaaataaacagtaattaccgctaaataataaaacaaacaataaaccaattttataacgaaaggatctgaatagattcttc

SEQ ID NO: 30620 - DNA, 719 bp, Homo sapiens
accaccctcatcatcagtatctttggtctgtgagctgcaggtctggcaggggctagcatgggctagggcaccacagccaaaggcttgggtctcacttggactatttgaccaagatcagcgggtgctaagtggccgctggcgcctcccacttcgggcccttcctctggaccccagccttagccttgggcagctgaatgggattcctcaggcaggtcaggctgagctctttctgcggctggtgaatgcaagagatgcagctgtacagacactggcagagatcaatccagcaagtgtccatgagtaccagttacccacctccggtgtccagcacatcttcactggaagccaacttcctcacccccgcagttggctttgctgatcccccacctcgtacagaagagcccctcagtggagtcaaggatagagatgagggtttgggccctcaccacagttctgacttgcccccagtgagtttctgaacccaagtgaatgtggagatgagcatctgaacatgcacaggactggggcctatttccagacctacagctttactactccatgttctgacattggatctagaagcatctagcagttgagtacagaaaaccagttccaaccacagctttaccacctcccgttaagtccttaacttttctgtacctcttctgtttttgtaaaacagattaaggattaaatgagtttgtcaggtaaaagagata

SEQ ID NO: 30621 - DNA, 505 bp, Homo sapiens
atgcctctgcctctttgactaattccacttctgagactctgccccaaggaaataacccaaaaagctaattggttccaagatgttccaagcactgctatggctaacagtgacaaacagaaaaagacccaaacactcgacaattcgaagatggcccagaaaaccgtcaagtattaaaactgagcaaaacccaattccaggaacattaaaaatgccagtcacgtggatgcttagaagtttatcagaaattaacgggaagaaatgagaacagaaagcccagctggtcgtgtctgcacaagctcacacacaccgaccacactcaggataggcaccaaaaccccccttcccctcgcaaaccaaggtccttattcataaaacacaaatgtaatcctagcactttgggaggctgaagtgggaggatcccttgagtcgggaggtcgaggttggagtgagccaagatcatgccacttcattccagctcgggcaagagagtaagactcgtgtcaaa

SEQ ID NO: 30622 - DNA, 351 bp, Homo sapiens
gtcattggctgggttctctccactgcactagctactgtcttctgtagctggtgtgagttagtgttagagtggatggattaaatttattaagagggccagtcagcaatagcacatggtgtacagggaactttggacagggtgagggtcctgctgtttcaaaaggcaaatcctatgaggactatgaatcatgagtttgagtctgatttatttttttaggactggaaccaacataagaattgacaggtacattaggcaggatgctccggaaaatatataaaatatatattaacaagaatttactgtatgataaaggtggtttaacaactagtgagggaaagaattattccaaaa

SEQ ID NO: 30623 - DNA, 449 bp, Homo sapiens
gattgagagtatcacccctgcagtatttaggtctttagtggtggtactaatctccacccttccccaggatgtgaaattagttttgatttacactcttggccatggaggaatgggagttttaaaggcttctacttaacctttcccaccatgatagtacttatcccatagccaaggatccgatgtgggagttactccactgtgtacagtcacccaagtaaatggtcacgggtctttttgaagaaggattagaagagacatcgcagcatattctggctgcagtattgcaaggtccttcttcctgggggtccagccactcttcagtcagtgagctctagttttgaaaactggctaagatccaagaacagaggaagaacttttttactggagaatcaccttcatgctcctgctgttctattcttatcttctgattaaagatgttcagcagcacg

SEQ ID NO: 30624 - DNA, 822 bp, Homo sapiens
tgtctttcttccttcttccagcctgcaacttggaggtgatagctggagcttcagcagctattttggaccatgaggttaccttgaggatggaagccatatgtgaagatgatgcaacagaaagagaggaagctggattcccactctcactctggagcaaccatactagcctgaaactgctacctctgggcatcttttatatgctgggaaaaagaaacttctatgttgttaagcctctgttgcttagggattttccatgtgcagccaaacagatacaacagcaaatggggaaagcttcacagggctttcaaggagacaagaggccactcaataaagaacaagactcctttttaaaatatttttcaaagacagtaaggaatctgtattcaaggggggaggctactacgatgaggttttgtagtaggggacagagatcagggttaactcccaagattccttttaataaagccatacctagttctcactggtaaacttttcctcttgcaagaatatgaggatgatcccagaaatgcttccagaagaaaacaaataggatactttgaatgcaacaagggtcagattggctaaaggtttcacataagagactctgaactttaaatagatgtcttgaaaataccaagggaaaattatgcttaaacctagaatcacaaatgccaagttttctttgacatttaaaggacacaaaaaattttgggtatgtaaggacaaagaaagtttttcagatcttttctgaaagaattactctaggttatatttcaggaaaaaaaatccaagaaagctgaaatactgaggtaaataaacctg

SEQ ID NO: 30625 - DNA, 436 bp, Homo sapiens
gatgggcatttcagaatgtgggctcctaaaaccagcacttgaaatacttccaggaatgccagccagaacagaaagaccactggcagcaatctccaaagcacactcaaaagatccacaggtggccagatggtgccatgacacagccaaggcttccccaagggccccaggatggaagaaaataccagggctctgtcagagacaagcctgcatctgccagtgtaaagaacctttcctagccaagttatgacaatagtcatgggaatacgttcctgtcttccactgcctttcctcagatgtgcacctaatgtccaagaggagatttattgcaaatgccttcacagtcatcaggatagagaaggagtactcagggtctgggctttgcttttctcttaagaggaaactctgttagaaataaaaaggtctacaggatattgat

SEQ ID NO: 30626 - DNA, 459 bp, Homo sapiens
ccaagcctccagaaatgtaagccaataaatttctgtatttctaaagttaccccgtctcagctattctgttacagcaacacgaaacaaactacaacaatatgaatttttaggaatcagtattttctcctacaaagtctaaagaccaaaagagaatgcaaatggtcagtcttaaaagctcttccctgccgggcacagtggctcatacctgtaatcccaacactttgggaggccgaggtgggcgggtcacctgaagtagggagaccagcctgaccaacatggagaaaccctgtctccactaaaactacaaaattagccgggcatagtggcgcatgcctgtaatcccagctactcggaaggctgaggcagaagaatcccttgagcccgggaggcagaggttgcggtgagccgagatcgcaccattgcactgcagcctgggcaacaaaggcgaaactcagtctc

SEQ ID NO: 30627 - DNA, 381 bp, Homo sapiens
gatcatccagttaaccttctctgcccacccactttatggatgaggacgctgaggcccaaaggaggcacttatcaacacaggaagataaagccatcaaaagagccattgttggccaggcacactggctcacgtctgtaatcccagcactttgggaggcccaggcgggcggatcacgaggtcaggagttcgagaccagcctggccaatatggtgaaaccccatttctactaaaaatacaaaaattagtcaggtgcagtggtgggcacctgtaatcccagctgcttgggaggctgaggcaggagaatcacttgggcagaggttgcagtgagccaacatctcgctactgccctccatcctatgcgacagagtgagactccatctc

SEQ ID NO: 30628 - DNA, 397 bp, Homo sapiens
tttgttcttaagcgaggaaagagggttacacacacatctgtctcttaaagaattctcaaaaacagtcagttctgggctgcactggaactctactgttccaggaacatgggcttccatttcctactctgcggatctcagctatggcatctacctcttagtccaggagagttactgaagttcttgccatctggatgattctacccaagtaggcagaggaggggatgaagtggagcctgtctttcccttatattccattgggcagaatttaatcaccaagccacacctacaagaatggctgggaatctcagccttcagtctgtgtaaaaatgtgcctaattaaatttacgggttctattaacaaagaggagaaagggtatctgagacacctagaatctga

SEQ ID NO: 30629 - DNA, 698 bp, Homo sapiens
gaaactgttggtagatttatataatggtctactatatagcagtgaatgaatatcctagtgctctgtgaaacaacctggattaatttcagtgtcttaatttgtacacccccagaacagagtgtgaggtgtgagacaagtacttcagttcaagagtgtatttaggaggtaatcccaggaagcagaaatgggaatgagcaaaaaaggaagaaaagtcaataaaaggtgcagtacggagctacttaccactatgaaccaccgtgctcactcccattgggaacactcagaggaatcatgtcgaatacagctcagagctgaaggccttcctgatgcgcttgcctgctccctggtctctctgcatggggaaggagtgttcccagcttgcaaactccagctttgcctgtgagaggaacaagcgtccctgatccagaaggtggtgagtcctcctctctctcttcatgctttttagtcctttaactttctcaggatcctcaggtttagtagagaaataatcccctttctccttacgcacaagaacattttcaagggtgaaatggggcagttgttagctatcactaaagaaacacaaaaggagacaagtgacaagattgctggatgggttttgttgaagtactcttatttaagtagtattgtcatcattattaaattaaagccaacatttatttagctcttactatttg

SEQ ID NO: 30630 - DNA, 707 bp, Homo sapiens
ctgacatggaaagcctagagcaggacggcaaggcagagcgaactctgtagcaacctaaaaagttggcagtcaggtacaaagtagaaaaagatctcacaaagtttggaaaggtggcaactccagtgtaaaaaataagacatctcagaaatttcatgagggccaaatgtcaaactctgctggaagggaaagtattgatgccaccctcaaagcatggaaagccagtgatttactgaatgtaacaaagctcagagatgatcaattacaaattagattgaccctgtctcacacactaactgcttgagaaaagagcacatctttaccagaggtaaatacattactgcagcctctactctttacacaaaaagttacagcatacctcaaaaaaatgatgagatacacaacaaagctagatatatgacccatggtcaagaggggaaatggtcaatagaagcagacctagagatggcccagatgttcaaaaatgcttagctgttatttcttcaaactacttctcccctctatcctttccacttgggactttaattacacattaaactatttgatatcataccacttattcaaaaagctcagagaacccaagaaaaataaatgcaaagaaaacccactttgggaggccaaggcgggcagattacgaggtcaggagatcgagaccatcctggctaacacggtaaaaccctgtctctact

SEQ ID NO: 30631 - DNA, 509 bp, Homo sapiens
atgtctgtgttttgtcttgtgggccttggggtgcccctgcccctgataagaaggggtttcagagcagaaataaagcctcagacaggtgagcctctgtggcacatggcccctcgagccagccatgcatctgggttcagcccctgccaggacacttgaccaggccccttaccttctccgagctgggatcatgctgggaagactgaatgggacgcagccggtgaaaacgcctggaagagagtaaacgccattttctctaagcatatttatttctttaacaacagtgacgaccatttgtgagccatctctctgtctcaggcacggtgctacatgccaacgaaacctgctcccattgaaccctggccagccagtgaagaaagggttgggcctgggaggtgccactttacagacaggggcaccaaggggcagggtggcaggaggcccaccggacgttccccatgaagtagcagtcccagcatccacacccagcaggcaccacgctggcccgcagc

SEQ ID NO: 30632 - DNA, 400 bp, Homo sapiens
ttttttttttaaacgttttcgtagaaatgagggtctcactacgttgcctagtctggtccagaactcctggcctcaagtgatcctgttgctgtggcctctcaatgtgctgggattacagacagccatgaaccaccaggcctggccaactttcgataatgtggttagataattcaaacttaaagctgttggaactttaaattattccaagccttgagaggaatgttgctatgtagcctgagtcacgtagcatgcagttacaacttctgctttttcctgtaaatgattaagaatgaccaagcagtgccagagataagatcacctcagaacattactcctaggccgggtgttgtggcctcacatctgtaaccccagcactttgggaggcagaggtggatcactt

SEQ ID NO: 30633 - DNA, 366 bp, Homo sapiens
caacaaaaccagatcccatcactacaaaaaattatttcaaaaaatttgaataaaataatactaataaagcctaatacaaacaatacaggatgcagtggctcacacccgtaatagcactttggggggccgaggcaggcagatcacttgaactcaggagttcaagaccaggctgggcaacgtggcaaaacccctctctacaaaaaaatacaaaaattagctgacatggtgtggtgtgttctagtcccagctactccggcggccaagacggcagaattgcttgagccgtggaggtcaggtctgcagtgagctgtgattacaccactgcactgcagcctgggtgaaagagtgaggccccatctcaaaaga

SEQ ID NO: 30634 - DNA, 465 bp, Homo sapiens
gggtccaataaaaatagaaagaatgaataagatctagtattttataacataactttaggatacctaaagaatgaataaaatctagtatgtgatagcataactttaggacacctaaagccaataataattgtacatttttaaaataactaaaactgtataattggattgcttgtaacacaagggataaatgcctgaggtgatggatacctcattttacatgatgtgattattatacattgtatgcctgtatcaaaacatctcatgagatgtattttcccattaaaaattcctcattaaaaaatgtcatatatcccataaatgtatgtatatatatttacgtaaatatatgtatatatatattcagtgtaattctgaaacattttaattatgaagatttatcatggtcatgacattgctttaatatactggtttcatataatttatttaatttggaattcctaataa

SEQ ID NO: 30635 - DNA, 384 bp, Homo sapiens
ggataactccaaacatatcatgtgccacagccttttaaacatttttatcgttgaatgtgtaaatagtaatgttttgaaggtttccagatttctctccagattgtgctagttaacttcattctgccgtcatagaacaattaaacagaagcatttgggagaggaataaaaaaagtgccagggaggaacattgtaagtcagacggcaggtgcagaagtgccctggaaacctgaggcagaaactcacctggccgcacagtgcctgggccttccaggggtggctccaggtgggtggaagcaccagtgtctgagaagctccggaggctccacagactgcagggcagccctgccccagagagtgagtgacttacgtccaggagcggcccca

SEQ ID NO: 30636 - DNA, 136 bp, Homo sapiens
aaatattttatgtgcacttaaatgtataagaaacttaccttgcactgggaacatacaaaaatgaaacaagacaagtttctcattctgaacacacggtattgagcttgcatgactcacagtgtgcaaattgtatagc

SEQ ID NO: 30637 - DNA, 413 bp, Homo sapiens
tgggcaggtggcctgagtcacctactgtgtgtgagctgggctcaccatggcaacccagcagacccagagggcataaagaagccagtaccttccctgctgcacaagtgtaggcggagcatgttgcatctgctttgatttccaacttagaaaagtttttctctactttaaggactcatttccccttcccttctctcaggacacagcttactcactctggggtccttctccttgcctggaaggtattctgcagtcccacaggcaaaccccactcatcccagaattaagtaccacctcctccaaggattcatcccagaccagttagtcctctacccttcttcaagttcccaccacacaaaaggcagaagctcttaaccttcagaatctgtggcttacacactgacaatcaactgtgt

SEQ ID NO: 30638 - DNA, 379 bp, Homo sapiens
tattgctactatagtggtaacctaggttataattttcaaatgtaagagccccaaatactattctttttactcttagtgatatgaaactatgttagaacatctgcagaaagtctgaattagtaattttaataataaatattgagtactgatatattgtatatcactgagatttattttatatacattattttatcaattcctatgatcacttcggtaagtactaattttcacaactaagtagtgacagaaaatgaggtttagagagatatagtattttacccaaagtcacagaatataagtagagaatgcagaacttgcattctgggctatttgacagtggagcccagacttttaaaattaggcttataaagatttcctg

SEQ ID NO: 30639 - DNA, 346 bp, Homo sapiens
ctgaccccttccatttgcccttgactctaattggtccactacaaactattttttacctaatgtagacctccaacctgtcaatccatcaaacttttccactgtccagcctccatatgctatcttcatttctctttgtacacacttaggctcacaacccattatttatccagttttttgcaaacaatctcctggactccctttttttcctctctcccttcactctctctatctgagaacaccttaatttgggttgtaatattcttaagtattttatcttgcaactatcccttatttctctgaaacgttagtctccatttctactgaattatccccatcagcttgtcaa

SEQ ID NO: 30640 - DNA, 4047 bp, Homo sapiens
aaaaataacagccgtatgcctctgctaagtactaactacctcatcaccttttgtgcagacaggcaggttacatttggtttaaggaattaggaatatgttctttccagcaccttagtaacccacgcgattgtgattcttttctcttcttgactgtgataggtggcatggaatattcacatgggagagccgcatgaggccgcccaccacgcttcctgaaggatgcccgtgtggaagaattttgacgtgccagtgtcctcgttctacagggtgttccattcttccgcaatctcagaaaaatgggactaaaagaaactattttgtaaaataagaagacttccatttttaatgaccaacatgtattaagatggacacctactctacgaaacacgaagttctatggtctcgaagaagcccgtgcctgtttaaaactgatcctaactaaaaacagacttgagtggatatgagaatgttggttagtggcagaagagtcaaaaaatggcagttaattattcagttatttgctacttgttttttagcgagcctcatgtttttttgggaaccaatcgataatcacattgtgagccatatgaagtcatattcttacagatacctcataaatagctatgactttgtgaatgataccctgtctcttaagcacacctcagcggggcctcgctaccaatacttgattaaccacaaggaaaagtgtcaagctcaagacgtcctccttttactgtttgtaaaaactgctcctgaaaactatgatcgacgttccggaattagaaggacgtggggcaatgaaaattatgttcggtctcagctgaatgccaacatcaaaactctgtttgccttaggaactcctaatccactggagggagaagaactacaaagaaaactggcttgggaagatcaaaggtacaatgatataattcagcaagactttgttgattctttctacaatcttactctgaaattacttatgcagttcagttgggcaaatacctattgtccacatgccaaatttcttatgactgctgatgatgacatatttattcacatgccaaatctgattgagtaccttcaaagtttagaacaaattggtgttcaagacttttggattggtcgtgttcatcgtggtgcccctcccattagagataaaagcagcaaatactacgtgtcctatgaaatgtaccagtggccagcttaccctgactacacagccggagctgcctatgtaatctccggtgatgtagctgccaaagtctatgaggcatcacagacactaaattcaagtctttacatagacgatgtgttcatgggcctctgtgccaataaaatagggatagtaccgcaggaccatgtgtttttttctggagagggtaaaactccttatcatccctgcatctatgaaaaaatgatgacatctcatggacacttagaagatctccaggacctttggaagaatgctacagatcctaaagtaaaaaccatttccaaaggtttttttggtcaaatatactgcagattaatgaagataattctcctttgtaaaattagctatgtggacacatacccttgtagggctgcgtttatctaatagtacttgaatgttgtatgttttcactgtcactgagtcaaacctggatgaaaaaaacctttaaatgttcgtctataccctaagtaaaatgaggacgaaagacaaatattttgaaagcctagtccatcagaatgtttctttgattctagaagctgtttaatatcacttatctacttcattgcctaagttcatttcaaagaatttgtatttagaaaaggtttatattattagtgaaaacaaaactaaagggaagttcaagttctcatgtaatgccacatatatacttgaggtgtagagatgttattaagaagttttgatgttagaataattgcttttggaaaataccaaatgaacgtacagtacaacatttcaaggaaatgaatatattgttagaccaggtaagcaagtttatttttgttaaagagcacttggtggaggtagtaggggcagggaaaggtcagcataggagagaaagttcatgaatctggtaaaacagtctcttgttcttaagaggagatgtagaaaaatgtgtacaatgttattataaacagacaaatcacgtcttaccacatccatgtagctactggtgttagagtcattaaaatacctttttttgcatcttttttcaaagtttaatgtgaacttttagaaaagtgattaatgttgccctaatactttatatgtttttaatggatttttttttaagtattagaaaatgacacataacacgggcagctggttgctcatagggtccttctctagggagaaaccattgttaattcaaataagctgattttaatgacgttttcaactggtttttaaatattcaatattggtctgtgtttaagtttgttatttgaatgtaatttacatagaggaatataataatggagagacttcaaatggaaagacagaacattacaagcctaatgtctccataattttataaaatgaaatcttagtgtctaaatccttgtactgattactaaaattaacccactcctccccaacaaggtcttataaaccacagcactttgttccaagttcagagttttaaattgagagcattaaacatcaaagttataatatctaaaacaatttatttttcatcaataactgtcagaggtgatctttattttctaaatatttcaaacttgaaaacagagtaaaaaagtgatagaaaagttgccagtttggggttaaagcatttttaaagctgcatgttccttgtaatcaaagagatgtgtctgagatctaatagagtaagttacatttattttacaaagcaggataaaaatgtggctataatacacactacctcccttcactacagaaagaactaggtggtgtctactgctagggagattatatgaaggccaaaataatgacttcagcaagagtgactgaactcactctaaggcctttgactgcagaggcacctgttagggaaaatcagatgtctcatataataaggtgatgtcggaaacacgcaaaacaaaacgaaaaaagatttctcagtatacacaactgaatgatgatacttacaatttttagcaggtagctttttaatgtttacagaaattttaatttttttctattttgaaatttgaggcttgtttacattgcttagataatttagaatttttaactaatgtcaaaactacagtgtcaaacattctaggttgtagttactttcagagtagatacagggttttagatcattacagtttaagttttctgaccaattaaaaaaacatagagaacaaaagcatatttgaccaagcaacaagcttataattaatttttattagttgattgattaatgatgtattgccttttgcccatatataccctgtgtatctatacttggaagtgtttaaggttgccattggttgaaaacataagtgtctctggccatcaaagtgatcttgtttacagcagtgcttttgtgaaacaattatttatttgctgaaagagctcttctgaactgtgtccttttaatttttgcttagaatagaatggaacaagtttaaatttcaaggaaatatgaaggcacttcctttttttctaagaaggaagttgctagatgattccttcatcacacttacttaaagtactgagaagagtatctgtaaataaaagggttccaaccttttaaaaaagaaggaaaaaactttttggtgctccagtgtagggctatctttttaaaaaatgtcaacaaagggaaaataaactatcagcttggatggtcacttgaatagaagatggttatacacagtgttattgttaaaatttttttaccttttggttggtttgcatcttttttccatattgttaattttataccaaaatgttaaatatttgtattacttgaattttgctcttgtatggcaaaataattagtgagtttaaaaaaaatctatagtttccaataaacaactgaaaaatta

SEQ ID NO: 30641 - DNA, 641 bp, Homo sapiens
gaaaaaagagccgcccccatcccgcccgcatacagcccgcatcccgccggggaagcgagcccagtccagcgctgcccgtccagtcctcgcccaagatttaaagcccgcaagttttgttcttgagaccagcgactttagctccgatgcgggaaggaaagccgacctccgatttggacatttaaagagctgggcttgaacttcgtgagtttcgctctaaactgcccttgaaatgaagctggacttggaggtaaagtcactgggaagctggcctggggcggggtttccccctcttctcgtattttagaaacggacagcggcagtgcagccctagtttgctgtaagtttccttactttgttactgaggcccccagagctccacgcataagtggtgtgaccagaaaccttttaacaagacccgcctgagcctgcgttagagctcccgctcggaaagtaaaagaccatcctaatccgcggcgctgcggaaccggtgtcccgtgtgggaggaaccgcggcgttccctgggcgtagggcccgcgaggccagcacagtccgcctcttggcggagcgccctgggccggtggttccgcgcggagttagtctgtggtcagttacgtggtgaaaacacggctgtgccgcggccg

SEQ ID NO: 30642 - DNA, 4110 bp, Homo sapiens
tgcacccacagcagtctgttgtggatggttgctgagctgcgcattcggcattgggcttgctttgtttcctgccaggcccagcattttcttctaccagatcggcaggcttgtgggcttcttcctaggtccctcccctgcactctgaataggaaagctggaagctgtgctttagagaagctttaagacgccgaaagaaaccagaagagtgagcgccagttgtatgtggcatggaatattcacatgggagagccgcatgaggccgcccaccacgcttcctgaaggatgcccgtgtggaagaattttgacgtgccagtgtcctcgttctacagggtgttccattcttccgcaatctcagaaaaatgggactaaaagaaactattttgtaaaataagaagacttccatttttaatgaccaacatgtattaagatggacacctactctacgaaacacgaagttctatggtctcgaagaagcccgtgcctgtttaaaactgatcctaactaaaaacagacttgagtggatatgagaatgttggttagtggcagaagagtcaaaaaatggcagttaattattcagttatttgctacttgttttttagcgagcctcatgtttttttgggaaccaatcgataatcacattgtgagccatatgaagtcatattcttacagatacctcataaatagctatgactttgtgaatgataccctgtctcttaagcacacctcagcggggcctcgctaccaatacttgattaaccacaaggaaaagtgtcaagctcaagacgtcctccttttactgtttgtaaaaactgctcctgaaaactatgatcgacgttccggaattagaaggacgtggggcaatgaaaattatgttcggtctcagctgaatgccaacatcaaaactctgtttgccttaggaactcctaatccactggagggagaagaactacaaagaaaactggcttgggaagatcaaaggtacaatgatataattcagcaagactttgttgattctttctacaatcttactctgaaattacttatgcagttcagttgggcaaatacctattgtccacatgccaaatttcttatgactgctgatgatgacatatttattcacatgccaaatctgattgagtaccttcaaagtttagaacaaattggtgttcaagacttttggattggtcgtgttcatcgtggtgcccctcccattagagataaaagcagcaaatactacgtgtcctatgaaatgtaccagtggccagcttaccctgactacacagccggagctgcctatgtaatctccggtgatgtagctgccaaagtctatgaggcatcacagacactaaattcaagtctttacatagacgatgtgttcatgggcctctgtgccaataaaatagggatagtaccgcaggaccatgtgtttttttctggagagggtaaaactccttatcatccctgcatctatgaaaaaatgatgacatctcatggacacttagaagatctccaggacctttggaagaatgctacagatcctaaagtaaaaaccatttccaaaggtttttttggtcaaatatactgcagattaatgaagataattctcctttgtaaaattagctatgtggacacatacccttgtagggctgcgtttatctaatagtacttgaatgttgtatgttttcactgtcactgagtcaaacctggatgaaaaaaacctttaaatgttcgtctataccctaagtaaaatgaggacgaaagacaaatattttgaaagcctagtccatcagaatgtttctttgattctagaagctgtttaatatcacttatctacttcattgcctaagttcatttcaaagaatttgtatttagaaaaggtttatattattagtgaaaacaaaactaaagggaagttcaagttctcatgtaatgccacatatatacttgaggtgtagagatgttattaagaagttttgatgttagaataattgcttttggaaaataccaaatgaacgtacagtacaacatttcaaggaaatgaatatattgttagaccaggtaagcaagtttatttttgttaaagagcacttggtggaggtagtaggggcagggaaaggtcagcataggagagaaagttcatgaatctggtaaaacagtctcttgttcttaagaggagatgtagaaaaatgtgtacaatgttattataaacagacaaatcacgtcttaccacatccatgtagctactggtgttagagtcattaaaatacctttttttgcatcttttttcaaagtttaatgtgaacttttagaaaagtgattaatgttgccctaatactttatatgtttttaatggatttttttttaagtattagaaaatgacacataacacgggcagctggttgctcatagggtccttctctagggagaaaccattgttaattcaaataagctgattttaatgacgttttcaactggtttttaaatattcaatattggtctgtgtttaagtttgttatttgaatgtaatttacatagaggaatataataatggagagacttcaaatggaaagacagaacattacaagcctaatgtctccataattttataaaatgaaatcttagtgtctaaatccttgtactgattactaaaattaacccactcctccccaacaaggtcttataaaccacagcactttgttccaagttcagagttttaaattgagagcattaaacatcaaagttataatatctaaaacaatttatttttcatcaataactgtcagaggtgatctttattttctaaatatttcaaacttgaaaacagagtaaaaaagtgatagaaaagttgccagtttggggttaaagcatttttaaagctgcatgttccttgtaatcaaagagatgtgtctgagatctaatagagtaagttacatttattttacaaagcaggataaaaatgtggctataatacacactacctcccttcactacagaaagaactaggtggtgtctactgctagggagattatatgaaggccaaaataatgacttcagcaagagtgactgaactcactctaaggcctttgactgcagaggcacctgttagggaaaatcagatgtctcatataataaggtgatgtcggaaacacgcaaaacaaaacgaaaaaagatttctcagtatacacaactgaatgatgatacttacaatttttagcaggtagctttttaatgtttacagaaattttaatttttttctattttgaaatttgaggcttgtttacattgcttagataatttagaatttttaactaatgtcaaaactacagtgtcaaacattctaggttgtagttactttcagagtagatacagggttttagatcattacagtttaagttttctgaccaattaaaaaaacatagagaacaaaagcatatttgaccaagcaacaagcttataattaatttttattagttgattgattaatgatgtattgccttttgcccatatataccctgtgtatctatacttggaagtgtttaaggttgccattggttgaaaacataagtgtctctggccatcaaagtgatcttgtttacagcagtgcttttgtgaaacaattatttatttgctgaaagagctcttctgaactgtgtccttttaatttttgcttagaatagaatggaacaagtttaaatttcaaggaaatatgaaggcacttcctttttttctaagaaggaagttgctagatgattccttcatcacacttacttaaagtactgagaagagtatctgtaaataaaagggttccaaccttttaaaaaagaaggaaaaaactttttggtgctccagtgtagggctatctttttaaaaaatgtcaacaaagggaaaataaactatcagcttggatggtcacttgaatagaagatggttatacacagtgttattgttaaaatttttttaccttttggttggtttgcatcttttttccatattgttaattttataccaaaatgttaaatatttgtattacttgaattttgctcttgtatggcaaaataattagtgagtttaaaaaaaatctatagtttccaataaacaactgaaaaatta

SEQ ID NO: 30643 - DNA, 4135 bp, Homo sapiens
gaaaaaagagccgcccccatcccgcccgcatacagcccgcatcccgccggggaagcgagcccagtccagcgctgcccgtccagtcctcgcccaagatttaaagcccgcaagttttgttcttgagaccagcgactttagctccgatgcgggaaggaaagccgacctccgatttggacatttaaagagctgggcttgaacttcgtgagtttcgctctaaactgcccttgaaatgaagctggacttggaggtggcatggaatattcacatgggagagccgcatgaggccgcccaccacgcttcctgaaggatgcccgtgtggaagaattttgacgtgccagtgtcctcgttctacagggtgttccattcttccgcaatctcagaaaaatgggactaaaagaaactattttgtaaaataagaagacttccatttttaatgaccaacatgtattaagatggacacctactctacgaaacacgaagttctatggtctcgaagaagcccgtgcctgtttaaaactgatcctaactaaaaacagacttgagtggatatgagaatgttggttagtggcagaagagtcaaaaaatggcagttaattattcagttatttgctacttgttttttagcgagcctcatgtttttttgggaaccaatcgataatcacattgtgagccatatgaagtcatattcttacagatacctcataaatagctatgactttgtgaatgataccctgtctcttaagcacacctcagcggggcctcgctaccaatacttgattaaccacaaggaaaagtgtcaagctcaagacgtcctccttttactgtttgtaaaaactgctcctgaaaactatgatcgacgttccggaattagaaggacgtggggcaatgaaaattatgttcggtctcagctgaatgccaacatcaaaactctgtttgccttaggaactcctaatccactggagggagaagaactacaaagaaaactggcttgggaagatcaaaggtacaatgatataattcagcaagactttgttgattctttctacaatcttactctgaaattacttatgcagttcagttgggcaaatacctattgtccacatgccaaatttcttatgactgctgatgatgacatatttattcacatgccaaatctgattgagtaccttcaaagtttagaacaaattggtgttcaagacttttggattggtcgtgttcatcgtggtgcccctcccattagagataaaagcagcaaatactacgtgtcctatgaaatgtaccagtggccagcttaccctgactacacagccggagctgcctatgtaatctccggtgatgtagctgccaaagtctatgaggcatcacagacactaaattcaagtctttacatagacgatgtgttcatgggcctctgtgccaataaaatagggatagtaccgcaggaccatgtgtttttttctggagagggtaaaactccttatcatccctgcatctatgaaaaaatgatgacatctcatggacacttagaagatctccaggacctttggaagaatgctacagatcctaaagtaaaaaccatttccaaaggtttttttggtcaaatatactgcagattaatgaagataattctcctttgtaaaattagctatgtggacacatacccttgtagggctgcgtttatctaatagtacttgaatgttgtatgttttcactgtcactgagtcaaacctggatgaaaaaaacctttaaatgttcgtctataccctaagtaaaatgaggacgaaagacaaatattttgaaagcctagtccatcagaatgtttctttgattctagaagctgtttaatatcacttatctacttcattgcctaagttcatttcaaagaatttgtatttagaaaaggtttatattattagtgaaaacaaaactaaagggaagttcaagttctcatgtaatgccacatatatacttgaggtgtagagatgttattaagaagttttgatgttagaataattgcttttggaaaataccaaatgaacgtacagtacaacatttcaaggaaatgaatatattgttagaccaggtaagcaagtttatttttgttaaagagcacttggtggaggtagtaggggcagggaaaggtcagcataggagagaaagttcatgaatctggtaaaacagtctcttgttcttaagaggagatgtagaaaaatgtgtacaatgttattataaacagacaaatcacgtcttaccacatccatgtagctactggtgttagagtcattaaaatacctttttttgcatcttttttcaaagtttaatgtgaacttttagaaaagtgattaatgttgccctaatactttatatgtttttaatggatttttttttaagtattagaaaatgacacataacacgggcagctggttgctcatagggtccttctctagggagaaaccattgttaattcaaataagctgattttaatgacgttttcaactggtttttaaatattcaatattggtctgtgtttaagtttgttatttgaatgtaatttacatagaggaatataataatggagagacttcaaatggaaagacagaacattacaagcctaatgtctccataattttataaaatgaaatcttagtgtctaaatccttgtactgattactaaaattaacccactcctccccaacaaggtcttataaaccacagcactttgttccaagttcagagttttaaattgagagcattaaacatcaaagttataatatctaaaacaatttatttttcatcaataactgtcagaggtgatctttattttctaaatatttcaaacttgaaaacagagtaaaaaagtgatagaaaagttgccagtttggggttaaagcatttttaaagctgcatgttccttgtaatcaaagagatgtgtctgagatctaatagagtaagttacatttattttacaaagcaggataaaaatgtggctataatacacactacctcccttcactacagaaagaactaggtggtgtctactgctagggagattatatgaaggccaaaataatgacttcagcaagagtgactgaactcactctaaggcctttgactgcagaggcacctgttagggaaaatcagatgtctcatataataaggtgatgtcggaaacacgcaaaacaaaacgaaaaaagatttctcagtatacacaactgaatgatgatacttacaatttttagcaggtagctttttaatgtttacagaaattttaatttttttctattttgaaatttgaggcttgtttacattgcttagataatttagaatttttaactaatgtcaaaactacagtgtcaaacattctaggttgtagttactttcagagtagatacagggttttagatcattacagtttaagttttctgaccaattaaaaaaacatagagaacaaaagcatatttgaccaagcaacaagcttataattaatttttattagttgattgattaatgatgtattgccttttgcccatatataccctgtgtatctatacttggaagtgtttaaggttgccattggttgaaaacataagtgtctctggccatcaaagtgatcttgtttacagcagtgcttttgtgaaacaattatttatttgctgaaagagctcttctgaactgtgtccttttaatttttgcttagaatagaatggaacaagtttaaatttcaaggaaatatgaaggcacttcctttttttctaagaaggaagttgctagatgattccttcatcacacttacttaaagtactgagaagagtatctgtaaataaaagggttccaaccttttaaaaaagaaggaaaaaactttttggtgctccagtgtagggctatctttttaaaaaatgtcaacaaagggaaaataaactatcagcttggatggtcacttgaatagaagatggttatacacagtgttattgttaaaatttttttaccttttggttggtttgcatcttttttccatattgttaattttataccaaaatgttaaatatttgtattacttgaattttgctcttgtatggcaaaataattagtgagtttaaaaaaaatctatagtttccaataaacaactgaaaaatta

SEQ ID NO: 30644 - DNA, 4003 bp, Homo sapiens
tgccggccgggggccccaggcttgcggccacccgcctccggctggagggctgaattcgagtcgaaagcccgtgtcgggctggaaagaagaaaccgccaacctgagaacgctttcggtggcatggaatattcacatgggagagccgcatgaggccgcccaccacgcttcctgaaggatgcccgtgtggaagaattttgacgtgccagtgtcctcgttctacagggtgttccattcttccgcaatctcagaaaaatgggactaaaagaaactattttgtaaaataagaagacttccatttttaatgaccaacatgtattaagatggacacctactctacgaaacacgaagttctatggtctcgaagaagcccgtgcctgtttaaaactgatcctaactaaaaacagacttgagtggatatgagaatgttggttagtggcagaagagtcaaaaaatggcagttaattattcagttatttgctacttgttttttagcgagcctcatgtttttttgggaaccaatcgataatcacattgtgagccatatgaagtcatattcttacagatacctcataaatagctatgactttgtgaatgataccctgtctcttaagcacacctcagcggggcctcgctaccaatacttgattaaccacaaggaaaagtgtcaagctcaagacgtcctccttttactgtttgtaaaaactgctcctgaaaactatgatcgacgttccggaattagaaggacgtggggcaatgaaaattatgttcggtctcagctgaatgccaacatcaaaactctgtttgccttaggaactcctaatccactggagggagaagaactacaaagaaaactggcttgggaagatcaaaggtacaatgatataattcagcaagactttgttgattctttctacaatcttactctgaaattacttatgcagttcagttgggcaaatacctattgtccacatgccaaatttcttatgactgctgatgatgacatatttattcacatgccaaatctgattgagtaccttcaaagtttagaacaaattggtgttcaagacttttggattggtcgtgttcatcgtggtgcccctcccattagagataaaagcagcaaatactacgtgtcctatgaaatgtaccagtggccagcttaccctgactacacagccggagctgcctatgtaatctccggtgatgtagctgccaaagtctatgaggcatcacagacactaaattcaagtctttacatagacgatgtgttcatgggcctctgtgccaataaaatagggatagtaccgcaggaccatgtgtttttttctggagagggtaaaactccttatcatccctgcatctatgaaaaaatgatgacatctcatggacacttagaagatctccaggacctttggaagaatgctacagatcctaaagtaaaaaccatttccaaaggtttttttggtcaaatatactgcagattaatgaagataattctcctttgtaaaattagctatgtggacacatacccttgtagggctgcgtttatctaatagtacttgaatgttgtatgttttcactgtcactgagtcaaacctggatgaaaaaaacctttaaatgttcgtctataccctaagtaaaatgaggacgaaagacaaatattttgaaagcctagtccatcagaatgtttctttgattctagaagctgtttaatatcacttatctacttcattgcctaagttcatttcaaagaatttgtatttagaaaaggtttatattattagtgaaaacaaaactaaagggaagttcaagttctcatgtaatgccacatatatacttgaggtgtagagatgttattaagaagttttgatgttagaataattgcttttggaaaataccaaatgaacgtacagtacaacatttcaaggaaatgaatatattgttagaccaggtaagcaagtttatttttgttaaagagcacttggtggaggtagtaggggcagggaaaggtcagcataggagagaaagttcatgaatctggtaaaacagtctcttgttcttaagaggagatgtagaaaaatgtgtacaatgttattataaacagacaaatcacgtcttaccacatccatgtagctactggtgttagagtcattaaaatacctttttttgcatcttttttcaaagtttaatgtgaacttttagaaaagtgattaatgttgccctaatactttatatgtttttaatggatttttttttaagtattagaaaatgacacataacacgggcagctggttgctcatagggtccttctctagggagaaaccattgttaattcaaataagctgattttaatgacgttttcaactggtttttaaatattcaatattggtctgtgtttaagtttgttatttgaatgtaatttacatagaggaatataataatggagagacttcaaatggaaagacagaacattacaagcctaatgtctccataattttataaaatgaaatcttagtgtctaaatccttgtactgattactaaaattaacccactcctccccaacaaggtcttataaaccacagcactttgttccaagttcagagttttaaattgagagcattaaacatcaaagttataatatctaaaacaatttatttttcatcaataactgtcagaggtgatctttattttctaaatatttcaaacttgaaaacagagtaaaaaagtgatagaaaagttgccagtttggggttaaagcatttttaaagctgcatgttccttgtaatcaaagagatgtgtctgagatctaatagagtaagttacatttattttacaaagcaggataaaaatgtggctataatacacactacctcccttcactacagaaagaactaggtggtgtctactgctagggagattatatgaaggccaaaataatgacttcagcaagagtgactgaactcactctaaggcctttgactgcagaggcacctgttagggaaaatcagatgtctcatataataaggtgatgtcggaaacacgcaaaacaaaacgaaaaaagatttctcagtatacacaactgaatgatgatacttacaatttttagcaggtagctttttaatgtttacagaaattttaatttttttctattttgaaatttgaggcttgtttacattgcttagataatttagaatttttaactaatgtcaaaactacagtgtcaaacattctaggttgtagttactttcagagtagatacagggttttagatcattacagtttaagttttctgaccaattaaaaaaacatagagaacaaaagcatatttgaccaagcaacaagcttataattaatttttattagttgattgattaatgatgtattgccttttgcccatatataccctgtgtatctatacttggaagtgtttaaggttgccattggttgaaaacataagtgtctctggccatcaaagtgatcttgtttacagcagtgcttttgtgaaacaattatttatttgctgaaagagctcttctgaactgtgtccttttaatttttgcttagaatagaatggaacaagtttaaatttcaaggaaatatgaaggcacttcctttttttctaagaaggaagttgctagatgattccttcatcacacttacttaaagtactgagaagagtatctgtaaataaaagggttccaaccttttaaaaaagaaggaaaaaactttttggtgctccagtgtagggctatctttttaaaaaatgtcaacaaagggaaaataaactatcagcttggatggtcacttgaatagaagatggttatacacagtgttattgttaaaatttttttaccttttggttggtttgcatcttttttccatattgttaattttataccaaaatgttaaatatttgtattacttgaattttgctcttgtatggcaaaataattagtgagtttaaaaaaaatctatagtttccaataaacaactgaaaaatta

SEQ ID NO: 30645 - DNA, 4179 bp, Homo sapiens
aaaaataacagccgtatgcctctgctaagtactaactacctcatcaccttttgtgcagacaggcaggttacatttggtttaaggaattaggaatatgttctttccagcaccttagtaacccacgcgattgtgattcttttctcttcttgactgtgataggtggcatggaatattcacatgggagagccgcatgaggccgcccaccacgcttcctgaaggatgcccgtgtggaagaattttgacgtgccagtgtcctcgttctacagggtgttccattcttccgcaatctcagaaaaatgggactaaaagaaactattttgtaaaataagaagacttccatttttaatgaccaacatgtattaagatggacacctactctacgaaacacgaagttctatggtctcgaagaagcccgtgcctgtttaaaactgatcctaactaaaaacagacttgagtggatatgagaatgttggttagtggcagaagagtcaaaaaatggcagttaattattcagttatttgctacttgttttttagcgagcctcatgtttttttgggaaccaatcgataatcacattgtgagccatatgaagtcatattcttacagatacctcataaatagctatgactttgtgaatgataccctgtctcttaagcacacctcagcggggcctcgctaccaatacttgattaaccacaaggaaaagtgtcaagctcaagacgtcctccttttactgtttgtaaaaactgctcctgaaaactatgatcgacgttccggaattagaaggacgtggggcaatgaaaattatgttcggtctcagctgaatgccaacatcaaaactctgtttgccttaggaactcctaatccactggagggagaagaactacaaagaaaactggcttgggaagatcaaaggtacaatgatataattcagcaagactttgttgattctttctacaatcttactctgaaattacttatgcagttcagttgggcaaatacctattgtccacatgccaaatttcttatgactgctgatgatgacatatttattcacatgccaaatctgattgagtaccttcaaagtttagaacaaattggtgttcaagacttttggattggtcgtgttcatcgtggtgcccctcccattagagataaaagcagcaaatactacgtgtcctatgaaatgtaccagtggccagcttaccctgactacacagccggagctgcctatgtaatctccggtgatgtagctgccaaagtctatgaggcatcacagacactaaattcaagtctttacatagacgatgtgttcatgggcctctgtgccaataaaatagggatagtaccgcaggaccatgtgtttttttctggagagggtaaaactccttatcatccctgcatctatgaaaaaatgatgacatctcatggacacttagaagatctccaggacctttggaagaatgctacagatcctaaagtaaaaaccatttccaaaggtttttttggtcaaatatactgcagattaatgaagataattctcctttgtaaaattagctatgtggacacatacccttgtagggctgcgtttatctaatagtacttgaatgttgtatgttttcactgtcactgagtcaaacctggatgaaaaaaacctttaaatgttcgtctataccctaagtaaaatgaggacgaaagacaaatattttgaaagcctagtccatcagaatgtttctttgattctagaagctgtttaatatcacttatctacttcattgcctaagttcatttcaaagaatttgtatttagaaaaggtttatattattagtgaaaacaaaactaaagggaagttcaagttctcatgtaatgccacatatatacttgaggtgtagagatgttattaagaagttttgatgttagaataattgcttttggaaaataccaaatgaacgtacagtacaacatttcaaggaaatgaatatattgttagaccaggtaagcaagtttatttttgttaaagagcacttggtggaggtagtaggggcagggaaaggtcagcataggagagaaagttcatgaatctggtaaaacagtctcttgttcttaagaggagatgtagaaaaatgtgtacaatgttattataaacagacaaatcacgtcttaccacatccatgtagctactggtgttagagtcattaaaatacctttttttgcatcttttttcaaagtttaatgtgaacttttagaaaagtgattaatgttgccctaatactttatatgtttttaatggatttttttttaagtattagaaaatgacacataacacgggcagctggttgctcatagggtccttctctagggagaaaccattgttaattcaaataagctgattttaatgacgttttcaactggtttttaaatattcaatattggtctgtgtttaagtttgttatttgaatgtaatttacatagaggaatataataatggagagacttcaaatggaaagacagaacattacaagcctaatgtctccataattttataaaatgaaatcttagtgtctaaatccttgtactgattactaaaattaacccactcctccccaacaaggtcttataaaccacagcactttgttccaagttcagagttttaaattgagagcattaaacatcaaagttataatatctaaaacaatttatttttcatcaataactgtcagaggtgatctttattttctaaatatttcaaacttgaaaacagagtaaaaaagtgatagaaaagttgccagtttggggttaaagcatttttaaagctgcatgttccttgtaatcaaagagatgtgtctgagatctaatagagtaagttacatttattttacaaagcaggataaaaatgtggctataatacacactacctcccttcactacagaaagaactaggtggtgtctactgctagggagattatatgaaggccaaaataatgacttcagcaagagtgactgaactcactctaaggcctttgactgcagaggcacctgttagggaaaatcagatgtctcatataataaggtgatgtcggaaacacgcaaaacaaaacgaaaaaagatttctcagtatacacaactgaatgatgatacttacaatttttagcaggtagctttttaatgtttacagaaattttaatttttttctattttgaaatttgaggcttgtttacattgcttagataatttagaatttttaactaatgtcaaaactacagtgtcaaacattctaggttgtagttactttcagagtagatacagggttttagatcattacagtttaagttttctgaccaattaaaaaaacatagagaacaaaagcatatttgaccaagcaacaagcttataattaatttttattagttgattgattaatgatgtattgccttttgcccatatataccctgtgtatctatacttggaagtgtttaaggttgccattggttgaaaacataagtgtctctggccatcaaagtgatcttgtttacagcagtgcttttgtgaaacaattatttatttgctgaaagagctcttctgaactgtgtccttttaatttttgcttagaatagaatggaacaagtttaaatttcaaggaaatatgaaggcacttcctttttttctaagaaggaagttgctagatgattccttcatcacacttacttaaagtactgagaagagtatctgtaaataaaagggttccaaccttttaaaaaagaaggaaaaaactttttggtgctccagtgtagggctatctttttaaaaaatgtcaacaaagggaaaataaactatcagcttggatggtcacttgaatagaagatggttatacacagtgttattgttaaaatttttttaccttttggttggtttgcatcttttttccatattgttaattttataccaaaatgttaaatatttgtattacttgaattttgctcttgtatggcaaaataattagtgagtttaaaaaaaatctatagtttccaataaacaactgaaaaattaaaaaaaaaaaaaaatgtggggggggctgggccggagaagtttaaaacacttggtgggggggcccaggtgaggaaatgggcaagggccaagaaccgggagaagggtggtttccaaaaaaggcggaccgggttg

SEQ ID NO: 30646 - DNA, 3994 bp, Homo sapiens
aaaaataacagccgtatgcctctgctaagtactaactacctcatcaccttttgtgcagacaggcaggttacatttggtttaaggaattaggaatatgttctttccagcaccttagtaacccacgcgattgtgattcttttctcttcttgactgtgataggtggcatggaatattcacatgggagagccgcatgaggccgcccaccacgcttcctgaaggatgcccgtgtggaagaattttgacgtgccagtgtcctcgttctacagggtgttccattcttccgcaatctcagaaaaatgggactaaaagaaactattttgtaaaataagaagacttccatttttaatgaccaacatgtattaagatggacacctactctacgaaacacgaagttctatggtctcgaagaagcccgtgcctgtttaaaactgatcctaactaaaaacagacttgagtggatatgagaatgttggttagtggcagaagagtcaaaaaatggcagttaattattcagttatttgctacttgttttttagcgagcctcatgtttttttgggaaccaatcgataatcacattgtgagccatatgaagtcatattcttacagatacctcataaatagctatgactttgtgaatgataccctgtctcttaagcacacctcagcggggcctcgctaccaatacttgattaaccacaaggaaaagtgtcaagctcaagacgtcctccttttactgtttgtaaaaactgctcctgaaaactatgatcgacgttccggaattagaaggacgtggggcaatgaaaattatgttcggtctcagctgaatgccaacatcaaaactctgtttgccttaggaactcctaatccactggagggagaagaactacaaagaaaactggcttgggaagatcaaaggtacaatgatataattcagcaagactttgttgattctttctacaatcttactctgaaattacttatgcagttcagttgggcaaatacctattgtccacatgccaaatttcttatgactgctgatgatgacatatttattcacatgccaaatctgattgagtaccttcaaagtttagaacaaattggtgttcaagacttttggattggtcgtgttcatcgtggtgcccctcccattagagataaaagcagcaaatactacgtgtcctatgaaatgtaccagtggccagcttaccctgactacacagccggagctgcctatgtaatctccggtgatgtagctgccaaagtctatgaggcatcacagacactaaattcaagtctttacatagacgatgtgttcatgggcctctgtgccaataaaatagggatagtaccgcaggaccatgtgtttttttctggagagggtaaaactccttatcatccctgcatctatgaaaaaatgatgacatctcatggacacttagaagatctccaggacctttggaagaatgctacagatcctaaagtaaaaaccatttccaaaggtttttttggtcaaatatactgcagattaatgaagataattctcctttgtaaaattagctatgtggacacatacccttgtagggctgcgtttatctaatagtacttgaatgttgtatgttttcactgtcactgagtcaaacctggatgaaaaaaacctttaaatgttcgtctataccctaagtaaaatgaggacgaaagacaaatattttgaaagcctagtccatcagaatgtttctttgattctagaagctgtttaatatcacttatctacttcattgcctaagttcatttcaaagaatttgtatttagaaaaggtttatattattagtgaaaacaaaactaaagggaagttcaagttctcatgtaatgccacatatatacttgaggtgtagagatgttattaagaagttttgatgttagaataattgcttttggaaaataccaaatgaacgtacagtacaacatttcaaggaaatgaatatattgttagaccaggtaagcaagtttatttttgttaaagagcacttggtggaggtagtaggggcagggaaaggtcagcataggagagaaagttcatgaatctggtaaaacagtctcttgttcttaagaggagatgtagaaaaatgtgtacaatgttattataaacagacaaatcacgtcttaccacatccatgtagctactggtgttagagtcattaaaatacctttttttgcatcttttttcaaagtttaatgtgaacttttagaaaagtgattaatgttgccctaatactttatatgtttttaatggatttttttttaagtattagaaaatgacacataacacgggcagctggttgctcatagggtccttctctagggagaaaccattgttaattcaaataagctgattttaatgacgttttcaactggtttttaaatattcaatattggtctgtgtttaagtttgttatttgaatgtaatttacatagaggaatataataatggagagacttcaaatggaaagacagaacattacaagcctaatgtctccataattttataaaatgaaatcttagtgtctaaatccttgtactgattactaaaattaacccactcctccccaacaaggtcttataaaccacagcactttgttccaagttcagagttttaaattgagagcattaaacatcaaagttataatatctaaaacaatttatttttcatcaataactgtcagaggtgatctttattttctaaatatttcaaacttgaaaacagagtaaaaaagtgatagaaaagttgccagtttggggttaaagcatttttaaagctgcatgttccttgtaatcaaagagatgtgtctgagatctaatagagtaagttacatttattttacaaagcaggataaaaatgtggctataatacacactacctcccttcactacagaaagaactaggtggtgtctactgctagggagattatatgaaggccaaaataatgacttcagcaagagtgactgaactcactctaaggcctttgactgcagaggcacctgttagggaaaatcagatgtctcatataataaggtgatgtcggaaacacgcaaaacaaaacgaaaaaagatttctcagtatacacaactgaatgatgatacttacaatttttagcaggtagctttttaatgtttacagaaattttaatttttttctattttgaaatttgaggcttgtttacattgcttagataatttagaatttttaactaatgtcggttttagatcattacagtttaagttttctgaccaattaaaaaaacatagagaacaaaagcatatttgaccaagcaacaagcttataattaatttttattagttgattgattaatgatgtattgccttttgcccatatataccctgtgtatctatacttggaagtgtttaaggttgccattggttgaaaacataagtgtctctggccatcaaagtgatcttgtttacagcagtgcttttgtgaaacaattatttatttgctgaaagagctcttctgaactgtgtccttttaatttttgcttagaatagaatggaacaagtttaaatttcaaggaaatatgaaggcacttcctttttttctaagaaggaagttgctagatgattccttcatcacacttacttaaagtactgagaagagtatctgtaaataaaagggttccaaccttttaaaaaagaaggaaaaaactttttggtgctccagtgtagggctatctttttaaaaaatgtcaacaaagggaaaataaactatcagcttggatggtcacttgaatagaagatggttatacacagtgttattgttaaaatttttttaccttttggttggtttgcatcttttttccatattgttaattttataccaaaatgttaaatatttgtattacttgaattttgctcttgtatggcaaaataattagtgagtttaaaaaaaatctatagtttccaataaacaactgaaaaatta

SEQ ID NO: 30647 - DNA, 2550 bp, Homo sapiens
ggacgcgtgggtcgacccacgcgtcggattaatgaagataattctcctttgtaaaattagctatgtggacacatacccttgtagggctgcgtttatctaatagtacttgaatgttgtatgttttcactgtcactgagtcaaacctggatgaaaaaaacctttaaatgttcgtctataccctaagtaaaatgaggacgaaagacaaatattttgaaagcctagtccatcagaatgtttctttgattctagaagctgtttaatatcacttatctacttcattgcctaagttcatttcaaagaatttgtatttagaaaaggtttatattattagtgaaaacaaaactaaagggaagttcaagttctcatgtaatgccacatatatacttgaggtgtagagatgttattaagaagttttgatgttagaataattgcttttggaaaataccaaatgaacgtacagtacaacatttcaaggaaatgaatatattgttagaccaggtaagcaagtttatttttgttaaagagcacttggtggaggtagtaggggcagggaaaggtcagcataggagagaaagttcatgaatctggtaaaacagtctcttgttcttaagaggagatgtagaaaaatgtgtacaatgttattataaacagacaaatcacgtcttaccacatccatgtagctactggtgttagagtcattaaaatacctttttttgcatcttttttcaaagtttaatgtgaacttttagaaaagtgattaatgttgccctaatactttatatgtttttaatggatttttttttaagtattagaaaatgacacataacacgggcagctggttgctcatagggtccttctctagggagaaaccattgttaattcaaataagctgattttaatgacgttttcaactggtttttaaatattcaatattggtctgtgtttaagtttgttatttgaatgtaatttacatagaggaatataataatggagagacttcaaatggaaagacagaacattacaagcctaatgtctccataattttataaaatgaaatcttagtgtctaaatccttgtactgattactaaaattaacccactcctccccaacaaggtcttataaaccacagcactttgttccaagttcagagttttaaattgagagcattaaacatcaaagttataatatctaaaacaatttatttttcatcaataactgtcagaggtgatctttattttctaaatatttcaaacttgaaaacagagtaaaaaagtgatagaaaagttgccagtttggggttaaagcatttttaaagctgcatgttccttgtaatcaaagagatgtgtctgagatctaatagagtaagttacatttattttacaaagcaggataaaaatgtggctataatacacactacctcccttcactacagaaagaactaggtggtgtctactgctagggagattatatgaaggccaaaataatgacttcagcaagagtgactgaactcactctaaggcctttgactgcagaggcacctgttagggaaaatcagatgtctcatataataaggtgatgtcggaaacacgcaaaacaaaacgaaaaaagatttctcagtatacacaactgaatgatgatacttacaatttttagcaggtagctttttaatgtttacagaaattttaatttttttctattttgaaatttgaggcttgtttacattgcttagataatttagaatttttaactaatgtcaaaactacagtgtcaaacattctaggttgtagttactttcagagtagatacagggttttagatcattacagtttaagttttctgaccaattaaaaaaacatagagaacaaaagcatatttgaccaagcaacaagcttataattaatttttattagttgattgattaatgatgtattgccttttgcccatatataccctgtgtatctatacttggaagtgtttaaggttgccattggttgaaaacataagtgtctctggccatcaaagtgatcttgtttacagcagtgcttttgtgaaacaattatttatttgctgaaagagctcttctgaactgtgtccttttaatttttgcttagaatagaatggaacaagtttaaatttcaaggaaatatgaaggcacttcctttttttctaagaaggaagttgctagatgattccttcatcacacttacttaaagtactgagaagagtatctgtaaataaaagggttccaaccttttaaaaaagaaggaaaaaactttttggtgctccagtgtagggctatctttttaaaaaatgtcaacaaagggaaaataaactatcagcttggatggtcacttgaatagaagatggttatacacagtgttattgttaaaatttttttaccttttggttggtttgcatcttttttccatattgttaattttataccaaaatgttaaatatttgtattacttgaattttgctcttgtatggcaaaataattagtgagtttaaaaaaaatctatagtttccaataaacaactgaaaaatta

SEQ ID NO: 30648 - DNA, 3640 bp, Homo sapiens
  misc_feature (3614)..(3614): n is a, c, g, or t
aaaaataacagccgtatgcctctgctaagtactaactacctcatcaccttttgtgcagacaggcaggttacatttggtttaaggaattaggaatatgttctttccagcaccttagtaacccacgcgattgtgattcttttctcttcttgactgtgataggtggcatggaatattcacatgggagagccgcatgaggccgcccaccacgcttcctgaaggatgcccgtgtggaagaattttgacgtgccagtgtcctcgttctacagggtgttccattcttccgcaatctcagaaaaatgggactaaaagaaactattttgtaaaataagaagacttccatttttaatgaccaacatgtattaagatggacacctactctacgaaacacgaagttctatggtctcgaagaagcccgtgcctgtttaaaactgatcctaactaaaaacagacttgagtggatatgagaatgttggttagtggcagaagagtcaaaaaatggcagttaattattcagttatttgctacttgttttttagcgagcctcatgtttttttgggaaccaatcgataatcacattgtgagccatatgaagtcatattcttacagatacctcataaatagctatgactttgtgaatgataccctgtctcttaagcacacctcagcggggcctcgctaccaatacttgattaaccacaaggaaaagtgtcaagctcaagacgtcctccttttactgtttgtaaaaactgctcctgaaaactatgatcgacgttccggaattagaaggacgtggggcaatgaaaattatgttcggtctcagctgaatgccaacatcaaaactctgtttgccttaggaactcctaatccactggagggagaagaactacaaagaaaactggcttgggaagatcaaaggtacaatgatataattcagcaagactttgttgattctttctacaatcttactctgaaattacttatgcagttcagttgggcaaatacctattgtccacatgccaaatttcttatgactgctgatgatgacatatttattcacatgccaaatctgattgagtaccttcaaagtttagaacaaattggtgttcaagacttttggattggtcgtgttcatcgtggtgcccctcccattagagataaaagcagcaaatactacgtgtcctatgaaatgtaccagtggccagcttaccctgactacacagccggagctgcctatgtaatctccggtgatgtagctgccaaagtctatgaggcatcacagacactaaattcaagtctttacatagacgatgtgttcatgggcctctgtgccaataaaatagggatagtaccgcaggaccatgtgtttttttctggagagggtaaaactccttatcatccctgcatctatgaaaaaatgatgacatctcatggacacttagaagatctccaggacctttggaagaatgctacagatcctaaagtaaaaaccatttccaaaggtttttttggtcaaatatactgcagattaatgaagataattctcctttgtaaaattagctatgtggacacatacccttgtagggctgcgtttatctaatagtacttgaatgttgtatgttttcactgtcactgagtcaaacctggatgaaaaaaacctttaaatgttcgtctataccctaagtaaaatgaggacgaaagacaaatattttgaaagcctagtccatcagaatgtttctttgattctagaagctgtttaatatcacttatctacttcattgcctaagttcatttcaaagaatttgtatttagaaaaggtttatattattagtgaaaacaaaactaaagggaagttcaagttctcatgtaatgccacatatatacttgaggtgtagagatgttattaagaagttttgatgttagaataattgcttttggaaaataccaaatgaacgtacagtacaacatttcaaggaaatgaatatattgttagaccaggtaagcaagtttatttttgttaaagagcacttggtggaggtagtaggggcagggaaaggtcagcataggagagaaagttcatgaatctggtaaaacagtctcttgttcttaagaggagatgtagaaaaatgtgtacaatgttattataaacagacaaatcacgtcttaccacatccatgtagctactggtgttagagtcattaaaatacctttttttgcatcttttttcaaagtttaatgtgaacttttagaaaagtgattaatgttgccctaatactttatatgtttttaatggatttttttttaagtattagaaaatgacacataacacgggcagctggttgctcatagggtccttctctagggagaaaccattgttaattcaaataagctgattttaatgacgttttcaactggtttttaaatattcaatattggtctgtgtttaagtttgttatttgaatgtaatttacatagaggaatataataatggagagacttcaaatggaaagacagaacattacaagcctaatgtctccataattttataaaatgaaatcttagtgtctaaatccttgtactgattactaaaattaacccactcctccccaacaaggtcttataaaccacagcactttgttccaagttcagagttttaaattgagagcattaaacatcaaagttataatatctaaaacaatttatttttcatcaataactgtcagaggtgatctttattttctaaatatttcaaacttgaaaacagagtaaaaaagtgatagaaaagttgccagtttggggttaaagcatttttaaagctgcatgttccttgtaatcaaagagatgtgtctgagatctaatagagtaagttacatttattttacaaagcaggataaaaatgtggctataatacacactacctcccttcactacagaaagaactaggtggtgtctactgctagggagattatatgaaggccaaaataatgacttcagcaagagtgactgaactcactctaaggcctttgactgcagaggcacctgttagggaaaatcagatgtctcatataataaggtgatgtcggaaacacgcaaaacaaaacgaaaaaagatttctcagtatacacaactgaatgatgatacttacaatttttagcaggtagctttttaatgtttacagaaattttaatttttttctattttgaaatttgaggcttgtttacattgcttagataatttagaatttttaactaatgtcaaaactacagtgtcaaacattctaggttgtagttactttcagagtagatacagggttttagatcattacagtttaagttttctgaccaattaaaaaaacatagagaacaaaagcatatttgaccaagcaacaagcttataattaatttttattagttgattgattaatgatgtattgccttttgcccatatataccctgtgtatctatacttggaagtgtttaaggttgccattggttgaaaacataagtgtctctggccatcaaagtgatcttgtttacagcagtgcttttgtgaaacaattatttatttgctgaaagagctcttctgaactgtgtccttttaatttttgagacaaaggnacccgggatcctctggtcgcccccgg

SEQ ID NO: 30649 - DNA, 3555 bp, Homo sapiens
aaaaataacagccgtatgcctctgctaagtactaactacctcatcaccttttgtgcagacaggcaggttacatttggtttaaggaattaggaatatgttctttccagcaccttagtaacccacgcgattgtgattcttttctcttcttgactgtgataggtggcatggaatattcacatgggagagccgcatgaggccgcccaccacgcttcctgaaggatgcccgtgtggaagaattttgacgtgccagtgtcctcgttctacagggtgttccattcttccgcaatctcagaaaaatgggactaaaagaaactattttgtaaaataagaagacttccatttttaatgaccaacatgtattaagatggacacctactctacgaaacacgaagttctatggtctcgaagaagcccgtgcctgtttaaaactgatcctaactaaaaacagacttgagtggatatgagaatgttggttagtggcagaagagtcaaaaaatggcagttaattattcagttatttgctacttgttttttagcgagcctcatgtttttttgggaaccaatcgataatcacattgtgagccatatgaagtcatattcttacagatacctcataaatagctatgactttgtgaatgataccctgtctcttaagcacacctcagcggggcctcgctaccaatacttgattaaccacaaggaaaagtgtcaagctcaagacgtcctccttttactgtttgtaaaaactgctcctgaaaactatgatcgacgttccggaattagaaggacgtggggcaatgaaaattatgttcggtctcagctgaatgccaacatcaaaactctgtttgccttaggaactcctaatccactggagggagaagaactacaaagaaaactggcttgggaagatcaaaggtacaatgatataattcagcaagactttgttgattctttctacaatcttactctgaaattacttatgcagttcagttgggcaaatacctattgtccacatgccaaatttcttatgactgctgatgatgacatatttattcacatgccaaatctgattgagtaccttcaaagtttagaacaaattggtgttcaagacttttggattggtcgtgttcatcgtggtgcccctcccattagagataaaagcagcaaatactacgtgtcctatgaaatgtaccagtggccagcttaccctgactacacagccggagctgcctatgtaatctccggtgatgtagctgccaaagtctatgaggcatcacagacactaaattcaagtctttacatagacgatgtgttcatgggcctctgtgccaataaaatagggatagtaccgcaggaccatgtgtttttttctggagagggtaaaactccttatcatccctgcatctatgaaaaaatgatgacatctcatggacacttagaagatctccaggacctttggaagaatgctacagatcctaaagtaaaaaccatttccaaaggtttttttggtcaaatatactgcagattaatgaagataattctcctttgtaaaattagctatgtggacacatacccttgtagggctgcgtttatctaatagtacttgaatgttgtatgttttcactgtcactgagtcaaacctggatgaaaaaaacctttaaatgttcgtctataccctaagtaaaatgaggacgaaagacaaatattttgaaagcctagtccatcagaatgtttctttgattctagaagctgtttaatatcacttatctacttcattgcctaagttcatttcaaagaatttgtatttagaaaaggtttatattattagtgaaaacaaaactaaagggaagttcaagttctcatgtaatgccacatatatacttgaggtgtagagatgttattaagaagttttgatgttagaataattgcttttggaaaataccaaatgaacgtacagtacaacatttcaaggaaatgaatatattgttagaccaggtaagcaagtttatttttgttaaagagcacttggtggaggtagtaggggcagggaaaggtcagcataggagagaaagttcatgaatctggtaaaacagtctcttgttcttaagaggagatgtagaaaaatgtgtacaatgttattataaacagacaaatcacgtcttaccacatccatgtagctactggtgttagagtcattaaaatacctttttttgcatcttttttcaaagtttaatgtgaacttttagaaaagtgattaatgttgccctaatactttatatgtttttaatggatttttttttaagtattagaaaatgacacataacacgggcagctggttgctcatagggtccttctctagggagaaaccattgttaattcaaataagctgattttaatgacgttttcaactggtttttaaatattcaatattggtctgtgtttaagtttgttatttgaatgtaatttacatagaggaatataataatggagagacttcaaatggaaagacagaacattacaagcctaatgtctccataattttataaaatgaaatcttagtgtctaaatccttgtactgattactaaaattaacccactcctccccaacaaggtcttataaaccacagcactttgttccaagttcagagttttaaattgagagcattaaacatcaaagttataatatctaaaacaatttatttttcatcaataactgtcagaggtgatctttattttctaaatatttcaaacttgaaaacagagtaaaaaagtgatagaaaagttgccagtttggggttaaagcatttttaaagctgcatgttccttgtaatcaaagagatgtgtctgagatctaatagagtaagttacatttattttacaaagcaggataaaaatgtggctataatacacactacctcccttcactacagaaagaactaggtggtgtctactgctagggagattatatgaaggccaaaataatgacttcagcaagagtgactgaactcactctaaggcctttgactgcagaggcacctgttagggaaaatcagatgtctcatataataaggtgatgtcggaaacacgcaaaacaaaacgaaaaaagatttctcagtatacacaactgaatgatgatacttacaatttttagcaggtagctttttaatgtttacagaaattttaatttttttctattttgaaatttgaggcttgtttacattgcttagataatttagaatttttaactaatgtcaaaactacagtgtcaaacattctaggttgtagttactttcagagtagatacagggttttagatcattacagtttaagttttctgaccaattaaaaaaacatagagaacaaaagcatatttgaccaagcaacaagcttataattaatttttattagttgattgattaatgatgtattgccttttgcccatatataccctgtgtatctatacttggaagtgtttaaggttgccattggttgaaaacataagtgtaatgatctaaaaccctgtatctactctgaaagtaactacaaccaagagtg

SEQ ID NO: 30650 - DNA, 1283 bp, Homo sapiens
tgcacccacagcagtctgttgtggatggttgctgagctgcgcattcggcattgggcttgctttgtttcctgccaggcccagcattttcttctaccagatcggcaggcttgtgggcttcttcctaggtccctcccctgcactctgaataggaaagctggaagctgtgctttagagaagctttaagacgccgaaagaaaccagaagagtgagcgccagttgtatgtggcatggaatattcacatgggagagccgcatgaggccgcccaccacgcttcctgaaggatgcccgtgtggaagaattttgacgtgccagtgtcctcgttctacagggtgttccattcttccgcaatctcagaaaaatgggactaaaagaaactattttgtaaaataagaagacttccatttttaatgaccaacatgtattaagatggacacctactctacgaaacacgaagttctatggtctcgaagaagcccgtgcctgtttaaaactgatcctaactaaaaacagacttgagtggatatgagaatgttggttagtggcagaagagtcaaaaaatggcagttaattattcagttatttgctacttgttttttagcgagcctcatgtttttttgggaaccaatcgataatcacattgtgagccatatgaagtcatattcttacagatacctcataaatagctatgactttgtgaatgataccctgtctcttaagcacacctcagcggggcctcgctaccaatacttgattaaccacaaggaaaagtgtcaagctcaagacgtcctccttttactgtttgtaaaaactgctcctgaaaactatgatcgacgttccggaattagaaggacgtggggcaatgaaaattatgttcggtctcagctgaatgccaacatcaaaactctgtttgccttaggaactcctaatccactggagggagaagaactacaaagaaaactggcttgggaagatcaaaggtacaatgatataattcagcaagactttgttgattctttctacaatcttactctgaaattacttatgcagttcagttgggcaaatacctattgtccacatgccaaatttcttatgactgctgatgatgacatatttattcacatgccaaatctgattgagtaccttcaaagtttagaacaaattggtgttcaagacttttggattggtcgtgttcatcgtggtgcccctcccattagagataaaagcagcaaatactacgtgtcctgtcgacgcggccgcgaatttagtagtagtaggcggccgc

SEQ ID NO: 30651 - DNA, 296 bp, Homo sapiens
gagctggagctctggacacttttgctgggctacctgctggaagccaggggacctaggttcctattgctgacgtgccagtgatttactgtgtggctttgggtaagggaccttttcccttctgttcattggagtttgtccctgtgcatggggtggggtgggcagtggattagatttcttttgtggtttaaggcactctccaatcgaaaatgcaaaccgtatgtataatttagaatattttcatagccgtatttttagagaagggacacaagtgatattttaataaatttatttgaccc

SEQ ID NO: 30652 - DNA, 353 bp, Homo sapiens
atgctaaaagagaaaaggaacaagtttctaagctcgaaaagctgaaagtcagttgttctattatgtaaattcagtgtgaaggcagtgggcaaccagtcaccctctcatggggagaccactactagggcataatttttacccaaatttctgtagttcctatagataaataacttcagcacttggcctttaatagtgtaggggaaggaggtcaggcgtggaggctcatgcctgtaatctcagcactttgagaggccgaggtgggcagatggcttgaacccaggagtttgagaccagcctgggcaacatggtgaaaccttgtctctgggcaacatggtaaaaacctgtctctacaa

SEQ ID NO: 30653 - DNA, 411 bp, Homo sapiens
cccctgtgcagcctgcgtgcctcctggaggtggggccttggggtaggaggtccccacaacatgtggaaacgcagtaggcatgggagattgaagtctccacttctgactcacctgctaatgggaaaagtgcagactcttgggctccataatggggtaggggttgagaaggtattttaaaagccaggcttagtggggaaataaaaactaaagcagacccacccagagagctgtcttacaactatctattattttcacatggactggggggagtatgggatgggcagagttgagtgcatcttagaaaatccaggtgagaggctgtggccaagggaacccacgggcccggtgctctgaagccctgggctgctggaaccggcttgacggtgtctttctctgttctcctccccacag

SEQ ID NO: 30654 - DNA, 784 bp, Homo sapiens
gagaagccgtataagtgtgagacgtgcggctcgcgctttgtacaggtacggagccagcctccaagtggcttccaaggcaaacctgcaagaggtggggtgggcccatagggagggttctgttcctcccagaggcaggacttgaagtctcctccctcccaggtggcacatctgcgggcgcacgtgctgatccacaccggggagaagccctacccttgccctacctgcggaacccgcttccgccacctgcagaccctcaagagccacgttcgcatccacaccggagagaagccttaccacgaaccagtgacttcatgaagtttctccggagccacctgcatcctgctgctctgaagtcacttcctgcctgaggtgtggaggcggcagggagaaaccaggaagccactaataatatcaagaggccggggcgtgcatctgtgctggagatcttaatgctggcgacatgcctccatcaccaaggaagatggataagagttgggtcccgtaaagaccacaggggctggaggtggcactgagaagactgagttagaactaacgggccagcccaccctcccccagcaagggtatcttgaatctatccagggtccagtgcatgcatctctcccaccctttcccctgtcctgtgtgtgtgctgggtgcggaggtcactaattctgatattaccttcctctgggccttaaattcctcatctgtgaaaaagtcagttaccatgatctctgcagctacctccaacattgaaagtttgtagttgtcttaaaatgtcttc

SEQ ID NO: 30655 - DNA, 201 bp, Homo sapiens
agatggagcacgtggtccaggcatgccaccgcttcatccaggccagctatgaacctctgggcatctccgcttccgccacctgcagaccctcaagagccacgttcgcatccacaccggagagaagccttaccactgcgacccctgtggcctgcatttccggcacaagagtcaactgcggctgcatctgcgccagaaacacgg

SEQ ID NO: 30656 - DNA, 1254 bp, Homo sapiens
gaaccattatgttgagcccaaaatggaagtaataataaatgcctcctggaggctgtgggtgtgggggattctgtatctggattccgtatcactccaagtggaggctggcaggtttttctgcaagatggtccagaatctaaaatgtcccattaatctggtcacttgggtttggctctgctgtatccatctatagtggtagagacccaccagggctcaagtggagtccatcatcctcccacgggggcctgttcttagcactgagttgatcgctccatgggggagagatcagacattccttatcagagatgatgtgaccttttctgactctgcccagtctctatgaatgttatggcctagggaagaatcatgaaactctttagcttgattagatggtaaacagtgttaacccatcctttactacagaggcatatgggtttgaatgttacctggggttctctctattgagttgagccccttcttcctttagtgggttttggacatcttctggcaagtgtccagatgccagaaccttcttttcctctagaagggatggtgcttggtaaccttaccttttaaaagctgggtctgtgacctggtcttcccatccctgcattcctgtctggaaccagtgaatgcattagaaccttccataggaaaagaaaaggggctgagttccattctgggtttgctgtagtttggttgggattattgttggcattacagatgtaaaagattgactagcccataggccaaaggcctgttctagttgaccaagtttcaagtaggattaagaggttggttgaggggtgcagtttctggtgtaggccaggtaggtagaaagtgaggaacagggttgcctcttggctgggtggagtctctgaaatgttagaagaagcgctgaagccttgattgatagttctgccccttgttgccctggggcttatctgattatgggacgagggtagaaagtaagaagcacttttgaatttgtggggtagaacttcaacaataagtcagttctagtggctgtcgcctggggactagtgagaaagctactcttctccctcttccctctttctccccatggccccactgcagaattaaagaaggaagaagggaaggcggaggagtctataagaaggaatcatgatttctatttagcagattggatgggcaggtggagaatgcctgggggtagaaatgttagatcttgcaacatcagatccttggaataaagaagcctctctgtgctgc

SEQ ID NO: 30657 - DNA, 1911 bp, Homo sapiens
gaaccattatgttgagcccaaaatggaagtaataataaatgcctcctggaggctgtgggtgtgggggattctgtatctggattccgtatcactccaagtggaggctggcaggtttttctgcaagatggtccagaatctaaaatgtcccattaatctggtcacttgggtttggctctgctgtatccatctatagtggtagagacccaccagggctcaagtggagtccatcatcctcccacgggggcctgttcttagcactgagttgatcgctccatgggggagagatcagacattccttatcagagatgatgtgaccttttctgactctgcccagtctctatgaatgttatggcctagggaagaatcatgaaactctttagcttgattagatggtaaacagtgttaacccatcctttactacagaggcatatgggtttgaatgttacctggggttctctctattgagttgagccccttcttcctttagtgggttttggacatcttctggcaagtgtccagatgccagaaccttcttttcctctagaagggatggtgcttggtaaccttaccttttaaaagctgggtctgtgacctggtcttcccatccctgcattcctgtctggaaccagtgaatgcattagaaccttccataggaaaagaaaaggggctgagttccattctgggtttgctgtagtttggttgggattattgttggcattacagatgtaaaagattgactagcccataggccaaaggcctgttctagttgaccaagtttcaagtaggattaagaggttggttgaggggtgcagtttctggtgtaggccaggtaggtagaaagtgaggaacagggttgcctcttggctgggtggagtctctgaaatgttagaagaagcgctgaagccttgattgatagttctgccccttgttgccctggggcttatctgattatgggacgagggtagaaagtaagaagcacttttgaatttgtggggtagaacttcaacaataagtcagttctagtggctgtcgcctggggactagtgagaaagctactcttctccctcttccctctttctccccatggccccactgcagaattaaagaaggaagaagggaaggcggaggagtctataagaaggaatcatgatttctatttagcagattggatgggcaggtggagaatgcctgggggtagaaatgttagatcttgcaacatcagatccttggaataaagaagcctctctgtgctgcctgctgtgtcctgggttcttgccttgggggactcggggagcgaggaagagagctcttcctcctggataacatcttggattctgtaccattccactgtcccttcccaccagacattttaaatggtcctcgttgtccccttccctgcccttgccttcctgctcattgtgtaggaaccagtgacttcatgaagtttctccggagccacctgcatcctgctgctctgaagtcacttcctgcctgaggtgtggaggcggcagggagaaaccaggaagccactaataatatcaagaggccggggcgtgcatctgtgctggagatcttaatgctggcgacatgcctccatcaccaaggaagatggataagagttgggtcccgtaaagaccacaggggctggaggtggcactgagaagactgagttagaactaacgggccagcccaccctcccccagcaagggtatcttgaatctatccagggtccagtgcatgcatctctcccaccctttcccctgtcctgtgtgtgtgctgggtgcggaggtcactaattctgatattaccttcctctgggccttaaattcctcatctgtgaaaaagtcagttaccatgatctctgcagctacctccaacattgaaagtttgtagttgtcttaaaatgtcttc

SEQ ID NO: 30658 - DNA, 1194 bp, Homo sapiens
gaaccattatgttgagcccaaaatggaagtaataataaatgcctcctggaggctgtgggtgtgggggattctgtatctggattccgtatcactccaagtggaggctgtgggtgtgggggattctgtatctggattcccgtatccactccaagtggagtctctgaaatgttagaagaagcgctgaagccttgattgatagttctgccccttgttgccctggggcttatctgattatgggacgagggtagaaagtaagaagcacttttgaatttgtggggtagaacttcaacaataagtcagttctagtggctgtcgcctggggactagtgagaaagctactcttctccctcttccctctttctccccatggccccactgcagaattaaagaaggaagaagggaaggcggaggagtctataagaaggaatcatgatttctatttagcagattggatgggcaggtggagaatgcctgggggtagaaatgttagatcttgcaacatcagatccttggaataaagaagcctctctgtgctgcctgctgtgtcctgggttcttgccttgggggactcggggagcgaggaagagagctcttcctcctggataacatcttggattctgtaccattccactgtcccttcccaccagacattttaaatggtcctcgttgtccccttccctgcccttgccttcctgctcattgtgtaggaaccagtgacttcatgaagtttctccggagccacctgcatcctgctgctctgaagtcacttcctgcctgaggtgtggaggcggcagggagaaaccaggaagccactaataatatcaagaggccggggcgtgcatctgtgctggagatcttaatgctggcgacatgcctccatcaccaaggaagatggataagagttgggtcccgtaaagaccacaggggctggaggtggcactgagaagactgagttagaactaacgggccagcccaccctcccccagcaagggtatcttgaatctatccagggtccagtgcatgcatctctcccaccctttcccctgtcctgtgtgtgtgctgggtgcggaggtcactaattctgatattaccttcctctgggccttaaattcctcatctgtgaaaaagtcagttaccatgatctctgcagctacctccaacattgaaagtttgtagttgtcttaaaatgtcttc

SEQ ID NO: 30659 - DNA, 444 bp, Homo sapiens
cactgaaagtaaggaggagcagatagagaagaatttggaagatccactgacttccctgctccaattcaagtaatcttgtctttcagatgattcttacataagaaatttaaaaattacctccatcttattagggcattttttccactataaaatgttaagatccaacttactttttaaagatttatagtattttattttttctaccttactttaaaaaaatgtatctatttcgctgggcgcagtggcccacgtctgtaatcccagcactttgggaggccgaggcgggtagatcttgaggtctggagatcaagaccatcctggctaacacagtgaaaccctgtctctactaaaattacaaaaaatatttttttgtggtgacagaaaaaatacaggtgtggtaacacgcgcctgtagtcccagctactcaggagcctgagggaggag

SEQ ID NO: 30660 - DNA, 564 bp, Homo sapiens
gatgtaacaagataatttcttttcctaaaattatagagcataatgtataattttatatctattctcaatagctgaagttaggtgctcaaaatgttttcagaattattaaataaagatgtatgttacgagattactatgcgttgacaatatagtgactgcaataaaattatactactaagctattaaccttgaggaatctgtcatgaacttgcaccccacaaaggagaggaatctgagcactcacccatcatagatgactttaagacttcttaagggccgggcgccgtggctcatgcctgtaatcccagcactttgggaggccgaggcgggcggatcacagggtcaggagatcaagaccatcctggctaacacggtgaaaccccttctctaccaaaaatacaaaaaaattagccgggcgtggtggcgggcgcctgtagtcccagctactcaggaggctgaggcaggagaacggtgtgaacccggaaggcggagcttgcagtgagctgagatcacaccactgcactccagcctgggcgacagagcgagactccatctcaacaacaa

SEQ ID NO: 30661 - DNA, 294 bp, Homo sapiens
caaatgtggcttgttatacagtctcttctctatttacttcctgataaggtccttgatgcaatgcccagtaggcagcagacactgaataaatatttgttaaaggggatcaagaattgtgacttctagaatttctgcaggcaatcaaagattattaataagagaaaggagatgaaccaggggaaccagaagaccatttgaaggaagataatggaaaattttcttttaggtgaaatagagatgagataagcaaagcgaggctaccattttgaaattctctctgtgtgtaaagaattc

SEQ ID NO: 30662 - DNA, 924 bp, Homo sapiens
atgctgaatacaacctcagtcaccgaatttctcctcttgggagtgacagacattcaagaactgcagccttttctcttcgtggttttcctcaccatctacttcatcagtgtgactgggaatggagccgttctgatgattgtcatctccgatcctagactccattcccttatgtatttcttcctgggaaacctgtcctacctggatatctgttactctacggtgacactgccaaaaatgctgcagaactttctctctacacacaaagcaatttctttcttgggatgcataagccagcttcatttcttccacttcctgggcagcacggagtccatgttgttcgccgtgatggcatttgacctctctgtggctatctgcaagccacttcgctacactgtcatcatgaaccctcagctctgtacccagatggccatcacaatctgggtcattggttttttccatgccctgctgcactccgtaatgacttctcgcttgaacttctgtggttccaaccgtatccatcattttctctgtgatattaagccattgctaaagctggcctgtgggaacactgagcttaatcagtggctactcagtactgtcacggggacaattgccatgggccccttctttctgacacttctctcctatttctacattatcacttatctcttcttcaagacccgttcttgtagcatgctctgtaaagcactgtccacttgtgcctcccacttcatggtagttattcttttctatgcacctgttcttttcacctatatccatcctgcgttagagagcttcatggaccaggaccggattgttgccatcatgtacactgtggtcactcctgtactaaacccactgatctatactttgaggaacaaggaagtgaagggggccttgggtagagtgatcagaaggctttga

SEQ ID NO: 30663 - DNA, 226 bp, Homo sapiens
caagacaataaaacaagcaagcaacaacaacaacaacaaaaaactctcctagaaatattagatagaggggaacttcctcaacttgataaagagcatgtaacaacttgataaagaacagctaatttacttaacggtaaaagactaagtcaaggatgtcttcttataccactcctattcaacattgtgctgaaagttctagccagaacaattagggaagaaaaggaaa

SEQ ID NO: 30664 - DNA, 430 bp, Homo sapiens
tgaagtgagctccaccaattgatagactaaatctcattcctaaatgtgaccacagagccaaggaccaccagatagttgaagaaagcttctaacaggaaatatagagaccaaaacaaacaggcaggtaaaaagaacttgaaagaaacagagatattaaggaacagaagaaaactaacaaaaacaacaacaacaaagcaatattgtacccttataagagagagctcatccatgaaacaggaatatgagtctataaaaaagaataaagagcaatataatgctctgaaaaattaaatacttctatccaacatattttaaaaaaccatttgaaactttagttctggattgttacgattttattaatttatgcctcttattattaggacttttttgttcacagttgtattcccaaaatacatagtttcaaaataca

SEQ ID NO: 30665 - DNA, 589 bp, Homo sapiens
ataagttcaacagcaaggcctcctatacttgatgtcttactgcagcgtcctttgtgctgggagctaaaaatggcaggacaaaggaaaggtgcgcacggtagaagggccttgagtatttgggaagtactcatggagtcacctcctccattgcctttagaacttatttctgactcctggtggtcagtgctccctaagtctttattttaaagtggaggctcctcagcgagcctcagggaatatgttactgctcacctggctctgaaagactgagtgtcactgaggctttagaaatggttctcgaagtgtggtcctcagagtacctttgttggaattgttgcatgtgcatatgtgtctgttggtggggggtggtacataccaaaaatactggattctgaacatcacatcagagtctctgaggatgaggtccaggaatttcactgagctccccagatgatgtttatgggcagtagcatttacgaaattctgttttcatgtcctgtttacaaagaagagggaaaaaatgcttgaacatcattaagaaggtaatcctaatatttttaaattaattttatttcatttaatcatatac

SEQ ID NO: 30666 - DNA, 745 bp, Homo sapiens
ccactgcctctggctttattttgcagaatttgaatgttaaacttttaaccttttgtttcagtcaatatctgctatcttcaagaaggactgaaacaataaattaaaagcttaatactcaggagctaggcatgcttgtagtcccagctactcatgaggcttaaatggaggatcacttgaggcctagccttggaggctgcagtgcactgtgattgtgcctgtaaatagctattgcactccagccttggcaacataatgagacactgtcactttaaaaaatggcaaaactaaataaacgtaaaagaaatacaacaagcttttcaatgatttgtaaatgtttgtagcattgttacttctacaagtatcaaagcttaaaatttcactaagacttttggaattcttgtgtttttataaagtgcccttttctcttgtaaagtagctctttgcaaggcttttatctgcattgatcacctcagattattttccctagatgtgataaagaggaggatccatgttaattcatatgtaacaaattagaaggaattggaccctaatagtagtaggtgatgcaatacattttattatcccacatgttagcctggatgcaggtatcatatttcatgtcctgctatttaaaaagaacttccgtaaaccttaggaatcctacctcctgaaaaagtatcatttatggaatgcagagcttagagattggagtattgattgcagttttattttcaaaataaatgct

SEQ ID NO: 30667 - DNA, 164 bp, Homo sapiens
tgatcccttgggtcctatatctgtcacccactttaggtacttatcaactgattagtcttgtttctgtacctatacccactcctcacttatcttcattatggtcatatcttctttaaaaactggaaatgtaaatgtgtttctcttctatgaaaggataagaagtt

SEQ ID NO: 30668 - DNA, 570 bp, Homo sapiens
tggtggtacctaagtgctgcagttcctgtgaggaacctgagatggtcacggccgtgtggcggatgtgcgtatgagcctgggaagaccccaggcccggttgactacgtggaggcctttcagtggacaagtgtgactcagggcccagaaacagtgacgttaaaaatatgaaaatgtgttacaatagcaagttaatctaaaccgttttatcagcagcacccacaacagtgcctggtgtacagcaggcactaaataaatgctggtagcgaacgaaagagtgagtcatgcacaccagatctcacccagtggtggtggcgtgctggagggtgatgctgagatggattcggaggctccatccaagggcaataggcaggaatcctgtgctccctgagggctgcctgcgagaaaagggcagggcatcatggtggcacatgtagcattatagctgccctgatctgcgtcctttgctaaaggactccttcagttaatggggacagactgtgtgtaagagatcctgtggaaagttacgttttccatccacccctccgaccatccaatgaatatttattgagt

SEQ ID NO: 30669 - DNA, 169 bp, Homo sapiens
aaatacatggaaattaaataacctgctcctgaatgaacgttgggttaacaatgaaataaagttggaaattaaaaaattctttgaactgaatggtaagaatgatacaacctctcaaacctgtgtaatatagaagtagaagaaaagaagtaacaaaaatcagggcagaact

SEQ ID NO: 30670 - DNA, 471 bp, Homo sapiens
tttttgctcagttctacctaatgattgtaaaatctgtcctctcagtagtgacaattagtatcctcatacatattagtcatatatatccccgctcaaaactttcagacatgtgttgtaggctgaaggagaaaagaccatgattaaggtgttagcctgtcaagttataaaaaaccaaatggcatagtatagtaaagcagctgtgatttttttgtctgaggcgccactcagaaatatcctgttttcccgttcattttccctttccatagatgcccttgcagtcaccttccaggatgccccttggctgtctttaggtgtcagaaccttccactttcctactgactgtgaagggcatgtaaatgcctgggcatcattagaaagccagggagagctcatttaacctgatgtgtcagtagaattttgaagcagataatttgaaaatgtgtaataatactcgctaaatcagatcatttg

SEQ ID NO: 30671 - DNA, 401 bp, Homo sapiens
atgctctgtactcctgatagtcagagtcctcgatctggcaactgacaatgagctttaaaacagcccacctctttcctagagagataagacgaggcagaacagaatcattggaagaaacagcttcagagtcagaactcctgtcaagtcctggctcagtcacttgggaattgagtggcctcaggcaatttatgaaacctcagtttcctgatctgtgaaatggagagaataaaactacttgttttggagatgaaaagagatcatgcacaggcactaaggacacaggaagcatttacaagataagagcaattgagcctgcagtgagccgccactgtactccactgtactctgggggacgacaaagtgagaccctgtttcaaaaataaataaataaataataaatg

SEQ ID NO: 30672 - DNA, 1548 bp, Homo sapiens
gacctttcagagccaggagggctttcgggggcgtggggcgcgctgcggagcggagccgcggctcgacggcggtgcgctggcggcgagtgtatgcagacggcgcccggcccgaaccccgagccccgcggggctccccacccgccggcctcccgcccctcccgcgcctccgcctggggaccacgtcggccttttgttggcgaaccgtcctttctttcagcgctttgcgcagcaacggaaatttcattgctcctgggtggaaattaaagggactcgcgttccctctctccctctccctctcccactctccctctctttctctctctcgcccacccttcccccttcttcccccacctttcccgcgaagccggagtcagcatctccaggcgcgggatcccgctccgagcacctcgcagctgtccggctgccgccccttccatgggcgccgcgctcgcctgcagccgccgccgccgcggggcgggcgcgatgccacgatgggcctaatctggctgctactgctcagcctgctggagcccggctggcccgcagcgggccctggggcgcggttgcggcgcgatgcgggcggccgtggcggcgtctacgagcaccttggcggggcgccccggcgccgcaagctctactgcgccacgaagtaccacctccagctgcacccgagcggccgcgtcaacggcagcctggagaacagcgcctacagtattttggagataacggcagtggaggtgggcattgtggccatcaggggtctcttctccgggcggtacctggccatgaacaagaggggacgactctatgcttcggagcactacagcgccgagtgcgagtttgtggagcggatccacgagctgggctataatacgtatgcctcccggctgtaccggacggtgtctagtacgcctggggcccgccggcagcccagcgccgagagactgtggtacgtgtctgtgaacggcaagggccggccccgcaggggcttcaagacccgccgcacacagaagtcctccctgttcctgccccgcgtgctggaccacagggaccacgagatggtgcggcagctacagagtgggctgcccagaccccctggtaagggggtccagccccgacggcggcggcagaagcagagcccggataacctggagccctctcacgttcaggcttcgagactgggctcccagctggaggccagtgcgcactagctgggcctggtggccaccgccagagctcctggcgacatcttggcgtggcagcctcttgactctgactctcctccttgagcccttgcccctgcgtcccgcgtctgggttctcagctatttccagagccagctcaaatcagggtccagtgggaactgaagagggcccaagtcggagctcggagggggctgcctgcaatgcagggcatttgtgggtctgtgtggcaggaagccggcagggaagggcctgagtgccagccctggcagactgaggagcctcccaggagcagcggggcagtgtggggctttgtgtcatcacaacattaaagtattttattcta

SEQ ID NO: 30673 - DNA, 388 bp, Homo sapiens
caagaacacagcaggccagggtatccagctgagtaagtggcagctaggaacagaggtcaggaacacagagggggctttgtgaaaaatatccagcattctgctatttcaataaccctgtcctgagcagtgaggcccacatgcagtacaggaggaagggggaggtttgagagggaaaaatgagctcacccgagctcccaatggcagaggccaagcagccattgccttctccttccttcctgtggggttcttccttggggagggacagaagccaaaggaggcagagctgagggaagggaaagaagccatgagaaacaagactcctgcaacagcaacaatgaaaatacctataaataaactaaataagacctggatagtagctacataaaga

SEQ ID NO: 30674 - DNA, 1397 bp, Homo sapiens
ccaggctggagtgcagtggcgggatctcggctcactgcaagctccgcctcccgggttcacgccattctcctgcctcagcctcccaagtagctgggactacaggcgcccgccactacgcccggctaattttttgtatttttagtagagacggggtttcaccgttttagccgggatggtctcgatctcctgacctcgtgatccgcccgcctcggcctcccaaagtgctgggattacaggcgtgagccaccgcgcccggcccatatgttgaaatcttaacccccaatgtgatgatattaggatgcggagcccttgggaggtcgtaagcatggagcccacgtgagtgggattagtgcccttatgaagagatcccagccctctttctgccatgcgaacacacagcaagaagatgcctgtctatgaaccagggggcccttaccagaaacaaacctactagcatcttgatctcggactttccagttcccataaccatgagaaataaatgtttttaattcaatgtatggtattttattatagcagctctacctaagacagtacatgtatagtgtctatttgaacattactgataatgttgaacaacttttcatgtttattagttattaggtttcttcaagtgttcttattcatacaaattttaaaatatgtacacaagttctttgttatatattttgcaaatatcttctgtggcttgtcttttcactattttagttctgtcttttgataaacaggagcttttaatttttatgtcaaatctatcaagctttttctttttgatttatgttttttatgtcttatttgagaaatccttctataccccaagatcatgaggatgtttcctgtgttctcttctgaaagctatatagtctttgtcatttaggtttatctttatacgtggtatgaagtgtaaagttctacttttaattttttgcatattttattaggataggatgggctttttctgtagtaataatccctaaatctcaggggcttaatatataaaattgtctcatgcaaaaaaccactgggtctagggcaattgctatctactgccgtctaatctccctctagtggcttccattggtagaccctaacaggaagccagctgataagggaatctgggaaatgtagtttacagagtggcagctacagtagaacagtagagactacaaggatgagcttgcagctgagaatagaaacgtgactggcacactaggtggtttgtttgtaggttttttcttttcctgtttgagacttttttggattcttgaatttgtacaatggtatccttaatcaattgtggaaaattaaatgattttttctttcagcattgtctgtttcttctgtaactgattaaatgtaagttggatcatatcatgata

SEQ ID NO: 30675 - DNA, 477 bp, Homo sapiens
gctttgtatgtgatttgcttttaagatgttggaaatgagaatctgatatattagagaatttgacttacaagatttgcaattttaagtgtaacacctaggaggatttaatgaattaattttgtagtcaatgtttggatgctcaggagaacctgaatttatcagtttaattctcagcaggttgaaatgctttaagagaatttgtgtgctaaatttagaagttttgatttattagtcttacaagaactaagtaagtcctgagaaagattttgtttcttctatttgtaagtcttcctgttagggatttgaagattttaacaaagccagatgtatcaaatttgtgagtatagtttgaaatgcttagaggaatttaattaatcaagtttataaatactgtttacattttgaaagattatttgatttgttaagcttataaaaattgtgactaataaaaatatgtaagattgatttgattaagtt

SEQ ID NO: 30676 - DNA, 1441 bp, Homo sapiens
  misc_feature (1441)..(1441): n is a, c, g, or t
ctttatgctctgggttttgctttatggaaacaaggatgaaaaacatgatacctttaataacaactgtctcttagaagataatgtgccctggaccgaatggcaagagaaattggatcatttgttctgaaatgaagtcagttccagcaactgtggtctttgcattcttgtggccctagtcccatccatttttcacacaacagcaagaaaaatcttttgaaaataaatggaatcatgtcactcccttccttagactctcctaatgactgtgttcactttagcacttagattaaaattcaaatatccacctttgccctgccagctctggctcttccctaactcattcctgccattcctccctttgcttactgtgctccagccacactggtgtttgaactcattggaacaggcaaaattatttcctacctgagaggcattgcatgttttgtttctttagtctgaaatgcccaccctgacctcttgctgcactgtgcttggttagttctttcttatcctttacatcttagcaaaatgttaactcaaagagcactttgcttaccaccatatttaaagtacaagcttccttacatctgttttacagtactctattccttcatagttcttattgtgctgtgttgtttctttcaaagcttttattacacaagttgtaattattttattttattttatttttgagacagagtctcgcttttctgcccaggctataatgtagtggcgcgatctcagctcactgcaacctccacctcccgggttcacgccattctcctgcctcagcctccccagcagctgggactacaggcgcctgccaccacgcctggctaattttttgtatttttagtagagacagggtttcaccatgttagccaggatggtctcgatctcctgaccttgtgatccgcccgcctcggcctcccaaagtgttgggattacaggcttgagccactgcgcctggcagttgtaattattttatttgctaactttttataaatctggggtgacagaagcgaagactctgctctcacaaacattaacttacactcacacattactcaggactttcttcatacggtgacacgaaacgatgtcctatcttgactttttccctataacaagtctaggttgaattcaggtacatgccttggaaattggcaggaatacctgtaaagtgtgccacttaaatcggcactggagctcctagggcaacatccattaactaccccagcattaaaaccttaccaccattaagggctgtgagaatagggaagcaacaaactataaggatcctaaacgcaccggtatatttcaggcttggaacccgatatatacgaatatacaaggacactggcactttgcacctggccccactgcctgcacgtgactatcacaaggacctggaggtagggagtgcttcacaacacgccan

SEQ ID NO: 30677 - DNA, 860 bp, Homo sapiens
tgtgacacacggcctggttctgagaagcggcgggcagggtggccattgccatgtgacacatggcctggttctgagaagcggcaggcagggtggccgttgccatgtcatgtgacacacggcctggttctgagaagcggcaggcagggtggccgttgtcatgcgacacacggcctggttctgagaagtggtgggcagggtggctgttgctcagaaagccacactttggcttttgctgttcaccaaagtgagaccagaccagcctcgtctctgcccttcatgttggttccttcctttcactggatccagaggggctttgagtgtattgggtggcggcagtagtcacccctctgatcttctgtcttgggcatctcagtaggaagtcgggggactgcggggctgagctcagttctggttgacgttgtgactgcgtggccttctcttggccttgtgcctcagtggactgcagtctgcaattcggtctgactctgctgtgaaaccctgttcttaaagctaacttggcgctctactggcaaccccgattgctgttttaaaagcagaggatcagcataaaaaaagagaaggaaatcatgaactaggtgaaaaaacacatttttcttcatattctcaaaatgagagggaagcagaagtctgtggctaagggtggagaccctgcgtctgtgaacagaggccactgcccaccactgcccccaagcaggtggagggaggcacagttctgaatgcctttggcccctcacaaggaaggtggcacacacaccggaccccctctggccttctgttaacctgcaccaagtcctgactgtccgcggagctgccgcgcccaccttgatggctgctgcgtt

SEQ ID NO: 30678 - DNA, 1183 bp, Homo sapiens
ggaagggtggccgccccgccagcagagagctgaaggtgttccgtggtcagtgagggctggcactggctctgcacgaagatctcctcacctccccagcggctcctggccagctccccacggagagcccaggacacttgtccctggacacagtggtgcagccatgcttgggccaaaccatgaggccaccagaaccgcgaaaggctactgtactgagagggatactgcgagagaggcccacaggtttccaagcatccctctcactccgcacactcatctccacgaccggctttaagtgcggccttgaggcctggctccctgtttggacttctctgcacctccaggagctcacttcccgtcacagctggatgcctcctcccgcaggcacctcccgggcatcctcccgccccaggctgcaccttctgtgggactgagccccgcaggcacttccccggcatcctcccgccccaggctgcagcttctgtgggactgaccttaagaccccatcggttcctcctgagagcagcagatctcagccagatgctgccgggagggaggtgctagcgtccacaccagacgggtccagtccagccctgctctccctggtctccaggcagggccctcccagggtggacattgcccatctctgcctggccaggggctgctgacccactggttccagagtctgagcctgtcctgcacaagtaccatggacaggggtcagccgggcactgaagaggcgtggcagaattgggcagggcaagggccccagctggcaagctggagtcagggcaattccaaccaagaaactgcggcaggccgggtgcagtgtctcaagcctataatcccagcactttgggaggcagtgggagaatcgcttgagcccgggagtttgagaccagcattggtaacatagagaccctatcgctacaagaaaaaaaaaaaaaaaaagctgggcatggtggtgcacacctgttgtcccagctattcaggaggctgacgtgggaggattgcttgtgcccaggggttgcaggctgcagtgagctgtgatcataccactgcactccagcctgggcgacagagaacctctctaaaaaaaaaggaaaatgaaaaataaatgggggcagaagctgagccaagcagaggcgggcagctcctcctccagggcccacctggcctgctgggg

SEQ ID NO: 30679 - DNA, 1839 bp, Homo sapiens
aaatagactgtcaaacaatgaattggcaactacggttaggtagagcggtttatcggccgaggcggcgtctgcagccggagcctgcctcgcctggctcctgcgcccgccgtccagggcccctgtccaagctcgcggacgccggcggcgttttccagctcgagtgctcagcctagggcaggctctgcgtgcgccccctcgagtgccggcctgggccctgccaggcagaggcgctcttgcgtcaggacggcgccgccggggccccgcgattccaactcgggggtcccggagcggcgcggggcggggacggcctggcagctcccagcagcgaggggcgatccccgcccgcgcagcagaccccgagctgcccaggcccttcctgcgccacgtgtacccagagctccgcccgggggagacttcgctgcttgttggagatgcccagcggtagggggcgaggactcgggaggaagataaacgggggatcccgtgtctggactttctcctccaccctcttcccttcgcagctgtgaatcctgggaggggaagggtggccgccccgccagcagagagctgaaggtgttccgtggtcagtgagggctggcactggctctgcacgaagatctcctcacctccccagcggctcctggccagctccccacggagagcccaggacacttgtccctggacacagtggtgcagccatgcttgggccaaaccatgaggccaccagaaccgcgaaaggctactgtactgagagggatactgcgagagaggcccacaggtttccaagcatccctctcactccgcacactcatctccacgaccggctttaagtgcggccttgaggcctggctccctgtttggacttctctgcacctccaggagctcacttcccgtcacagctggatgcctcctcccgcaggcacctcccgggcatcctcccgccccaggctgcaccttctgtgggactggcccccgcaggcacctcccgggcaccctcccgccccaggctgcagcttctgtgggactgagccccgcaggcacctccccggcatcctcccgccccaggctgcaccttctgtgggactgagccccgcaggcacttccccggcatcctcccgccccaggctgcagcttctgtgggactgaccttaagaccccatcggttcctcctgagagcagcagatctcagccagatgctgccgggagggaggtgctagcgtccacaccagacgggtccagtccagccctgctctccctggtctccaggcagggccctcccagggtggacattgcccatctctgcctggccaggggctgctgacccactggttccagagtctgagcctgtcctgcacaagtaccatggacaggggtcagccgggcactgaagaggcgtggcagaattgggcagggcaagggccccagctggcaagctggagtcagggcaattccaaccaagaaactgcggcaggccgggtgcagtgtctcaagcctataatcccagcactttgggaggcagtgggagaatcgcttgagcccgggagtttgagaccagcattggtaacatagagaccctatcgctacaagaaaaaaaaaaaaaaaaagctgggcatggtggtgcacacctgttgtcccagctattcaggaggctgacgtgggaggattgcttgtgcccaggggttgcaggctgcagtgagctgtgatcataccactgcactccagcctgggcgacagagaacctctctaaaaaaaaaggaaaatgaaaaataaatgggggcagaagctgagccaagcagaggcgggcagctcctcctccagggcccacctggcctgctgggg

SEQ ID NO: 30680 - DNA, 389 bp, Homo sapiens
ccctggccacccccttacctgataatgtcgtcgttgtgtcccaggaagaatttttggctgtgctcgcgggtgttgtaaaccaccccgaccccagccacaaagtagaccacctccttgcctgccgtgtagtacaggttgttgcggcactggtgaccccggtacccgtacacccactccagccggagctggcagcggggcgccgtccgatccgccatgataagccgacccgcgcgccccccgccccccgcgcgccggggccgtcctcgccgaggctggggctgcggcggacctgcaggggctcagcgcgcggcgcagggcgctgatttccgcggcgacacacaggcacagcccagcgggccggccgccaccatcatccgctgcagccgccg

SEQ ID NO: 30681 - DNA, 135 bp, Homo sapiens
acacgcttccccagatattgtgggactcattcctccactatctgcaactctttgttcaaatgtccccttctcagtgagttctcctctgactgccctttggaaaatggaaacctacctcaacccagtacttccgat

SEQ ID NO: 30682 - DNA, 457 bp, Homo sapiens
ctgtgataactggctggtgataactggctcgtgatgaccggcccatgatgactggcccgtgataactggctcgtgatgaccacccgtgatgaccgcccgtgatgaccggcccgtgataactggctggtgataactggctcgtgatgaccacccgtgatgaccgcccgtgatgaccggccgtgataactggctggtgataactggctcgtgatgaccagcccgtgaaggacaaggaagagggatggctgctcagatgccggggcctgcagtgctgatgagggtgtgcctgggccacatcgccatggaggacgggaggggcctgttcgtttctagagggacacgccggccacccggatgcagataccacgtcctcacggatgcgcacacgttgcttagacaccatcacgtgagccttttgagctttgaaggttgagaacatattcctaagaacacacat

SEQ ID NO: 30683 - DNA, 486 bp, Homo sapiens
ctttttagtattgtcctcaagggtgctggcaagctgatttgccaaattaactagatcagaggtgggcacagtttcccattctgttcgggcccttttgaccagctgggagagttcttgagaaaggctgttcactaacatggaataaaaggctacttgagtagattcaacattttctttaaatacagcctggagcctactgtaatagttgtacattaggttctttcttgggcacaggcctggaggtttttccagtctaaggctttaggaagagcctcgagaacagacttgtggagtgtttttttttccttctatgcctttgactctatccatagtctttaggggtgtttttgtctaaatccccctcaggatcatggcagtgagccttgaccatccagtgttgtgcctgaccttcactgacaagaatgtgaaccacctactgtgggtcagaaaaacctggctgataaccctaagttactatgtccaatt

SEQ ID NO: 30684 - DNA, 402 bp, Homo sapiens
tccagtttaaatttctttgaagaatagtgagaactgagagatcattttgatctcctttcaatcttctatggttttatagtttttctgactttttataattaccttacctacctctaattaaatagcagtgaatttaaaaacacatctgtgctgggcctttcacattcagtttaggtgttacagaaaaactaactctttatacttttatttattactttgaggcatacgtaattaaattgtgcaattataataacaggttgtggcaaatatgataggattgggcttaacatctgttgcaccttccttttaatatggccttcctgtattgcagaggctggaaaactaaaaactagttcaggatatgggtttggttctgctaatgataaccacttgtacgatacc

SEQ ID NO: 30685 - DNA, 326 bp, Homo sapiens
cttccagtgggattaaagctaattgcgtccatcgcttgtcagcagtgtgggacagaaattttattgacctatttccagttataaactcacatgatttaaagggaggaagcttttattaaattaataactaacgaacagctgcagtagttcagtgcttctgtatgattaggattttctctttttttctctcattttagccactcacgatgtcagctcgtgcaccttctactaagttagattccttaaccacaatacaagtctttggcccaaacctgggatataaaagctacttgctatgatttcttttttagtctcataaaaaaaaa

SEQ ID NO: 30686 - DNA, 450 bp, Homo sapiens
cttttagtccatcaacaaacacaaagtgggtgggtgtccaccgcccagccccctgaggaagagcttggctctgcctgttgaccacttggtcacatactcaccttccttgctgagacctgcggcctccccattcagagctacttcttccaggtggagctagtgcccaggacattctgatactgcacactagcctctttcatagcaatctcctgcctgctgtggtgaaactctcagcccctcccctcttctgtcacccccacaccggctctcctgcatgaaggaaactgagcacagagtggtgcctcctcaatgggagtggagactggtgtgtggaccactgtgcaagccagtttaatgctggccccacagggtttggcagtctctttcttatagtgggaccagcagaaactccctaattttaacaatcaggaaattcttttgaaaaatact

SEQ ID NO: 30687 - DNA, 289 bp, Homo sapiens
aaggaagtgggttcagtctgcagcccacatcctgggctgtcatcaagaattaacatggcaaacggcgactccataaagtaaactgtagctacttaactaaatgatttcgtgtggctgagatcctactgtttgctgggtttcctggaaaagtcctctagatgaactgcaggaatctcctggcactctggttacagctggagaaactgatttctgtgctgtccaggtgctcccagacccccaaggcatctccaggacacagtcaccaaacccccatcctggtattactggc

SEQ ID NO: 30688 - DNA, 454 bp, Homo sapiens
tttttattatcttttttttttaattttaaaatcttttgtagaaacagagtgcccctgttttgcccaggcttgtcccaaacccctcgcctcaagcgatcctcccatcttggcctcccaaagtgttgggattatagacatgagccaccgtacctggcctttaattttcttgtcactcagattctgacagataaagtatcatttcagtagtggttttagatgtgttctgtctgcccatctgataaccgaaaatttatcactttcatgaataagtgttttcagaccaatattcaatagttggataaattttacattaatatatttaaatttattctgtccttatcaggtggtttgatttaataattttaaataattaaaacagaaattaagtctagtttaaaaaaaattgtctccagtaagcctaccaagaaatttggtatttcattaggtcaaaaaa

SEQ ID NO: 30689 - DNA, 364 bp, Homo sapiens
ttgagaccgggctacaaggtgaaaccccatctctactaacaatacaataattagccaggtgtggtggtgcatgcctgtaatcccagctacttgggaggctgaggaacaagaattgcttgaacctgggaggcagatattaccccacactcaacaaataaatatgaaagaactttacttacaggataacatcatgataaaatttgcattttagaataactctacaattaacaataaaaagaagtacctataacattaccccacaaaagggataaggtgtggtgaacttggaaatttcatacaatttagaaatatgtattgagctgtaaaaatgttcatattcattgacataaaactttcacatctg

SEQ ID NO: 30690 - DNA, 426 bp, Homo sapiens
ctggctctcaaagatggacaaatggctttacgacgcttaaggggatgctctgtggagtctgcttgggtgcaaatcaccaccatgacacactacccaatgagcaaacaaaagcaaactggttaaggatcctgacaaagacttcgcagccagaagaggcgatgccgtgggtcaaatctaggaccaccagatttcaaaccttatacttctaatcactatatgacactgaacatgattttaagaaactttcttacaaaaatgtatgaattggacaagagagtaacaaaaacagagtaattcactgatctctcattttgtagatgtaagttttgtataatgagtttccatacatcaggagacacttggaaacataaataagtcaaagttacagacaataaagttacagagaattgtattattgtcctctga

SEQ ID NO: 30691 - DNA, 227 bp, Homo sapiens
gcttaaggggatgctctgtggagtctgcttgggtgcaaatcaccaccatgacacactacccagtaagttgcttaccctgctttaagtctccgttttcccatctcatcagtgggtatgttaacagtataggaatatttatgaagattaaattaattaatacagagaaaagcacttagcacagttcctggcacataatataaattagcaatggatgataatgggttcaa

SEQ ID NO: 30692 - DNA, 519 bp, Homo sapiens
taaattcgcggcctgcgtcgacgggatggggactctgtatgttgcctaggctgctctcgaactcctgggctcaagtgatcttcctgccttagcctcccaaagtgctgggattacaggagtgagccattgtgccaggccctgctgggatattccaaggtggggtctctgccccaagtgtcaagaacaatgaactgtaggttgaccaacatgagacctaatttatggaatcttcggcctatattttttcaatgttttgttactcacggtggagcctgtctccagaaaggctggctttcaatgtagtcccagccaccctggctccagagagggctcagcttgcacccaaatagcatcattgtttaacaggcctactttaagattatttttcaagttcccaatacccaactaactcgaaggaagaaatggaaatctattttcttttcttaccatcatttgatcatttgatcatttgctgaattaacaaatacgtacatacgcagacatcagaaaagaagggct

SEQ ID NO: 30693 - DNA, 421 bp, Homo sapiens
tttttttgtagacacaaggtctcactacgttgtccaggctgctctagaactcttgggctcaagagatccacctgcctcagcctcacgaagtgctgggataagaggcgtgagccactgtgccctgcctagttttgcttttaaaatgacttagaaagagggcgatggtgggactcgagaagaggacttatcaatcagcctcctcctgggaatccagagaactttgggctcccaggggagatgttatcagagatgaggctggaggtacgcatagtcttcatgacacatggtcttgatgacttcatgtcaatcaagttcaatactgactgccatgcacatggcagttgcttcatatttgcttcacaaagcaaaggtaggctgggacagacagcttttaagctataagctctttaactaggtagac

SEQ ID NO: 30694 - DNA, 401 bp, Homo sapiens
actatgagtctgttacaataggaattaaaatcatgctcttgggttaacagaccttaatcgtgggtcagttttgtatgttggctacttaagtgaacccataaactataaaaaggagatactttttaaatatctaaataaatatataggaggtttatatttctgagactcgtatttgagaaaagggaaaagtataggaatttggtactgtgtaagtagaagaagaaaaagaatatcagattttaaaatgaaaaagaagataatacattgaaatgaggaataattatgagggaataccaaaaaattactctaactgctcaaatttttatgtctaatgaaagaacaatagcatacttaaaaaatttagagtcagcagaaatgaagccaagaacaagaattcttaa

SEQ ID NO: 30695 - DNA, 899 bp, Homo sapiens
tttagctcttgtgaataatgctgctgtgaacatgggtatatctgagttcctgctttcaattccttggacatatacctaggagtgaaattgctaggtcatacggtattgctatatttaactttatgaggaactgccaaactgtttcccacagcagctgcaccattttgcattcctaccggcatgtatgagggttccagtttctccacatcctccctggcacttgttatcatgtctctataattatagctaccctagtggatgtgaagcagtatttcattgtagttctaatttgcatatttttgatggctaatgcatatttctttcctgataatttgtttttggtaagaaataagccgctttttcctacgttcttccacactcctgtatgaaacaagtaggggagagccaacttgctagacattgactctaaatgtgcccgaggttgtcatcccagcatgtagattgtctgcccctatttctcctccctctgcatgactccctggatcacctgccaacaggggaggcaaacacctcagatatcactaatgttttcccaagcctaataccgtacctaggaaagtgagaaaatttaaatgaaaggtaaaatacagtttaaggcagtagtgaaatgaatttttctacgctctctttagataccatgagaatcagtttatgcctatgctagccataaagttcttaggatatgagagcctggcattacatgctacagcaggagaggtcagagcagccggtgaggttagggcttgggcgtgggtctccatcttctcccacagcttattgaggtctcctttttataaaacataccatagttaacttcatgattagagcagaatgaaaaaaaacattcatctagtgcatggttcaggaggattaaccaa

SEQ ID NO: 30696 - DNA, 880 bp, Homo sapiens
gggcagctgctgctgcggtcgatctagaggattccccaattccattccacgtatgactaggagtgaaattgctaggtcatacggtattgctatatttaactttatgaggaactgccaaactgtttcccacagcagctgcaccattttgcattcctaccggcatgtatgagggttccagtttctccacatcctccctggcacttgttatcatgtctctataattatagctaccctagtggatgtgaagcagtatttcattgtagttctaatttgcatatttttgatggctaatgcatatttctttcctgataatttgtttttggtaagaaataagccgctttttcctacgttcttccacactcctgtatgaaacaagtaggggagagccaacttgctagacattgactctaaatgtgcccgaggttgtcatcccagcatgtagattgtctgcccctatttctcctccctctgcatgactccctggatcacctgccaacaggggaggcaaacacctcagatatcactaatgttttcccaagcctaataccgtacctaggaaagtgagaaaatttaaatgaaaggtaaaatacagtttaaggcagtagtgaaatgaatttttctacgctctctttagataccatgagaatcagtttatgcctatgctagccataaagttcttaggatatgagagcctggcattacatgctacagcaggagaggtcagagcagccggtgaggttagggcttgggcgtgggtctccatcttctcccacagcttattgaggtctcctttttataaaacataccatagttaacttcatgattagagcagaatgaaaaaaaacattcatctagtgcatggttcaggaggattaaccaa

SEQ ID NO: 30697 - DNA, 252 bp, Homo sapiens
gaactagtagacaaactaataaagatatagatgacttgagcaacattattagccaactcaagtccagtatgttctctgactgtaatggaattaaactagtaatctagtttaaactagaaatcaataacagaaaaatgtccaaatacttggaaattaagcagcatatttctaaataatccacaggcaaaacagcaagtttcaagtaaaattagaaaatattttgaactgatcaaaaatgaaaatacagcatat

SEQ ID NO: 30698 - DNA, 280 bp, Homo sapiens
actctgggctcacacaatggtgtgagttttgcctctaggagcctgccagattcttgcaatgaagagttattaaatgctaaagctagtccacactttatctctagtaattaagccaatacccttcaagcatccctactccatgcaggcaatttctgtttctgataagctttgattctctgtagcagcctatcattccagcttttggggtgataacttcaattctataaaggatcggaaaaaagctgttgattctgagttcttcagctttttgttgttgttg

SEQ ID NO: 30699 - DNA, 415 bp, Homo sapiens
gacatgcgcccaaggtggtcaggctacagcttggttttatacattttagggagacataagacatcaatccatacatgtaagaggtacattggttcagtccagaaagatgggacagctggaaacagggactggggagtgtgtggggtgacttccaggtcttaggtggattcaaagactggcaattggttattatctaaagacctgaaatcaatgtctaaattacaataaaggtttgtggacaccaaggttttatcatgcagataaagcctctagatagcaggcttcagagagaatagatggtaagtgtttcttaccagatttaaagagtctcttctggctgggcgcaatggctcacacctgtaatcccgacactttgagaggccaaggcgggaagatcacttgagctcaggagtta

SEQ ID NO: 30700 - DNA, 618 bp, Homo sapiens
cagagtgagaccctgtgtctaaaataatacacttgaaaataaaaatatgatcagagcaattggaattgtacaacagtagtcaattgcattaagataagtgtaaagttcaaactgtagtagtaagtgcagtattagtgaggaaggggtttctttccaagaattatttcaaacaaatacatagaattttgtgggaattcagacgtaagggatgaacgactgaagcgtcagagtcttaagagtttgagcatggttgaatagagtgacctgtgaaagaccaaggctgtggatgtcagttttcatggcaatgttttgaggagtgtagataaaagtatgagaggggatgagctggaagcagccagtaggcttagatgccttaaatagtatacatttaatgtgctaaagggcgttgatgaaggaacagggagcatgctatttagagaagtgagcatggatatcaccttttaaaccattagttagcagtggctcaggtattttctcgatttagagactatagcataccatgtcacactaggaaagcgtatatgaaaatccagacttataaaaattaaagagtagttgcatttaaaaggattcttcattttcagcaggattagtcat

SEQ ID NO: 30701 - DNA, 702 bp, Homo sapiens
catgttccattgaccagactttctaggggagtgaggcttaggaagtgaatctaaggcaagtgtttgatgggaaaggccacggttgtatttctgatttcagggctgacacattgagtatctctccttctcttttttcttagctaaccaagttctgatatgtgtagtattgaagctgtataaatacagtggggatcctgaaattatcatggcaaagggctcagatttaaaattgacagtaacacagaatgaaaacatgggaaatgactaggtattggcctcacatcacacagtttcagggccagggtgcacattggatcctttttgtgcagcaaaatctctgtctttgtagatgagaaatcctggagccattgcaagtttgtaatttatctaaggttacacaactaggttttgtcaaaattgagactagaactagattcagttgactttttttcctaccttccttgcaacacagcagaaagtaacatcaactagtgtaaataactggatgtcttctgtcaaagttttaaccattggtattattattatcattgtgatcgttattttataattagaacagagatagggtagagtagaagaggtaacttgtagaagaaggcataggctaaggaggccattggacttcagcaatgaccaccgtatagcattattgaagacctataggcagctagggttaatgggccc

SEQ ID NO: 30702 - DNA, 229 bp, Homo sapiens
ggctaattttagatcatggctctgccacagaaagtagaactgtagggtttcttttaaaaattaattttaaagtagaccaacttactgtagctctaattaggggacgtttaaggtcatcttcttacaaatgaactggttttcagaagtaattgtttctcagttcttgctgggaaggaggttcccagggcctttgggctaacaggttgcttttcattgacttcaaacatgc

SEQ ID NO: 30703 - DNA, 356 bp, Homo sapiens
tcttttcttcaattctgtggtatgctgcaggtgaagaaactgaggcatagatcacgtagcttgtaagtgatggaacagtggcctaaatccaacatgtgcaactttagaacccatgtatttttcctctgtcccatgccctgtctgatgtaagcaggcttctaagttgcaaataccaggtggtgtggtgtgctttgaagctatttattcaacatgtgtttatcaagaagtgtctgtccaggcgcagtagctcatacctgtaatcctagcactttgggaggccaagatgagaggatcccttgagcccaggagtttgagactagcctgggcaacatacctggacaacatagtgagacccc

SEQ ID NO: 30704 - DNA, 1051 bp, Homo sapiens
gagcccgataccggtttcagagtcctgggcagcgtgcgcgctcttcctggcggctgcgcaggtgtgaaaatcacaaatgtcaaatgatggaagatccaggaatcgggacaggcgctacgatgaggtcccaagcgacctgccctatcaagataccaccataagaacccacccaattcttcatgacagtgagcgggcagtgagcgctgatcccttgccaccaccccctctcccattacagccaccattcggcccagacttctactcaagtgacacagaagaaccagctatagcgccagatctcaaaccagtaaggcgctttgtccctgactcctggaagaactttttcagagggaagaaaaaggaccccgaatgggataagccggtgtctgatatcaggtacatctccgatggagtggagtgttcaccaccagcctctccagcaagaccaaaccaccgttcgcccctcaactcctgcaaagatccctacggagggtcagaaggaacctttagttcccggaaagaggctgacgcagtgtttccccgggatccctatggatctctagaccgacacacacaaacagttcgaacatacagtgagaaggtggaggagtataacctgagatactcctacatgaagtcgtgggcaggcctgctgagaatactgggtgtggtggagctgcttttgggggccggtgtctttgcttgtgtcacagcttacattcacaaggacagtgagtggtacaacttgtttggatattcacaaccgtatggcatgggaggcgttggtggattgggcagtatgtatgggggctattactacactggccctaagaccccttttgtactcgtggttgctggattagcttggatcaccaccattattattctggttcttggcatgtccatgtattaccggaccattcttctggactctaattggtggcccctaactgaatttggaattaacgttgccttgtttattttgtatatggccgcagccatagtctatgtgaatgataccaaccgaggtggcctctgctactatccgtta

SEQ ID NO: 30705 - DNA, 358 bp, Homo sapiens
agcataaactattacagcataaactattcacaaggacagtgagtggtacaacttgtttggatattcacaaccgtatggcatgggaggcgttggtggattgggcagtatgtatgggggctattactacactggccctaagaccccttttgtactcgtggttgctggattagcttggatcaccaccattattattctggttcttggcatgtccatgtattaccggaccattcttctggactctaattggtggcccctaactgaatttggaattaacgttgccttgtttattttgtatatggccgcagccatagtctatgtgaatgataccaaccgaggtggcctctgctactatccgtta

SEQ ID NO: 30706 - DNA, 500 bp, Homo sapiens
gcgtcgacattaatttttttatttagggagaaaagcccaatattgtggttattcactatttatgctttaatagtaatcataattgtaattatggtaaactgagtcagaggaattgcaaactttactattttattttatttttttgagatggagtctcgctgtatcgcccaggctggagtgcagtggcgcgatctcagttcattgcaacgtgggttcatgcatttctcctgcctcagcctcccaaggagctggcccttgcataaggcggccacacaaatttttgaagcattctatattttgcgcagtcactggaaggtcatttgactgtttgctgagtagctttaaggaaatggtgtgaatcaaagcagaatggctgccacaaaaacattgaaattgtgatttgcgcaataaaaatagtcatgtaaggtggtctgtgagatgacaccagagccaaataacgtgtggggtgttgtgtacaaaatatattgttagtatgtatg

SEQ ID NO: 30707 - DNA, 357 bp, Homo sapiens
tccccagactggagcaaaacaatattaaaacagcctgggttacactttattgaagaggccagcttaggacgactttaagaactaggtgaccacagtcttaagacaggcaggggcaaggctgtaagattttactctcagccagttcacactcctaactgtgagatcaggcctctacagaccttatgggcctatcaaacccaaagaaaatttcctggaggtgcctactcagaggggctccctcctggtcactccttatagccttgctcggtccagggcagggtgggttcggtctctcggtgagaacaagaggaacacatttagctctgcattatgtatttaggttgagagaaacaattt

SEQ ID NO: 30708 - DNA, 464 bp, Homo sapiens
gaattacctcctcattcttcctgttgaaattactctcaaatcttttctgacagagttgcaaacacactgacagctcccgaatgatctgatacaggatccttaataggcatggaagtgttcgccagacaaaaatatttgagaacatgacaataatgacactgctaatggcttgtagtttcccgtgatactaatgagacaggctagtttattagtgttttgttctcttttttctatctcctccccatgcccattctgagcagaaagctgtactcttcacatgtccttgcttcaagaaactggttgaagaccacccttcgtccagccttgtgtgagtctgagcttgttgaagagactttgccacaagtttagtggtgggagagggggaaaaggagtgcttttgaggtctgggaaggagaagaagatattttagaaccgactctcacacctcgtgcctcccagcaggg

SEQ ID NO: 30709 - DNA, 323 bp, Homo sapiens
taatagatattctttatcagataaagaagttccccttatatatcctagtttgcctaatgttctttatcatgcttggttttgaattttaacagatggtttttctgcatctgttgaaataattacattattttcttctttattctgttaatgtggtgaattacattgactggattttaaaacaagataaaaatttgttttccttatagcagtctaagcttcagtaatctagggctgataatacaggtctataatacagggacccagacaatatctttttttttttgctttgttcttccggactcaggttttctctatcatggtct

SEQ ID NO: 30710 - DNA, 876 bp, Homo sapiens
ctaggtgggagggagtccagagggtcatgggtgtgaaactgtgcacagctttccctccctccctcttcctccttgtctgtgacacatgtgcacccacacacacacacacaaacacatgtgcatatcacacacatgcacacacacaaacacatgtgcatatcacacacgcgcacacacccaaacacgtgcatatcacacacatgcacacacacaaacacgtgcatatcacacacatgcacacaaacgtgcatatcacacacacgcacacacacccaaacacgtgcatatcacacacacgcacacacacaaacacgtgcatatcacacacaaacacacgtgcacacatacttaacacacacttgcacctgctgtgcacatgtgcacacacacgtagtagtgtgttttccagccacccacacactgggtttgcattggagattgtttcaccctgcaaacgtcaacgtcagcagactcgtcggtgcgctgtgctatccggttgggaggtctcaccaggagcagagcctccctaacgtgcacctccgagaagaggggtgtcggggagtgttcccagcacctgctcggtggaagggctctccggagactggcactcagtatctgagtatgaggagcctcacttcccggggtgtcggtaaacttgaccgtgactcagtaacccacagcgtgctcctcccagcaaaccccgtgtgtccttacaggtcgaccagacgggccgtcggaggaccaccaggtggctctgcctctgcctcaccttctcacctgcttccatagctgatgtgaacccgaatccccacgctgtgctgtgtacgcactgtaggtgcagaaccgtccacacaaaaatacagtcttggcattgtt

SEQ ID NO: 30711 - DNA, 1122 bp, Homo sapiens
ctaggtgggagggagtccagagggtcatgggtgtgaaactgtgcacagctttccctccctccctcttcctccttgtctgtgacacatgtgcacccacacacacacacacaaacacatgtgcatatcacacacatgcacacacacaaacacatgtgcatatcacacacgcgcacacacccaaacacgtgcatatcacacacatgcacacacacaaacacgtgcatatcacacacatgcacacaaacgtgcatatcacacacacgcacacacacccaaacacgtgcatatcacacacacgcacacacacaaacacgtgcatatcacacacaaacacacgtgcacacatacttaacacacacttgcacctgctgtgcacatgtgcacacacacgtagtagtgtgttttccagccacccacacactgggtttgcattggagattgtttcaccctgcaaacgtcaacgtcagcagactcgtcggtgcgctgtgctatccggttgggaggtctcaccaggagcagagcctccctaacgtgcacctccgagaagaggggtgtcggggagtgttcccagcacctgctcggtggaagggctctccggagactggcactcagtatctgagtatgaggagcctcacttcccggggtgtcggtaaacttgaccgtgactcagtaacccacagcgtgctcctcccagcaaaccccgtgtgtccttacaggtcgaccagacgggccgtcggaggaccaccaggtggctctgcctctgcctcaccttctcacctgcttccatagctgatgtgaacccgaatccccacgctgtgctgtgtacgcactgtaggtgcagaaccgtccacacaaaaatacagtcttggcattgtttgttctttgtgaggctggttaatagcatccccgtgtgtttttctcaccctcgatggggtagaggggcacctgaatgtgtggcccccgtctgtgtcctggatcctggggcagggctgctctccctggcccctgcagcccctcatgaactttccaccctcagtgcccccggctgagcagagaggcgtcccaccattcaaccaaagaaagtcaacattgaacattaaacctctgtgtgtttctatactg

SEQ ID NO: 30712 - DNA, 409 bp, Homo sapiens
caccatagtcctgggggacaggagaaggaatgattatcagaacccagcaatagttacgactgtgggcaaggaactatcagtagagaaatacagccactaccaaagctaacagggagtgaaagagggaaataaatgctgtagcccctcactcctcttgccctgcagtttcattggccattagccaaagcctactgaaagccagagggtaagaggagctgggtgatatagtcatgaggtcagctcctgagagcacagagcaaagaaggtccaagaacggatttggagtgaaaatagagaataatgagcttcttattaatgatttattttgaaacctagaatcaaaagccaatttaaatatctatttttaaaagttcaaattatgactcaggggcatttcctttaaaaaaaa

SEQ ID NO: 30713 - DNA, 290 bp, Homo sapiens
ttttttctgtccctttcttttttgctcttcttctggaactccattaatattagtactaatttagtatgctggatgatgcatcataggtcccttaggctctcttcatgtcgtgtatctttattgtttttcatcctgcttctcagactgataatataaattgcactaatttcaagtttgctgattctttctttgcctgctcaaatctgtcattgaaactctctaatggttttcctttttgatttcagctaacttactttcaactcctaaatttctcttttgttcactttata

SEQ ID NO: 30714 - DNA, 1002 bp, Homo sapiens
  misc_feature (617)..(617): n is a, c, g, or t
  misc_feature (648)..(648): n is a, c, g, or t
  misc_feature (914)..(915): n is a, c, g, or t
atgcaggccgctgggcacccagagccccttgacagcaggggctccttctccctccccacgatgggtgccaacgtctctcaggacaatggcactggccacaatgccaccttctccgagccactgccgttcctctatgtgctcctgcccgccgtgtactccgggatctgtgctgtggggctgactggcaacacggccgtcatccttgtaatcctaagggcgcccaagatgaagacggtgaccaacgtgttcatcctgaacctggccgtcgccgacgggctcttcacgctggtactgcccgtcaacatcgcggagcacctgctgcagtactggcccttcggggagctgctctgcaagctggtgctggccgtcgaccactacaacatcttctccagcatctacttcctagccgtgatgagcgtggaccgatacctggtggtgctggccaccgtgaggtcccgccacatgccctggcgcacctaccggggggcgaaggtcgccagcctgtgtgtctggctgggcgtcacggtcctggttctgcccttcttctctttcgctggcgtctacagcaacgagctgcaggtcccaagctgtgggctgagcttcccgtggcccgagcnggtctggttcaaggccagccgtgtctacacnttggtcctgggcttcgtgctgcccgtgtgcaccatctgtgtgctctacacagacctcctgcgcaggctgcgggccgtgcggctccgctctggagccaaggctctaggcaaggccaggcggaaggtgaccgtcctggtcctcgtcgtgctggccgtgtgcctcctctgctggacgcccttccacctggcctctgtcgtggccctgaccacggacctgccccagaccccactggtcatcagtatgtcctacgtcatcaccagcctcanntacgccaactcgtgcctgaaccccttcctctacgcctttctagatgacaacttccggaagaacttccgcagcatattgcggtgctga

SEQ ID NO: 30715 - DNA, 628 bp, Homo sapiens
tgactagttttggtgtcaaggtgatacctcagagtgacttaggaagaatttcattatcctgaatttttgggaagagtttcaggaggattattattcttagtgcatttggtagaatttggctgtccatttatctactcccgagcttttctttttcaagactttttttattactgcctcaatcatgctactcattattggtttgtgttactgttgtatccattgaaatgtctgttctttcacttctgattgtttatttagatctgtcttctgcttttggttaagctagctagcagtttatcaattttgtctttttgaaaaatcaactattctgttgatcatttttattgtttttggtcttaaattcatttggttctgttctgatttttgtttttttttttcttgtaacttggaatttggtttgttattaattttctagttccttgaagtgtgatgtcaagtccttaatatgtaagctttctacttttttgatgcaggcatttaggctataaactgctctctttgtactatatttgcatatctcacaggttttattatattgcatttctatttccatcttttttcccacaatttttaaattttcattttaattttctttttgagatgggtt

SEQ ID NO: 30716 - DNA, 300 bp, Homo sapiens
gctttgggaggatattgcctcagaggggctttcaggggagctagaaatgttctctgtcttgatctgagtgatggtttcatgagtgttttcccatgtaaaaccatcatcacttcatgtatattaaactaccatttaggaatttcaataggcagtttaaacagcagagtagatagaatgagtgaaccattctgaaagaaccaaggaaactgcctgaaacatgagacagacagaaaaggagataaaagatataaaagaagtgaaacgggataaaatgagtagatcactcatatatccaacaga

SEQ ID NO: 30717 - DNA, 464 bp, Homo sapiens
caccttttcaattagtatattcttcttgtaccttccagtatacactctatttaataccagaacccataagaaacaaatttagtaaaaatccagtgctgggattacaggcgtgaaccaccgcgcctggcccgactaattcatttattcagcgagtgttttctgagcacctactatgtacttgccactgttctaggcactggggatacaggaatgaacaaaatcacccaaatctctgccctcccaattttctggtatggagagaaagttcttttgtagatagggatgagaatcccacagaaaactcaggagtgatgtaacaatgcaaatgctcacaaaatctctttcctcatctttcattccctatttggaaggaaaggtttcaaagacattgatgttgtataaatgaccatcttcttcattattttataaacatttgtcctgtgcagagtaaaaacaactggact

SEQ ID NO: 30718 - DNA, 354 bp, Homo sapiens
tcaggataataagtggttcattttgtatgtataaccataagaaaactcttgcttttatttgctttatactgctcagacaaagcaaggtaaaagtacttcctccttcactttcaacgcattctcatactgaacacaaatacttattaatgatgtggacacctttcattttacccaaatttcttaaaagcctattgcctgagtgtctaatgcaagccctcaactcactcctaaccccatttcaccctccatatgatgccaggtgggccatgctccccgtgcctgcgatgctggaatgccttttcctctcctctcactttccacctgttggatgtttccatgtttattaaggcaagt

SEQ ID NO: 30719 - DNA, 459 bp, Homo sapiens
cagccaacactcagtgctttctgtgcatctgtgcttggctgctttcagttgtccaattatttatcttgtttctgtatttgtccatgttgtctcctccagagagtgcaaactttttgaagtcagtcattaattttatgaagaaatcctggtatgtttttgaagcatctcattgaatatttcataatttaatgaagagattggatgattttggacagtattacatacggaaaagctacatgatacatatttgtggtaccagaacaatgctattaaaatcagcccatgatgtttctgatgagattgcaaagtttgtgtcgagtcttaagtctgtatatgaaacaattaaattctatggaaagagactgccacagaaaaagaaaataggaattaactaaggaaaacataaaaatcacctttttagttgatttttgaaacccaagatactttgtttttatattc

SEQ ID NO: 30720 - DNA, 418 bp, Homo sapiens
atgtgctttttttcccccagctttgactctctggatgcttttgaaagtttgagttcctaagaaattccacagctagaggttcctacgatgtcactgagtgaggttaaggttctgctcttatagggagcatcttatccttggggattctggacaactggacccctaggaacttgaaaaacagctgctttcattggtattcttttgacatggggaaaatatagccattgtccattaaaacacaatccaatttgggtacaagtactcttcaggttttctaagttctccacaggaataccaagactaggctaccatcttttctgacaacagactactttttaaataagctttgtaagtccaagatttctggcagagaaatgtaaataaaaaataaaaacaaaaataaataagtcttgtagaa

SEQ ID NO: 30721 - DNA, 1883 bp, Homo sapiens
aggaataccgctccagcgccaacgcaatctcctcctccctcgcctttacctaatcccttgcctgccctgtttccccgctgagctcctcaaacacttcgcatctctccccgttattccagtctacctggtgaaaaggttatttgaggaccttgtctacgctgcccctacctgatcccgctcccggcgccacaggctgggccccaacaggagctcctcaatctaagtgtctaggagaaacccagggagtctccacgaaggaggcactttacccactacagactaaaactggcctcggaatcgccttcctggagattcggcccagcggctctcaggagtcggtaggggcaagaacgtttccccggtgcagtggaagaagactgcgggccagccagggactcgggatccggggacagggcctcggcaggcgcccgcctggaagcccgcagcccagacgcggacgacccactgctcagcgggacacacctcgggccttgccccggaacgccgcttggacaacaacctttccgccgagtgcaggccgagcgcttttgggcgcagcacgcaggaaccggaagtcaatggaggaagactggacctactgattcaacttggagatgagcgggtctgtcctcttcacggcgggagagaggtggagatgctttctgaccccgtcgaggtcatccctgtactgggccttacataatttctgctgtcggaaaaaatccactacacctaagaaaattactcccaatgttactttttgtgatgaaaatgcaaaggagcccgaaaatgcacttgacaagctcttctcttcagaacagcaggcttccatcttgcatgtgttgaatacagcatctactaaagaacttgaagctttccgattgcttcgtggaagaaggtccatcaatatcgtagagcacagagaaaactttgggccatttcagaatttagagagtttaatgaatgtgcccttgtttaagtataaaagtacagttcaagtttgtaactccatactttgtccaaagactggacgggaaaaaagaaagtcaccggaaaaccggttcctgagaaagctcctcaaaccagacatagaaagagaaagacttaaggcagttaatagtatcatatctatcgtttttggtactcgaagaattgcctgggctcaccttgatcgtaagttgacagtgctggactggcagcaaagtgaccgttggagtttaatgagaggaatatactcatcatcagtctatttagaagagatttcctcgatcatttcaaagatgcctaaagcagatttctatgttctggaaaaaacaggactttccattcagaactcatctctgtttccaatactgttacattttcatatcatggaagccatgctgtatgccttattaaataaaacttttgcccaggatgggcagcatcaggtgctgagcatgaatcgaaatgcagtggggaagcattttgaactgatgattggtgactcccggactagtggaaaagagctagtgaagcagtttctcttcgattctatactgaaggcggatcctcgggtgttcttcccatcagataaaatagttcactacagacagatgtttttatctactgaactacaaagagtagaagagctttatgattcattattacaagctattgccttctatgaattagcagtgtttgactctcagccttagaattctgaggttaacgtgctaaagtataattattagctctaacgtaacaccaactgttgtgaacatccatgttattggaaaagaacacattttcagtgtattttagatgtttaaattctgacttttggctattaaatggtttacacaataagccaagaccaaatcaataaacattttatgagattc

SEQ ID NO: 30722 - DNA, 1846 bp, Homo sapiens
aggaataccgctccagcgccaacgcaatctcctcctccctcgcctttacctaatcccttgcctgccctgtttccccgctgagctcctcaaacacttcgcatctctccccgttattccagtctacctggtgaaaaggttatttgaggaccttgtctacgctgcccctacctgatcccgctcccggcgccacaggctgggccccaacaggagctcctcaatctaagtgtctaggagaaacccagggagtctccacgaaggaggcactttacccactacagactaaaactggcctcggaatcgccttcctggagattcggcccagcggctctcaggagtcggtaggggcaagaacgtttccccggtgcagtggaagaagactgcgggccagccagggactcgggatccggggacagggcctcggcaggcgcccgcctggaagcccgcagcccagacgcggacgacccactgctcagcgggacacacctcgggccttgccccggaacgccgcttggacaacaacctttccgccgagtgcaggccgagcgcttttgggcgcagcacgcaggaaccggaagtcaatggaggaagactggacctactgattcaacttggagatgagcgggtctgtcctcttcacggcgggagagaggtggagatgctttctgaccccgtcgaggtcatccctgtactgggccttacataatttctgctgtcggaaaaaatccactacacctaagaaaattactcccaatgttactttttgtgatgaaaatgcaaaggagcccgaaaatgcacttgacaagctcttctcttcagaacagcaggcttccatcttgcatgtgttgaatacagcatctactaaagaacttgaagctttccgattgcttcgtggaagaaggtccatcaatatcgtagagcacagagaaaactttgggccatttcagaatttagagagtttaatgaatgtgcccttgtttaagtataaaagtacagttcaagtttgtaactccatactttgtccaaagactggacgggaaaaaagaaagtcaccggaaaaccggttcctgagaaagctcctcaaaccagacatagaaagagaaagacttaaggaagaattgcctgggctcaccttgatcgtaagttgacagtgctggactggcagcaaagtgaccgttggagtttaatgagaggaatatactcatcatcagtctatttagaagagatttcctcgatcatttcaaagatgcctaaagcagatttctatgttctggaaaaaacaggactttccattcagaactcatctctgtttccaatactgttacattttcatatcatggaagccatgctgtatgccttattaaataaaacttttgcccaggatgggcagcatcaggtgctgagcatgaatcgaaatgcagtggggaagcattttgaactgatgattggtgactcccggactagtggaaaagagctagtgaagcagtttctcttcgattctatactgaaggcggatcctcgggtgttcttcccatcagataaaatagttcactacagacagatgtttttatctactgaactacaaagagtagaagagctttatgattcattattacaagctattgccttctatgaattagcagtgtttgactctcagccttagaattctgaggttaacgtgctaaagtataattattagctctaacgtaacaccaactgttgtgaacatccatgttattggaaaagaacacattttcagtgtattttagatgtttaaattctgacttttggctattaaatggtttacacaataagccaagaccaaatcaataaacattttatgagattc

SEQ ID NO: 30723 - DNA, 1542 bp, Homo sapiens
  misc_feature (1221)..(1221): n is a, c, g, or t
  misc_feature (1225)..(1225): n is a, c, g, or t
  misc_feature (1241)..(1241): n is a, c, g, or t
  misc_feature (1244)..(1244): n is a, c, g, or t
  misc_feature (1255)..(1255): n is a, c, g, or t
  misc_feature (1257)..(1257): n is a, c, g, or t
  misc_feature (1259)..(1259): n is a, c, g, or t
aggaataccgctccagcgccaacgcaatctcctcctccctcgcctttacctaatcccttgcctgccctgtttccccgctgagctcctcaaacacttcgcatctctccccgttattccagtctacctggtgaaaaggttatttgaggaccttgtctacgctgcccctacctgatcccgctcccggcgccacaggctgggccccaacaggagctcctcaatctaagtgtctaggagaaacccagggagtctccacgaaggaggcactttacccactacagactaaaactggcctcggaatcgccttcctggagattcggcccagcggctctcaggagtcggtaggggcaagaacgtttccccggtgcagtggaagaagactgcgggccagccagggactcgggatccggggacagggcctcggcaggcgcccgcctggaagcccgcagcccagacgcggacgacccactgctcagcgggacacacctcgggccttgccccggaacgccgcttggacaacaacctttccgccgagtgcaggccgagcgcttttgggcgcagcacgcaggaaccggaagtcaatggaggaagactggacctactgattcaacttggagatgagcgggtctgtcctcttcacggcgggagagaggtggagatgctttctgaccccgtcgaggtcatccctgtactgggccttacataatttctgctgtcggaaaaaatccactacacctaagaaaattactcccaatgttactttttgtgatgaaaatgcaaaggagcccgaaaatgcacttgacaagctcttctcttcagaacagcaggcttccatcttgcatgtgttgaatacagcatctactaaagaacttgaagctttccgattgcttcgtggaagaaggtccatcaatatcgtagagcacagagaaaactttgggccatttcagaatttagagagtttaatgaatgtgcccttgtttaagtataaaagtacagttcaagtttgtaactccatactttgtccaaagactggacgggaaaaaagaaagtcaccggaaaaccggttcctgagaaagctcctcaaaccagacatagaaagagaaagacttaaggtatattcttcatgtctgctatactgcctaatatttgagaacctactctagaaagcactcttctgggcattgggtgggaagtggtaagacagggtcttcaggtttagttggnagtntatgatcactaccaantantgagatgtccngntngtaaaatggcagttgagagggcagcaaaccaatggctgtgactgtggtggaaggtttagctgggaaaactcaattatgtcttaaagaagaatccttggatgggaaaggggattgtaggttgaaagaacgttgtgctggaagcagttaaggaaggtattagagaggtggggaaaaacagcgtgtaagggagtggtaagaaaataggcaaatgtttgcgggggttaattacgcgtcggataatattgggtcctagatttgaagggtgtgaaaaaacacttttggg

SEQ ID NO: 30724 - DNA, 1608 bp, Homo sapiens
aggaataccgctccagcgccaacgcaatctcctcctccctcgcctttacctaatcccttgcctgccctgtttccccgctgagctcctcaaacacttcgcatctctccccgttattccagtctacctggtgaaaaggttatttgaggaccttgtctacgctgcccctacctgatcccgctcccggcgccacaggctgggccccaacaggagctcctcaatctaagtgtctaggagaaacccagggagtctccacgaaggaggcactttacccactacagactaaaactggcctcggaatcgccttcctggagattcggcccagcggctctcaggagtcggtaggggcaagaacgtttccccggtgcagtggaagaagactgcgggccagccagggactcgggatccggggacagggcctcggcaggcgcccgcctggaagcccgcagcccagacgcggacgacccactgctcagcgggacacacctcgggccttgccccggaacgccgcttggacaacaacctttccgccgagtgcaggccgagcgcttttgggcgcagcacgcaggaaccggaagtcaatggaggaagactggacctactgattcaacttggagatgagcgggtctgtcctcttcacggcgggagagaggtggagatgctttctgaccccgtcgaggtcatccctgtactgggccttacataatttctgctgtcggaaaaaatccactacacctaagaaaattactcccaatgttactttttgtgatgaaaatgcaaaggagcccgaaaatgcacttgacaagctcttctcttcagaacagcaggcttccatcttgcatgtgttgaatacagcatctactaaagaacttgaagctttccgattgcttcgtggaagaaggtccatcaatatcgtagagcacagagaaaactttgggccatttcagaatttagagagtttaatgaatgtgcccttgtttaagtataaaagtacagttcaagtttgtaactccatactttgtccaaagactggacgggaaaaaagaaagtcaccggaaaaccggttcctgagaaagctcctcaaaccagacatagaaagagaaagacttaaggcagttaatagtatcatatctatcgtttttggtactcgaagaattgcctgggctcaccttgatcgtaagttgacagtgctggactggcagcaaagtgaccgttggagtttaatgagaggaatatactcatcatcagtctatttagaagagatttcctcgatcatttcaaagatgcctaaagcagatttctatgttctggaaaaaacaggactttccattcagaactcatctctgtttccaatactgttacattttcatatcatggaagccatgctgtatgccttattaaataaaacttttgcccaggatgggcagcatcaggtgctgagcatgaatcgaactgcggggggacgcctttgactgtgatggggcccggccattggagagctctggggcgtcctcggccaaaggagggggcccggggttccccaaaaaatctcaccgggttttcttggacccgaaagtgtttcaacagccccataggagcccccccaccacg

SEQ ID NO: 30725 - DNA, 1827 bp, Homo sapiens
aggaataccgctccagcgccaacgcaatctcctcctccctcgcctttacctaatcccttgcctgccctgtttccccgctgagctcctcaaacacttcgcatctctccccgttattccagtctacctggtgaaaaggttatttgaggaccttgtctacgctgcccctacctgatcccgctcccggcgccacaggctgggccccaacaggagctcctcaatctaagtgtctaggagaaacccagggagtctccacgaaggaggcactttacccactacagactaaaactggcctcggaatcgccttcctggagattcggcccagcggctctcaggagtcggtaggggcaagaacgtttccccggtgcagtggaagaagactgcgggccagccagggactcgggatccggggacagggcctcggcaggcgcccgcctggaagcccgcagcccagacgcggacgacccactgctcagcgggacacacctcgggccttgccccggaacgccgcttggacaacaacctttccgccgagtgcaggccgagcgcttttgggcgcagcacgcaggaaccggaagtcaatggaggaagactggacctactgattcaacttggagatgagcgggtctgtcctcttcacggcgggagagaggtggagatgctttctgaccccgtcgaggtcatccctgtactgggccttacataatttctgctgtcggaaaaaatccactacacctaagaaaattactcccaatgttactttttgtgatgaaaatgcaaaggagcccgaaaatgcacttgacaagctcttctcttcagaacagcaggcttccatcttgcatgtgttgaatacagcatctactaaagaacttgaagctttccgattgcttcgtggaagaaggtccatcaatatcgtagagcacagagaaaactttgggccatttcagaatttagagagtttaatgaatgtgcccttgtttaagtataaaagtacagttcaagtttgtaactccatactttgtccaaagactggacgggaaaaaagaaagtcaccggacagttaatagtatcatatctatcgtttttggtactcgaagaattgcctgggctcaccttgatcgtaagttgacagtgctggactggcagcaaagtgaccgttggagtttaatgagaggaatatactcatcatcagtctatttagaagagatttcctcgatcatttcaaagatgcctaaagcagatttctatgttctggaaaaaacaggactttccattcagaactcatctctgtttccaatactgttacattttcatatcatggaagccatgctgtatgccttattaaataaaacttttgcccaggatgggcagcatcaggtgctgagcatgaatcgaaatgcagtggggaagcattttgaactgatgattggtgactcccggactagtggaaaagagctagtgaagcagtttctcttcgattctatactgaaggcggatcctcgggtgttcttcccatcagataaaatagttcactacagacagatgtttttatctactgaactacaaagagtagaagagctttatgattcattattacaagctattgccttctatgaattagcagtgtttgactctcagccttagaattctgaggttaacgtgctaaagtataattattagctctaacgtaacaccaactgttgtgaacatccatgttattggaaaagaacacattttcagtgtattttagatgtttaaattctgacttttggctattaaatggtttacacaataagccaagaccaaatcaataaacattttatgagattc

SEQ ID NO: 30726 - DNA, 1105 bp, Homo sapiens
caagacaatttaatattgtcctctattagttcttaaattccaggaaagtatttgtgactttgcaaaggatctagtcaagcttgcaactaaccccaaaggaagtaggacatccaacttatattttgctaaattttccttttagagaggtggagatgctttctgaccccgtcgaggtcatccctgtactgggccttacataatttctgctgtcggaaaaaatccactacacctaagaaaattactcccaatgttactttttgtgatgaaaatgcaaaggagcccgaaaatgcacttgacaagctcttctcttcagaacagcaggcttccatcttgcatgtgttgaatacagcatctactaaagaacttgaagctttccgattgcttcgtggaagaaggtccatcaatatcgtagagcacagagaaaactttgggccatttcagaatttagagagtttaatgaatgtgcccttgtttaagtataaaagtacagttcaagtttgtaactccatactttgtccaaagactggacgggaaaaaagaaagtcaccggaaaaccggttcctgagaaagctcctcaaaccagacatagaaagagaaagacttaaggcagttaatagtatcatatctatcgtttttggtactcgaagaattgcctgggctcaccttgatcgtaagttgacagtgctggactggcagcaaagtgaccgttggagtttaatgagaggaatatactcatcatcagtctatttagaagagatttcctcgatcatttcaaagatgcctaaagcagatttctatgttctggaaaaaacaggactttccattcagaactcatctctgtttccaatactgttacattttcatatcatggaagccatgctgtatgccttattaaataaaacttttgcccaggatgggcagcatcaggtgctgagcatgaatcgaactgcggggggacgcctttgactgtgatggggcccggccattggagagctctggggcgtcctcggccaaaggagggggcccggggttccccaaaaaatctcaccgggttttcttggacccgaaagtgtttcaacagccccataggagcccccccaccacg

SEQ ID NO: 30727 - DNA, 1691 bp, Homo sapiens
gagagacaatgtcacacttcaaggaggcagctctctagacaggaaagttattcacgtcccatgtcaattgagaaatgcaattttatctgctgcctttcattctataccctgcttctgaaccatcgtgttcaactgtgaaactcacactttggtgaccacgactccaaaactcacttaatacacccaaggtcagccccagtgatctgcttcatagcaaggactttgggtgggtctgcccagggagtagggcaccctcagagaatgtggctttggactttatcacagctggggccttttgtgtcacttaagatctaaacttgtaaccatgctagatgtgtttctaatgtgacaacatcacgaaccacgagtccagaagcctaatccttaatcctacctcctcatgatgaagtctcatgctctgtgctcaacgtggttagcctgcacaagatgtaaaccaaagcttcactgaaccctcgacccaaatcagtaactcaagtgcgtcaatcataatgaacctccccaaactcagtttttatgattatttttgaggcagggtctcactctgtcgcccagactggagtgcagtggcaggatcagggctccgtgcggccccgaccttccaggctccagcgatcctcccgcctcagcgaggctgaagcacaagaattgtgtgaacccaggaggcggaggttgcagtgagttgagattgggccactccattccagcctgagaggcagaacaagactctgtctcaataaacaaacaaacaaacaaactgtccaggtgtggtggcacagccctgtagtcggagctaataaagaagctgaggtgggaggatcgcttgagcccaggatatggaggctgcggtgagctatgatctcaccactgcactccagcttgggggacagggcaagtctgtctcaaaaaaataaaagaaattgaatacattgatattttgccaggaccctgccttctacaggcatctagtctaatgggactgggagtaatcaaggcagatgacctaatcccagtgtccaggatgtaactagagagctacgggcatgcagaagttggaagatgagggaaggcatcacagaggctgtggggtgaactgatttcaaggaatgggtccttcccttcagagccacatgtgtgcgggacacccagacagaaaacacaaacacaaagtcgagtggagggcatttggaaggagcagtgaagccgagccaggaaataccaagatggcgagccagtgtgcttgtagagattgtagagagggtagaattgacactgtggaccctggcctcgatagagaaaggcatcagctaaggaagttgttcaggtgggcagtgaggttgtcgtgctttggaaagatgttcaggctgcactaggaagccccctggcttggggagagactccaggagaccccagcggggagcatttgacagtaaattcgagtgatgcgagggggacctgaactgtggcctctgtcatgggaacccagaggaggtcgatggcgtttgtggttgatgtgggaaggagagagagagaagaaccagaaacgtctgcttgctggaggaagcggcatgtccgctcctccactccttttcttttccccttaggagcggtttatggttccttttgttttattcttttatttgtacactggcattggagtttgtttttttggc

SEQ ID NO: 30728 - DNA, 1376 bp, Homo sapiens
  misc_feature (1262)..(1262): n is a, c, g, or t
  misc_feature (1264)..(1264): n is a, c, g, or t
  misc_feature (1347)..(1347): n is a, c, g, or t
gagagacaatgtcacacttcaaggaggcagctctctagacaggaaagttattcacgtcccatgtcaattgagaaatgcaattttatctgctgcctttcattctataccctgcttctgaaccatcgtgttcaactgtgaaactcacactttggtgaccacgactccaaaactcacttaatacacccaaggtcagccccagtgatctgcttcatagcaaggactttgggtgggtctgcccagggagtagggcaccctcagagaatgtggctttggactttatcacagctggggccttttgtgtcacttaagatctaaacttgtaaccatgctagatgtgtttctaatgtgacaacatcacgaaccacgagtccagaagcctaatccttaatcctacctcctcatgatgaagtctcatgctctgtgctcaacgtggttagcctgcacaagatgtaaaccaaagcttcactgaaccctcgacccaaatcagtaactcaagtgcgtcaatcataatgaacctccccaaactcagtttttatgattatttttgaggcagggtctcactctgtcgcccagactggagtgcagtggcaggatcagggctccgtgcggccccgaccttccaggctccagcgatcctcccgcctcagcgaggctgaagcacaagaattgtgtgaacccaggaggcggaggttgcagtgagttgagattgggccactccattccagcctgagaggcagaacaagactctgtctcaataaacaaacaaacaaacaaactgtccaggtgtggtggcacagccctgtagtcggagctaataaagaagctgaggtgggaggatcgcttgagcccaggatatggaggctgcggtgagctatgatctcaccactgcactccagcttgggggacagggcaagtctgtctcaaaaaaataaaagaaattgaatacattgatattttgccaggaccctgccttctacaggcatctagtctaatgggactgggagtaatcaaggcagatgacctaatcccagtgtccaggatgtaactagagagctacgggcatgcagaagttggaagatgagggaaggcatcacagaggctgtggggtgaactgatttcaaggaatgggtccttcccttcagagccacatgtgtgcgggacacccagacagaaaacacaaacacaaagtcgagtggagggcatttggaaggagcagtgaagccgagccaggaaataccaagatggcgagccagtgtgcttgngntttctgtctgggtgtcccgcacacatgtggctctgaagggaaggacccattccttgaaatcagttcaccccacagcctctgtnatgccttccctcatcttccaacttctgca

SEQ ID NO: 30729 - DNA, 543 bp, Homo sapiens
tagaatatgtctcatgtggacagcatatagatctggtgcgtctttgaggtcgtcagagctcatgggcttccctgaaattcatccactgtccctgccgtatgctacgggaatattcattagtgtacaaaatgcagggaggaagtaggtttaatattcaactttctagccaaagtttatattgaaacccaaaagaaaacatttaagagttgttccacatatttcacttttaaaaacaaatgcctttggttctttagcacattttgcattccttttcacatctccagtaaatgccaacatatctcctgttaaattagcagcagccatttaaagtcctttcggtggcatctgcataataattgcccagagatgctttatatctgggaagcaagccaaggaataaaccttgaagcaaagtgtattaaattagttatctagttagagcttttggaatgatttcctgatgatgtatcaagtctgaagctggagctgtcagtgtctattgctgcagtttggatttgaagggagaaaatgtaaaatggagga

SEQ ID NO: 30730 - DNA, 433 bp, Homo sapiens
agctgggactacaggcgcacactgccgtgcctggctaattttttgtgttttagtagagatggggtttcaccatgttgcccaggctagtgttgaactcctgagctcagacaatccgcttgcctcggcctcccaaagtgctaggattacaggcatgagccaccgcacccggccccggaatctgcatttcaacaagctcttctgatggttcctctgcatctgggagtcgagaagttcttgctctatggcctctgaagttgcttcgaacccaattcagaatctcaacccactcctctgcctcttctagtcatagttacttttccttaagtgccacactggcataaaggcgttcgatgttccactatctttcctgcaggtgttcagcacatgatcggtggtttctagggtctgccatgggtcttactaattatttgga

SEQ ID NO: 30731 - DNA, 1553 bp, Homo sapiens
gccgcgggagccgaagagggcgccccaggtggttgccccctccctctcctgagatgtcaggaaggagggggccacctgtgtcctccacaggggccccccgaagcctggggactcccagccccagagctccgaggcggaggaggtgctgacaggtgctccgagagatgctccctctcccctcatgctccctccccatcctcctccttttcctcctccccagtgtgccaattgagtcccaacccccaccctcaacattgcccccttttctggcccctgagtgggaccttctctccccccgagtagtcctgtctaggggtgcccctgctgggccccctctgctcttcctgctggaggctggggcctttcgggagtcagcaggtgccccggccaaccgcagccggcgtggggtgagcgaaactgcaccagcgagtcgtcggggtgagctggctgtgtgcgatgcagtcagtggctgggtgacagaccgccggaccgctgtggacttgcgtgggcgcgaggtggaggtgttgggcgaggtgcctgcagctggcggcagtcccctccgccagtacttctttgaaacccgctgcaaggctgataacgctgaggaaggtggcccgggggcaggtggagggggctgccggggagtggacaggaggcactgggtatctgagtgcaaggccaagcagtcctatgtgcgggcattgaccgctgatgcccagggccgtgtgggctggcgatggattcgaattgacactgcctgcgtctgcacactcctcagccggactggccgggcctgagacccatgcccaggaaaataacagagctggatgctgagagacctcagggatggcccagctgatctaaggaccccagtttgggaactcatcaaataatcacaaaatcacaattctctgattttgagctcaatctctgcaggatgggtgaaaccacatggggttttggaggttgaataggagttctcctggagcaacttgagggtaataatgatgatgatataataataatagccactatttactgagtgtttactgtttcttatccctaatacataactcctcagatcaactctcatggatttgatcattggtggcccttggtgttaagttgctgactactcagtctcagaggacaccaccttgctggggagtgggaggggacatttcacgatgtgggtggaggaggagagaaactagaacaggcaagcagatggccaggggaccttgagaacgtggcccacagaaggcctttaagtatctgggagatggggttcaaatgggaaatcttacttggtaagagggggcaaaggttgacttagaatattctgttttgaggtaataagctaccgatcacagaggagtacaagcaaggttgaatgagaagtgatcaggatgctggagagttcagccctcggcagggagctgaagtcaggtttctagccctcttccctgtcccaacctttactctacattgggaaagaaacagaccttaaaattttccagcttgatggccaggtgcgatggctcattcctgta

SEQ ID NO: 30732 - DNA, 894 bp, Homo sapiens
cccttccccacctgcctctataacctgtctattcttttcttcccctaggtggttgccccctccctctcctgagatgtcaggaaggagggggccacctgtgtcctccacaggggccccccgaagcctggggactcccagccccagagctccgaggcggaggaggtgctgacagtgagagacctcagggatggcccagctgatctaaggaccccagtttgggaactcatcaaataatcacaaaatcacaattctctgattttgagctcaatctctgcaggatgggtgaaaccacatggggttttggaggttgaataggagttctcctggagcaacttgagggtaataatgatgatgatataataataatagccactatttactgagtgtttactgtttcttatccctaatacataactcctcagatcaactctcatggatttgatcattggtggcccttggtgttaagttgctgactactcagtctcagaggacaccaccttgctggggagtgggaggggacatttcacgatgtgggtggaggaggagagaaactagaacaggcaagcagatggccaggggaccttgagaacgtggcccacagaaggcctttaagtatctgggagatggggttcaaatgggaaatcttacttggtaagagggggcaaaggttgacttagaatattctgttttgaggtaataagctaccgatcacagaggagtacaagcaaggttgaatgagaagtgatcaggatgctggagagttcagccctcggcagggagctgaagtcaggtttctagccctcttccctgtcccaacctttactctacattgggaaagaaacagaccttaaaattttccagcttgatggccaggtgcgatggctcattcctgta

SEQ ID NO: 30733 - DNA, 1663 bp, Homo sapiens
ggggcggggcttggcggaggaaactgaggcaagagggaagtgtcccagatatgcagccggtttcccctgaggggtctcggagtccggaacccccaacccaaatctggaggatgaggaacccggagtctgcatttcttagtggttgccccctccctctcctgagatgtcaggaaggagggggccacctgtgtcctccacaggggccccccgaagcctggggactcccagccccagagctccgaggcggaggaggtgctgacaggtgctccgagagatgctccctctcccctcatgctccctccccatcctcctccttttcctcctccccagtgtgccaattgagtcccaacccccaccctcaacattgcccccttttctggcccctgagtgggaccttctctccccccgagtagtcctgtctaggggtgcccctgctgggccccctctgctcttcctgctggaggctggggcctttcgggagtcagcaggtgccccggccaaccgcagccggcgtggggtgagcgaaactgcaccagcgagtcgtcggggtgagctggctgtgtgcgatgcagtcagtggctgggtgacagaccgccggaccgctgtggacttgcgtgggcgcgaggtggaggtgttgggcgaggtgcctgcagctggcggcagtcccctccgccagtacttctttgaaacccgctgcaaggctgataacgctgaggaaggtggcccgggggcaggtggagggggctgccggggagtggacaggaggcactgggtatctgagtgcaaggccaagcagtcctatgtgcgggcattgaccgctgatgcccagggccgtgtgggctggcgatggattcgaattgacactgcctgcgtctgcacactcctcagccggactggccgggcctgagacccatgcccaggaaaataacagagctggatgctgagagacctcagggatggcccagctgatctaaggaccccagtttgggaactcatcaaataatcacaaaatcacaattctctgattttgagctcaatctctgcaggatgggtgaaaccacatggggttttggaggttgaataggagttctcctggagcaacttgagggtaataatgatgatgatataataataatagccactatttactgagtgtttactgtttcttatccctaatacataactcctcagatcaactctcatggatttgatcattggtggcccttggtgttaagttgctgactactcagtctcagaggacaccaccttgctggggagtgggaggggacatttcacgatgtgggtggaggaggagagaaactagaacaggcaagcagatggccaggggaccttgagaacgtggcccacagaaggcctttaagtatctgggagatggggttcaaatgggaaatcttacttggtaagagggggcaaaggttgacttagaatattctgttttgaggtaataagctaccgatcacagaggagtacaagcaaggttgaatgagaagtgatcaggatgctggagagttcagccctcggcagggagctgaagtcaggtttctagccctcttccctgtcccaacctttactctacattgggaaagaaacagaccttaaaattttccagcttgatggccaggtgcgatggctcattcctgta

SEQ ID NO: 30734 - DNA, 1702 bp, Homo sapiens
ggggcggggcttggcggaggaaactgaggcaagagggaagtgtcccagatatgcagccggtttcccctgaggggtctcggagtccggaacccccaacccaaatctggaggatgaggaacccggagtctgcatttcttagtatccgagaaggaggggcctgaattccagaactcctgggtggttgccccctccctctcctgagatgtcaggaaggagggggccacctgtgtcctccacaggggccccccgaagcctggggactcccagccccagagctccgaggcggaggaggtgctgacaggtgctccgagagatgctccctctcccctcatgctccctccccatcctcctccttttcctcctccccagtgtgccaattgagtcccaacccccaccctcaacattgcccccttttctggcccctgagtgggaccttctctccccccgagtagtcctgtctaggggtgcccctgctgggccccctctgctcttcctgctggaggctggggcctttcgggagtcagcaggtgccccggccaaccgcagccggcgtggggtgagcgaaactgcaccagcgagtcgtcggggtgagctggctgtgtgcgatgcagtcagtggctgggtgacagaccgccggaccgctgtggacttgcgtgggcgcgaggtggaggtgttgggcgaggtgcctgcagctggcggcagtcccctccgccagtacttctttgaaacccgctgcaaggctgataacgctgaggaaggtggcccgggggcaggtggagggggctgccggggagtggacaggaggcactgggtatctgagtgcaaggccaagcagtcctatgtgcgggcattgaccgctgatgcccagggccgtgtgggctggcgatggattcgaattgacactgcctgcgtctgcacactcctcagccggactggccgggcctgagacccatgcccaggaaaataacagagctggatgctgagagacctcagggatggcccagctgatctaaggaccccagtttgggaactcatcaaataatcacaaaatcacaattctctgattttgagctcaatctctgcaggatgggtgaaaccacatggggttttggaggttgaataggagttctcctggagcaacttgagggtaataatgatgatgatataataataatagccactatttactgagtgtttactgtttcttatccctaatacataactcctcagatcaactctcatggatttgatcattggtggcccttggtgttaagttgctgactactcagtctcagaggacaccaccttgctggggagtgggaggggacatttcacgatgtgggtggaggaggagagaaactagaacaggcaagcagatggccaggggaccttgagaacgtggcccacagaaggcctttaagtatctgggagatggggttcaaatgggaaatcttacttggtaagagggggcaaaggttgacttagaatattctgttttgaggtaataagctaccgatcacagaggagtacaagcaaggttgaatgagaagtgatcaggatgctggagagttcagccctcggcagggagctgaagtcaggtttctagccctcttccctgtcccaacctttactctacattgggaaagaaacagaccttaaaattttccagcttgatggccaggtgcgatggctcattcctgta

SEQ ID NO: 30735 - DNA, 432 bp, Homo sapiens
gggactcccagccccagagctccgaggcggaggaggtgctgacagtctggtaactactgactgtttcccagtcttctccacgccaccctttcccagaaccacaggcttccagaatgttgtagggaaactgcaaaatccgcgcctccaccagcctctcccagcgccaggtcaatttcacacacagggaaactgaagcctgcctcagaggggcagcgttttacctccttagtggcagttttgaggtgaactggggtctccctaggattccaggttgtgacctttctctaaattgtggaatgtggccaggcgtggtggcttgagtctgtagtcccagctactcaggaggctgaggcaggagaatgccatgaacttgggaggcggagcttgcagtgagccaagatcgtgccactgcactccagcctgggcgacaga

SEQ ID NO: 30736 - DNA, 1558 bp, Homo sapiens
tgcatcaacattcttcccccacgtcttgacgctgggttccggcctagggttctggctttcctcctgggctagtgaacgcggcgaagtcctcctctttctaatctccagagccgcagttccatcctctgggtcagcggcttaccctgactgggctgcggtatctgccttccttcccccaacaaggcgacaggtagtcggggctggggccggaactgactgagtgggccgcaactgactgagtgggccgcggctcccgcctgaggaggctaggaaggactgaacagcagccgacttcccaggctctaaaaatcgtgcctctgagttagagctacctcaaaagcaagaccaagcatgagaaatggagtcttttggccagtattggggtgttcggaattcaagcgtatgagagagtggacggtagcgttgagaattttcatttgaagatctcgtcttaaccaccccaagtgtagtcagaggcggcgttttccctgcgagagtgccctggaacaaagcaaggatagcgtgggttagacatacctgaaatgaaagcgtcttactttatctaggtacatatttgcgtcagtaaggcgcaacgccatttctctcttggaattcagaagtgaaatatggtgactgggacgcctgtacattgctttgacttaaaaattgaagtccattattctgaccgaaagttaatctgatgattaattggttaaacatactatcgttgctaattagcataattattatttacaataaagtgagctaaatagctacaactaaaatatatttaaattactgtgatattgtgatgctaaagatgtgttgaaattaatatcttgaatttctcaaccctgcctaaatgcctctgagagtaattagtataattaaaagtcactagagaaagtgaatgactctaataacaggataacaaattcttttcaagtcagatggtttccagttctttgctttcaacaaaattaatggtggcccatgaattgtcagctgatgaaggaacactatttggtttttggcatgcaactcggaaagaaaccaaacgattgattgacatgcttacaacaaaactactagcattctcacctatttatgtaaaaccatttctcagcacttgtatctgtgaaaacaacagaattgaaaatgaaccctgttaatctaccagtaggaactattcatccagataaatgaattaattggtgggtcagccccatctatctcactaagagatgtgttcccaatagaatttcaccttttataactgtgtgttatcaatatttgcaatcgtgtcattttgatccattatatactaaagatgattgtgatgattactcacttcagaagaattccagcgtagagccataaagttacacgaaattttttaaggtttactacatatgtcatatttttattgcgaagaagtgatcaagaaaaggttgttcaaacatcaaagtactatatttgaataacattttttgttagagtacaatctaaatatgttagagataataaaagaacaatgttgaagagctcaaaaaaaaat

SEQ ID NO: 30737 - DNA, 991 bp, Homo sapiens
aagggagggctcgaagcttctcccggggtcgtcgcaagaaaaaatgcaagatttgcaagcttcgatcctttttccgtaaactcaacaccaggctaatgtcccaacggatctgatggtggggagggagaaaactgtcctttagaggatcttccccactccggcttggccctgctgtttctcagggagaagcctgtcacatctccatctacagggagttggagggtgtagagtcccttggttgaacagggtagggagcctggataggagtgggtgggaataaaccagactgggatgcctgtgtctcagtcctgcctcctcacggacttgctctgtgacctcaggtgacccacatgagcttttagcctcagtttcctcatctgtaaaatgagctctaatgactttgtgactctttggtgtggccctggagcctggggcacggtggagttcctggccggccttgccacttgacaactcctttaaggcttcccccttaacacgggatccctgtggtggtgtttgggagttgcctggaggcaactccaagcctggcccccagctgaagcatggcaatctggctgctctctacagggacccccaagcgctgtgggtggagggcaggggtcgggggggttgaccttcttgggtcttcacatggcctaggccagtcctccggtcagactggtgtcaggcaccgtggtgcaaaattcctcttctggcccctccagtacccagagaaactggctgggccattaactgctgcagcaccaagggtggtagaaagagctgtgaagagcccccaaaccagtaccaggacacctgggttctcctgtgacctggggcacagttcttgccctctaggccttgatttccccacctgcaagtggggatgccagccctggctctgcctccttcatgaggctctggaagactggccaaggttgtggaggagcttgtgaacttgattaaagtgtcgtaacatggaaatgaaaaa

SEQ ID NO: 30738 - DNA, 390 bp, Homo sapiens
ggggcctaggctttgtccacagtcccctgctcaagcgaaagcaacggacaagccgggcactgatgcacatcactgaactggtgtcaggcaccgtggtgcaaaattcctcttctggcccctccagtacccagagaaactggctgggccattaactgctgcagcaccaagggtggtagaaagagctgtgaagagcccccaaaccagtaccaggacacctgggttctcctgtgacctggggcacagttcttgccctctaggccttgatttccccacctgcaagtggggatgccagccctggctctgcctccttcatgaggctctggaagactggccaaggttgtggaggagcttgtgaacttgattaaagtgtcgtaacatggaaatgaaaaa

SEQ ID NO: 30739 - DNA, 390 bp, Homo sapiens
aaataattcaaatcactgccaatgcagtgtgttacaagtataaatctaaatacagccagttaaaaagagctaatttaattcgcagctgtgttcaatttaaaacatggatattatttaggtcttcatttctttttatgcatgggtgtgctatctcttgcatggcatggaagttgattaactttaaaaatatgaattgggttgcataccacattgttttcccttttgaaattttttttaagtttcttaattgctggagaccattttagggccatggatttaaaaagaaatcattttttcctttagaaatggatgtttgttttaaaagtaaatagaaaaacattaatcctaaatacttttggaattaatcttgcaatcaattggaaacagaag

SEQ ID NO: 30740 - DNA, 427 bp, Homo sapiens
ggtagatgaattgtagaagtttgattatgaagcaaagagaaggatagagatagtagtggaaaggaagaatggacggagcagctgaatccaacaggagagaacttcgaatattatcctcaagatattagaaaataaaaaagggaagacagactgagcacagcgactcacgcctgtaatcccagcactttaggaggctgaggcaggcagatcacgaggtcaggagatcgagaccatcctggccaatatggtgaaaccctgtctctactaaaaatataaaaattagcttggcatggtggtgcatgcttgtaatctcggctactcgggaggctgaggcaggagaattgcttgaaccaggaagtcagaggttgcagtgagccgagatcgcgccactgcactccaacctggtgacagagcgagactccgtctc

SEQ ID NO: 30741 - DNA, 500 bp, Homo sapiens
ctgacctcgtgatcctcccacctcggcctcccaaagtgctgagattacaggcgtgagccaccacgcccagccaaacagttatattttaaagagacccagaaatgacaggaaaaaatcatgttcacctcaccaggtgctcttcgttgctttttgttgtatatccaagttcccatcggagatcatcttcctccctcctgaaggaattgaatgtttcctgtagtgcaggtttgctggtgatacgttcttgtttcttttgcatgtcagaaaaagtctttactttgtcttcattttgaaataaattttcactgggtatagaattctaggttaatttaatctttgttccttcagttaccaatttgtgtcttttctctctctttttctgtggctgcttttaagtttcttctggtttttttgttttgttttgttttcccttagagacaggatctcactgtgtcacccaggctggagtacagtggtgctcactgcagcctcgagctccc

SEQ ID NO: 30742 - DNA, 407 bp, Homo sapiens
ggggagacatgggcttgtcaatctaatggttatagtgactaaaaatagtaacaatgaggcagtacatgtgatcaataaattttaaaatggagagggatgtgtttccatataaatacaaagctttgcatcatttctaacacactggttcaaaagatagcttttttttttgtaccctgtccaaaagcaatgagatgctccttcccataaatcaaacaaccaaagctctgggagagctggcttcccttcttcacatgggaagctgttcataaagcctagttctcgtagagacttaccacctgtattagtccgttttcacactgctacaaagaactgcccagtttataatagctgggtaattataagtaagaggtttaattgactcacagttccacatggctgtggaggcc

SEQ ID NO: 30743 - DNA, 411 bp, Homo sapiens
tactactactactaaattcgcggccggtcgacctgctttattttaccaaagatattggtcctttttttctccagacaactcaacaaatatttactaagttcctacagtgtatccagctatgggcagtacactgtggtatatagtacagtgcttcctctccaaatgccaacaacgaaataatagcgtctttcagtttgtaaagcacttttatatgcataatttcatattattctccctctagtcttttgaaatagaaagtacaggtattatttccattttgtagatgagaaaactaaggcttagtaacttactcaagattccactgatggagatttgtgggtccattctgtttactgactccagtgtgttctgtggtctccatataactcagtttgatttttctctcctcct

SEQ ID NO: 30744 - DNA, 355 bp, Homo sapiens
gaagcgaggccaccaggctggagtgggctcagctgctcaggggaacctatactctccccctctgcctctgccagcctgctcctttctcaggcaggccacctggtccacctggccctggagcccaaacctccctccccaacgtgcttttacactgcctaaatgctcaaatcttcctgttcttagatctagaaaacccttttagtgctgaatccccttcaagctactttcttgctctgtgaagctaactctctctttctcttcaccatcaagcttacatttttttcaaactacagcactcattagattaaaagcattatcaaactcctggcaacagtgatgcaggagccacatacca

SEQ ID NO: 30745 - DNA, 930 bp, Homo sapiens
  misc_feature (798)..(798): n is a, c, g, or t
  misc_feature (800)..(800): n is a, c, g, or t
  misc_feature (807)..(807): n is a, c, g, or t
  misc_feature (813)..(813): n is a, c, g, or t
  misc_feature (819)..(819): n is a, c, g, or t
  misc_feature (821)..(821): n is a, c, g, or t
  misc_feature (830)..(830): n is a, c, g, or t
  misc_feature (840)..(840): n is a, c, g, or t
  misc_feature (846)..(846): n is a, c, g, or t
  misc_feature (860)..(860): n is a, c, g, or t
ctggaactctttctgcaaatgactaagatagaaaactgccaaggacaaatgaggagtagttagattttgaaaatattaatcatagaatagttgttgtatgctaagtcactgacccatattatgtacagcatttctgatctttactttgcaagattagtgatactatcccaatacactgctggagaaatcagaatttggagaaataagttgtccaaggcaagaagatagtaaattataagtacaagtgtaatatggacagtatctaacttgaaaagatttcaggcgaaaagaatctggggtttgccagtcagttgctcaaaaggtcaatgaaaaccaaatagtgaagctatcagagaagctaataaattatagactgcttgaacagttgtgtccagattaagggagataatagctttcccaccctactttgtgcaggtcatacctccccaaagtgtttacctaatcagtaggttcacaaactcttggtcattatagtatatgcctaaaatgtatgcacttaggaatgctaaaaatttaaatatggtctaaagcaaataaaagcaaagaggaaaaactttggacagcgtaaagactagaatagtcttttaaaaagaaagccagtatattggtttgaaatatagagatgtgtcccaatttcaagtattttaattgcaccttaatgaaattatctattttctatagattttagtactattgaatgtattactttactgttacctgaatttattataaagtgtttttgaataaataattctaaaagcaaaaaaaaaaaggggngntaaaatnccgggncagttngnccgttttgnaaggccaagngggaanaaagcggggtaaanggggaaagcggttggggacctcggggggggagccaaaggaaaaaagtgggaggcgggggggtagcgagag

SEQ ID NO: 30746 - DNA, 783 bp, Homo sapiens
ctggaactctttctgcaaatgactaagatagaaaactgccaaggacaaatgaggagtagttagattttgaaaatattaatcatagaatagttgttgtatgctaagtcactgacccatattatgtacagcatttctgatctttactttgcaagattagtgatactatcccaatacactgctggagaaatcagaatttggagaaataagttgtccaaggcaagaagatagtaaattataagtacaagtgtaatatggacagtatctaacttgaaaagatttcaggcgaaaagaatctggggtttgccagtcagttgctcaaaaggtcaatgaaaaccaaatagtgaagctatcagagaagctaataaattatagactgcttgaacagttgtgtccagattaagggagataatagctttcccaccctactttgtgcaggtcatacctccccaaagtgtttacctaatcagtaggttcacaaactcttggtcattatagtatatgcctaaaatgtatgcacttaggaatgctaaaaatttaaatatggtctaaagcaaataaaagcaaagaggaaaaactttggacagcgtaaagactagaatagtcttttaaaaagaaagccagtatattggtttgaaatatagagatgtgtcccaatttcaagtattttaattgcaccttaatgaaattatctattttctatagattttagtactattgaatgtattactttactgttacctgaatttattataaagtgtttttgaataaataattctaaaagca

SEQ ID NO: 30747 - DNA, 336 bp, Homo sapiens
cagatgaatcgcaattaataaatgtggaacgaatgagagacgaagacgatgagcaccagaggactgcagggagcacggctgaggcaacatcaccagaggatagtaaaattagcagacagagatctaagcacaaacagtgtctctgtgtagccttaaagcatctctttgaatatttaatggttacaaaggaaaaacagtgagttgatgggggagaaccctggcaggcaccaccctaaccaagagatcaaagttggcatgaccaggcacaaggcacactaacagcccacacccactgatctggcccaccgaaaatgcacatcacttctgtggcattgc

SEQ ID NO: 30748 - DNA, 1953 bp, Homo sapiens
tgtatgagagaataaacaaacttactcagactgaagagtatgttttcaaaaattaaagaagtagcaattatatgggagctgttatttattaaagcaattatctgagcccttaaagggctgtttgtttttacaatgttgtataatggccttgcaggaaaattagatttcttattctctcttccagtgtacattgtcttgagtattgtcacatttagagaccatagggagatatgggactcctagtattcagtcgacactctgaacagattttctgtgtgatacattttttcattttaattgagtcccctcttcctcccctccaactgatagctttttataactgtgtgaaatatctagagaagaatgaagtaggctgagctacattttcaagcttaacattctttagaaaactaagaaaatgcccaatatttcaacattaaggtgtcaataggggctaaatgatcactttaagatgttttcagtttggaacttgaatgtgtgtttaattttttgtgaacagattgatgactcttccgcgtctatttctctggcccagcttacaaaggtatatatatatatatattcttgaaaatataagtttttttctaacatcatatttttttatgtggaacggttttttaagaggggttgggggaggacatattttgcaaaagcattgtacatattattactatcctgtaaagagtagttgctgttttgagaagataggggaatactttgtcagcctcagcgtattggagtattgttcatcttcaagacagaagaaacacttgaagctacacttaattattttttttccctcatacattttgtttaattatacattggaaactaacaaggttctggaggaatttcctggttttggctataaattatgtggaccttttttaagcagccaaaacagaagatttcctttacacggacgattgcatggttatttcttgaatatttgacttgatcccatgaaggtcaatattttaaatgtgatgcagttgtttctttatgctatagacttgtagtctgtctgcattaggaaaagttttgaacaacctaatttgtttgaacacagactacatgaattgtgtaagtgtgtaaagctgtttgcaggaatataccaatgtgtatgtttggcagaggggcaaattgttacctcctgaatcactgtatatgccatgttttgcgataagattgcttgcattttctgctcaacaatgtgtatcttctgtttgggaaagcactagtgatggattactttttaaagcaatacatttagcttgcaaattgtgcctttaaaaaaaaaaataggcagacttttgagggccaagaaggaagctgtccagttttccaaaaatcctttttccctgctatcagaaatgtgaaaccaaatttagcaaccaagattaatgaaaagatgggttttccattagtgctgtccctatcttgttcttggctttgttatgtcctttcccctagactgtatcccgacaaaatgtcctagtaacaaattgctttttaagctcctgttctgggaaaactaagcattaaaattgattattctaaaacataaagtggactaaagccatcctattttataattttctaatgcaaagtggtttagtatagagttaacacttagaagtttatagtttactgtttttattcttatgtactgtaaggaccatatttgagtttttggtctattcctaccattgtttctttgtggggaggagttggggcggtttgggggattggttttttttttttgtttttttaaactacaggtatttgtaaaacaatgtttgggttcaaacaaattagttgttaaacatctgtaatccagttttctgtaaatgttgctgttgttctaagctctgttaatgttaagcattctttgtatataaaattacaataaaatgttaaaactgaaaactt

SEQ ID NO: 30749 - DNA, 384 bp, Homo sapiens
tcttggatggtggtgatttgggggtgggcatgggatgggtaggggcaggtggtgtactgcctacaggataaagctgctctcatttgtaattactgtggggaggtgaggcaaggggggaggctgttctggcttttctaatttcaaaagatgcctaaaggacataataggagctacatgcttttcattcacaaatagttacaccagagaatgctaactggggtttgctaccttaagtggcaaggaatctcttggagcagttggggggcatcattatcttgtttatgtgcaaaagaagatttaagtagatgaaaagatgatttttatctagacaaaatgttcctaccatcctgcatgtataacccaattgcctcatgttaaagtcat

SEQ ID NO: 30750 - DNA, 464 bp, Homo sapiens
cactagaaaaagaatattaataaccagttagaggagtaaatatagtgttaactaaagcacatggaaattaagaaagaattagacttttgatgctaacttgttgtatgttaactatattcccccaagggcaaaaaatatttaattcacagaaagttttctcatccttattttccaaggagaacatttttagtctcaaatcacaataaaatcatattttatactttaaatgtgttctacctccctaaagttaactgaaatatagtccttaggatataatagcatcgtatgtgagtaattgagaaatttaataaatgcaagtatttagaaagaaagaaaatgttctgtttccaaaagcagatatattactaccactggcaaaactctttcataataaattcttaattatatttcagcatctcccaaagtgttatctcagtgtgaataaccatcatacagctcagcat

SEQ ID NO: 30751 - DNA, 429 bp, Homo sapiens
ggaatttggtagcttctcagaataatggctgcacgaacaatatttgtttaattttggtctagtaggtaacggaatcaagtctgtgttgtatgaacgtatgataaatgtgtgatgatgagggggatgatgatagtgatgacaaacttcaaggttgtcttgatttttctggattcctccatcttggacatttcctatcctgttccttggtttaggaatgaatatgtgatacaattctggccaacgagacatgagggtaagttttcagttcagggagtcaagtgaggaaaaaggtgggatgaaacagcatttgacatgcataggtttacttaagcccctgatgttcagtaaggtatccctccttcagttgtgcttggtgcctttgagtcttgagatcttcttcttctgttttatattctccaaagaaaaaac

SEQ ID NO: 30752 - DNA, 948 bp, Homo sapiens
gattgcttgagcctaagaatttgaggctgcagtgagccatgactgcaccattgcactctggcctgggcaacagagagagatcctgtctccaaaaaagaagaaaagtatcaagcctcagctcaggacatgattccgaatctgcatctcaacgagactctgggtgatttgtgtgcacagtagtttgagaagctctggggcctaccacatagccctcaacctattgctgttttctaaaattcctacacaaactccgttcctgacagacttgccatgatggagcagcattgcaggatcactacagggaatattaataatgagtcttcaaatcaggaaccccactagacagagccaccaactgggcagtacgtcagcactaatgggtgacaatttcctaggcactcctgggtacaagtccataaatgtaattggcaccaagcaatagagttgtcacagctttcacctgccgcattagggcaaactgcttttatgtctaaaccactgggcctgaaagcttcctctaagtagagcctggaattaatcttgatccactgtaattcaaagtatcgtcagattttcatttcccagagtgggagcgcgccccccattgccatgttttatggccttgtttgagcctctacaagtgcttgtttggcagcgatattcagaatcacccaaaccatggggatgttctgctaggtaattagccccaggccagtggactcaatttttttataacattttcagaaaaatatgtgacccaaggaggggacttggctgttcagctgcagcctgcatgggaaagaactgttaaaaccaacaaagccaggcacagtggctcacacctgtaattccagcattttgggaggccgaggtgggtggatcacctaaggtcaggagttcgagaccagcctgccaacatggcgaaaccctgtctctactaaaaataca

SEQ ID NO: 30753 - DNA, 267 bp, Homo sapiens
cccacgcgtccgcggacggcgtgggtcgacccacgcgtccgaaaccttgtttgccagttaccttccgaaagctgtgtaaagagttatttttaacaaagtcttaacaatatatgttactttttagatactatagaaaataataaatataacctgtaaaccacattaagctatgtttgtttttaatttgataaatcacattggcaactttgtgtagtatactttttaaaaataagctttacattaaagtttgttaattcaggcttaaaa

SEQ ID NO: 30754 - DNA, 1258 bp, Homo sapiens
ttttttcattttcttctcatttacacctatttttttaaaaagtatacatttactaaaatgatgtaataaataacatgttaatagactcaagctttaccttatgaaattgatgtatttttaccagttatttctaatgtaacattgaatatataagatctgacaaatgtatgtttaaacatgaattagaagagttgagaactaccattatgtatagggattctcatagtgtcttggcccttaattggaaagttgtggcaactttaaagtactttttactgtatgttataattctttataacttagagagagacaatggtcactcaaactatgagaactatgaattaggagataaaagtttaaatttgttgttgttttataacagtatgtacaagttagttttcccttatatatttacgttttcaagttttttaatctcatcatatacatccatactctataaaatgttttatattcaaagaactgtaaaatcctaaacattagttttcactattgaaattgttttttaaagataggcataaatagttgtccttagacttattcatacaaatatagtcatttacttctatgtagtttgagattctgagagttattccaactttatgaagattgatttcaatgtgcctgctaagtcctaaaagattcagaaagaaaatttatatattattgatttaaatatcatcctttaaatatgttgtataacattcaatatagtttatgtatcagtgattgtattttattctgaatgcatgatctcaagccttaactactataatctttttctgcccctcagaaattgaataacctaaccaagatgcctttaggggatgccctaagtaaatgtaatttcagatttcagggttttttttttttcctctctaagtgttccttccctttcttctcctgctctccatcatgttatggagaccagtgaggaaccagtgttaacttggtgacaatgtgacagctggtgctttatctaagctccgttttctatttcttgggaatgctttattgtggaaactgcttcagatacttaaattgaatcataacttgcttctgtaaattgcgtaaagacaacaaactgattttagtttgaaaagtttatcttttacttgtaaaccttgtttgccagttaccttccgaaagctgtgtaaagagttatttttaacaaagtcttaacaatatatgttactttttagatactatagaaaataataaatataacctgtaaaccaca

SEQ ID NO: 30755 - DNA, 1151 bp, Homo sapiens
ttttttcattttcttctcatttacacctatttttttaaaaagtatacatttactaaatgtatgtttaaacatgaattagaagagttgagaactaccattatgtatagggattctcatagtgtcttggcccttaattggaaagttgtggcaactttaaagtactttttactgtatgttataattctttataacttagagagagacaatggtcactcaaactatgagaactatgaattaggagataaaagtttaaatttgttgttgttttataacagtatgtacaagttagttttcccttatatatttacgttttcaagttttttaatctcatcatatacatccatactctataaaatgttttatattcaaagaactgtaaaatcctaaacattagttttcactattgaaattgttttttaaagataggcataaatagttgtccttagacttattcatacaaatatagtcatttacttctatgtagtttgagattctgagagttattccaactttatgaagattgatttcaatgtgcctgctaagtcctaaaagattcagaaagaaaatttatatattattgatttaaatatcatcctttaaatatgttgtataacattcaatatagtttatgtatcagtgattgtattttattctgaatgcatgatctcaagccttaactactataatctttttctgcccctcagaaattgaataacctaaccaagatgcctttaggggatgccctaagtaaatgtaatttcagatttcagggttttttttttttcctctctaagtgttccttccctttcttctcctgctctccatcatgttatggagaccagtgaggaaccagtgttaacttggtgacaatgtgacagctggtgctttatctaagctccgttttctatttcttgggaatgctttattgtggaaactgcttcagatacttaaattgaatcataacttgcttctgtaaattgcgtaaagacaacaaactgattttagtttgaaaagtttatcttttacttgtaaaccttgtttgccagttaccttccgaaagctgtgtaaagagttatttttaacaaagtcttaacaatatatgttactttttagatactatagaaaataataaatataacctgtaaaccaca

SEQ ID NO: 30756 - DNA, 1786 bp, Homo sapiens
tgaaatgatctggcattatctatttcacagtaatgtaaaatgcttatttttatgtcaccagttgtcaccactcccattgctgatagtgacataggttttgggggcaaaattcagttcctaacaaacagtggatactgctaatgagtcatcttttctactctcttcaattttctactctctactctcctctttaatttttgcacaaaataatactttgcaacaaatagtcttttgtctttattggcagaaaaatcacttgttatatgtgttctagttagttctttttcatgttagctgtgtggctaaaagcgtgttacctttctatatttaaaaaaagtaatctctgaggatagttacagttcctgtaatataattttatgtacctagttttatctttttttaaataagaactgaagagagagctttgttacatatttgaatttttaatttgcactgctgtattttaaacctaaccataattagtcatttaaaataattaagtaggcctgaaagtcagccatgttaatttctcaatttaatcaattcttaaagccttcaaaaattgacattttttttccaagacccttcattctcttaaataactttaattttatgaaaccatgtatactaaagaaaaacttttccaagattccaggtgattgtgcatttgtgctctaatctacttttttaacattacggctaatcttttgcgtagacatatcgctgtggaataactgccatatttcagagttcctcaggtttccttttccttttccagtctctgtctatgaattaaatagtatatagaatgacccatataaggcaatatagttaaataaaaccaggttaaatgatttcctttgtatctgcccaaagttgatagcacacgttactttttcaaaataaagctaaaactaccaaaaagaggatgaaaactttttcctcattatggagtgaagttctaggtggttgctttagaagttggcagtgcagtgctcagaaggaactctcaataaataacatgtactccttggacctgtgagttttaggaaactggaccttttctgaagaccttagaatagggagttggccttaggacctaatgtcccaacttagtgttggacccttttaatataagatattgttaattattagcatacttttcaaaacctttgaaatagttactgctaacctgataaaatgttcccattaatctatcattagtctgtttctctgaaaacaaaatgcattgatgaggtgaaagcttgttccacatggcacctacctaatgaacaggacttactcagtttttaactgttaagaatgtcacatgtactattgtcactccttaggttttcagctataaaacatgtaagtctctcatcatacagatgaattcatttgctaacaaaatatttaaaacccgcagtagactctgaaatatccagtcatcaaactcctggctaactggatgatttggctataataatctttattattattattttcatctgtctctcgaaatatctacagtaggatgttagtaaatggtcttttaaaagcaaaaaattggggataaaaggaaaactgaattccttctatatttttattactaataaataatgcttttgtaaatttgaatggaaaaccacttgtatgtattgctatttggttgcagttacactctggagcttaatttaaaacactactctaaaaatttcatgaaggatgaattccaataatcagaaaataaatgcatttcaaagctaaaaataaagtgtgatat

SEQ ID NO: 30757 - DNA, 460 bp, Homo sapiens
caacttataaagtctgccagagtgttcgtggttacgactttctaggggtctgctttgtgatatggattaatatttactgtccttcacttgaccctttgtcacattgtgtgattattttttctagtttacttttttttcccatgtaaaactttttatttaacatttctgtaatcagaactctcaatcttttgtttaaaacttggaaagcattcctcacatatttaattttgctacatgcatgattttttaaatgctaaacctttgattcataaggaatatatttttgtttgggtttaacccgttattccaatagcaacaccactttattaaacagtcttttatgtcttcactcacttgatatgccatcttcatgtgttgttgttgttgttttttgagatggagtcttgctctgtcgcccaggctggagtgcagtggcatgatctcggctcactgcgacctc

SEQ ID NO: 30758 - DNA, 461 bp, Homo sapiens
ggagtttcctaagcaatgggtgcttagcaaggcagtactgtgggcggggtgggagcggggcctctgcaggacagtggcctccctcccctcgttctgactcagccggaggaaggagcctcagtcccgcagcatccgaggttatgcagaggtacaggtggcttgttacctccactaccacctggcctgctgctcacttgctgggagggaggatgaagcggagtgctgggcaggggctgccaatgttggatgctcacttgctcccaaacaggtttggggtccacagtctcaatgcagaggagagtgggggatgaggaccttctctcatttaacccccacactagccctctgaggccagggtaactgtgccccttttataggtgaggatcagagaggctaagggacttgcactaataacagctagcagggggcagagccgggacagaagcagtgctccatcccag

SEQ ID NO: 30759 - DNA, 473 bp, Homo sapiens
tgaaagcgcgggcggagggtgcgcttgtgttcttgagacccaggttccattacaaaccacccagcatcgccaccggcgccccccgtttcaataaggaagccactttgtcaaaacattctaaaagaaacttgggaagaggacgcgtcagagaaataccgccgccgattaactatcagctgcgcctcccctgtgcacagaaagcatgcagcagagatcagaggaagggccatttggtccagagagaccctgattcacagccttgtcctgttccaagcaatgttgggatgagctgaagaagatgcctccgttctcagacccaaaaggcacaaagacggcacctttgggagagccaggcactaccagtgtcttgagtgctgaatattgtgcattcgaaagcaatgagagctctagggtggacctttcactggcactcaaagagaaccaaggaagcagagaaggatgataaatggcat

SEQ ID NO: 30760 - DNA, 432 bp, Homo sapiens
acaaaatccatctgggcaacggctctatggaaaatttggcttaagtaattatttccagtattccattgtattccattgtcccttcgtgttccataagttaaatgactgtctaatttttccaaaaatttatttctgacttgagaataagtgtgtcatgattttcccagtgtaaagacactgatataactgtagataccagacattttatgtagtgtctatgacacattttagtatgtatgagccaacaatagacatgtctttgtcttgaggagtgtccatctgaattgaaaatgtgtcagcttttttttaacatcatcaacagacttcttaattaagctgccaatacatactgccaatagcactgtgtgctgtctgagaaatgcattgtgtaagtgctatttccatcttattaaataaacaatgttgctctgt

SEQ ID NO: 30761 - DNA, 333 bp, Homo sapiens
ggcgtggtggcactcgcctgtagtcccagctacttgggaagctgaggcagaagaatcgcttgaacccgggaagtggaggttgcagtgagccgagatcacaccactgcactacagcctggcgacagaacaagactccatctcaaaataaataaataaataaataaataaataaataaataaataaataaataaatggtaccattatctccgcagcactttaaaagttgtatgatttctgacactaactttaatgttaaatgttattctatcacatagataaggttcttaaaaaacaatgtcaaaacaaaaatattaggttatttcctattcact

SEQ ID NO: 30762 - DNA, 460 bp, Homo sapiens
atatcagtaatcactgattatgatcagtgtggaattttgggaagcaggagcaagttaaagggaaacgtgtgctgtaaattatagactgaaagtttggtatcagtcccaaagtattattcagatggtttgtgagcatttagagtacctaaagagcaaatcatggatttcataaacatgggagagactagaagcattctgcagcaataagtggaaaacatccttggccaggggcaaatggttgatgaatctaacagggtgataagtaataggaataaatctaaatccttcctgtatggttcaaaaaagccaagagtactggcttggaattagagtaatacaatttagcagcaatatgtatgaagaagagattgaggatttggcttcaatgcaaatgaatctacaatatcatccatcttgtataaattatccctgtgatgttagtgcctcaccatcccctgca

SEQ ID NO: 30763 - DNA, 350 bp, Homo sapiens
taaagctaagcccaaaaatgtagtattcatgggaataactcatttttaaacagaacaaaattttcattgtggtaaagacacgtaacaaaatttaccatcttaaccatttttaagtctatagtttagcagtgttaagtatattcacatcgttgtgaggcaatcttgaataatgatttgtttttgactgactgctattattcaatactcaccatgtactaggttataggatgtgaaagtgagacacagtgcctggtttcaaggaactgtgtggaaagggaagacacatgtgcacagacacagaactgataccaccacgcagagcagaagctgcatgagggctattgcaatat

SEQ ID NO: 30764 - DNA, 1143 bp, Homo sapiens
gacaatagctgagttgagaagacctcaaggatatttaaaggaatttttctgctactgaaaatatattgaagaatcgctgcaaaatttttccattccatcccctttcccccacccccgttttccacagcaagaatcaatttggagggagatgtgtaaactagaatttttaaagaaatagtaagacttcaggtgttttctacccagggatagcctacataattgagaaagaggagttcctgctatttttctgttccagagagaaatgtatcaaatcttttttagaattccactggagttttgattctcaaagtggaaatacccatccctttgggtccaggaaaagaaaactcagctcacagtttcagaaatttggactgttttttttcccccctctgtctttctatttgaaacgtctcacaattaaagagcaagaaaaatataaaaaaggaactcaactagttaccattcaaaaggtgtcagctaaaatctcactgcaaagggaaaaaaaaaggtttaacatcttgccactggctgcatcccccaccccccttagactttggattagtcattgtatgagagagagggagagaaaaaaaaatcacttttttttttttttgggaaaagtaaagtaaacagcctccaactgctggaaccttggacaacccaaattaaggaagcaggagagatcaaacagaactgctgctgggtggttgtcaggagctgctacacggagaaccctggactattcgatcaagcagcaaggctatatgttcacttatgcagaaatggaccattgcagatgctaatctttgttgtgcaagcgaaggctcacttggaaggaaatactcagcccctctctgggcagcatttgagttccttatggatgccgagtcgcgaaacaagttattttttttaatgtatccttctttatgaggagaatgctacccaaaaatgtattaaaggaatattaagtcgtccagagactgtcttgctaccaagaactgtgcaatggaattctttttaccaacattagactcctacactagagttagataacgttttctcacattgagtttagaagatctgccttgtcagggaagccaaggttttgtatgtgagagtttaaatctgatgtgaagctca

SEQ ID NO: 30765 - DNA, 416 bp, Homo sapiens
taatggctgaatggaattccattgtgtatatgtaacacattttccttatccagtcatccactgaggaacatacaggtggacttcatctctccactgttgtgaataatgctgcaataaacatgggagtgcaaatatgttttctacatactgatttcattttctttaaatatatacccagtcatgaaattgctagattatgagatagctgtattttgatttcttgaaaaactccatgttttctataacagctgtttgtaaatagaattgtcttattgattttttttttcagataattcactattagtgtatagaaatgctattgactttggtatgttaatttggtatcctgcaagtttactgatttgtttcttagatctaatcatttttctgacgtgggctttggagttgtctatatt

SEQ ID NO: 30766 - DNA, 353 bp, Homo sapiens
atacattcttgtcttctacacatgcaacatattctgtgattgaccatatgcttggccataaaacaaatctcagtgaatttttaaaaatgatgccaagcacactctcagaccacagtgccataaaaatggaaattaatactaagaagatttctcaaaactacacaaaaacatggaaattaaacaactagctctttataacccttgagtgaacaatgaaattaagtcagaaataaaaactttctttgaaactaatcaaagtagagatgcaacttactaacatctttgggatgcagctaaatttgtgctaagagataagtttatagtcctatggctttcatcaagaggttagaaag

SEQ ID NO: 30767 - DNA, 471 bp, Homo sapiens
ccttgtctctaaaacaaacaaaaccactacatttactcatcctttaagtaccaacatgttacctcctgtgagaaaattttccagaaataccatttaacacactaatagacatgtctctcgattgctctattgctgatcaattgtgtatttctccaagttggcctcctaatataccccaacccctctttcttcaagttggaagccacatttatgtagcttgaatattaaagttacgtatgtaaacatttaaaagcaggtgagtttgttaacttcggcaagcttatcagtagacagggccttccagtgaaaagagcacttgactagaaattaggagatttaggtactgtcctaaatctgtttctaccttactttctctggcctcagttttctccctcataaaggaatgtatctacagccctagtctctgggtggcgatttacggcttctctgccttttatcttcattctccga

SEQ ID NO: 30768 - DNA, 408 bp, Homo sapiens
gccctggcaacatagcaagagcccgtctttataaaaaataaaaattaaaaataaatagcgagccatggtggtagcacatgcctgtagtcccagctacttgggaggctgagacagggaagatcacataagccccaggagttggaggctgcagtgagctacgactgcaccactgcactccagtctgggtgaaagctcaagaccctgtctccaaaaaagaaaagaaaaaaattctaatataaatatgtaacccgaagttcatgtttcctcattaattttagtggtattaggccaggaacggtggctcatgcctgtaatgccagcactttgggaggccgaggcaggagctcgcttgagcccaggagttcaaggctggcctggcaacataggaagatcttgtctctaccagaa

SEQ ID NO: 30769 - DNA, 204 bp, Homo sapiens
tttttttttgtattttttgtggagacggggtttcaccgtgttcaccaggatggtctcaatctcctgacctcatgatccgcatgcctcagcctcccaaagtgctgggattacaggcgtgaaccaccacgcccagacctctggttaattttttagaacttgaaaattagagctgtattttaccatgttaaagatgtgttcttagcc

SEQ ID NO: 30770 - DNA, 770 bp, Homo sapiens
cactttaggggccgaggtgggaggatcacttgaagctaggagttagagactagactggacaacaaagcaagatcctgtcaaaaaaagaaagaaaagaaaagagaaaaagaaagaattccagaagaggatggtacttttgagactcaccactcttatttaccattgagaaacctatggcacagaaatagaaagtgatgacctcaaggttacttacaaattagtagcaacactattctaaagcactgttgtccaaaatggtagtcactagccacatatagctatcaaacactagaaatgtggcggaagaactggattatttattttacttaattttaattactataaatatcaatagttacatgtagctagtggcttccatgttggatagcacagttcttgagtctaaatgtctagttcagggccttctcctcctaaatgacatggcctccaaaaggggggtattgtttccaaattcagaattagcataaggaaaaaaataaaaatgtaggaactctgagaactgtgaggttgacaactaccaaggatggaattttagtgtacttaacagaaattcatcattctgtttggttttcccttagttccttagaaaaagttccttttgaaaacaccacaggatttctggttttcaaatgatatctaacttgtaggaccctaatggcagcctcactcaggctcctgatttcaaaaactggggaatcaactgtcatcctatcacccaaatttgggtgataggataacacgtgcgcgag

SEQ ID NO: 30771 - DNA, 1171 bp, Homo sapiens
cactttaggggccgaggtgggaggatcacttgaagctaggagttagagactagactggacaacaaagcaagatcctgtcaaaaaaagaaagaaaagaaaagagaaaaagaaagaattccagaagaggatggtacttttgagactcaccactcttatttaccattgagaaacctatggcacagaaatagaaagtgatgacctcaaggttacttacaaattagtagcaacactattctaaagcactgttgtccaaaatggtagtcactagccacatatagctatcaaacactagaaatgtggcggaagaactggattatttattttacttaattttaattactataaatatcaatagttacatgtagctagtggcttccatgttggatagcacagttcttgagtctaaatgtctagttcagggccttctcctcctaaatgacatggcctccaaaaggggggtattgtttccaaattcagaattagcataaggaaaaaaataaaaatgtaggaactctgagaactgtgaggttgacaactaccaaggatggaattttagtgtacttaacagaaattcatcattctgtttggttttcccttagttccttagaaaaagttccttttgaaaacaccacaggatttctggttttcaaatgatatctaacttgtaggaccctaatggcagcctcactcaggctcctgatttcaaaaactggggaatcaactgtcatcctatcacccaaatttggacgggcttttcaccaactcaaaactgatgaaactagagtaaatagcctcaatcagtggactatttatgaaatttctccctaaacattgattcctcacctattgagggagccaggactgtaccggccagtcttcaaaaggcagttaatgggccaggtgcagtagcacatgcctgtaatcccaacattttgggaggccaaggtgggaggatcacctgaggtcagaagttcgacaccagccctgccaacatggccaaaccccatctctactaaaaaaaaaaaaaatttagccgggcatggtggcacgcacctgtagtcgcagctacttgggaggctgcacatgagaatctcttgaacctgggaggcagaggtcgtaatcagccaaaattgtgccactgcactccagcctgggcgacagagcgagactc

SEQ ID NO: 30772 - DNA, 291 bp, Homo sapiens
  misc_feature (2)..(2): n is a, c, g, or t
  misc_feature (6)..(6): n is a, c, g, or t
  misc_feature (8)..(8): n is a, c, g, or t
  misc_feature (11)..(12): n is a, c, g, or t
tnagangnagnntcactgttgttccccaggctggagtgcagtggcactatcacagctcactgcagccttggaactcctgagctcaaatgatcctcccaccccagcctcccaaagtgctggggttataggcatgagccctgtgcctggctaatgattaatgttattacaaatatttaaatggtgaagtccatgtctcaaggatgtccagactaaacatccaaaagagataagaactatttgatgtagattttctgtgatgtattatctttttctctctaaggaaaaaaaaaa

SEQ ID NO: 30773 - DNA, 316 bp, Homo sapiens
cacccgcttcggcctcccaaagtgctgggattacaggtttgagccactgcgcccggccaactgtgggttctgatgtactcagcctccctagtggacagtgcaccagtgcactcacagggtttatgctagggagtacaacggttcacagcaacgcggcggcaagggcttaacatttgtgaggtgggctccagcagcagcagggcatggaacactgggcttcctggggcagccccccattcttagaggtgatggcagcagtcagcccacacccacagcatttcccagccctggcccccccatctcagcctctgtgtgg

SEQ ID NO: 30774 - DNA, 1576 bp, Homo sapiens
agcgggttgccgcgatccgggccgggagctgcgggcgcccgggcgcccgaggcttcccggtgcgctccgccaggtgctgtgcagcctgtgtggctggctctcgctctatatttctttctgccacctgaataagcaccgaagctatgagtggagctgccgcctggtcaccttcacccatggagtcctctctataggcctctccgcttatattggcttcattgatggcccatggccttttacccacccaggctcacccaatacacctctccaagttcatgtcctgtgtctcaccttgggctacttcatcttcgacttgggctggtgcgtctactttcagtctgagggtgccttgatgctggctcatcacacattgagtatcttgggcattatcatggcccttgtgcttggggagtctggcacagaggtcaatgcagtcctctttggaagtgagcttaccaaccccttgctacagatgcgctggtttctccgggaaacagggcactatcacagtttcactggagatgtagtggacttcctctttgtggctctgttcacaggagtgaggattggtgtgggagcttgcctccttttctgtgaaatggtctcccccacgcctaagtggtttgtgaaggctgggggagtagcgatgtatgctgtgtcttggtgtttcatgtttagcatctggcgctttgcatggaggaagagcatcaagaagtaccatgcttggagaagcaggcggagtgaggaacggcagctgaaacacaacggacatctcaaaatacactagccaaggcttgctccagattatggattgggttaagtcagccatgggaaccaggttggaaatatgactgttacataattacacttataacaaacttaggtttcaataaagggctaaatgtattgatcaatttggtcagtcttcaagccgagcatataccagtattaaaacactaacttctacagtagcacagttgtagaaagtgagaatactccatggtagttgggaataagtgagaactgtgaagtgagtacaactggcatttgttttcatttgtggtgaccctgggtcctcctgtccctgggaggtttgatgttcaggcagtttagaaaggaactcgaaaaagattagtgctatttcttgttcctttgagaagtaactctttcaataaacacttatttctgctttccacatagcaatttatctaagtttaccccatttactataaagtgaggggcttacaggaagagacacgcctttgacattctgaacattagatcggggaattgggtcgcttaaacagaggggcataggagggtgagagtgaaactggcagtgagggggagggctacttactgaacctcctataccaactgtgccagaggtgcccaagaccactgccaggttctgtaattctctgggaagactcagtggactcagcatatagtcttacttatagttttgatttattatagtgaaaagatacaaagaaaaatcggtaaaaggaaaaggcacctgagacaaagtctagggtaaagcaagcacaagtttccagagtcctctcccaatgga

SEQ ID NO: 30775 - DNA, 1209 bp, Homo sapiens
  misc_feature (10)..(10): n is a, c, g, or t
  misc_feature (13)..(13): n is a, c, g, or t
  misc_feature (15)..(15): n is a, c, g, or t
  misc_feature (17)..(17): n is a, c, g, or t
gcgggcgcgngcngngncatctcccggtgcgctccgcagatggcattagctctgtgtctgcaggtgctgtgcagcctgtgtggctggctctcgctctatatttctttctgccacctgaataagcaccgaagctatgagtggagctgccgcctggtcaccttcacccatggagtcctctctataggcctctccgcttatattggcttcattgatggcccatggccttttacccacccaggctcacccaatacacctctccaagttcatgtcctgtgtctcaccttgggctacttcatcttcgacttgggctgcatctggcgctttgcatggaggaagagcatcaagaagtaccatgcttggagaagcaggcggagtgaggaacggcagctgaaacacaacggacatctcaaaatacactagccaaggcttgctccagattatggattgggttaagtcagccatgggaaccaggttggaaatatgactgttacataattacacttataacaaacttaggtttcaataaagggctaaatgtattgatcaatttggtcagtcttcaagccgagcatataccagtattaaaacactaacttctacagtagcacagttgtagaaagtgagaatactccatggtagttgggaataagtgagaactgtgaagtgagtacaactggcatttgttttcatttgtggtgaccctgggtcctcctgtccctgggaggtttgatgttcaggcagtttagaaaggaactcgaaaaagattagtgctatttcttgttcctttgagaagtaactctttcaataaacacttatttctgctttccacatagcaatttatctaagtttaccccatttactataaagtgaggggcttacaggaagagacacgcctttgacattctgaacattagatcggggaattgggtcgcttaaacagaggggcataggagggtgagagtgaaactggcagtgagggggagggctacttactgaacctcctataccaactgtgccagaggtgcccaagaccactgccaggttctgtaattctctgggaagactcagtggactcagcatatagtcttacttatagttttgatttattatagtgaaaagatacaaagaaaaatcggtaaaaggaaaaggcacctgagacaaagtctagggtaaagcaagcacaagtttccagagtcctctcccaatgga

SEQ ID NO: 30776 - DNA, 1920 bp, Homo sapiens
agcgggttgccgcgatccgggccgggagctgcgggcgcccgggcgcccgaggcttcccggtgcgctccgccaggtcagtcatcgctagagggttattattgacatttactcatcataaaatgtgatgtcagcctaccagctcggagtgcagttcctggtttccagtttacaacattgaccagttgctaacatgttatctctgaggaacttggaatgataaatacagccatacttaaatagaagattcttggccgtgtagataaggaaaataagataaggcaatatttttgaactattctataatagaaatgaggatatatacacaaaatgacccagtgctgttttcttagggtgcatcctttgtttttctggttttggtcttttcatcacaggatggcattagctctgtgtctgcaggtgctgtgcagcctgtgtggctggctctcgctctatatttctttctgccacctgaataagcaccgaagctatgagtggagctgccgcctggtcaccttcacccatggagtcctctctataggcctctccgcttatattggcttcattgatggcccatggccttttacccacccaggctcacccaatacacctctccaagttcatgtcctgtgtctcaccttgggctacttcatcttcgacttgggctggtgcgtctactttcagtctgagggtgccttgatgctggctcatcacacattgagtatcttgggcattatcatggcccttgtgcttggggagtctggcacagaggtcaatgcagtcctctttggaagtgagcttaccaaccccttgctacagatgcgctggtttctccgggaaacagggcactatcacagtttcactggagatgtagtggacttcctctttgtggctctgttcacaggagtgaggattggtgtgggagcttgcctccttttctgtgaaatggtctcccccacgcctaagtggtttgtgaaggctgggggagtagcgatgtatgctgtgtcttggtgtttcatgtttagcatctggcgctttgcatggaggaagagcatcaagaagtaccatgcttggagaagcaggcggagtgaggaacggcagctgaaacacaacggacatctcaaaatacactagccaaggcttgctccagattatggattgggttaagtcagccatgggaaccaggttggaaatatgactgttacataattacacttataacaaacttaggtttcaataaagggctaaatgtattgatcaatttggtcagtcttcaagccgagcatataccagtattaaaacactaacttctacagtagcacagttgtagaaagtgagaatactccatggtagttgggaataagtgagaactgtgaagtgagtacaactggcatttgttttcatttgtggtgaccctgggtcctcctgtccctgggaggtttgatgttcaggcagtttagaaaggaactcgaaaaagattagtgctatttcttgttcctttgagaagtaactctttcaataaacacttatttctgctttccacatagcaatttatctaagtttaccccatttactataaagtgaggggcttacaggaagagacacgcctttgacattctgaacattagatcggggaattgggtcgcttaaacagaggggcataggagggtgagagtgaaactggcagtgagggggagggctacttactgaacctcctataccaactgtgccagaggtgcccaagaccactgccaggttctgtaattctctgggaagactcagtggactcagcatatagtcttacttatagttttgatttattatagtgaaaagatacaaagaaaaatcggtaaaaggaaaaggcacctgagacaaagtctagggtaaagcaagcacaagtttccagagtcctctcccaatgga

SEQ ID NO: 30777 - DNA, 1566 bp, Homo sapiens
  misc_feature (10)..(10): n is a, c, g, or t
  misc_feature (13)..(13): n is a, c, g, or t
  misc_feature (15)..(15): n is a, c, g, or t
  misc_feature (17)..(17): n is a, c, g, or t
gcgggcgcgngcngngncatctcccggtgcgctccgcagatggcattagctctgtgtctgcaggtgctgtgcagcctgtgtggctggctctcgctctatatttctttctgccacctgaataagcaccgaagctatgagtggagctgccgcctggtcaccttcacccatggagtcctctctataggcctctccgcttatattggcttcattgatggcccatggccttttacccacccaggctcacccaatacacctctccaagttcatgtcctgtgtctcaccttgggctacttcatcttcgacttgggctggtgcgtctactttcagtctgagggtgccttgatgctggctcatcacacattgagtatcttgggcattatcatggcccttgtgcttggggagtctggcacagaggtcaatgcagtcctctttggaagtgagcttaccaaccccttgctacagatgcgctggtttctccgggaaacagggcactatcacagtttcactggagatgtagtggacttcctctttgtggctctgttcacaggagtgaggattggtgtgggagcttgcctccttttctgtgaaatggtctcccccacgcctaagtggtttgtgaaggctgggggagtagcgatgtatgctgtgtcttggtgtttcatgtttagcatctggcgctttgcatggaggaagagcatcaagaagtaccatgcttggagaagcaggcggagtgaggaacggcagctgaaacacaacggacatctcaaaatacactagccaaggcttgctccagattatggattgggttaagtcagccatgggaaccaggttggaaatatgactgttacataattacacttataacaaacttaggtttcaataaagggctaaatgtattgatcaatttggtcagtcttcaagccgagcatataccagtattaaaacactaacttctacagtagcacagttgtagaaagtgagaatactccatggtagttgggaataagtgagaactgtgaagtgagtacaactggcatttgttttcatttgtggtgaccctgggtcctcctgtccctgggaggtttgatgttcaggcagtttagaaaggaactcgaaaaagattagtgctatttcttgttcctttgagaagtaactctttcaataaacacttatttctgctttccacatagcaatttatctaagtttaccccatttactataaagtgaggggcttacaggaagagacacgcctttgacattctgaacattagatcggggaattgggtcgcttaaacagaggggcataggagggtgagagtgaaactggcagtgagggggagggctacttactgaacctcctataccaactgtgccagaggtgcccaagaccactgccaggttctgtaattctctgggaagactcagtggactcagcatatagtcttacttatagttttgatttattatagtgaaaagatacaaagaaaaatcggtaaaaggaaaaggcacctgagacaaagtctagggtaaagcaagcacaagtttccagagtcctctcccaatgga

SEQ ID NO: 30778 - DNA, 2859 bp, Homo sapiens
ccgggatcccgccctggggaggcgcgcagcagaggctccgattcggggcaggtgagaggctgactttctctcggtgcgtccagtggagctctgagtttcgaatcggtggcggcggattccccgcgcgcccggcgtcggggcttccaggaggatgcggagccccagcgcggcgtggctgctgggggccgccatcctgctagcagcctctctctcctgcagtggcaccatccaaggaaccaatagatcctctaaaggaagaagccttattggtaaggttgatggcacatcccacgtcactggaaaaggagttacagttgaaacagtcttttctgtggatgagttttctgcatctgtcctcactggaaaactgaccactgtcttccttccaattgtctacacaattgtgtttgtggtgggtttgccaagtaacggcatggccctgtgggtctttcttttccgaactaagaagaagcaccctgctgtgatttacatggccaatctggccttggctgacctcctctctgtcatctggttccccttgaagattgcctatcacatacatggcaacaactggatttatggggaagctctttgtaatgtgcttattggctttttctatggcaacatgtactgttccattctcttcatgacctgcctcagtgtgcagaggtattgggtcatcgtgaaccccatggggcactccaggaagaaggcaaacattgccattggcatctccctggcaatatggctgctgattctgctggtcaccatccctttgtatgtcgtgaagcagaccatcttcattcctgccctgaacatcacgacctgtcatgatgttttgcctgagcagctcttggtgggagacatgttcaattacttcctctctctggccattggggtctttctgttcccagccttcctcacagcctctgcctatgtgctgatgatcagaatgctgcgatcttctgccatggatgaaaactcagagaagaaaaggaagagggccatcaaactcattgtcactgtcctggccatgtacctgatctgcttcactcctagtaaccttctgcttgtggtgcattattttctgattaagagccagggccagagccatgtctatgccctgtacattgtagccctctgcctctctacccttaacagctgcatcgacccctttgtctattactttgtttcacatgatttcagggatcatgcaaagaacgctctcctttgccgaagtgtccgcactgtaaagcagatgcaagtatccctcacctcaaagaaacactccaggaaatccagctcttactcttcaagttcaaccactgttaagacctcctattgagttttccaggtcctcagatgggaattgcacagtaggatgtggaacctgtttaatgttatgaggacgtgtctgttatttcctaatcaaaaaggtctcaccacataccatgtggatgcagcacctctcaggattgctaggagctcccctgtttgcatgagaaaagtagtcccccaaattaacatcagtgtctgtttcagaatctctctactcagatgaccccagaaactgaaccaacagaagcagacttttcagaagatggtgaagacagaaacccagtaacttgcaaaaagtagacttggtgtgaagactcacttctcagctgaaattatatatatacacatatatatatatattttacatctgggatcatgatagacttgttagggcttcaaggccctcagagatgatcagtccaactgaacgaccttacaaatgaggaaaccaagataaatgagctgccagaatcaggtttccaatcaacagcagtgagttgggattggacagtagaatttcaatgtccagtgagtgaggttcttgtaccacttcatcaaaatcatggatcttggctgggtgcggtgcctcatgcctgtaatcctagcactttgggaggctgaggcaggcaatcacttgaggtcaggagttcgagaccagcctggccatcatggcgaaacctcatctctactaaaaatacaaaagttaaccaggtgtgtggtgcacgtttgtaatcccagttactcaggaggctgaggcacaagaattgagtatcactttaactcaggaggcagaggttgcagtgagccgagattgcaccactgcactccagcttgggtgataaaataaaataaaatagtcgtgaatcttgttcaaaatgcagattcctcagattcaataatgagagctcagactgggaacagggcccaggaatctgtgtggtacaaacctgcatggtgtttatgcacacagagatttgagaaccattgttctgaatgctgcttccatttgacaaagtgccgtgataatttttgaaaagagaagcaaacaatggtgtctcttttatgttcagcttataatgaaatctgtttgttgacttattaggactttgaattatttctttattaaccctctgagtttttgtatgtattattattaaagaaaaatgcaatcaggattttaaacatgtaaatacaaattttgtataacttttgatgacttcagtgaaattttcaggtagtctgagtaatagattgttttgccacttagaatagcatttgccacttagtattttaaaaaataattgttggagtatttattgtcagttttgttcacttgttatctaatacaaaattataaagccttcagagggtttggaccacatctctttggaaaatagtttgcaacatatttaagagatacttgatgccaaaatgactttatacaacgattgtatttgtgacttttaaaaataattattttattgtgtaattgatttataaataacaaaattttttttacaa

SEQ ID NO: 30779 - DNA, 699 bp, Homo sapiens
aagcagtggtatcaacccagagtgcccattacggccgggattattaaagaaaaatgcaatcaggattttaaacatgtaaatacaaattttgtataacttttgatgacttcagtgaaattttcaggtagtctgagtaatagattgttttgccacttagaatagcatttgccacttagtattttaaaaaataattgttggagtatttattgtcagttttgttcacttgttatctaatacaaaattataaagccttcagagggtttggaccacatctctttggaaaatagtttgcaacatatttaagagatacttgatgccaaaatgactttatacaacgattgtatttgtgacttttaaaaataattattttattgtgtaattgatttataaataacaaaattttttttacaaactaaaaaaaaaaaaaaaaaaaaaaaaaaactttgttgggcgcgccgcgcggaccccatggaaaagttttctaagaacaatttcgttgggggccggcgggcgccagtggttacagtggacgcgggcaaagcgggtccccaaggaaaacggggcaagggacgagggcggggttcctcaccaataaaaaaagcccgggggacagggggggtctggaccaaacccaaggagtccgaggccacaggggccacacaggggtcaaggagcggattatcggccgcggggggagag

SEQ ID NO: 30780 - DNA, 2816 bp, Homo sapiens
ccgggatcccgccctggggaggcgcgcagcagaggctccgattcggggcaggtgagaggctgactttctctcggtgcgtccagtggagctctgagtttcgaatcggtggcggcggattccccgcgcgcccggcgtcggggcttccaggaggatgcggagccccagcgcggcgtggctgctgggggccgccatcctgctagcagcctctctctcctgcagtggcaccatccagttgatggcacatcccacgtcactggaaaaggagttacagttgaaacagtcttttctgtggatgagttttctgcatctgtcctcactggaaaactgaccactgtcttccttccaattgtctacacaattgtgtttgtggtgggtttgccaagtaacggcatggccctgtgggtctttcttttccgaactaagaagaagcaccctgctgtgatttacatggccaatctggccttggctgacctcctctctgtcatctggttccccttgaagattgcctatcacatacatggcaacaactggatttatggggaagctctttgtaatgtgcttattggctttttctatggcaacatgtactgttccattctcttcatgacctgcctcagtgtgcagaggtattgggtcatcgtgaaccccatggggcactccaggaagaaggcaaacattgccattggcatctccctggcaatatggctgctgattctgctggtcaccatccctttgtatgtcgtgaagcagaccatcttcattcctgccctgaacatcacgacctgtcatgatgttttgcctgagcagctcttggtgggagacatgttcaattacttcctctctctggccattggggtctttctgttcccagccttcctcacagcctctgcctatgtgctgatgatcagaatgctgcgatcttctgccatggatgaaaactcagagaagaaaaggaagagggccatcaaactcattgtcactgtcctggccatgtacctgatctgcttcactcctagtaaccttctgcttgtggtgcattattttctgattaagagccagggccagagccatgtctatgccctgtacattgtagccctctgcctctctacccttaacagctgcatcgacccctttgtctattactttgtttcacatgatttcagggatcatgcaaagaacgctctcctttgccgaagtgtccgcactgtaaagcagatgcaagtatccctcacctcaaagaaacactccaggaaatccagctcttactcttcaagttcaaccactgttaagacctcctattgagttttccaggtcctcagatgggaattgcacagtaggatgtggaacctgtttaatgttatgaggacgtgtctgttatttcctaatcaaaaaggtctcaccacataccatgtggatgcagcacctctcaggattgctaggagctcccctgtttgcatgagaaaagtagtcccccaaattaacatcagtgtctgtttcagaatctctctactcagatgaccccagaaactgaaccaacagaagcagacttttcagaagatggtgaagacagaaacccagtaacttgcaaaaagtagacttggtgtgaagactcacttctcagctgaaattatatatatacacatatatatatatattttacatctgggatcatgatagacttgttagggcttcaaggccctcagagatgatcagtccaactgaacgaccttacaaatgaggaaaccaagataaatgagctgccagaatcaggtttccaatcaacagcagtgagttgggattggacagtagaatttcaatgtccagtgagtgaggttcttgtaccacttcatcaaaatcatggatcttggctgggtgcggtgcctcatgcctgtaatcctagcactttgggaggctgaggcaggcaatcacttgaggtcaggagttcgagaccagcctggccatcatggcgaaacctcatctctactaaaaatacaaaagttaaccaggtgtgtggtgcacgtttgtaatcccagttactcaggaggctgaggcacaagaattgagtatcactttaactcaggaggcagaggttgcagtgagccgagattgcaccactgcactccagcttgggtgataaaataaaataaaatagtcgtgaatcttgttcaaaatgcagattcctcagattcaataatgagagctcagactgggaacagggcccaggaatctgtgtggtacaaacctgcatggtgtttatgcacacagagatttgagaaccattgttctgaatgctgcttccatttgacaaagtgccgtgataatttttgaaaagagaagcaaacaatggtgtctcttttatgttcagcttataatgaaatctgtttgttgacttattaggactttgaattatttctttattaaccctctgagtttttgtatgtattattattaaagaaaaatgcaatcaggattttaaacatgtaaatacaaattttgtataacttttgatgacttcagtgaaattttcaggtagtctgagtaatagattgttttgccacttagaatagcatttgccacttagtattttaaaaaataattgttggagtatttattgtcagttttgttcacttgttatctaatacaaaattataaagccttcagagggtttggaccacatctctttggaaaatagtttgcaacatatttaagagatacttgatgccaaaatgactttatacaacgattgtatttgtgacttttaaaaataattattttattgtgtaattgatttataaataacaaaattttttttacaa

SEQ ID NO: 30781 - DNA, 804 bp, Homo sapiens
attttatagttattttaatttatttattctgttttttctgcttgtctgtgttgagaaaatggttttttatatacacactgtttttgtttttgtttttttgagatgcactccagcttgggtgataaaataaaataaaatagtcgtgaatcttgttcaaaatgcagattcctcagattcaataatgagagctcagactgggaacagggcccaggaatctgtgtggtacaaacctgcatggtgtttatgcacacagagatttgagaaccattgttctgaatgctgcttccatttgacaaagtgccgtgataatttttgaaaagagaagcaaacaatggtgtctcttttatgttcagcttataatgaaatctgtttgttgacttattaggactttgaattatttctttattaaccctctgagtttttgtatgtattattattaaagaaaaatgcaatcaggattttaaacatgtaaatacaaattttgtataacttttgatgacttcagtgaaattttcaggtagtctgagtaatagattgttttgccacttagaatagcatttgccacttagtattttaaaaaataattgttggagtatttattgtcagttttgttcacttgttatctaatacaaaattataaagccttcagagggtttggaccacatctctttggaaaatagtttgcaacatatttaagagatacttgatgccaaaatgactttatacaacgattgtatttgtgacttttaaaaataattattttattgtgtaattgatttataaataacaaaattttttttacaa

SEQ ID NO: 30782 - DNA, 542 bp, Homo sapiens
tgaaacatttatttctgtaatgacccttgtcttcctttcttgtacaggaaccaatagatcctctaaaggaagaagccttattggtaaggttgatggcacatcccacgtcactggaaaaggagttacagttgaaacagtcttttctgtggatgagttttctgcatctgtcctcactggaaaactgaccactgtcttccttccaattgtctacacaattgtgtttgtggtgggtttgccaagtaacggcatggccctgtgggtctttcttttccgaactaagaagaagcaccctgctgtgatttacatggccaatctggccttggctgacctcctctctgtcatctggttccccttgaagattgcctatcacatacatggcaacaactggatttatggggaagctctttgtaatgtgcttattggctttttctatggcaacatgtactgttccattctcttcatgacctgcctcagtgtgcagaggtattgggtcatcgtgaaccccatggggcactccaggaagaaggcaaacattgccattg

SEQ ID NO: 30783 - DNA, 2440 bp, Homo sapiens
gctgaggcctgcgcgaccccgccagagatggggctgagtcccaatttagacaggcagaccatggcagagttctcccagaaacgggggaagcggcgtagcgacgaagggctgggcagcatggtggacttcctcctggccaatgcccgcctggtgctgggcgtgggcggggctgctgtgctgggcattgccaccctggccgtgaagcggttcattgacagggccactagcccgcgggatgaggatgacaccaaggcagacagctggaaggaactgagcctgctcaaggccacaccacacctgcagccccggcctccacctgctgcccttagccagccagtgttgcccttggccccctcgtcgtctgccccagaagggcctgcagaaactgatcctgaggtgacaccacagctcagctccccagcaccgctgtgtctgacactgcaggagaggctgctggccttcgagcgggaccgtgtgaccatcccagcagcccaggtggctttggccaaacagctggctggcgacatcgccctggagctgcaggcctactttcggagcaagttcccggaactgccctttggggcattcgtgcctggggggccgctctacgacgggctgcaggcgggggctgcggaccatgtgcgtctcctggtgccactggtgctggagccgggcctgtggagcctggtgccgggcgtggacactgtggcgagggaccctcgctgctgggccgtgcgcaggacgcagcttgagttctgcccccgtgggagcagcccctgggaccgcttcctggtcgggggctacctctcctcccgcgtcctgctggagctactccgcaaggcgctggctgcttctgtcaactggccggccattggcagccttctcgggtgcctgatccggcccagcatggcctcggaggagctgctgctcgaggtgcagcacgaacgcctggagctcactgtggctgtgcttgtggcagtccctggggtcgatgctgacgaccgcctcctcttggcctggcccctggaggggctggcggggaacctctggctgcaggacctgtatccagtggaggctgctaggctgcgagccctggacgaccatgacgctgggactcgccggcggctgctgctgctgctgtgtgctgtctgccgtggttgctcggctctggggcagctaggccggggtcacctgacccaggtggtcctgcgtctgggggaggacaacgtggattggacggaggaggccttgggtgagcgcttcctgcaagccctggagctgctcatcggcagcctggagcaggccagcctgccctgccacttcaaccccagcgtgaacctcttcagcagcttgcgtgaggaggagattgacgacattggctatgcgctatacagtggcctacaggagcccgaggggctgctctaggtgggtggaaacgggtggttgccatgttttctaatgctggggagctgcacccacctcccttccagggatttgaatagtggtttttctctagctttttgccagaacaaaggagggtacattacttaaacccagggcatcaggatgtgcttgggctatggtggccataaaccctgagcccagagagcttgggtcactgtcacctgagtgcagctgggctgcctcaggcagcttggagtgccagccattcctgcaagcaccgtttcagctcttggggccaaccccaggacctttggctctgtccatcaccagcaaccaatccaccaacagaatgtggtttctgccatcctgggcagaagctgaaggccagcttcacatttctgctgagagaaggtgacttaacgccttttccggccctagctccaggcgttttgaggcgtctggtgcctgatggtaggtatggtgtgtttgttctgtcccccaggggctggagtcacctggtgcccctgaaggacagatttttggctgttaaaggatggcattttcctgctgtcttctgtgcgtttagttttcttgctgagcgggagctcagtatgacttgccacccacctgatacctcagggcaaggccctttttccctccagccaggtgagtgttttcttcaggcagctgagggtcctgggggagctgaggctctgtgctgcacccccagcccacagctggggcatctcactggagctgttccaggccccactggagagcagaggacctgatcccccactagagaggtccggtgtgcacagccggcctcccagtgtgccaaaatgaactgctctcagctgatggctgtattctgactttgaagcctgttaagaggtagcaagggggctagaggagggagattccacctcccctcccaagtgaccctcctcctgcctctggtatccttccttttgaaacgaagctcagcttcgaagatgtgaacaagaataaaaggaaaaaattctaatgtatatat

SEQ ID NO: 30784 - DNA, 2543 bp, Homo sapiens
ggcctgcttgtctgcgtgctgcgaagtccgcggctgcccccggggccctagtcgttgggttccagggtccttcacgttccattcccaggctggtctgagctccggggccgtggtcccgctgcctcctccggtcgtcgtgcggaagctgcgacgcaggcagaccatggcagagttctcccagaaacgggggaagcggcgtagcgacgaagggctgggcagcatggtggacttcctcctggccaatgcccgcctggtgctgggcgtgggcggggctgctgtgctgggcattgccaccctggccgtgaagcggttcattgacagggccactagcccgcgggatgaggatgacaccaaggcagacagctggaaggaactgagcctgctcaaggccacaccacacctgcagccccggcctccacctgctgcccttagccagccagtgttgcccttggccccctcgtcgtctgccccagaagggcctgcagaaactgatcctgaggtgacaccacagctcagctccccagcaccgctgtgtctgacactgcaggagaggctgctggccttcgagcgggaccgtgtgaccatcccagcagcccaggtggctttggccaaacagctggctggcgacatcgccctggagctgcaggcctactttcggagcaagttcccggaactgccctttggggcattcgtgcctggggggccgctctacgacgggctgcaggcgggggctgcggaccatgtgcgtctcctggtgccactggtgctggagccgggcctgtggagcctggtgccgggcgtggacactgtggcgagggaccctcgctgctgggccgtgcgcaggacgcagcttgagttctgcccccgtgggagcagcccctgggaccgcttcctggtcgggggctacctctcctcccgcgtcctgctggagctactccgcaaggcgctggctgcttctgtcaactggccggccattggcagccttctcgggtgcctgatccggcccagcatggcctcggaggagctgctgctcgaggtgcagcacgaacgcctggagctcactgtggctgtgcttgtggcagtccctggggtcgatgctgacgaccgcctcctcttggcctggcccctggaggggctggcggggaacctctggctgcaggacctgtatccagtggaggctgctaggctgcgagccctggacgaccatgacgctgggactcgccggcggctgctgctgctgctgtgtgctgtctgccgtggttgctcggctctggggcagctaggccggggtcacctgacccaggtggtcctgcgtctgggggaggacaacgtggattggacggaggaggccttgggtgagcgcttcctgcaagccctggagctgctcatcggcagcctggagcaggccagcctgccctgccacttcaaccccagcgtgaacctcttcagcagcttgcgtgaggaggagattgacgacattggctatgcgctatacagtggcctacaggagcccgaggggctgctctaggtgggtggaaacgggtggttgccatgttttctaatgctggggagctgcacccacctcccttccagggatttgaatagtggtttttctctagctttttgccagaacaaaggagggtacattacttaaacccagggcatcaggatgtgcttgggctatggtggccataaaccctgagcccagagagcttgggtcactgtcacctgagtgcagctgggctgcctcaggcagcttggagtgccagccattcctgcaagcaccgtttcagctcttggggccaaccccaggacctttggctctgtccatcaccagcaaccaatccaccaacagaatgtggtttctgccatcctgggcagaagctgaaggccagcttcacatttctgctgagagaaggtgacttaacgccttttccggccctagctccaggcgttttgaggcgtctggtgcctgatggtaggtatggtgtgtttgttctgtcccccaggggctggagtcacctggtgcccctgaaggacagatttttggctgttaaaggatggcattttcctgctgtcttctgtgcgtttagttttcttgctgagcgggagctcagtatgacttgccacccacctgatacctcagggcaaggccctttttccctccagccaggtgagtgttttcttcaggcagctgagggtcctgggggagctgaggctctgtgctgcacccccagcccacagctggggcatctcactggagctgttccaggccccactggagagcagaggacctgatcccccactagagaggtccggtgtgcacagccggcctcccagtgtgccaaaatgaactgctctcagctgatggctgtattctgactttgaagcctgttaagaggtagcaagggggctagaggagggagattccacctcccctcccaagtgaccctcctcctgcctctggtatccttccttttgaaacgaagctcagcttcgaagatgtgaacaagaataaaaggaaaaaattctaatgtatatat

SEQ ID NO: 30785 - DNA, 2768 bp, Homo sapiens
ggcctgcttgtctgcgtgctgcgaagtccgcggctgcccccggggccctagtcgttgggttccagggtccttcacgttccattcccaggctggtctgagctccggggccgtggtcccgctgcctcctccggtcgtcgtgcggaagctgcgacgcaggcagaccatggcagagttctcccagaaacgggggaagcggcgtagcgacgaagggctgggcagcatggtggacttcctcctggccaatgcccgcctggtgctgggcgtgggcggggctgctgtgctgggcattgccaccctggccgtgaagcggttcattgacagggccactagcccgcgggatgaggatgacaccaaggcagacagctggaaggaactgagcctgctcaaggccacaccacacctgcagccccggcctccacctgctgcccttagccagccagtgttgcccttggccccctcgtcgtctgccccagaagggcctgcagaaactgatcctgaggtgacaccacagctcagctccccagcaccgctgtgtctgacactgcaggagaggctgctggccttcgagcgggaccgtgtgaccatcccagcagcccaggtggctttggccaaacagctggctggcgacatcgccctggagctgcaggcctactttcggagcaagttcccggaactgccctttggggcattcgtgcctggggggccgctctacgacgggctgcaggcgggggctgcggaccatgtgcgtctcctggtgccactggtgctggagccgggcctgtggagcctggtgccgggcgtggacactgtggcgagggaccctcgctgctgggccgtgcgcaggacgcagcttgagttctgcccccgtgggagcagcccctgggaccgcttcctggtcgggggctacctctcctcccgcgtcctgctggagctactccgcaaggcgctggctgcttctgtcaactggccggccattggcagccttctcgggtgcctgatccggcccagcatggcctcggaggagctgctgctcgaggtgcagcacgaacgcctggagctcactgtggctgtgcttgtggcagtccctggggtcgatgctgacgaccgcctcctcttggcctggcccctggaggggctggcggggaacctctggctgcaggacctgtatccagtggaggctgctaggctgcgagccctggacgaccatgacgctgggactcgccggcggctgctgctgctgctgtgtgctgtctgccgtggttgctcggctctggggcagctaggccggggtcacctgacccaggtggtcctgcgtctgggggaggacaacgtggattggacggaggaggccttgggtgagcgcttcctgcaagccctggagctgctcatcggcagcctggagcaggccagcctgccctgccacttcaaccccagcgtgaacctcttcagcagcttgcgtgaggaggagattgacgacattggctatgcgctatacagtggcctacaggagcccgaggggctgctctaggtgggtggaaacgggtggttgccatgttttctaatgctggggagctgcacccacctcccttccagggatttgaatagtggtttttctctagctttttgccagaacaaaggagggtacattacttaaacccagggcatcaggatgtgcttgggctatggtggccataaaccctgagcccagagagcttgggtcactgtcacctgagtgcagctgggctgcctcaggcagcttggagtgccagccattcctgcaagcaccgtttcagctcttggggccaaccccaggacctttggctctgtccatcaccagcaaccaatccaccaacagaatgtggtttctgccatcctgggcagaagctgaaggccagcttcacatttctgctgagagaaggtgacttaacgccttttccggccctagctccaggcgttttgaggcgtctggtgcctgatggtaggtatggtgtgtttgttctgtcccccaggggctggagtcacctggtgcccctgaaggacagatttttggctgttaaaggatggcattttcctgctgtcttctgtgcgtttagttttcttgctgagcgggagctcagtatgacttgccacccacctgatacctcagggcaaggccctttttccctccagccaggtgagtgttttcttcaggcagctgagggtcctgggggagctgaggctctgtgctgcacccccagcccacagctggggcatctcactggagctgttccaggccccactggagagcagaggacctgatcccccactagagaggtccggtgtgcacagccggcctcccagtgtgccaaaatgaactgctctcagctgatggctgtattctgactttgaagcctgttaagaggtagcaagggggctagaggagggagattccacctcccctcccaagtgaccctcctcctgcctctggtatccttccttttgaaacgaagctcagcttcgaagatgtgaacaagaataaaaggaaaaaattctaatgtatatataactcaggctggataagggagtcttggtgctttcatacgcagctgttgagggttttctgtaagtcctgtggcttgtcctggcactttggcaagagtgcttgaggtcaattggaggtggtagagtttactttaaaaagtagcatcttggccgggtgtggtggctcgcatctgtaatcccagcacatcgggaggccgaggcgggcggatcacgaggtcaagagatcg

SEQ ID NO: 30786 - DNA, 337 bp, Homo sapiens
atttaatgggggtggtgtttctttgccctgttcctggagcaaggtggtagcgttgtgatggtggggagctttagatggggaaactgaggtccagaggggcgtgacatacctacctactctgcatgaagctgttgtcgccagggtgttggactctggggcaatgagaactcgtcaccaagagctcactatatgtgaggatctgaactgagtgccttctcaggtgccactgcaggtgagaaaagtgaggccctgggacatcacacagctagttctcggtggcgttttcttaactaatcacaggctgttccgacatgttccccgccccttcactctgcag

SEQ ID NO: 30787 - DNA, 313 bp, Homo sapiens
tgataaaatccaatttattatttcttatgtgttctcctttttatgtcttatccaaaaaaatcttttgtaacccagagtcacaaagactttcttttatatgtttatcttatttatcatatgctttgctttgtattagaacaggatcctgtgcccagatgcattttctcctcttttcaccaaggcagatggtttttgcttttattcttctctcggaagcaaatttacatttgccatgtgacatcagcctgctaatgaacttaagaaagtttatgattttttagatctggattttttttttcatttttaaagtggg

SEQ ID NO: 30788 - DNA, 460 bp, Homo sapiens
gtcgactcagtactgtgctccctagagtaggcacggcatcagtttcaaacttcaacattattttccagatttggaggctcaaaatatttgagcaagttaagttaagaaatagcctttttctgattattaggcctttcatatacaactcaaaattagtttaagagtaaagcatggggtgggtgcggtggcttatgcttgtaagcccagaactttgggaggcggaggtgggaggatcacttgaggtgaggagttcgagaccagcctggccaacgtggtgaaaccccactgctactaaaaatacacaagattagccagatgtggtggcaggcacctgtaatcccagctacttgggaggctaaggcaggagaatcgctggaacctgggaggcagaggttgcagtgagctgagattgtaccactgcactgcagcctgggcaacaagaacgaaaccccgtctcaaa

SEQ ID NO: 30789 - DNA, 646 bp, Homo sapiens
gaaaactttaattccccctcccccagtctgtatcctttttccctccacactttaatgtcctgactaggacatctaatagaatacttactttatgttgggtctctggaggtcattttgttatttttgaatctcaagtgtccattatctgtcttttcatatgtgaactactttataccagcaactaaattaagtaatttgtataagacatactgcttgtaagtaaaaaggaactaacaagccactgtgttgtaaaaatcaagtttgttgattcagtgttggcaattcaataacagtaagttaaacccaataaccaagttgggcaattactattctctgtcatgtatttacaaaaacattgtcagtttatcataatgtggctgttccgttcccagttttggtgtcaataaataacttaaatagaagtttttaaatgttgatttaaaaagaagcaaataaaatagccaaaatagaaaagtcaaaataggaaaatcttaaatgtgttcaatatactaatgatcttttatttcttccttaggttaatgccttagataagaaaacgtgtatcattgttcattagttattatagaataatagttacatcaacttacatatcaattgtgtttataaacaagtaaatatttttacc

SEQ ID NO: 30790 - DNA, 472 bp, Homo sapiens
atgtggtttatagttaatattcaaaaattagaaaatgcctgcaaaaattatgagataatgctaacaaacctaacatttggactccctagcaagattaacaacactacacgaactgatatgtcaaaattgctaatttaaggacttattttcttccaaatgtgttatttcttgaaacaccgttcataggatttgtataaagtatacgatgcatatgaacttatagacatttattttatttataagaatgactcacccttagtcacagagaagatcacaaacaagctcttataacacggttagttggttttctattactacataacaaattaccacaaatttagcagctttaaacaacacaaacatattatttcatgtttctgtaggtcaagatccacagggccaaaatctaaaagtgtcagctgagactgcagttctcactgggagcttggggtcctctccaagttcactggat

SEQ ID NO: 30791 - DNA, 504 bp, Homo sapiens
gccgacccagtcccgaggtggaccccgcaatggagggggtgggggggtcgaccggagacggtggcattgatgaggggggaccctggcccggagataggagcctgcctttagagtctaggccgggtgactgcagacaagccgctttccttctgagcattctatttcccatatggcagtaggagtgaattagatcaggtggcgggggtgagggactggtatttcgtgctcgagaatctgatatttttcaggcaaggggttcatttccttcatcaaacaccttcctcaaactttgagtcccactgagttccgagagtccatatggcatagctaagaagagaaatctggagttaggcttggattgctccgtgacccaggacaagtgacttcacctgcagagcctgagttcctcactagtaaaatgggggtaataatatgtcgtacttagctcataagcagggattgattgggatcattcaaataaacgtacttaacacagtacccggc

SEQ ID NO: 30792 - DNA, 249 bp, Homo sapiens
ccaggaagatgctggagacatactcatccctattccttctgctaagtccaactaaaaacactggacattacgtttaaaacaaacataaaagattctgaaaggtaagaactagaaagtagaccaagctaggaacctcaagacccaaagaatgacacagcaggaactccctgaattttgtttgtgcctcatacattccagagttagagctgaagaagctggcaacctggaaagagctaacgcacacaaagg

SEQ ID NO: 30793 - DNA, 302 bp, Homo sapiens
tatatctttttgttattgatttcctaactcatacttgaaacctattacagatttggaagttactccaaggttaacatcagttgtattctattctgtattttatatacgtatacctttatcaagttataaatgtgtgtgtttgttcagtatgtggtcttaatgtcaatttatttttaaaatttttttagagacagccgggcgcggtggctcacgcctgtaatcccagcactttgggaggccgaggcgggcggatcacaaggtcaggagattgagaccatcctggctaacacggtgaaacccca

SEQ ID NO: 30794 - DNA, 448 bp, Homo sapiens
catgccaaccgtcacccttctaaacctttttttcatccctgagaactgcagagcttggtctttgtgcagccttcggattaactgtgcacagtggcttttccatgttttccctgtttgccttttctggcaggcatggatgtgtaagctgtgccagcatttggcctgtagtacatgtcctaaatagttatttacacagtttgagtccattttagtcaactgggtaaataacagccctcttcaaaagatttataaatccataaatatgtctttatacatacccaatagacagaaataactcaatctgtcaagaacatatccaaagaggtgtttcccccacagacaggagtaatacatattttaaaactttctctgacatattatttttactgcatttcttttttcctcattccttttccatttttaccacttcattatggcacctgtggtt

SEQ ID NO: 30795 - DNA, 680 bp, Homo sapiens
ttccttaatgtcaaatgatgttggacattttttgatgtgcctccctgccatttctatatctttttttgtgaaatgtctggttaaatctcttacctagggtttgttttttttaattgagtttttaaagtgctttctgtattctttatcagatacatgctttgcaaatttttttcagatgtcttgacttttcatttgtctcatggtgtctttcaaagagccatttttaatttttgaattttaaagttcttatcaattgttcttttatgaatcatgcttttggttcatatctaggaaatctttgcctaatccaaagtcataaagattttctgctatgttttcttctagaagttttattattttactttttacatttaggtctatgatccatttttagttgatcttgtatctggtatgaggtatggactgaagttttatttatttgtacttggataaccaattgctttcagcaccatttgttgaaaagactatatattctgaatttcattgcctttatatcttcgtcagtatgtttatatctttgtccatttgtttgtaggtctatttctggactctgttgtattctgtatatctgtttatctttccaaatgccaatactacagtgtcttgattactgttgctcaaataaggttgtgatagccctgcaactttgttctcttttt

SEQ ID NO: 30796 - DNA, 1744 bp, Homo sapiens
gccccggcccgcccgccagctgcggcggcgcgtcgggaagtgcttggggcggcgagcatggcggcagcggctgcaggcctgggcggcggcggcgccggcccgggacccgaggccggggacttcctggcccgctaccggctggtatcgaacaagctgaagaagcggttcctgcggaagccgaacgtggcggaggccggcgagcagttcggacagctgggccgggagctgcgcgcccaggagtgtctgccctacgcggcctggtgccagctggcggtggcgcgctgccagcaggcgctcttccacgggcccggggaggcgctggccctcaccgaggccgcccgcctcttcctgcggcaggagcgcgacgcgcgccagcgcctggtctgccccgccgcctacggggagccgctgcaggccgccgccagcgccctgggcgccgcggtgcgtctgcacctcgagctgggccagccggccgccgccgccgccctctgcctcgagctggccgccgccctgcgcgacctgggccagccggccgccgccgccggtcacttccagcgcgccgcccagctccagctgccccagctgcccctggccgcgctgcaggcgcttggcgaggccgcctcctgccagctgctggcgcgcgactacaccggcgccctggcggtcttcacgcgcatgcagcgcctggcgcgggagcacggcagccacccggtgcagtcactgccgccgcccccgccgccggcaccccagcccgggcccggggcgacgcccgccctaccggccgcgctgcttcctccgaactccggctcggcggcgccctctcccgccgccctgggcgccttctcggacgtgctggtccgctgcgaggtgtcccgcgtgctgctgctgctcctcctgcaaccaccgcccgccaagctgctgccggagcacgcccagaccctggagaagtactcctgggaggcttttgacagccacgggcaggagagcagcggccagcttcccgaggagctctttctgctgctccagtctttggtcatggctacccacgaaaaggacacggaagccatcaagtcgctgcaggtggagatgtggccactgttgactgctgagcagaaccacctccttcacctcgttctgcaagaaaccatctccccctcaggacagggagtctgatccatcccattcacccagtgacttctttttgcccaggcctggactttttgcatcagtcacgttaaccagatgactttgcctgttaccaaacctcatgcatccacgtttgcgtctggggaggaataaaaagacatcgttcccgcttctgcgttttgttattcctactgccgccataggaattatttcgttggctgaacgttaccagcaccccgagaacacattttgatagaatcagagtagaggacatggctgtcttctaaaaagccacgacatgaaaatgacaatccctttcgtctccttcctccgctgcttccacctaacgcagcctcctgcctccgcctttgtttcatagtgaggattttattttgcacggcgccctccctctaaatacctaccctagatgatttcatcctgcccctcacttcttaacatattcctgtgtctttgtaatggccaaatttctccttccactcgtccgcacggtacgtcttcatgggagtcattttattccttacagcttccttgtaaccacagccctaaatccatgataaagctactcttgtactcctca

SEQ ID NO: 30797 - DNA, 614 bp, Homo sapiens
ctcggtacccggtccgctcggaccaagaatcagagtagaggacatggctgtcttctaaaaagccacgacatgaaaatgacaatccctttcgtctccttcctccgctgcttccacctaacgcagcctcctgcctccgcctttgtttcatagtgaggattttattttgcacggcgccctccctctaaatacctaccctagatgatttcatcctgcccctcacttcttaacatattcctgtgtctttgtaatggccaaatttctccttccactcgtccgagcggaccggtccgctcggaccatctggacccaaaataattggcatatcgcccgtaaaatcaattgcgccaatggcataagcattgtcgtgaatattggaaggatgtaagcctgcctcaccaccgtcttcacgtgcccactcaggtttcggcccaattaaacgaatacctgtccggcttgagttatagtgaatttcaaactcattggcaaagaacgtatcaatatcttgtttggtgaaaaaatctggtgcgccatgtggcccatacatgacggcaatttcccagttttgggtaaagctaggaatttgccttgagctaaagctgtggtcgtccgagcga

SEQ ID NO: 30798 - DNA, 1438 bp, Homo sapiens
gccccggcccgcccgccagctgcggcggcgcgtcgggaagtgcttggggcggcgagcatggcggcagcggctgcaggcctgggcggcggcggcgccggcccgggacccgaggccggggacttcctggcccgctaccggctggtatcgaacaagctgaagaagcggttcctgcggaagccgaacgtggcggaggccggcgagcagttcggacagctgggccagccggccgccgccgccggtcacttccagcgcgccgcccagctccagctgccccagctgcccctggccgcgctgcaggcgcttggcgaggccgcctcctgccagctgctggcgcgcgactacaccggcgccctggcggtcttcacgcgcatgcagcgcctggcgcgggagcacggcagccacccggtgcagtcactgccgccgcccccgccgccggcaccccagcccgggcccggggcgacgcccgccctaccggccgcgctgcttcctccgaactccggctcggcggcgccctctcccgccgccctgggcgccttctcggacgtgctggtccgctgcgaggtgtcccgcgtgctgctgctgctcctcctgcaaccaccgcccgccaagctgctgccggagcacgcccagaccctggagaagtactcctgggaggcttttgacagccacgggcaggagagcagcggccagcttcccgaggagctctttctgctgctccagtctttggtcatggctacccacgaaaaggacacggaagccatcaagtcgctgcaggtggagatgtggccactgttgactgctgagcagaaccacctccttcacctcgttctgcaagaaaccatctccccctcaggacagggagtctgatccatcccattcacccagtgacttctttttgcccaggcctggactttttgcatcagtcacgttaaccagatgactttgcctgttaccaaacctcatgcatccacgtttgcgtctggggaggaataaaaagacatcgttcccgcttctgcgttttgttattcctactgccgccataggaattatttcgttggctgaacgttaccagcaccccgagaacacattttgatagaatcagagtagaggacatggctgtcttctaaaaagccacgacatgaaaatgacaatccctttcgtctccttcctccgctgcttccacctaacgcagcctcctgcctccgcctttgtttcatagtgaggattttattttgcacggcgccctccctctaaatacctaccctagatgatttcatcctgcccctcacttcttaacatattcctgtgtctttgtaatggccaaatttctccttccactcgtccgcacggtacgtcttcatgggagtcattttattccttacagcttccttgtaaccacagccctaaatccatgataaagctactcttgtactcctca

SEQ ID NO: 30799 - DNA, 2104 bp, Homo sapiens
gccccggcccgcccgccagctgcggcggcgcgtcgggaagtgcttggggcggcgagcatggcggcagcggctgcaggcctgggcggcggcggcgccggcccgggacccgaggccggggacttcctggcccgctaccggctggtatcgaacaagctgaagaagcggttcctgcggaagccgaacgtggcggaggccggcgagcagttcggacagctgggccgggagctgcgcgcccaggagtgtctgccctacgcggcctggtgccagctggcggtggcgcgctgccagcaggcgctcttccacgggcccggggaggcgctggccctcaccgaggccgcccgcctcttcctgcggcaggagcgcgacgcgcgccagcgcctggtctgccccgccgcctacggggagccgctgcaggccgccgccagcgccctgggcgccgcggtgcgtctgcacctcgagctgggccagccggccgccgccgccgccctctgcctcgagctggccgccgccctgcgcgacctgggccagccggccgccgccgccggtcacttccagcgcgccgcccagctccagctgccccagctgcccctggccgcgctgcaggcgcttggcgaggccgcctcctgccagctgctggcgcgcgactacaccggcgccctggcggtcttcacgcgcatgcagcgcctggcgcgggagcacggcagccacccggtgcagtcactgccgccgcccccgccgccggcaccccagcccgggcccggggcgacgcccgccctaccggccgcgctgcttcctccgaactccggctcggcggcgccctctcccgccgccctgggcgccttctcggacgtgctggtccgctgcgaggtgtcccgcgtgctgctgctgctcctcctgcaaccaccgcccgccaagctgctgccggagcacgcccagaccctggagaagtactcctgggaggcttttgacagccacgggcaggagagcagcggccagcttcccgaggagctctttctgctgctccagtctttggtcatggctacccacgaaaaggacacggaagccatcaagtcgctgcaggtggagatgtggccactgttgactgctgagcagaaccacctccttcacctcgttctgcaagaaaccatctccccctcaggacagggagtctgatccatcccattcacccagtgacttctttttgcccaggcctggactttttgcatcagtcacgttaaccagatgactttgcctgttaccaaacctcatgcatccacgtttgcgtctggggaggaataaaaagacatcgttcccgcttctgcgttttgttattcctactgccgccataggaattatttcgttggctgaacgttaccagcaccccgagaacacattttgatagaatcagagtagaggacatggctgtcttctaaaaagccacgacatgaaaatgacaatccctttcgtctccttcctccgctgcttccacctaacgcagcctcctgcctccgcctttgtttcatagtgaggattttattttgcacggcgccctccctctaaatacctaccctagatgatttcatcctgcccctcacttcttaacatattcctgtgtctttgtaatggccaaatttctccttccactcgtccgcacggtacgtcttcatgggagtcattttattccttacagcttccttgtaaccacagccctaaatccatgataaagctactcttgtactcctcaaaaaaaaaaaaaaaaaaaaaaaaaaacacaacaaccacaaaaaaaaagagggggggggggcaaagataccggggggggaacactatactgccccttctttggaaaaggccccaagggagtataaaaaagggccggcgcgggaacacacgggagaaaacgtccgtgtgtttggagcaccttgcgcgggtcgtggaccaccaggatagcccgataaattattgttgtggaactgttttggtgttgttgttattcacatctatagtacaataacaactaagatacaacagtccatgaccataagtagcatactattctcctgtctactcctatctactcctcaacacgaccgacacagaaacg

SEQ ID NO: 30800 - DNA, 1767 bp, Homo sapiens
gccccggcccgcccgccagctgcggcggcgcgtcgggaagtgcttggggcggcgagcatggcggcagcggctgcaggcctgggcggcggcggcgccggcccgggacccgaggccggggacttcctggcccgctaccggctggtatcgaacaagctgaagaagcggttcctgcggaagccgaacgtggcggaggccggcgagcagttcggacagctgggccgggagctgcgcgcccaggagtgtctgccctacgcggcctggtgccagctggcggtggcgcgctgccagcaggcgctcttccacgggcccggggaggcgctggccctcaccgaggccgcccgcctcttcctgcggcaggagcgcgacgcgcgccagcgcctggtctgccccgccgcctacggggagccgctgcaggccgccgccagcgccctgggcgccgcggtgcgtctgcacctcgagctgggccagccggccgccgccgccgccctctgcctcgagctggccgccgccctgcgcgacctgggccagccggccgccgccgccggtcacttccagcgcgccgcccagctccagctgccccagctgcccctggccgcgctgcaggcgcttggcgaggccgcctcctgccagctgctggcgcgcgactacaccggcgccctggcggtcttcacgcgcatgcagcgcctggcgcgggagcacggcagccacccggtgcagtcactgccgccgcccccgccgccggcaccccagcccgggcccggggcgacgcccgccctaccggccgcgctgcttcctccgaactccggctcggcggcgccctctcccgccgccctgggcgccttctcggacgtgctggtccgctgcgaggtgtcccgcgtgctgctgctgctcctcctgcaaccaccgcccgccaagctgctgccggagcacgcccagaccctggagaagtactcctgggaggcttttgacagccacgggcaggagagcagcggccagcttcccgaggagctctttctgctgctccagtctttggtcatggctacccacgaaaaggacacggaagccatcaagtcgctgcaggtggagatgtggccactgttgactgctgagcagaaccacctccttcacctcgttctgcaagaaaccatctccccctcaggacagggagtctgatccatcccattcacccagtgacttctttttgcccaggcctggactttttgcatcagtcacgttaaccagatgactttgcctgttaccaaacctcatgcatccacgtttgcgtctggggaggaataaaaagacatcgttcccgcttctgcgttttgttattcctactgccgccataggaattatttcgttggctgaacgttaccagcaccccgagaacacattttgatagaatcagagtagaggacatggctgtcttctaaaaagccacgacatgaaaatgacaatccctttcgtctccttcctccgctgcttccacctaacgcagcctcctgcctccgcctttgtttcatagtgaggattttattttgcacggcgccctccctctaaatacctaccctagatgatttcatcctgcccctcacttcttaacatattcctgtgtctttgtaatggccaaatttctccttccactcgtccgcacggtacgtcttcatgggagtcattttattccttacagcttccttgtaaccacagccctaaatccatgataaagctactcttgtactcctcaaaaaaaagcaaaagcacacaaca

SEQ ID NO: 30801 - DNA, 829 bp, Homo sapiens
tgatgctgaggtgatctagaggatcccgaggagatatcctgggaggcttttgacagccacgggcaggagagcagcggccagcttcccgaggagctctttctgctgctccagtctttggtcatggctacccacgaaaaggacacggaagccatcaagtcgctgcaggtggagatgtggccactgttgactgctgagcagaaccacctccttcacctcgttctgcaagaaaccatctccccctcaggacagggagtctgatccatcccattcacccagtgacttctttttgcccaggcctggactttttgcatcagtcacgttaaccagatgactttgcctgttaccaaacctcatgcatccacgtttgcgtctggggaggaataaaaagacatcgttcccgcttctgcgttttgttattcctactgccgccataggaattatttcgttggctgaacgttaccagcaccccgagaacacattttgatagaatcagagtagaggacatggctgtcttctaaaaagccacgacatgaaaatgacaatccctttcgtctccttcctccgctgcttccacctaacgcagcctcctgcctccgcctttgtttcatagtgaggattttattttgcacggcgccctccctctaaatacctaccctagatgatttcatcctgcccctcacttcttaacatattcctgtgtctttgtaatggccaaatttctccttccactcgtccgcacggtacgtcttcatgggagtcattttattccttacagcttccttgtaaccacagccctaaatccatgataaagctactcttgtactcctca

SEQ ID NO: 30802 - DNA, 534 bp, Homo sapiens
aaatgtgctggggtgactctagccggatccctgactaaatggctgttaccaaacctcatgcatccacgtttgcgtctggggaggaataaaaagacatcgttcccgcttctgcgttttgttattcctactgccgccataggaattatttcgttggctgaacgttaccagcaccccgagaacacattttgatagaatcagagtagaggacatggctgtcttctaaaaagccacgacatgaaaatgacaatccctttcgtctccttcctccgctgcttccacctaacgcagcctcctgcctccgcctttgtttcatagtgaggattttattttgcacggcgccctccctctaaatacctaccctagatgatttcatcctgcccctcacttcttaacatattcctgtgtctttgtaatggccaaatttctccttccactcgtccgcacggtacgtcttcatgggagtcattttattccttacagcttccttgtaaccacagccctaaatccatgataaagctactcttgtactcctca

SEQ ID NO: 30803 - DNA, 353 bp, Homo sapiens
cgggattcggcgccggacagaatgcggagaggatgtgtcgctaaaaggacgacatgaaaatgacaatccctttcgtctccttcctccgctgcttccacctaacgcagcctcctgcctccgcctttgtttcatagtgaggattttattttgcacggcgccctccctctaaatacctaccctagatgatttcatcctgcccctcacttcttaacatattcctgtgtctttgtaatggccaaatttctccttccactcgtccgcacggtacgtcttcatgggagtcattttattccttacagcttccttgtaaccacagccctaaatccatgataaagctactcttgtactcctca

SEQ ID NO: 30804 - DNA, 216 bp, Homo sapiens
gcaaaccatttgcacagtcataacatctatacaagtatttgcttattaccttggccagaaaaatctcttttcaaggctgcttcacagggtttcttgagtatgcatgagtcaacacacatgttcatagaggagaagattgtgctgatttgctctacaccaacgttctgttaaaggtggaaccaagtcacttctgtcactgatcagagcaccgcttat

SEQ ID NO: 30805 - DNA, 383 bp, Homo sapiens
gtggttatgattctgctaatgataatgtttgtctcttgcttatggatagccttagcctggtggagatgacaatattctctggcctatgcaagaaaagaggagggaatcccacttaacgaaaacttaagtcattctcaaatttattcaaatcatacttgaaaaggcggaatgaaatttagggggatatgttttaactatataagcctttgctaataaaagattaagaagtatgtggcttagcatcttttaattatttttttctagcaacttgaatatacaatgtttgaaaactctggttggatcaacattattttgctcagaggtttgtggactttgcatactgattctttcctgtttccaagtacatttgcttttaggctatt

SEQ ID NO: 30806 - DNA, 343 bp, Homo sapiens
tgagacggagtctcaccctgtcgcctgcgccagagtgcagtggcgcgatctcggcttgctgcaagctctccctcccgtgttcaggccattctcctgcctctcgagtaactgggactacaggccccctccaccacgctcggctaattttttggatttttagtagagacggggtttcaccatgttagccccgatgatcttgatctcctgacctcatgatgcgcctgccttggcctcccaaagtactgggattacaggtgtgagtcaccgtgcctggcctacttggggaactttttataaatgcaacttccaatccagattccctcttcaccaagtgtctcaagta

SEQ ID NO: 30807 - DNA, 648 bp, Homo sapiens
aacacaaaacactttagttacatttcaaatattttataaatagtatacagataagttagaattgaaagaattaaaaaaagctaattacaaaatagaaaacatatctaagcaaggcttatagctgagatagaataaagttgcaagacagaaccatccatttttggataaggtggtcagaatgagagagaaaacaataacaaagtcagatgtcttcttaactgtgaaaaatatatgtaaaaaatgagcattcataaacttagatttaaggtatggttagatcaggcttattctccttcaggaaaagcaaagtacagatatgcctattagtttaagaattaagatttttaaaaagcaatgggaggctggtcacagtggctcatgtctataatcccagcactttgggagaccaaggcaggtagactacttgtgccccggaggttgagaccagcctgggcaacatggcaaaatcccatctctacaaaaaaaatacaaatattggctgggtgtgctggcacacgcttttagttccggctacttgggaggctgaggcgggaggatcacttgattccaggaggtggaggctgcagtgagctataattgtgcctctgcactctagcctgggcaatagtgtgagaccctgtctcaaaa

SEQ ID NO: 30808 - DNA, 287 bp, Homo sapiens
tccctttggccctggacagattcaggcagagccttgactcctccatttgtgtggtcaaaaccaaggacgtcagatgggaacctcaagcttgtgggttccaccttgtcatttcacagttggggccatgaggtccagagacggggaatgccttgcttaggttgatgccctgagtcagagatagggcagagaccaggactcctgtgtcccggggaaatgtttactctgcgcgccagtggtggtgggcttggcgttagatctactgtcttgttctctattttctgttcatg

SEQ ID NO: 30809 - DNA, 374 bp, Homo sapiens
taagggtgtcaatttgacctgggggttctgaaagtctcaggaaaggcagatgggggagggcccgaggcatccacagctttgagtgtcctggtgtctaagcaggagccatggagaaggtgggaggtgtgagttaggatcagctggagatcggtgctcttttgtccaagagaatgaagttgtcttcaggtatgatttggtttggaaacaagataaaagagattggccgggcacggtggctcaggcccgtaatctgagtactttgggagaccaaggtgggtggatcacgaggtcaagagatcgagaccattctggccaacatggtgaaaccccgtctctactaaaagtacaaaaattagctgagcatggtggcgcat

SEQ ID NO: 30810 - DNA, 1179 bp, Homo sapiens
ttgtacctagatttatgaaaaatatgtagtgctgttttgtaaatttacttatatggtatattgcatatatgcagcttgctttctactaggcatttttactgatttatctatgttgatatatgtttagtagtctgtttttgactgctgtacagtattccatcaaacaaccttttttttttttttggagacagggtctcatggtcacacaggctggagggcagtggtgtgatcatggctcactgcagcctcaacctccgtggctcaagcaatcctcccactgcagactccccaataactgcgactacaggtgtgtggcaccacacccagctaatttttttaattttttgtagagacgaggtctcactatgttgcccaggctggtcttaaactcctgagctcaggtgatcctcctgcctcagcctccccaagtgctgggattacaggtgtgagccactgctcctggccatgaatcagccatagataaattagacatttcccctagtgataaattgctaagtcattacttttttccattataaccatgccatactgaagatctttatacatgtctaatggtgtgaccatttcttcagggcatatacctataagtgaattggagctaatacacttttcatattgttaggtattgacagtggctgtaccaactcccacattagtggagtagtttgtgagaatttgtttcccacatcttttcaacatttgctgttagatttcctaattgttgctagtctgatgggggatagtagtaccttgttttgatttgcattttcctgacgtttaccattttttcagtttattggttattcaggtgttttcatctgtgacttcttatgttctttcctatttttctcttgggtttttaaagaaatatccagtatcgcttatatacatgaatactagtctgtatttaacgccttagatgacacttagaaacctagcctgcttttcccttgagtttactattttagtcagcactcccatactctagtgctaaccaatcaaaaacattttagtttagcctgttattttctctgtatattaattcatgctgtttcaagataaatctgattttcttgggctgaatttatcatgaaactgactctaacagccattggtttattcattttccaaatatttattattgaagtacagcattaa

SEQ ID NO: 30811 - DNA, 673 bp, Homo sapiens
gaggccaggattaccctaataacaaaaatggacaaagacattataagaaaagaaaattacataccaattatctcttacaaacgtggatgtaaaaatcctcaacaaaatattagcaaattcaatccaacaatgtataaaaagaagtatacactatgatcaaatgggatttacctcaggtatgcaatgctggttcaacattccaaaatcagttaatgtaatccatcacatcaatgggctaaaaaaaaaaaaaaatcccagccaggcatggtggctcacatctataatcccagcaattcaggaagccaatgcaggaggatcacttgaacccaggagttggagacaagcttgggcaacatagtgaaaccctgtctctgtatttttttttaaatcacatgatcatatcaatagatatgattctgttgagtggatcaagaaaaagcatttgacaaaatccaacacccattcatgataaaaaattctcagtaaactagaaatacaggggaatttcctcaacatgataaagaatatctacaaaaaatctactgctaacatcttaatggtgagaaatgcaaagcttttccactaagatcaggaagaaagcaaggatttcccctgttatagtttttcaacatcatactggaagtcctaaataatgcaataagacaaaaaaaaa

SEQ ID NO: 30812 - DNA, 961 bp, Homo sapiens
ttgagatccactaactcccctcccaagcctgcaggtaaaaccatcccagatcacctttattcctgctttagggtttaaaaaccccaggaggcaaacaaattaaagactgcagatgttcttaggatggttagacttgacacagaagagaaagaggtacaactgttcatagagttcagtttgacaattaacatgtatattagtatggttgcctgtgtttgtgttatgtttcactgtgtttcatcttcctgtgcctgggatcccccatgccctcctttcctatctttctcaaaaccagctgtttttccccatctgctgcattttggttatagatatttatttgtaggtttgctttaaaacaaaactcctctaaatcctacttgataaccatccatgctctttactctctcctgtcctgggagctctcttcctaactcctgcccttcattctcgacgcctgcctggcctccttttggttccttctctacagcattgcttccacccaccagctgtagtgcccctgtcccttaagagtatggcagtgcctcctaactgggttatatacctctgattgtccatttttaaatctgctaccaagagctttttaagctgtggatacgattatttcatcgtgggctttaaaaattgtgaggaggggcccttcagtgggtttccagagcaacaggataaagttcatggctcttagatggaaccttgagcccagcatcattctgccagccgcatctttgccatttcccccactgcactctccctcctttctcaaaacacactggtgcactctgatagctcccaggggttttgttttcatggacaagacacacaaaacttttgcagttagacacaaggttgccgtttttttattttgctaagtaagggcattaaaaaatgatctctaccatctactgtctttatctcattttaaaagatggcagtttaccctaaa

SEQ ID NO: 30813 - DNA, 382 bp, Homo sapiens
aattatcttatagaaaatgtatattttttaggatatcatctctattccttctatgttaatgaatcatgctctttagcattgatgaaagtttcaattttgagaatagtagaccttgtcaggtgtcactttgagtgccagcaaacggttgatttgaggcaagaagaataaagtttaaaaaagaaaataaatctagcatttgcttaataatttgccctttgcagcaccagaatcttatgtgaccacccacattcatctggttactgacgtggttcttgcttcaattgcagaagctatttttgcaccttttgtgtcttttgaggaaccgagtgggcctacttgcttattaatgattcatgtctcaagtggcacagggtgtcctgaa

SEQ ID NO: 30814 - DNA, 966 bp, Homo sapiens
  misc_feature (69)..(69): n is a, c, g, or t
  misc_feature (207)..(207): n is a, c, g, or t
atgggggaatggaccatcttggagaggctgctagaagccgcggtgcagcagcactccactatgatcggnaggatcctgttgactgtggtggtgatcttccggatcctcattgtggccattgtgggggagacggtgtacgatgatgagcagaccatgtttgtgtgcaacaccctgcagcccggctgtaaccaggcctgctatgaccgngccttccccatctcccacatacgttactgggtcttccagatcataatggtgtgtacccccagtctttgcttcatcacctactctgtgcaccagtccgccaagcagcgagaacgccgctactctacagtcttcctagccctggacagagacccccctgagtccataggaggtcctggaggaactgggggtgggggcagtggtgggggcaaacgagaagataagaagttgcaaaatgctattgtgaatggggtgctgcagaacacagagaacaccagtaaggagacagagccagattgtttagaggttaaggagctgactccacacccatcaggtctacgcactgcatcaaaatccaagctcagaaggcaggaaggcatctcccgcttctacattatccaagtggtgttccgaaatgccctggaaattgggttcctggttggccaatattttctctatggctttagtgtcccagggttgtatgagtgtaaccgctacccctgcatcaaggaggtggaatgttatgtgtcccggccaactgagaagactgtctttctagtgttcatgtttgctgtaagtggcatctgtgttgtgctcaacctggctgaactcaaccacctgggatggcgcaagatcaagctggctgtgcgaggggctcaggccaagagaaagtcaatctatgagattcgtaacaaggacctgccaagggtcagtgttcccaattttggcaggactcagtccagtgactctgcctatgtgtga

SEQ ID NO: 30815 - DNA, 237 bp, Homo sapiens
cagctacatgcttcaccactagatggtgctcctgcctcagccatctaaagtgctgaatcagtgatgtggaaaccaacaaatgtgctgatgaagtgtggccactgaataaggagatttaggctatggaaaaatggaatacaaatacattgtcttatagtattagataagtaggttagcacaggctaaaaataggaaatgcctaacagtcaaactgtttgcagattttaaaaattcaaa

SEQ ID NO: 30816 - DNA, 217 bp, Homo sapiens
aaatgtatgaaggggtatgtgtttataaacacatatacatgtgtaattatatgggtactcacataaatttgaagagtctatctataaaattttatatatgctttatttttattttttatttgtatgttttatatttttatttctagcatgtatttttatttttatgtacacttataactgtataatttaattgccaaaaattatgttaaatgggtat

SEQ ID NO: 30817 - DNA, 437 bp, Homo sapiens
gaagctaccctgcctccactagatagagcagggagagttctgtgatccccaataggtaaggactatgccccaagccagcatgaagcagttaccaaaaaagatcatcggtccctctgcctcccataaagatttatgggatcacatctctcagggaggagatgaggcaggaaaatacggtctggaggcaggaaacataaggacaattcacacttcagctatgacaggaaatatcctctccatagggcataggccaagtaaatgactttgcaactttacttcatcctcttcatttatgtagtatgtgtcccaatcctctagaggatattgaaactcccaaaattctaaatagtgtggacttggagcccctatgctcaggcccgctcccacactatggagtgtactttcctttacaataaaaccctccatttcttccttgc

SEQ ID NO: 30818 - DNA, 214 bp, Homo sapiens
tcttcagccaactgaacaatccataagtgtttattcgttaaaagctcactatgtacctagcactgtaaatagaaaaatagcaacatctctatatcaaaatacgtaggagtggaaattacttagtggagatatgttgatgtaatttttttaatttttaaaaacaaaactcttattccttggccaattaaatgcatttcctgcagtatctatttaa

SEQ ID NO: 30819 - DNA, 461 bp, Homo sapiens
aaaccctataattgtaaacctaactttgttgaattatatacacatacatataaccctcgaaaccctgaaattcatttagaattcttaatatcctagaccatatgctaaattctcaaacctgaaatttctcaagttataccaatcatttcactaattattcagtaccattcactagtgtgcatcattatgaggaaaagctgctacttgttgttatttcattacccaaatacacaatccccactaagagttcttgtcttggccaggcgcggtggctcacgtctgtaatcccagcactttgggaggcagaggcgggcagatcacgaggtcaggagatcgagaccatcctggctaacacagtgaaaccctgtctctactaaaaatacaaaaagaattagccagacattgtggcgggcgcgtgtagtcgcagctacttgggaggctgaggcaggagaatggcatga

SEQ ID NO: 30820 - DNA, 515 bp, Homo sapiens
gaccatactccttgaattcatgaagcttacagtctagttgagagataggcagtaaaattgaaaattagatggtatatttaccatataatatagggaaaaaataaagcaagtagaaagatggggggggccaaggactggagggatggttatgattttaaatagagacgtttaggaaatctataccagaaggctctactgaatcagactcaatagtagtaaaggaatcaggaacagtgactcagcctgtaatcccaacattttgggaggctaaggcaggagatcacttgaggccagaagtttgagaccagcttgtttgtgacagggtctcctatggagacccgctctctacaaaaatttaaaaattagccggacgttgtgatgcaagcctgtggtgccagctactcaggaggctgaggcaggaggatcacttgggcccaggtaatcaaggctgcaagtgagctgtgccactctagcctgggttacaaagcaaaaccctatccccctaaaaaaaaaaa

SEQ ID NO: 30821 - DNA, 967 bp, Homo sapiens
gcggaggttgcagttagctgagattgtgccattgcactgcagcctgggtgacaagagcgaaactccatctcacacacacacacacacaaaatgtaaagccatgaggatgaataatagtgttctcccaccacccttaactctagtgctttgaaaagaagactcgaatcacaattatttagtaacattctccctttcaggtgacatcatcatcattattatcatcatctacatttacatctgtcttattaaatgatttatttctgaaatatttacatacataatttgggtaatgtctatgtaatttccaagagatatcattgtgggaaagttacattagtaaacagcaaagttcatgtcaggctgaatacattgagatttagaaagttaagtgtagtgtagtgtagtttaaaatacattgcttaagaaaacaattatagatgatattaaactaatccaaggaacactataaaaagattttgattttagtataaataaaattgcttagtaagaaaaataaataaaccatttcatgatcaagctcttatttctaaagagaggattttagggctaaataaatcaaacagaagtaagctctcccccacatcttgtctatatcatttggataatgatgtaattcaaaggcacagagcaccttttcaacaacataagcaaagtgaaaattatgtcatggaatacaatgatgtatctgtggttaatgaactatattttatctattgcaatgatattttgaaatccagtgctgctctttgagttccctttgagcagagtttgtggtggggacccagcaacagacaagctaatatccaaaaaaagctactcacatcaacttaatttccagtttctttcaaattgaaggtaaattctaacacaaagcttttattctattctctgactaaagtgttgggaaaagaagaaaattgttaccgttttcatttctaacatacta

SEQ ID NO: 30822 - DNA, 393 bp, Homo sapiens
gcgggtgactgtaatcccagctacttgggaggctgacacaggagaatcccttgaacccgggaggcaaagtttgcagtgagtcaagatcgcgccactgcactccagcctgggcgacagagcaagacttggtgtcaaaaaagaagaaaatttctccatgtagttgtatatcatttttttctctatgtattttgagtctattttataagttatatccagggtttaaagttgcagtgaataattatcctgggtcgttttaaattgcagtgaatcaaaggcatttaggcattacataatgactattcctgggtgatgctttttctcttggatattgttttgtctaatatttaatattccctttgcccatttttcttttggcttaggtaatgtaaggca

SEQ ID NO: 30823 - DNA, 155 bp, Homo sapiens
gttctttttccctgtgctggcaggactgctctgagagagcagccaagaggaactggagctaagtgggagctcccttttaggatcctcagccaagacaaatgactgtcacctgaggcattagtgtgcatgacttcttccaggcccctttgtcgatg

SEQ ID NO: 30824 - DNA, 389 bp, Homo sapiens
tcctagtgccaagtgtgcctgccttcctcattagctcagtgacataaggaatgggttttcagcaccaattttttttaactggtatgtagaagaatctaaaagtttattttttattttttaatattttatttttccataagttgttggggtacaggtggtatttggttacatgaataagttatttagtggtgatttgtgagatcctggtgcacccatcacctgagcagtatacactgcactgtatttgttgtctcttttccctcgttcccctcccactcttccccccaagtccccaaagtccatagtatcattcttatgcctttgcaccctcatagcttagctcccacatatcagtgagaacataggatgttcggttttccattcctgag

SEQ ID NO: 30825 - DNA, 454 bp, Homo sapiens
atctgtttcaattctagtcactagcagccccacctacataatgtttccagtcctgttcttttttttttttttacacatttttgccttttcttttggttttgtgtctgtacatctcagctattgacacattgctgtatatatatccactgattataatgcatgtgtctgtgttttcaggaagccttttgatgctgctgcataatgtgtaaatggataatgctcaaagagacaaattaccttttaataatagattgacagttatttttaagaaatgaaaaccaattttgaattgatatttgtaggcccacactgtgcctcaatgtatgaaacctcacctaaaccaggaagcctaatgacgatgcgccctttcctcttaactgtttgcagcctgcagttggcactgttcgtgatgcatggtctggttgtgccctgtgctggcatggagtcaccctta

SEQ ID NO: 30826 - DNA, 358 bp, Homo sapiens
gagagagggtgatgactgatctggggttggagaagaaagcacatgtttgagagggctgtggaagatggaatcggggagactctgccagcagaacatgtgggcaaagcgccgatgagctgttctggagcacggggcccagcacagggtgagaggcaagatgcctgtagggaaatccaggagatagttaaacacaggcaagggtctggagctcaggagaggcttggtctggaaggaaaaagttgaagttcatcacaacacaggtggtggttgtcaacactgtctagaaggagtgtacagaaagagaaaaggatggtttgaggacagagccctgaggaatgaagaggggcacgcaaaggag

SEQ ID NO: 30827 - DNA, 135 bp, Homo sapiens
taaaaattctgtataattggcttcagtgttcagagggaaaaaatgttaaggtgttcatgtgcagaccatggtctaaaatccaattctgaaaagagcacatcttataggaaatttagactcaaaatgtacattcat

SEQ ID NO: 30828 - DNA, 346 bp, Homo sapiens
atgaaatgacatgattgtggccattctgtagtctttaaaaggagatctatttgtgtcaataaacaacgagctcattaaaaactacccataaaacaattaggccaagggaattttgtctgataacagtgaaagaaggaagtgaggatttagctgcagattctggaatgagcctgtttatcctccaggaccacagcagttttgtcttcaggcttaagataaatcactgtaagtgtgaaggtgttcagaaaaataggttctgccattgctactatgtcctgaagtttcttccagtttgcctttgaagaacacagccactaaaccgccgctagatgtcctcaaagtaaaa

SEQ ID NO: 30829 - DNA, 96 bp, Homo sapiens
actgccagcatcctgctgcaactggctccaggctgagtaattgtccgccacgcacactcataattttcaaggctcttcaggactaattggctgggg

SEQ ID NO: 30830 - DNA, 595 bp, Homo sapiens
atacatgattttttttttttttttaagatagctgactctcactgagtggatatctgtgttttcactatggaagcaagagtcagcaaagaagaaccttcaatccaaatgaactgcaggaaaagatcaacccctgcttcctagccaggaacaatggactcaccctgtgaacatacaaagttctcagacttctcagctggttaacaaaagaaatttaaaatgtaaaattgaatagaatgttatagtgactaatttaatctaaatgatgcaattggaaaagttaagaataaatccaaacacacacatttgccaatttggggacataatttaactcttttccacaaaggcactgaaattcatttatgaataccaacgttttcatgattaaattatattaaattctagacctagaaggaagatagtcattttacaaaacatggttaccattaaatgaaaaatttaaagacctaatagcggtgttgtgggtgtttaaacattttctttaataagctattataaatactcatacttcatcttctacatttgagtgtgcatgtgtgtgtgtgcatgcacagacacacatattactagaggtcga

SEQ ID NO: 30831 - DNA, 433 bp, Homo sapiens
taacaacaacaaaaacttctaaccagtaatactcgattcaaaattattttacttcaaaaagaatataaaaataaagactttccaaaataaaagttgagactgttcatcaccattggcacagtcctacaagatataatatacagggttgtgctccctggctcacgcctgtaatcccaacactttgggaggccaaggtgggtggattgtctgaggtcaggagtccaagaccagcctgaataacatggtgaaacaccgtttgtactaaaagtgcaaaaattatttgggcatggtggcacattcctgttgtcccagctactgaggaggacaaggcaggagaatttcttgaatcaaggaggtggcgactgtaatgagccaaaatcatgccacggtactccagcctgtgacagagaaagactccatctcaaaaaaaaaa

SEQ ID NO: 30832 - DNA, 527 bp, Homo sapiens
agtagctgggactgtaggtgtaacccactacacccagctgtttttttattttttaagaggtggtggtcctgggagtcttgccatgttgtccaggctggtctcaaactcttgtcctcctgtctcagcctcccaaagtgctgggtttaacaggtgtgagccactgcgccctgcctgggttcatattttttaagcaacagtcatgaatgttaggtctcctggcctacttgagttacatatgaagctattgaaaactcaaaattgcctgtagtcctcctgcctcagcctccgaaagtgctggggacagaggcatgagcctggcctcaaattttaaaatgacacaaatttaggaggaataaatactcagagcattggatgatcagaacaggggctgaacgataatagctgagaatgttaggcaggaatctagctaaataaattggacaggaataaattctaccagaacaaccaatcttagtatgataggtagaaggggggaaaaaaaaaaaagtcgactctaggttaattca

SEQ ID NO: 30833 - DNA, 477 bp, Homo sapiens
gtgtgtgtgtgtgtgtgtgtatgtgtgtgtgtaaaatacagacagggtctcactgtgttgcctagactggtctcaaactcctggcctcaagtgatcctcctgtctcagcctcccaaagtgctgggtttaacaggtgtgagccactgcgccctgcctgggttcatattttttaagcaacagtcatgaatgttaggtctcctggcctacttgagttacatatgaagctattgaaaactcaaaattgcctgtagtcccagaaggctgaggcaggaagactgcttgagcccaagagttccaagctgcagtgatctttaattgtgccactgcactccagcctgggtgacagtgagatcctgtctctaaagaataataataatagataatacttgttttatcaaaatattggccaatggaagaaagtgaagtcatcgtgttgttaaaaaatactagaatactcagtagagatagcaccatgtt

SEQ ID NO: 30834 - DNA, 287 bp, Homo sapiens
taacactaaatccccactactaccaatccctaggcatagaccccagtttgccaccattttttcttaactgattatccaaagccactggtttaacttctctctaccaagccttctgttctgccacctgagagaactgttcaactatagacagtattgtagtaattatgaaaattttgatatagtgacaacacagtgatgatagtgtaacttttacagagtgcttgcatgtgccaagtactgtgctttttttttctttttttttggacgcaagaccttgttctgtctcc

SEQ ID NO: 30835 - DNA, 661 bp, Homo sapiens
aaaaaataatcatagagactcaacatagtaggttagtcatatgtgttggtctctttttctcaaagccacaccaaaataagagtaaaaggaataaaatgtaaacccacagggtcagcccacaagagaaggtagaggaggcatcagtggatgaaaaggtacaataatctgaaaggtggaaactggttggaatgttgatagccaaaatcagtgcaaagaaaatacagccaaaattcatcctgtagaacaacttcaaagacttaaggcttgcagacagcaggtagggaggaagtgaggtacaagacaggattgaaagtgaggaattggttagaagttggagcctcaggaaacttccccaccctgagcagtcagatgccaacccctagtcaaggcaggagaatggaaattttccattattctctggaaaaatggaaccatggaaattaaggccatggaaacagtgggcatggtggtgggccagggtgagatgcagggctggaaattgattaggtacaaattgcttattctgccatggtcttctgctcccctttcccttagaacaccaggaccagagcgggtgggaagggagtggaaagtttatctggtatgtttggccatttggaaaagaatattgatgggtatctgacaggtccgagaatgtgtt

SEQ ID NO: 30836 - DNA, 437 bp, Homo sapiens
agtgagtctctctgctctattttgtatcccaacccctttattgtcttagggactctatcacatcaagacaatcttttacttctcccttcctgctgccttcttttctcagcctattcccatgagcaaagctattccacatttaagaccctccccttaaccccaaatctccctctaactatggcctatctgactgtttcttttcttagaaaagttttttttttttaagagtagcctggactccagtagttccaggactgaggttcaagagaagcacaggctgctgcccctggagtttaacaccagaggtaaaagcatgaaggaggtgcaggatgccacttttaggactgagactcaagtgaggcaccatttaagagcctaacccaaaagaatgtgaaccattctggagcccagcgattctggggctaagttgcaaaaga

SEQ ID NO: 30837 - DNA, 574 bp, Homo sapiens
gctcacacagccacctgctcccccgctccctccttcccttgtcagcatggccaccgtgggcctggcatcaccatgggcctggcacacagtccctcgtgggctgcctttgtgccatgagcccactgctgccgactcacctgtccctcccagtactggaaccttctggaacaccagcactaaaagataggaggccctgtgaggttggcatcccccatcccccccaagaggcgccctctaccagggtggcccaggtgagtgttttacagaaggcggctctgtccaggcagtggttcgcacctataagcccggtactttgggagaccgaggggatagatcacttgagcccaggaattcaagatcagtgtagaaaacatagaccccctctctataaaaaataaaaaattggcttgggcgtggtagcttgtgcctgtggtcccagctactcaggggtgctgaggtgggaggattgccggagctggggaggtcaaggcccactccagcctgagacgctgtctcaataaaaaaaaatacacacacacccacccacccactccagcctgagaccctgtctcaa

SEQ ID NO: 30838 - DNA, 274 bp, Homo sapiens
tgctcattaagctacactgtctactgaaaacagaagcataaaaatcaccaagaagtttctcaaagatttgctcaactttttagagttcccaagcataacaactcaactgcaacaaatacaactggctgtattaatacacctatccacatgaaacattaattccatgttgtcaaagagcaagttttacaagatgactccaattctcatctcaaggggatatgagaaaatttacagttaactgagctcaacttcactcaagcttatgcctcatctt

SEQ ID NO: 30839 - DNA, 318 bp, Homo sapiens
ctcaaacaaaacaaaacaaaacaaaacaaaacaaaacaaaacaaaacaaacataagtttgcctcctttaggaggccaaggcaggatgatcacttgagaaaactggcgccaggagttcaagacatagtgagacatcatctctgcaaaaactaaaaaaaaaaaaaaaaattagccaggcgtggtggtgcatgactgtagttccagctacatggcaggctgaggttggagaatcagttgagcccaggagtttgaggctgcagtgagccctgatcgcacagctgcactctagcctgggtaacagagtgagaccctgtctgag

SEQ ID NO: 30840 - DNA, 418 bp, Homo sapiens
acccacaaaagtggtctctgagtgtcagtccagtgggacccccaccccttatggcttcagttccccaaatagggctggacccttgatcctgatccagctgtggctatccagccccttcctggggactttggactttgaggggggcatgcccagttgtgctgggaatccatactttccctggctggagtagaacctgtggactgtagtcctgagggcagtcatgttctgcctgtgcctggaaacacaagaaacttgactgcagagagaagaaagaggagagaggaacagagcgaggaaaccgcccgtctccggggctttttctgttccctatccttgactttctaagaccagtggggtcccctcctctgcttctttttcctgagttctgtgaaattccccaattcttattttttatctc

SEQ ID NO: 30841 - DNA, 633 bp, Homo sapiens
tgtggtggtgtgtgcctgtaatcccagctacttgggaggctgagacaggagaatcgcttgaatccaggaggcagaaatggtagtgagccgagatcatgctgctgcactgtccagccttggcgacagaacaagacagggtctcacactgttgcctaggctggagtatggcagcctgaaacgcttggattcaactgatccacccacctcagcctcccaagtagctgggactacaggtgcaggccaccacgcctacctaatttttaaaatttttttaatttttgtagagacaggatcttgctatgttgtccaggctggtctcaaactcccagccacaagtgatccttccacctcagcctcccgaagtgttgggattgtaggcgtgggccaacacacccagccagcttcatttctgcaccgaaccttttattttgaaatgattgaaagattcacttgcagttataaaaaataacgtggaaagatctatgtaccctttacccagtttttgccaatggtaacatcttgcaaaactatagtacaatgtaataactcggatattaacattgacactttactatttttttagatcaaaggtgtatttcatacttaatggtcaaaatgattttcaaaagatag

SEQ ID NO: 30842 - DNA, 287 bp, Homo sapiens
accttttgtctatttaaataatggtactataaacatttgtgtacaagctttgtgtgaacaggctttcaattagtattttaggagtggagttgtggggtcgtatgttaactctatgtttaacattttcaaaaaccgtcaaactgatttccaaaggaactgtaccgtttttacatatctgccagcaatatgagtttcaatttctctgtgcctttagttacaataacaatataacagcccttgctattgtcttttaaaaaaaatacagccactctaatgaatgtgaagtg

SEQ ID NO: 30843 - DNA, 371 bp, Homo sapiens
cagagatggagccacctgtcttctgcccagggtgggacaggagctggaacttgtcctgcttcttagatgtctttgaaaatcagacttcctgtctctgctgcctccacacccattgcagatgctccaggcctggcccagttcttgaccctaagtataaatgggccattccactgcccgcccacgtccgtgccctctccatgtccccatattcacctatcttctttttcctatccagtagcattttggtgcctgttctcccttttccttctccctgtccacgtggattgattccttaaacaagaacaaaaaagaagtcagggaggagggatatggagagaggggcagggaggaaaatagattgcctatattca

SEQ ID NO: 30844 - DNA, 390 bp, Homo sapiens
gatatctacctcatagaattgtcgggaagattaaccactatcccggcctcttacacttcttaatacacccacagtgagccttgcactgagcaaagtctcaatatttcgttgccagattcattacacagtccgtaggccccaggggctctgcatcatgcacaagtacagttagtactggcttttcttccttgtttatgtgaaaggtacttcttttctaataatctccactcctcctctgtcccctttccccaccagctagaatcctaaaacttaagcagctaacttctgtttcctgagagagaaagctatcccaggtagtcatccaagtcctggtaagcacagcattaggaccatggccaggcctctcaccaagtcagcagacttcaagga

SEQ ID NO: 30845 - DNA, 438 bp, Homo sapiens
tttcatcaaacatggcataatttttcagtacagctacttgagtgtgcatatttatgagtagcttgaaacaataaaaacaatgaaaaaccttttaatgcactgaaattagcacaaatatgagctatgtagctaagctccattgttcatagcattgaagatagtcacatctaattttgctgctatagaaagcaaatcagttctgctaactgaagcccacgatattttgcacattatttttttgaatttcttcggtctattttagtgtttgaaatgctaaaaacttctgtcccagcattctttctggaaaaaagtctgtatactgtcttttgagctctgctactagttcacaagtcactcttgactgaagttataaagcaagagaggggattttatttatgggattttgtattatttttttctattcactatagtgcattt

SEQ ID NO: 30846 - DNA, 354 bp, Homo sapiens
ttttccaagagcacctcattttggggaatttgtccaacgacaccaacagcctgctgggtgtcaggaaaaagccctgcatttctgattaattgcttacctgtactttatcagaaatccagagattgaagtgaccttgaaggattatgaggtctgtccctgtatccaggcaagaccgtacttaaccacccagacagatgggacaaggcatgtttatcaaaaatgccttgaagttgaaattaaaatctccttatagaaaaatatttgaaaatttttcatgaccacaaaaagtttgaaaattatgaattaaaaaagtttttattacgaaagtagtatttaaaatatcagtacagaaat

SEQ ID NO: 30847 - DNA, 1126 bp, Homo sapiens
tgttccttagcacaggtggtgtggatttaatttcttctcctggggtgacctacttgtatctagaggggagaaatattgtaatgaaatgctcgttacttacaaaccacaccaaattccaggtgtactgtaccaaatgcatggaaatgagtagaatgtgctctcccagacctgctagccaaggtgaaaatgcttccctgaaattactcatttgcaaatgcctttgaagtcattagataatacacttggcctcaaaggcaccaggcagccaaattttacgttggagctgtgtgtacccaaccgtggaatttgcctcccaaactatagcaaaactgataatgcatatcggttttaaaaagcgaattttcaccttgaatctttctcctataagaccactgggaacagaacgctaatgtatcctggcctccctccaattctgccattatagattcaccttcttaacccataatacatataattccttcttcctagtgcctgccttattgaggccatgcacacatgtgaccactcatccagcatatttgctgggagaactgaggtaccatgacttggtgctgcagttgattagcctagaaatcttaagaccattccaagagcacgattttatggccctctgattcatgctatggatatgtaacatgatttctgatctgtgggagctgccagataggcctgtcccaaataaagatcgtcacaaatctttactgaatgatattattgggaagtgcacaattatggcaccctgtaaccacctccagaactttccatggtaggcatgggcccaccccattcccttaccctgaattggttcaatactgtatctggacataacaggttacttccaaccataatctgcatcgtggatagacataaggaaaaacagctttctcaaccacctacgtaataacagcaaaccactgtttcccaaactcagtgggttaaaagactcacctgaaaagctttcaaaaatacagattttggctgggcatggtggctcacacctgtaacaccagcactttgggaggccaaagcgagaagatcacttgaggtcagaagtttgagaccagcctgggccagacagtgagatccctgtctccgccaaaaaaaa

SEQ ID NO: 30848 - DNA, 270 bp, Homo sapiens
tcagtgctctccatgcctagagggtcccctctacctgagactgcaggagacagaagcctctccagggacaggtccttacctgtgtctcctgcttcttcccaccgctgtccagcccttgaagctgatgctccctggacacaatgaatcaggggccagcagtgataaaacacacaaaaatcctgcccacggagctgccatcctgggagaaggggacccgcatggaacaaagtgtgtagcgtgtgcagtggagagaacttcatgtggaaaaat

SEQ ID NO: 30849 - DNA, 359 bp, Homo sapiens
ttttttgagactaggtctcactctgtcacccaggctggactgcagtggcacaatcacagctcactgcaacctctgcctccctggctcaagggatcctcctacctcagtctcccatgtagaggtgaccacaggtgcacactaccatgcctgtctatttttttaaattattttttatttttgtagagacagggtctcgccttgttgcccaggctggtcttgaactcctgggctcaagggatcttcctgccttgacctcccaaagtgctgggattacaggagtgagccaccgcttccggcctacttttagaggatttataaattcgaattggtctaagttccaacatgccaaatatcctgga

SEQ ID NO: 30850 - DNA, 638 bp, Homo sapiens
aaaattgcttgtgaaagaattcaagcaacacaagaaaatccaaagaagaaagcaaagatgacatctttaattgaatggctaccctgagccaggtaattccttgttaggctgtcttgcctcctgtaggatggttagcaacatccctggcctcaactcactaggatgcccactcaactagcccagttgtgacaaagttatttccaaatatttccagatgtcaacagagaggcaaatatcaccctcaattgagaaccactgatttaatgaattcatttattcatcaactttttttttttaaacagaaggggtcttgctctgtcacctaggctgaagtgcagtgacacaatcgtagctcactgtaacctcaaaatcctaggctgaagccatcctcttgcctcagcctcctggattttgatcctaaggggtaatagtaacccaatgagaatcacacttgtcagactagcctcaaaacagtttctaactcttttaaaaagtgtatctcctttagaaatactttatcacttttaaagatataaaaggttgcactgcactctggagaaaatgtcaagagcagcttcaaagaaattctgacgagtaatccacacagttggggaggggagaagttgcatgtattttta

SEQ ID NO: 30851 - DNA, 94 bp, Homo sapiens
ccctccctcactccaccttgttctttttatttagtgacattcttggcctttttttcttccatatacattttagaattagtttgtcaagttccac

SEQ ID NO: 30852 - DNA, 563 bp, Homo sapiens
aattggaacaagagagatctggggtgaaaagaggctgaagaaagtacagcttagagctgatctgttttaggacatcagtcagacctggccagagcatttggaaatgtgctacttctggaatgaataagccaggacttgtggggaggtgtgggaatttattgatttgagttcttgggccatcatcatttttcttaaattactttttcgaggtattgcccttcttgactcagacatgaaagatgtctcctctcatttaaatcagaatgcaaaattgggaattggtcccacatcttgcatgtaggaaaagaacacttggatatagaaaaccaaccgataggagctccttctcctcttggagatcttctataagaggccatcataatgcttctctcgaccattctccagaaagtgaacctaaagaacttgaacaagaagaccaaaaaatgcaccatctctaaagaatgagaagacaagccacagactgggagaaaatatttgcaaaagacctatctcataaaatactgttctccaaaatgtacgaagaactcttacaactcaacagt

SEQ ID NO: 30853 - DNA, 343 bp, Homo sapiens
acttgggaggctgaggtagaaggattgcctgagccctggagttcaagtctgtagtgacctatgatcatgccactgcactccagccaggatgacagagtgaggccctgtctctaaaaacaaacaacaacaacaacaaaaaaaaagagagaagacttttaaaggaaaacgtaggagaaattacttgtgacctagggttaggcacagaatttgtagatatgacaccaaacatataatctataaaagaaaatattgatcaattggatttcatcaaattaaaaatatttgctctcaagaccctgataagagcatgaaagaaaaagccacagatgggaaaaaaattttc

SEQ ID NO: 30854 - DNA, 391 bp, Homo sapiens
gctcaacaaatggcaggtgctatgccaatagcacagagatctgaaagcctttagccaatatcatagagatctaaattatgccaataacatagagatctaaaagcctttttctgcatgtttgcggcttttccttgtattaaaaaaactatattgcagttctaggttggaaatctgtatgtgttttcactgtggtgcccgcaatacctagataagtgctatgtcatgggctctttcattcatgtaacaagtatttttttggctaagctctgagtgcagcaaatatacagacacaaaaatctcaaccctcatgaagcttaagttctggcatgggatgaaggtgggggagtcagacaataaagacaaactgttaggtggagatgtggtcagtact

SEQ ID NO: 30855 - DNA, 262 bp, Homo sapiens
tgaaaacgagttaaaacgatcacgtaacagcatttgtagcttgaaaaagaaaataaaagaaacaacgattagtcttaaaagaggtttactaaatactgtgtacctaagttacaaattaatgtaagccatcctacttatagtttacctttttgtgacagttataaaatcatcaatcaaatttaattgaatttaaaactaaattgcaggctgggcacggtggctcatgcctgtaatcccagcactttaggaggctgaggcaggt

SEQ ID NO: 30856 - DNA, 323 bp, Homo sapiens
ggctgtattattacttaagctatgtttacaggtagacttctaagccttctagctttccactagtaccaggtgagaaagatacgtgctcatgtactgtataatgatgtttcagtcaacggagactggaaatacaatggtgggcccttaagactgtaacaccctgtttttactataccttttctatgtttaaatacacaaatacttaccactgtgctccaattgcctacagtattcagtacagtaccatcctgtagagatgtgcagccttggagcaatggcctgtaccacagagcctacgtctgtagtagctatgccatcttggt

SEQ ID NO: 30857 - DNA, 458 bp, Homo sapiens
gtctttgagggcccacaaccctcaagttatccttgatgtgagtggaatatttatttatggatgattgtagaattttatatttttactttttagaagtaatttcttaaattacctggaaagtatgtatctctgtatatctaggtggcatgttgtaaggattatccaattagataattttccaactacctgtactaaatattcaacccttccccattggctggtgattattcctcaattgctggggaactggccctccatatggccatctgcctcactggactctgcccattaccaccttcaactggacttgctcatccctgataatcatctaatttttttaagaaaggtttttaaatatactgtgtatctgagatgaaaatattaaagccctcttgcttttcattgtgtaagtttttaaaaattccacttgataactctgaacatcttggcttaattat

SEQ ID NO: 30858 - DNA, 720 bp, Homo sapiens
gtggaggagggacagacagaggaggctcgtgcaggggaacgccagccaaggagggagcgcctgctccaagggagggggcatttgaggcacagatcaaatgattccatgatgacaaactgcctgtctcaactgaccagattccactggcaaacactccgctgaccttgggcagctccctctgctcccacctcctctggcccttgtgcttctggggctttgtggagtagctggacatcaatgataacactaacagtagccggcctgccaccaagttctttacataggggatgcctatgtctgtgcttcattggcgtcatctcacaaggccctgagctggcaggaaattgaggtctcaaggggaaaagccacctgcccccagtgacaaccaggaagtgcaagactctgacccaacgcccatgcctgccatccccaaacatgggctcaaaacccccttcccagggacggctgtgtccacccctcagcaggaggaggagaccccacagcaccgggtgagaggtcctgctggatgctaagcaccgaaacctcaacccggaacaagaccagaacaacctgagcaacaacaggaccagcgatggctctccctgctggaggattctggaagtcacctggctggaccaagccctctccgtgttctctgtcagcccactccccagagccgctaggcctgatgtgcacaagcagactaataaaggcttgagg

SEQ ID NO: 30859 - DNA, 1590 bp, Homo sapiens
gtggaggagggacagacagaggaggctcgtgcaggggaacgccagccaaggagggagcgcctgctccaagggagggggcatttgaggcacagatcaaatgattccatgatgacaaactgcctgtctcaactgaccagattccactggcaaacactccgctgaccttgggcagctccctctgctcccacctcctctggcccttgtgcttctggggctttgtggagtagctggacatcaatgataacactaacagtagccggcctgccaccaagttctttacataggggatgcctatgtctgtgcttcattggcgtcatctcacaaggccctgagctggcaggaaattgaggtctcaaggggaaaagccacctgcccccagtgacaaccaggaagtgcaagactctgacccaacgcccatgcctgccatccccaaacatgggctcaaaacccccttcccagggacggctgtgtccacccctcagcaggaggaggagaccccacagcaccgggtgagaggtcagtgctgaagccagggaggcagctctcagcagggcacctgtgtggagccagggaagccagggccacacttgcagggtgaagtggggaactcggaaggctgggcagtggagcaaaatgcttggtgccctgcgggaaccggtggccaaggctacactgggatgaagggagccgtggagctgcagaatctgcgggtggccctcagtggcaggcagccaggccaacaggggctttgggctgcaggtcagcccctcccctgctctggaacttttggagggccattacaaaggacatcagccccaagatactcctctgaaattctgcctgaaaggcccttcacattccctaattggcacttacaacattccagaacattctatggtaccttaagtttctcctccccctccaaagggcccttgaaccttaaggatagggcagaaggggctcctcaccctggcctcgagggcttaagatccagctgaggactcctagcctccctgtgtgctgggcaggaaagtagctccatgtcactgctgtccctgggaaaggaaaaaaggttgaggaagggctcagagccagccttcagaccaggcaggaagggttcagagccagccttcaggccatgcaggcctcctggatgtgcttactaactctgggctcgctgttctctgagctggctgggagttcccctctgcacccccgtttcctcccctgtaaggtgggaataatagcgtatgtctctaggattaagtgagccagtcatgcatgggccgagaaccaggtttggcatattgtagctgctcagtggacgttagctgttatgattggaccacaacgtgcttccgtttcaattctgtgggccttttggaggtcctgctggatgctaagcaccgaaacctcaacccggaacaagaccagaacaacctgagcaacaacaggaccagcgatggctctccctgctggaggattctggaagtcacctggctggaccaagccctctccgtgttctctgtcagcccactccccagagccgctaggcctgatgtgcacaagcagactaataaaggcttgagg

SEQ ID NO: 30860 - DNA, 773 bp, Homo sapiens
gtggaggagggacagacagaggaggctcgtgcaggggaacgccagccaaggagggagcgcctgctccaagggagggggcatttgaggcacagatcaaatgattccatgatgacaaactgcctgtctcaactgaccagattccactggcaaacactccgctgaccttgggcagctccctctgctcccacctcctctggcccttgtgcttctggggctttgtggagtagctggacatcaatgataacactaacagtagccggcctgccaccaagttctttacataggggatgcctatgtctgtgcttcattggcgtcatctcacaaggccctgagctggcaggaaattgaggtctcaaggggaaaagccacctgcccccagtgacaaccaggaagtgcaagactctgacccaacgcccatgcctgccatccccaaacatgggctcaaaacccccttcccagggacggctgtgtccacccctcagcaggaggaggagaccccacagcaccgggtgagaggtcagtgctgaagccagggaggcagctctcagcagggcacctgtgtggagccagggaagccagggccacacttgcagggtgaagtggggaactcggaaggctgggcagtggacaacaacaggaccagcgatggctctccctgctggaggattctggaagtcacctggctggaccaagccctctccgtgttctctgtcagcccactccccagagccgctaggcctgatgtgcacaagcagactaataaaggcttgagg

SEQ ID NO: 30861 - DNA, 602 bp, Homo sapiens
ccctctacctctgggctctgccttcagccagggttggggacagcaggtaggcagatcccatcgcagacaggcctgccttcctcagggcctcgcttaaatccacaggaatctgctggggctctgccctctggctggggcaggtggaactggccagattggcggtggggggaccactgtgcttgccatagggactggcccagctgccccacaggggagcacattggagtaacaggggaggctgacccgagcctggcccggctccacactccccacccccaccccaccatcagggactcgcatttaattgtcattcatttcccctctctgaattcaaactaggcacagatcaaatgattccatgatgacaaactgcctgtctcaactgaccagattccactggcaaacactccgctgaccttgggcagctccctctgctcccacctcctctggcccttgtgcttctggggctttgtggagtagctggacatcaatgataacactaacagtagccggcctgccaccaagttctttacataggggatgcctatgtctgtgcttcattggcgtcatctcacaaggccctgagctggcaggaaattgag

SEQ ID NO: 30862 - DNA, 804 bp, Homo sapiens
cctcctctcctccctaccgtttcatttaatggtaaaacaacagcagagctctgaaagttagccatctgcgcagagtttgccttctttaaggagggaggcgtcagacgatatccatttaaatatattttgtacttccacaaaggatggaaagggaaattcacgaagggagtggaggcggaaagggagctccgagaaagaaggaggggtcattccgcggggggcgggggggggcgggggccgacgcaggggaaagagttgctctctacaccgaaaagggactttgaccttccattgatctcgaaattcaaaaacgtttcttcacaggtcagattgtaacaaacactcgttcctaatttatgaactcgccgttttgattttattatttaagcatgcgccagcaatcgtgtttccttaagaaagaactgacctatttttggctggagataaacgatcatgttaacagatgttaatcttgtaatctgtttttcctgtaagcactttacctagccgggtttcagaccttaaaaataacatcttttccaaaaagacctgacgtcacaattcactccctgaaaaatcacactccccctccagtttcttcccctgcaatgatttcaaagacattaaatcttttccactttataaatgctgatctgttctgcctctactcccacaggctcttatttgcatttcaaattccacaggttacaccagtcgccttttcaaaaaatgtaaaccaacaatgcagcagcaaatggctttttgtgcatctggattaaataaagcacagaatgaatatattta

SEQ ID NO: 30863 - DNA, 371 bp, Homo sapiens
atgatgcgttgaggggctcaggagcaatcaaagaggcctggaggggctgggcagggttggagaagcgggagcgaggtcaagaaccacaccgtgtagcaataccaagtggtattacatgatcaatgggcgatttatgcgtgtatttgtcactccccctccagtttcttcccctgcaatgatttcaaagacattaaatcttttccactttataaatgctgatctgttctgcctctactcccacaggctcttatttgcatttcaaattccacaggttacaccagtcgccttttcaaaaaatgtaaaccaacaatgcagcagcaaatggctttttgtgcatctggattaaataaagcacagaatgaatatattta

SEQ ID NO: 30864 - DNA, 295 bp, Homo sapiens
cgccctccatcctggtcaacagaatgagactccctctcacaaaacaaaaaagaatcaatgcggatttcaggggtatgattaactggaaaataccgcggaagttatgtaacgtagcataaaatggaagtgttttgtaactgatttggctccttctgtgtaagtggggtgactgtacacttgatttagaaaccacatctactgtcctgggccaggatgcatccaaagcaagaagaaaggacctggggattactggtatccttgaaactattagtaaagcttgatactgagtaaaatc

SEQ ID NO: 30865 - DNA, 855 bp, Homo sapiens
gtttgatgctgcagtgagctaggatggtgccactgcactccagcctgggtaacagccagaccctgtctcttaataaacaaataagcaagcaggtatggaacattctcagctgggttctttaagctgtctgacaaggtttcgggttgtaatacatgcttctaatgtaaatatgttaaaatgcacataattgaaatggagtaaagtaagctgattatacgttgctttgtgcatttagactattattgtattttattttccatgagattatgaggagattgatgatgttaaaaggtgagaagaaatagagaaccatttcgatttagtctgtagaaaatgtattttcacttttttgctactatctttgtaaatgaaattgcagaaaaattacttagactcccattggtttttttcaatttgaaaatgagtatcttcgaaccaggaatatcttggggtccactgggggctagctgtctagggcactttgctgggaagacttctgagaccacatctgggctctgcaggaaggagtgctgtaaccacctttctgggtctacctgtgatcaacccgggtgtgctgtggacatcagactgaggaggagtgctacatttgctgataccttagtatgcagtattggtagtgtagaagcttagatcctctggaatggcagaaattcccagatttatattgatagggactagatttctggaaaaccatatcactgggaatatagacacccttttttatggagagggaattatggatttttaattttaaaagtctagtgtaatatatagtgtatattgagacatgaatctttccacttatcatcattcactaatttctgttaaaaaaaa

SEQ ID NO: 30866 - DNA, 839 bp, Homo sapiens
ttgagacaagagtcttgctctgtccagcctgggtaacagccagaccctgtctcttaataaacaaataagcaagcaggtatggaacattctcagctgggttctttaagctgtctgacaaggtttcgggttgtaatacatgcttctaatgtaaatatgttaaaatgcacataattgaaatggagtaaagtaagctgattatacgttgctttgtgcatttagactattattgtattttattttccatgagattatgaggagattgatgatgttaaaaggtgagaagaaatagagaaccatttcgatttagtctgtagaaaatgtattttcacttttttgctactatctttgtaaatgaaattgcagaaaaattacttagactcccattggtttttttcaatttgaaaatgagtatcttcgaaccaggaatatcttggggtccactgggggctagctgtctagggcactttgctgggaagacttctgagaccacatctgggctctgcaggaaggagtgctgtaaccacctttctgggtctacctgtgatcaacccgggtgtgctgtggacatcagactgaggaggagtgctacatttgctgataccttagtatgcagtattggtagtgtagaagcttagatcctctggaatggcagaaattcccagatttatattgatagggactagatttctggaaaaccatatcactgggaatatagacacccttttttatggagagggaattatggatttttaattttaaaagtctagtgtaatatatagtgtatattgagacatgaatctttccacttatcatcattcactaatttctgttaaaaaaaa

SEQ ID NO: 30867 - DNA, 429 bp, Homo sapiens
gttttctgctgcttgatacatttctgctattgagagactgatgcatttttcagtttgtcaattgaatttttccactttgggatttctgcttgattctttttactaataattattgcagtctcttttttaaatttataggattctgaatttgttctctgtattatcttggatttcgttgaactttctcaaagcattcagcttgaattctgtctgaaagttcacatatctcttatcacttgggaattggtcactggtgtcctttatttttagttcatttggtgaggtcatgttttctcagatggccttgatgcttgtggatgttcatcagtgtctgggcattgaagagttgggtattctgttctttgtagtctggttttgtttgtacgcattcttttttttttttttctgttttcgagactccatctcgct

SEQ ID NO: 30868 - DNA, 255 bp, Homo sapiens
agaaggtggctccaggtggaggagtggccacctgggctttgctgggttatgtcctttgcttgaatgtcaggacacccttggagtaggagcgggtgcagttctgagggctacgggcggctccctgagtcctgctgcttgacttctattttctattaaatgtgtttcgttgatctttaacatatgtatttgaagacaattttatgtgataagaaatcgaatgtataaaagtgtaaattccccagttcaccttctgaa

SEQ ID NO: 30869 - DNA, 646 bp, Homo sapiens
ggtgtaggattttggctgacccccaaaacaaaagattaaaaattatggatgacttttataaactacaagcaagtcttacaatttccctcagagacaaagatatacttctgcccactcagccctgagtagcttcaatcatggttctctagtaagttagaattatattttctccccgtgacataaatttcagtataaggatcagcaacattgctccagtcctataaatcatatgaggcaaccaaatagtctccaagattctagctcatttgctgttcatctgttttaagattgcatttcaccagtttatttcagggtgtctgccattttggccccagttttgataactgcagattgttgttattttaaagccatttcattgctcagtcttgctggggctggggccctgccttgctcttgccctcactaagctgcattctggtttcctgcctacctcccttggctttgaataaataccacatgctcttgctgtgcttttgctgtgctctgccacctgcagggcccttggtcatactgtgttgagacctccttgcaggagtggccgcttgccctttgcagccagcatttttcagataacttccctccatgctcctgaaacacatctgtctccccactgcctgcctcctct

SEQ ID NO: 30870 - DNA, 394 bp, Homo sapiens
ccttgcagttggcgtttgatttctcactgaacattcattgtcataattatagacactatgtgactatcaagggcataatattctttcatgctgcatttttattagatggcacctcaaagttttcccaagtaggtgggttttaaattatgaatatataccgtggcatagtatcttacttagtattttaataagattcttatttatataacaaattttttttattcctctgtagtgctactttagtctctgagctaattttcatgaagccaatctaaaaatcgtgttatttctaaggatgtggagcgagtgagatgaacagttgtgctgtcatattgcccctccccagtgcagatagtgaatgaggacccactgatttaaaggcaacactgcagcc

SEQ ID NO: 30871 - DNA, 891 bp, Homo sapiens
taaaaaggcagatgatcagagacggctttatacaggaggtgaatttttgtctggcttgacaagataacaaagccaggttgagtgggaagaaaattttgccaaaagaacacaagcagatttatgacagtgggaagatgctttattgaagtgaatcccatgctgtgatagaaattttctgtgaggatttaattcaaactcgatcctttttcaagtatataactatttaaaaagagaaattaagtgaattgtcagctgttggccatctgcctcaatgtgtgcttttgaagcccagcagattgcacattctgtgtaggtggatagcttgaaacctgcagacaactgtcagaggacaatgacttcagagaagattcagtgaatttctaacatcaaacttcaactactgtaatatgcttgtctagccatctctttgttgttgctgttctacagctttattgagatataactgacatacaataaactgggcaaatttaaagtgtgcaatttgaagtttcaacgtatgtatatacctgtgaaatcatcaccacaatcaagatgacgaacttatccatgatcccaaaaagtttccttctgccctttttaaattcctccttcccgcccctctgcttttgtcattatatattactttgcatttcctagaatttcatataaatggaatcatacagtatctactctttgttgttgtctggcttctttcactcagcataattattttgaaacttatctatgctgttgtgggtatcagtagctcatttccttttgttgctgagtagtatttcattgtatgaatgtgctacacgttattgattcaccattcgttgagttgtttccagttttatggctattacaaataaagttgctataattatctgt

SEQ ID NO: 30872 - DNA, 204 bp, Homo sapiens
tgctcatcggggctggactccttggttcctggggacgaagacaaaccctataagtgtcagctgtgccggtcttcgttccgctacaagggcaaccttgccagtcatcgtacagtgcacacaggggaaaagccttaccactgctcaatctgcggagcccgttttaaccggccagcaaacctgaaaacgcacagccgcatccattcg

SEQ ID NO: 30873 - DNA, 2856 bp, Homo sapiens
aggaatgcttgatgaaacattttaaaataagtcatgacatgttagcttgagaatgtattttcataattgtatacttgtttttaactttaaatgtaatttttaatcaggtaaagtttgacacatgtatagctacatacacacatttttaatggtgctcatatatactgtattttttgttgtttagttttacttattgagagtgtcacaacatgaatcacataatcatgattttttttttttacttttactccccaaattattcatgtttcttagatcgtagtcattgagaagtcccaataactctaaacttttgagttataacgtagtaaacttctctttcatctttgtgttagctctgtagtcttaacctggattttaatttttttgtttccaaagtcacaattgaattattcttagataccttaagccactgaattcagttctgtttgactgaaagcaaaacaacgtgacagtttattttcaaacactaacttcttgatattttgttatggtatatctttttattaaatatttattttgactaagctttcataaaatatttgaagctattttaatcatcaagtatggaaaacaaattactattgcattttcctatatatgcatatattatggattaaccagaattgtatcatttttggcctaatgtctggatataaaagataattagcctactatagtattaataaatttttcagttggtttgggcaaatttaaacctgaaaaataggttaaaaagtagttacaaattaaacttactaatttatacctgattttttttcttgaattaaagtacattttaaatgagctttataataccttaaaaagttggttctaatttaaaatatgaaagctctggctatcatcctgggatagtaatttctaattatatagtatttcaaaactatatattttttagttcctttgagataactaatttctaattatatatgtttcaaaaaccatatcctgtattttttttaagaattgttttataaataggtcataagatacaaggtctgcattagaagacccactcttactaggttccctaaggatctgccatagattttttttttttttttttttttttaggtagtttaaagcaagcactgataccagtgggagttggtcttgatctaggagattctgttaagcatccaaaaacaatgcctaatttcagttcttaggttatggcttgtgactccagataaaagatggagaatacctcatgtactgtgacttgaaaatgaattcttaaaattcttaggctctctccatgtatctttcttaaggaaaagtttctgagtgtgatctctcttttgccatagtatcaagtggagggtagttcagaaaagttaataggaaatcttttgtgacagcagactataatagaagtttgagtaatattttaataaatttatataattcaaatgataaaaatgtatcaatgttatccaatgatttttattaaaaaattaccttattattagaactgtgcctattacataaaaagtgctcatgtatttgaattttaaataatttatttaaatcaagaccaccataagtcattaataatttaataattgttttaaatcagtggttttcaaccctcacttcatattagaatcatctgaggacttttaatatggaatccacctcataacaattaagtctaaatttctggaagatggagccatgcttgtttttccaaaagctctttgagtgattctaatttgtagtcagagttgaagaccactgctctaaattagtgcaggaaaatgcttttatttctcccatggttaacttttaaaactagtaatgtacccagttaagttttgatggtttaaattccactaaagaacatattcttctaataactagcatttattacatgaaatttaagagtttaagttccatcaaactagcccttgtgtaagattattatttcttctctataacttcaaaatagatatttcattcaaactgttcaggtgagaaaacataatggatttttttttttttcctctggagctgcctgttcagtgagatggaggaggtgggcacatttaaggtcagttcactaacctatggttcagagttctgatcatatggaagtttggaaaagagagcttatcacaggtttgtatgctggtgaatggatagttttaattctcactgtctcaaaagagaatcagctctccagcagttctagaaaagctttgacaatccccaaggggcagtgttaccttactccttcactgcttcttagaaggtagaattaagtttctggaattgcacctacatgttttcttattaacattcagaattgggaatattaatttttccagtgagtagttttctgaaattggtaacttggagagtaaaataacgtattttgcttttcaattttgtgtttgtttacttttatgtaaaaatttgatatgtgaattacacagttctaataaaacctcatgccttttcattacatctaatttgaactctcaacttcatgttacagaatgctttaaagatgctttaatgaaaagtattaagaaaatatatagatttgtatgtcagtttatacttcagaaatccatatatttgtcatatttatttttttagaaacctcctaattggataactagatggtatttaaaatgaatgcccaaaaatatcttgtacctttgtccaaaagtttatctgttggaagccgccagccattcatgtagagagtttataagaaaataatttaaaattgtatgcattttatattactatggtatctgtgtaccatatttctaagtattcattattaaattggtacttcttaaaacc

SEQ ID NO: 30874 - DNA, 2659 bp, Homo sapiens
aggaatgcttgatgaaacattttaaaataagtcatgacatgttagcttgagaatgtattttcataattgtatacttgtttttaactttaaatgtaatttttaatcaggtaaagtttgacacatgtatagctacatacacacatttttaatggtgctcatatatactgtattttttgttgtttagttttacttattgagagtgtcacaacatgaatcacataatcatgattttttttttttacttttactccccaaattattcatgtttcttagatcgtagtcattgagaagtcccaataactctaaacttttgagttataacgtagtaaacttctctttcatctttgtgttagctctgtagtcttaacctggattttaatttttttgtttccaaagtcacaattgaattattcttagataccttaagccactgaattcagttctgtttgactgaaagcaaaacaacgtgacagtttattttcaaacactaacttcttgatattttgttatggtatatctttttattaaatatttattttgactaagctttcataaaatatttgaagctattttaatcatcaagtatggaaaacaaattactattgcattttcctatatatgcatatattatggattaaccagaattgtatcatttttggcctaatgtctggatataaaagataattagcctactatagtattaataaatttttcagttggtttgggcaaatttaaacctgaaaaataggttaaaaagtagttacaaattaaacttactaatttatacctgattttttttcttgaattaaagtacattttaaatgagctttataataccttaaaaagttggttctaatttaaaatatgaaagctctggctatcatcctgggatagtaatttctaattatatagtatttcaaaactatatattttttagttcctttgagataactaatttctaattatatatgtttcaaaaaccatatcctgtattttttttaagaattgttttataaataggtcataagatacaaggtctgcattagaagacccactcttactaggttccctaaggatctgccatagattttttttttttttttttttttttaggtagtttaaagcaagcactgataccagtgggagttggtcttgatctaggagattctgttaagcatccaaaaacaatgcctaatttcagttcttaggttatggcttgtgactccagataaaagatggagaatacctcatgtactgtgacttgaaaatgaattcttaaaattcttaggctctctccatgtatctttcttaaggaaaagtttctgagtgtgatctctcttttgccatagtatcaagtggagggtagttcagaaaagttaataggaaatcttttgtgacagcagactataatagaagtttgagtaatattttaataaatttatataattcaaatgataaaaatgtatcaatgttatccaatgatttttattaaaaaattaccttattattagaactgtgcctattacataaaaagtgctcatgtatttgaattttaaataatttatttaaatcaagaccactgctctaaattagtgcaggaaaatgcttttatttctcccatggttaacttttaaaactagtaatgtacccagttaagttttgatggtttaaattccactaaagaacatattcttctaataactagcatttattacatgaaatttaagagtttaagttccatcaaactagcccttgtgtaagattattatttcttctctataacttcaaaatagatatttcattcaaactgttcaggtgagaaaacataatggatttttttttttttcctctggagctgcctgttcagtgagatggaggaggtgggcacatttaaggtcagttcactaacctatggttcagagttctgatcatatggaagtttggaaaagagagcttatcacaggtttgtatgctggtgaatggatagttttaattctcactgtctcaaaagagaatcagctctccagcagttctagaaaagctttgacaatccccaaggggcagtgttaccttactccttcactgcttcttagaaggtagaattaagtttctggaattgcacctacatgttttcttattaacattcagaattgggaatattaatttttccagtgagtagttttctgaaattggtaacttggagagtaaaataacgtattttgcttttcaattttgtgtttgtttacttttatgtaaaaatttgatatgtgaattacacagttctaataaaacctcatgccttttcattacatctaatttgaactctcaacttcatgttacagaatgctttaaagatgctttaatgaaaagtattaagaaaatatatagatttgtatgtcagtttatacttcagaaatccatatatttgtcatatttatttttttagaaacctcctaattggataactagatggtatttaaaatgaatgcccaaaaatatcttgtacctttgtccaaaagtttatctgttggaagccgccagccattcatgtagagagtttataagaaaataatttaaaattgtatgcattttatattactatggtatctgtgtaccatatttctaagtattcattattaaattggtacttcttaaaacc

SEQ ID NO: 30875 - DNA, 373 bp, Homo sapiens
ggctaagtggagctgcagacaactttgacccgtttgacaaacttactgtgggctcagctcactgcaacttctgcctcccgggttcgagtgatcctcctgcctcttcctcctgagtagctgggattacaggcatgtgccaccactcctggctaaattttgtatttttagtgaagacgggctttcaccatgttggccaggctggcctcgaactcctgacctcaagcaatccgcctgcctcagcctcccaaagtgctggattacaggcgtgaaccaccacacctggccaaggttagggtttaatgggcacaaagtttgttaaggaagataaaaagtttcagagatggatagtagtgatggttgtacaacactgtgg

SEQ ID NO: 30876 - DNA, 411 bp, Homo sapiens
atggcccgaaccaagcagactgcgcgcaagtcaacgggtggcaaggcgccgcgcaagcagctggccaccaaggtggctcgcaagagcgcacctgccactggcggcgtgaagaagccgcaccgctaccggcccggcacggtggcgcttcgcgagatccgccgctaccagaagtccactgagctgctaatccgcaagttgcccttccagcggctgatgcgcgagatcgctcaggactttaagaccgacctgcgcttccagagctcggccgtgatggcgctgcaggaggcgtgcgagtcttacctggtggggctgtttgaggacaccaacctgtgtgtcatccatgccaaacgggtcaccatcatgcctaaggacatccagctggcacgccgtatccgcggggagcgggcctag

SEQ ID NO: 30877 - DNA, 310 bp, Homo sapiens
attcaatatgtttttaaaggtgtgattcttaaattctttatgattgtttagatttctatatcttggtaacatgaatacacacttaatgaaagatttcagtaatttttgatttgggaattaatcatagtgggaaaaactgtttaggaaaacatgtcagtggaaattaactcgccacagtatgtagtgttagggaatagcttctgttcggcatttgatttgagtgctgtattctgacatttttcaggaacaaatacatgtgattcatcttctataaatatttgcagtttcttcaagttgaaatgagaaaagc

SEQ ID NO: 30878 - DNA, 123 bp, Homo sapiens
aggagatggagagggtgctgggatgaagaggcagaaggcagcaatgcctcagggggttacacacaaccatttttgtcttctctttccttttcccaccagcaggcatgcaggggcagagctgcc

SEQ ID NO: 30879 - DNA, 951 bp, Homo sapiens
atgcctggtcagaactacagaaccatatctgaatttatcctctctggcttctcagccttcccccagcagctcctgcctgtcttgttcctgctgtacctcctgatgttcctgttcacattgcttggcaaccttcttatcatggccacagtttggattgaacgcagactccacacacccatgtacctcttcttgtgtgccctctccatctctgagattctgttcactgttgccatcacccctcgcatgctggctgatctgctcttcacccatcgttccatcacctttgtggcttgtgccattcagatgttcttctccttcatgtttggcttcactcactccttccttctcatggtcatgggctatgatcactacgtgaccatctgccacccactgcattacaacatgctaatgagtccccgtggctgtgcccatcttgtggcctggacctgggctggtggctcggtcatggggatgatggtgacaatgatggtttttcacctcactttctgtgggtctaatgtgatccaccattttctctgtcatgtgctttccctcttgaagttggcctgtgggagcaagacatcatctgtcatcatgggtgtgatgctggtgtgtgtcacagccctgataggctgtttgttcctcatcatcctctcctttgtcttcattgtggctgccatcttgaggattccttctgctgagggccggcacaagactttctccacttgtgtatcccacctcactgtggtggtcatgcactatagttttgcctcccttatctacctcaaacccaagggcctccattctatgtacagtgatgccttgatggccaccacctatactgtcttcacccccttcctcagcccaatcattttcagtctaaggaacaaggagctgaagaatgccataaataaaaacttttgcagaaggttctgccctctaagctcctaa

SEQ ID NO: 30880 - DNA, 479 bp, Homo sapiens
gcaccaccatgcccagctaatttaaaattttttttgagacaggttctcactttgttgcccaggctggtctgaaactccgtgccgccaaggtaggcggactgcttgaggtcaggagttcgagggcagcctggccaacacggtgaaacctgtctccactaaaaatacaaaaattagctgggtgtggcagcgcatgcctgtaatctcagcttctagggaggcctgaggcatgagaattgcttgaacccgggaggcagggtttgcagtgagatgagatcgtaccacctcactgcagcttgggcaaaagaacaagactatgtctcaaaaaataaaaataaaaaagaaatcttatattcattagtagtcactccccattcatctccacaccttacccttagccctaggcaactactaatttagtttctgtatctgcagatttccttattctgaacttttacataaattaaatgatatgtgatctc

SEQ ID NO: 30881 - DNA, 462 bp, Homo sapiens
atgatctccaggtataaggaatgcacaaattagttttcctgtgacagcatgcagagcacttttccaagccccgtcacctgtccttagttcctctgaactatacagaggaacaaatcaatataaatgcagaagagaaaagatgagatcagctgattttggtgttgatatgggtaatatctgatttacattcagttttcatgtgggatctctgtgcctggcttggtttaatgattcaaagtgacaatacagtcaacttctgagaaaatgatctatggaaaattgaaagtttaaaatattttcttcctcctaactttgaagaggacttgtttcatatcaaatctgcctgttcatctgcctgtccgtccactcactgtttatccatggatcttggtgttagcttctgaggtggtaatgaattcaaaacccttctgttcctactctcatattaaaggttcaaaaatc

SEQ ID NO: 30882 - DNA, 339 bp, Homo sapiens
  misc_feature (283)..(283): n is a, c, g, or t
  misc_feature (322)..(322): n is a, c, g, or t
caactaataacagaaacaaaaactgtgcctatagccgagtgggtgtggtaggagctcttttctgtattatcttgctcttctttaaattttgaattctttgcaccacacaataaatgaacgtaccttgtattattgtaaatattcccccatcactaacatatttgtgtttggtttctgttcagccctcacggcagccctcacctgagttgtggttgttcactatctgtactccctcagatgaagaaactaaggtgctaaaatgcatatgcccaagcataccaancccctaaggaaaggaggtaacatgtgcctaggcaatgtngcccctggtgttaatac

SEQ ID NO: 30883 - DNA, 345 bp, Homo sapiens
tgtatcctgtaactaacccagtatagaacagtaacactgtttacactgattggaaggaagaaggttcatcctggcggtttatgacattgccagaatggcttgaatccttgagggtgggtgacaggtagagtggataataaatgggcctcctggttcacagagcctgagaacctctcacccaatgggcacctggtgcccctgcagagtccagtctaagaggacaattttttttttcagatgtagtcttgttctgttgcccaggttggagtgagctgagatcacgccgctacgctccagcctggtgcgacagagtgagaccccgtctcaaaaaaaaaaaagtcgacg

SEQ ID NO: 30884 - DNA, 419 bp, Homo sapiens
tttttttttttaaatgagatagggtcccattgttttccaggctggagtacagtggtgcaatctcaagtcactgcaacttctgcctcctgggctcactccatcctcccaccttagcctcccaagtagctgggactacaggcatgcactaccacacgcagctggtttttgtatttttagtagagatggggtttcaccatttcacccaggctgagaatacactttttaaacttagagatacaaaattagaattgccagtcataggttttcttggaatacacatgctacaataatgtaggagtacctgataagaattcagtaaatatttgttgaatgaaggagagaatgattgaatagcagagattcctaggtctgtggtattggcacttaaatactttcataattttatccagaaacaatcc

SEQ ID NO: 30885 - DNA, 283 bp, Homo sapiens
ttaagcaaacatttatgacacccttcctagacacaaggacactctgccccggtgctctctgtgggatcagctctttctttggctccttgcgctttggtttcatttctgaaatgattttttatcttttctttaaatttcttttcttagtctgtcaattcttatttcacatgctcttactgtctagccatctctgctctgaatgtctttacctccgctttgtgaactcactgcttaactaagttacaaaatgaatgttgaaagtactgccaatttttctccactt

SEQ ID NO: 30886 - DNA, 411 bp, Homo sapiens
gaccatgttgagccctacttttgttctgtgggatgttggatatcccttatacacctatggctccatcttcatcgttattgtaattatctggcaagtgaaaaggagccaccatgaattgaacttggaagttgaaaggagctgctgctggcgtcaccaaaaagtcaggcaaagagctagagatgcagcatcaacaggtgaagtcccaatctctcctctgactcccttccactgtgggtgtttcctatgaatcctgtccctctatgacccctggagccaagagccaggtgctctgccactgaagactccagttccccagactgaaacttccatgggtgggaaatcttaccttggaaacgttccaaaattctctacattattcccatgggaataaagaattgaggaaataaaaca

SEQ ID NO: 30887 - DNA, 488 bp, Homo sapiens
gaccatgttgagccctacttttgttctgtgggatgttggatatcccttatacacctatggctccatcttcatcgttattgtaattatctggcaagtgaaaaggagccaccatgaattgaacttggaagttgaaaggagctgctgctggcgtcaccaaaaagtcaggcaaagagctagagatgcagcatcaacagctaggagactttctcaggaagaagatcagaagccacaagagctgttctctgtcatgaaaagccagggctggcttcccccagagggaagtgtgcggcgaatcctatgtacagatccctgttgccaaatttgcaatgctatggctctggagattcagcagttgctggcggatgagaatgactagatctccccaactttgtcgaggagtccatcacaggtctcctcttgcctagagatcttgtctctgtctagtgtatcctttgagcagagtatagagctccattccagaaatatca

SEQ ID NO: 30888 - DNA, 505 bp, Homo sapiens
atcctgggtagttgacaatggctaatagaattaggtggaaagatcatgcatccatctatgtactgcacattgcatactgaaatctgaaagaatgtttttgcaaaatgacttaatcatacttctctgagatcaaaatctaataacattactttcataacgtgaatttgttctatgttgacttttagtacttgaaatacaggcttaattaaaaatttgttggccaggtgcagtggctcacacctgtaatcccagcattttgagagattgaggtgggtggattgcttgagtccatgagttcgagaccagcctgggcaatatggcaaaaccccgtctctactaaaaatatacaaaaaattagctgggagtgatgctgtgcactgtagtcgcagctactcaggaggctggtgggggaggatcacatgaactcaggaagttgaggctgcagcgagccatgatcacgccactacactccagcctgggtgacagagcgagaccctgtctcaaa

SEQ ID NO: 30889 - DNA, 364 bp, Homo sapiens
gcttaaaagacattgataaatttagtttgactacaaacaggtggagttttgaacattagaaaatgctccacagccgggcatggtggttcacgcctgtaatcccagcactttgggaggctgaggcaggcagatcacttgaggctgggagtttgagaccagcctggccaacatggtgaaacccctgtctccagtaaaaatacaaaaattagccgggtgtggagatgcacgcctgtaattccagctacacgggaggccgaggcaggagaatcacttgaacccggagagcagagtttcagtgatctgagactgtgccactgcattccagcctaagcaacagagcgggactcttgtctctataaagaag

SEQ ID NO: 30890 - DNA, 503 bp, Homo sapiens
attctccctccttctcaatttttcccatttaaggaaaatcttctggccctgctatttctttcttcttcatgtctctccctctcagatacaacgcattctcttcattcccactgtcttatcctggtcctcatcagctcaaactgtctcccaaccggcttccttggcccttacaggtctgtcccttcctcaagctatgccttaatgatgcgaatcttaaagcatttttgctagtatcactcctcaagctcaagaagcttcagtaactccccactatctcaaagctctccttaatctagcctcatctctggatccaacctttacctctaacaaggcaggggctttccaccactcttgtcaaaatgagtctcttgcatccttctcatgacatcagctgtcactcacctccagtcccacatttcctactgcctgctcaacatttcactggatggcctgctactgcctccaataaaataatgatcaatcctacttctgtgcctctgatt

SEQ ID NO: 30891 - DNA, 529 bp, Homo sapiens
ctgctcaggcgctccttggggtcgcgcatggtctcggacagggtttgcaaggacttcgaagctaaccagtttggagccataaccctttcgtacttgccaaaaaactctgggcaagactcttgaattttgagccgcagtattctcgttcataaggtgagaataaaaacatcacctagggttgatgtgaagagagatgaaatcattgtgaaataggagagttattgctttcaaccaatgacattttctggaaacgtgctggagatatggctgcagcagtgacgcctgcaaacgacgttcctgtcatcatgatgctgacattttaattgggaagcagattgaaacgataactaaggaatttgacaggagcatttagtaggacctgtaaagaaattaaagcaggtccgaggtggagttttgtaaactatatgcctgaatagaactttctgtttccaagggaattgttacagttggagacatgtcaattattacaataagcgtcaagggcaataacagaggtgttttaaagcta

SEQ ID NO: 30892 - DNA, 317 bp, Homo sapiens
atttatcacataaaatctgtttctcccctttccccaattctcagaaactgtttatcctagaaatctaattcccttaccagatagtgccatctgggtgactgggacacaaaaatcacatgggttctttctgtagcttaaacagattcttacaagagaaaatacataactaaataatcacttaaactaggcatatacttggaaaaatcatctataattcctgtaaccgagaataaacaattgttgacgttttgtcctgtttgccaccagttttttcctgtgtattaagctttaaaaatatacgctgattaagtatatta

SEQ ID NO: 30893 - DNA, 161 bp, Homo sapiens
taatcatcaatggttccccccattctacaacatactgatgcactctggtatcttccaataaatattcatttctttctctcctcgagttaaaggagtgcaagggctttgttttattttttaaatttttacttttttttttgagacaaggtctcactctgtca

SEQ ID NO: 30894 - DNA, 367 bp, Homo sapiens
tttttttttgctttgttgattatttaaaagtatgttatttagtttgcaatgatttgggaatttttacagatatttttctattgtcaatttctaattaatttcattttagtcagataagccatgttttatgacttgcatcattttaaacttaccgagacttgctttatggtttagaatatatctaattcaatacatgtctggtgtgtatttgataaaaatctattttatattggtgttgattgcagtgttgtgtaattttcagttaggtcaaattgtgtgactagttcagattttccatagtaatattctatctacttattctagattttttagatatggcacaaagaggaggagtaattttaaaggt

SEQ ID NO: 30895 - DNA, 1230 bp, Homo sapiens
caacagtgtgtattctggagttaaaacattcattgagttcttaatgatggttattatatttctcagtttatgagtttctatttggttcttttctaaatttctttgctaagatgtttaagtttagcttgtccccttcacaacttttgtaaagttagtgctggttcccatttatgttgctttctttcccctggtgcctgcttatcttagctagacgttatattagaaaaaattatttgacaaaattgtttgaggcttgggtgatatttttctacataaagcattttcttttttttctttttctttttgtttttttttttttttttttttcttgatgaagtccagctctgttgtccaggctggagtgcagtgatgcaatcttggctcactgcaacttccaactcccgggttcaagcgattctcctgcctcagattcctgagtagctggtaatacaggtgtgtaccaccatgctgggctaatttttgtagttttagtagagatggggcttcaccatgttggccaggctggtctcgaactcctgatctcaagtggtccacccacctcagcctcccaaagtgctggaattacaggtgtgagccaccacacccagcaataaagcattttcatttgcttctattgagacaataccctagaagttttgcagtggcagtgtgatgaccaatgaggtttatctgaggtgcgattattgctaattgaagcagtgccctggaggtactagaattccttatcagtttcatacaatttcagggcttgattttttataggttacccagacaattcattcaagggctgctttacttatggttcacatgtcatgtaaggagcagtggttttgagcataaactctattcctgggatttatcagataccccacttttgacaggtcttggatttcacttttcagatcctttttaggattggcaaatcgctttcttcactgtcctctagcaagacaaaaagtgattcaactccccagcactttggaaagccaaggcagaaggattgtttgaggccaggaatttgaacctagactggtcaatatagcgagactctgtttctacaaaagaaaaatttaaaaaattagccaggaatcgtgctgcatgcctgtagtcccactacgccggaggatgaggcaagaggatcatttgagcctaagaggtcaaggctgtagcaaacctggatgacagaacaaggccctttctaaaaaaaaa

SEQ ID NO: 30896 - DNA, 414 bp, Homo sapiens
ccattccaatgtaggtccctcagaagccaaccctgagacagggattgagtgctagcagatattttaggaggtaatcccaggaagcaacagtggcagtgtgagcaagtgatacagggtagggaaggggtaagttgagaatgccctaatgggcgggtgaacactgtggacaaacagaagctcagtcctaatgagggcctcggggccaccccatacagcacacttagagttttctatccatggttcgaggaagctgaggtctttataaccactaccactcatcattgtttgagggctgctcctagggaaattaattcccttgcacctctagcacgcttctcatatagacagaacatgctcccagaccagagaaggacctcagccggaaagttctctgcagcacaaagtcctccaagt

SEQ ID NO: 30897 - DNA, 434 bp, Homo sapiens
acaaaatcttacattttgaaattgaagatatctaggtggtagcaatgaagtggggagaagtggtaggattatggatttatattgaaggtgctgctgagagtatttgcctacatattggatataagtgtaataaaaatagaggagtcaaggatgactccaaggattttgacttgaattgctggaagagctctaatagatcaattaaacaataatgaacacctcaatgacaaaaagcaccaaaatagaattgaaatttaacaaagagtgatttttctttttaagcagtattttctagtacactttaattgaggaaaagtgcacaaatcataagtatacaactgcagaaactttcacaaactaagcaaatacagcatgtagccagaacctagatcaagaaacagaacatcacctgcactcaagaagcactccaaaaa

SEQ ID NO: 30898 - DNA, 319 bp, Homo sapiens
ggtcgacttttttttttttgccattcaaaagtcctaagagcaatcaatggcaaaaggaaaaataatacaacataggtctctcaaggatttaatttcatgttaaatatagtcccattctcataattactaatattgttttggtcagttgtgtacgttagtagtggtagcttaaatcagaagaacccttgaagagcctgtgttgaaattgaatccttgagagacctatgttgtattatttttccttttgccattgattgctctaaggacttttgaatgatttaagtgactggtgactggattcagttatgcataaagcatt

SEQ ID NO: 30899 - DNA, 376 bp, Homo sapiens
cgccggctgctgcgaggaggaagcagaggaggaactggcttgagggaggcgcagaattttggagtgggggacgtggttgaaagtacaagtaaggccgggcgcggtggctcacgcctgaaatcccagcactttgggaggccaaggcggacggatcacgaggtcaggagatccagaccatcctggctaacatggtgaaaccccgtctctactaaaaatacaaaaaaattagccgggcatggtagcgggtgcctgtagtcccagctactcgggaggctgaggcaggagaatggcgtgaacccaggaggcggagcttgcagtgagccgagatcccgccactgcactccagcctgggcgacagagcgagactccgtctcaa

SEQ ID NO: 30900 - DNA, 237 bp, Homo sapiens
ggtagatttaacgttcttctcacgctctgcagtcagtttgacttgagtctatgagtttttccagcaaatgaagaatctacttctacttcctgaaaactcttctaactagtctttccccaggtttctttctttctttttttttttttttaataactctaagtgctaccatgaagacttcagaacagttcaaagaatccttccaccttcgactgtggggataagagtcaggggagggga

SEQ ID NO: 30901 - DNA, 477 bp, Homo sapiens
cagtgcagtgttgtgatctcggctcactgcaacctccaacctcctgggttcaagtgattctcctgcctcagcctcctgaatagctgggattacagacacatatcaccaagcctggctaattttttttttttgtatttttagtagagacagggttttaccactttggccaggcttgtttcgaactccggacctcaagtaatctgcctgcctcggcctcccaaagtgctgggatcacaggcatgagctgccactccgggctccctgtgaatgttttttgaatgagttgtatgtgcttaaccttaaacgcaacttttttttgagaatttgaattgggaagaaatcaaaataattattcttatatgttatactagctagtttctttgtgatttgcaattattttgaatatgttgtatttgaataaactaataaaccgacaggataatactgtgttgttttacctacattgtgtctaaaaaa

SEQ ID NO: 30902 - DNA, 424 bp, Homo sapiens
acacacacacgcagagaatatatacttttctgggcaaagtatctgtagcttccctcaaactctcaaatgtgtctgtgacccttaaagtttaagaacactggtctagagagaacccaaagtgttgtgggccactgtgctcccttggccaccagcctctcagatgccagaatcttgagagagcacaccaggcctctagtgtttctgcttaggcatgaactgggatacagtatcaaatattgctgaagttcacaattataactataaatgtacagctgtcctttgggatgccccaagtacttttatttatttatttatttttttgagatggagtttcgctgtgttgcccaggcaggggtgcagtgagccaagatcgcgccgctgcactccagccttagtcacagagcgagattctgtctcaacacaa

SEQ ID NO: 30903 - DNA, 218 bp, Homo sapiens
gaaaatataggacttgtctgactttgggaaggaagaatctcttaaacaagatacaaaaagtgctaatcataaaaggttgataaattcgtctacattacaattaatatctcttcagtgaagtacatcatataatcacgaactgggaggacatttgaagtgcctataactatcaaagagctggtcatttggaataatttgagaactcctacaaatcaata

SEQ ID NO: 30904 - DNA, 399 bp, Homo sapiens
tgagatcctaatctaatgctcctcctacactgttgcctcatgaaatgaaaataaggttggcatagactcatttgtcaaagatgttcattcaaacattatttggtgcttactatgtgttaggcactggggattcagttagtaccctcatggagattgtagtaagtggggaatatagtctatctgtgattatctgagttaagaggaatgattaaaatgattgaaattaaagttctttatgagttttctgatccatagccaacagaacataaaaagttgcaaatgtggccaggcgcggtggctcacacctgtaatcccagcactttgggggtcgaggtgggtggcccatgaggtcaagagatcaagaccatcctggccaacattgcaaaaccccgtctctac

SEQ ID NO: 30905 - DNA, 808 bp, Homo sapiens
aatattgcactatgaccgtggaggtgagcgagcacttcatggtcttttgtgagtaggttagaagggggagcctttggttgttcagccagcttgtctttttcctcaatgagagcaatgttttccaaactatttttggcttcagatacctcatagtgactaaaagtgataaagccatatggaagaactttgcccaatctcctagctctgtccaacaaggtcatgggcaatgacaatccaataaaaactagtggtgccactaaaggatcccgagggaacaggctattcaagacagtggcacaaaagctaaacttaggtttaaaaaaaaaatgatcactgattttcctcccttttaggtctttgagaaggaagtaaaggtgttgactttttgataaggttttgtttttgtttcaattaaactttttggagaataccattgtttttcatttgttggtttgtaaatcttgaaaattatgagaaatgtagattattgaaagaaaaaattagcaatacagattataaaaagaagaaaatagcaatcatgaatagcctcaatacccgggattaaacattgttaacaatgtagcatatttccttctagtcttttttcttatgtactatttcttaagtggctaaattatatactataaatagtcttgataaaataaatttgtaagctgtccttagattaagcaaggaaacaaaatcttttagttgtaaagttaactatggagatgatcagactcagggtatttatttagcagaaataccaaatgtggaattctctggaaaattcaaaaccatcaatatc

SEQ ID NO: 30906 - DNA, 434 bp, Homo sapiens
tagttatctattggtgttcattcttttctctggtgacttacaagttcattaagtatggtagtgtgcttaggaaactcttaccctaccccaggattacctacaggattactcactctttcttacgctctgactttcttatagttacatttaattctgtattcacttggaaatgggtagagaagaaggatatggtgtgaggagggaaactacctcctttcttcccctccaaaattacttatttgacataatacagttattgaataattcatactttcccccattggtttgaaatgcaaacttcattatgtattactttgttacatataatcacttaagaatttctcaggtctcttcagtgattatatgtaacaaagtaatacataatgaagtttgcatttcgtcgagcggccgctaatttagtagtagtagtaggc

SEQ ID NO: 30907 - DNA, 1056 bp, Homo sapiens
ggacgagggtaaacggaaacagccattaacgttaatgctaggaaactctgttgtaaaagggagcagagtaattggcaacagctaagagggatcttaggatctttttaaagatgggggatatttataacatccttgtatgatggaaactaaataaaagagagttttctttccttcctccaggtttcagggctctgaatcctatttcaattgtgagaatgctaaaaaggtacatctgtgatgtgacaggtaagatggggtcctttggagagtcgcctgcttcttctttctggcttcagggagagagagaatagcaagggcaaggctcgctgggcagcttaaatgtggaactgagtttgaagaacatgttcttcatgcaccctcacagtccacaaaatgactttaaccatctttttattcccctcccactgttccctcagctggagtttcagcagttaaagatataaagaaaaatgtttaaattctaaagagcagaaagttcaatagaaataaaacttctgggacaaagcagccccagttgcaggcagaccaagtactgctgattaccagcaagaaagccttcattgtaacagggattttaccctttctttggcattcctaagtaacaaaagagaagtgctgcaaaccaacgataattagcaatagttttattcacaccaaaatcattctaatatggtgcttgaaaaagcaaaataatcttttcacttaacagaaaaaaactgtactatttttgagcaactgaaagtcacgtcaatatattaattgaatgacctataattgctgcattgttctgatgtttatcttagaccctgcatgagtggtttttccttgatgctaatcccattagaagtaaaatggaccgcagttttgaatctctctgttccttaaaaaaaaaaaaaagttaattgacaagctgtttaatatgagatgccattttacagatgaccagattgaataataaaagaactaagggggaaaatgagcttttacctgtttcacaggttttaatatatatatattcaaaaatttttctaaaag

SEQ ID NO: 30908 - DNA, 482 bp, Homo sapiens
tgagacggagtcttgctctgtcgcccaagctggagtgcagtggcgtgatctctgctcactgcaacctctgcctcccaggttcaagtgattctcctgcctcagcctcctgagtagctgggactacaggcgtgtgccgccatgcccggctattttttttgtatttttagtagagacagggttacaccattttagccaggatggtcttgatctcccgacctcgtgatccactcgcctcggccccccaaatactgggattacaggcgtgagccactgcacccggcctggaacatgtatttcttaaagggacaggtaaagaagaagagcctaaggagtagccaggagttaaactaagaatctagaatgttttagaagtcaaaggaaaagtttcaaagtaaagtagtacagtgctatagtaaggtgaagatataggctggaaaatatccactgaatgtgaaagaggtattctcaccaacatctacaat

SEQ ID NO: 30909 - DNA, 476 bp, Homo sapiens
acaactggattttaactgcgacttgggaacagaatgttgcaaatcgcgtggctggatgaacttttcagcgtctccattcctgacacatttccacagaagccctttcagctgaaggtctcagacctcagctgcctccttcccaacgagaatgcattttaatagtggtacaggcccgtgggtctgtgttttcacagagaactgccttggctccagggccaccttggccgatattcattttccaaagataaaataaagcagcagacaactagcatgcaagggcatgctattggaatcaggtgtaatagtaggaattcgggagtgagcagggctgtaggccatccactcaggggttctgaaggctcttacaaatggggaaattggttccaagaaaatgaatagcagagattccttaggccacattgcgaacatattggcattttgttcatttttgctctttttgataaagcaaaaaaaaa

SEQ ID NO: 30910 - DNA, 516 bp, Homo sapiens
ggggccagccaatgccacattacaaattagtgacgttgggccctggtacttcagtaacagtgacaacccccctcagtttctttcagggtcctcctgtgccccttatcttttagagattaagaccacagatttgggggcaaaattttcaggattagaacctcagttctgccattgccatttagtagccagtgtaactttaggtgagtggctttatctctctctcttttttctttttcttttttttgaaagtaaagaaataaagaaataggcagaacacccggctttaatctctttatgcctctgctctctcatctgtaaagtggggataatatcatagtagcatccaccttaaagagttattgtgggaatttaaatgagttattagaacagtacctcgcacgtagtaaacgctgtggacaggcagtattaacaagggtttcagggaggcatttagaccacacaataggctgagagacagaagtgatgagtttggtgccaatcataatatagaaagac

SEQ ID NO: 30911 - DNA, 372 bp, Homo sapiens
ctcccctccccaggccccagcccccacccccagccagcaggcaaaccctgaggtgctgggatgaaaaactgccccaggagaggtttgctgtcagctgggtcatgcagaccttctcacatagtggctgctaggagctgaattatgccccctcctaattgttgaagtcctaattcccaggacagaatgtggctgtggttagagacaggctctctaaagagataattaagttaaaataaggtcattaggatggccctaatccagcatgactggtccgtataggaagagatgatacttgggaggctgaggtgggaggatcacttgagtccaggagtttgagtcctgcctgggcaacatagtgagaccctgtttctg

SEQ ID NO: 30912 - DNA, 543 bp, Homo sapiens
actggaaatactgtgtgtgagacatgagtaggatatgggttttatcttggcttcctggagtgtagttttgaggaatctggggccccattttctaccgtgttgcctatgggtttaggagggagagcatttatttatgcttgggtatttgttatctctgggctttttggaaattactaaagatgaatggtaaagtcagtgtgggaaaccttgtggaggagaaataaatagccagtgtttataaagggtggttattttttagaggaattgttatcaaatgatagttaatgcttattgtagcaaaatttaagtagtttgaatttctttgggttgatctttttttaaaaaaaaaattaggataatccaaacctttttaaagttctaaattggcaggcagactacttgttcgttcttttgattgttcattaatagcagatgaatcctagggcagatttttaatattttagaaacatattttcatgtatttatgaacattaatcccaagatatttatatgaattttataaggaaggcagtgttacaagat

SEQ ID NO: 30913 - DNA, 320 bp, Homo sapiens
gttttttttttttagaagaaataaaaaaatttcagtgttaatgactgtttacattttcgtgaattctttccaatatttgatatttatacatatataataaaattatatctacctacctatctgtctacctatctatctgctttctagtctccctttttcttttacttagctcagatcatgaagatttttttccatgtcaataaatatatttcttctcttttctttttcttttcttttttttttttcttttttttgagatggagtctctctctgttgcccaggctggagtgcagtggtgcagtctcagctcactgcaacct

SEQ ID NO: 30914 - DNA, 141 bp, Homo sapiens
tcagcagctgttttacatagaatgactctggttctggtgtgcagggaatatcaaaggtcaccggcatcacaggtcatatgtcctaatgaggaacccgggcccacgggagcagcttgattcttacaggttgtctgggagctg

SEQ ID NO: 30915 - DNA, 548 bp, Homo sapiens
ggggggactttatttagaaacagtttataactcaccaagataatcaattcaaccacacctaagctgacttcaacgatcatttattgtctgccaactatgcacctgtgacatgctggcagtcatattattctatggtcaaatatcacaaaattcacttaagcccaaaaatggattactcttgatgtcttctggccaagaaataaaaggacgcctgagccaccagacttgtcacacctggtaacttaatgtttgacaatgtgtgcacatttggattccttccaaaacaattcttttagcccgatccatcaagaaccctctatttacctttaagctattaaaggtaaagcattaacttgaaacaaaataatgaatcatagaatcttataggaagaagggaatttagagctcacatttcctgttaagaggagacttagatcacataaattctgtaacttgcccaattaaagacatgtcaacaacgttcttttaaaccatggaaatgtcattaagagaactaaaattaaaatgtttgcttgagaaaaagaagt

SEQ ID NO: 30916 - DNA, 268 bp, Homo sapiens
ccctagaagaaaatctaggaaacaccatcctaaacattgaccttgggaaggaacttatgactaattcctcaaaagcaattgcaacaaaaacaaaaattaaccggtgggacctaattaaactaaagagcttctgtatagcaaaagaaactatcaacagagtgaacagacaacctccacaatgggagaaaatattcacaaactatgcatccaacaaaggtctaatatccagaatctaaaaggaacttaagcaatccaattaaaaaaaaaa

SEQ ID NO: 30917 - DNA, 4334 bp, Homo sapiens
cgggcagcgtggaccccggatgagttgcttttaggcttgctggcccgcggggctgtccaggcacgcgaggcccctcaacaaaatgcttcaacaagttccagaaaacataaattttcctgctgaagaagagaaaatcttggagttttggactgaatttaattgttttcaggaatgcttaaagcaatcaaaacataaaccaaaatttaccttctatgatggtcctccttttgcaactggactgcctcactatggacatatacttgcgggtacaattaaagatatagttacaagatatgctcaccagagtgggtttcatgttgacagaagatttggatgggattgccatggcttacctgtggaatatgaaattgataagacactgggaatcagaggaccagaggatgtggccaaaatggggattacagagtataacaatcagtgccgagcaattgtgatgagatattctgctgagtggaagtctactgttagcagacttggccgatggattgactttgacaatgactataaaactctgtatccacaattcatggaatcagtctggtgggtcttcaaacaactctatgataaaggccttgtttatagaggtgtgaaagtcatgcccttctctacggcatgtaacactccactttccaacttcgagtcacaccagaattataaggatgttcaagatccttcagtatttgtaactttccctttggaagaagatgaaactgtatctttagttgcttggacaaccactccctggactctacctagtaaccttgctgtgtgtgttaatccagaaatgcaatatgtgaaaattaaagatgttgccagaggacgattactcattttaatggaagccagattgtcagccctctataaattggagagtgactatgagatccttgaaagatttcctggtgcctatcttaaaggcaagaagtacaggcccctgtttgactatttcctgaagtgtaaagagaatggcgctttcactgtgcttgttgacaactatgtgaaggaagaagaaggcacaggggttgtccaccaagctccttacttcggtgctgaggactatcgggtctgtatggactttaacattattcggaaagactcactccctgtttgccctgtggatgcttcaggctgcttcacaacggaggtgacagatttcgcaggacagtatgtgaaggatgctgacaaaagtatcatcaggactttgaaggaacaaggccgacttctggttgccaccaccttcactcacagctaccctttttgctggagatcagacactcctctaatttacaaagcagtgcccagctggtttgtgcgagtggagaacatggtggaccagctcctaaggaacaatgacctgtgctactgggtcccagagttggtacgagaaaaacgatttggaaattggctgaaagatgcacgtgactggacaatttccagaaacagatactggggcacccccatcccactgtgggtcagcgatgactttgaggaggtggtatgcattgggtcagtggcggaacttgaagaactgtcaggagcaaagatctcagatctccacagagagagtgttgaccacctgaccattccttcacgctgtgggaagggatccttgcaccgcatctctgaagtgtttgactgttggtttgagagtggcagcatgccctatgctcaggttcattacccgtttgaaaacaagagggagtttgaggatgcttttcctgcagatttcattgccgagggcatcgaccaaaccagaggatggttttataccctgctggtgctggccacggccctctttggacaaccgcctttcaagaacgtaattgtgaatgggcttgtcctggcaagtgatggccaaaaaatgagcaaacggaaaaagaattatccagatccagtttccatcatccagaagtatggtgctgatgccctcagattatatctgattaactcccctgtggtgagagcagaaaacctccgctttaaagaagagggtgtgcgggacgtccttaaggatgtactgctcccatggtacaatgcctatcgcttcttaatccagaacgttctgaggctccagaaggaggaagaaatagaatttctctacaatgagaacacggttagagaaagccccaacattacagaccggtggatcctgtccttcatgcagtctctcattggcttctttgagactgaaatggcagcttataggctttatactgtggtgcctcgcctggtcaagtttgtagatattctgaccaattggtatgttagaatgaaccgcagaagattaaagggtgaaaatgggatggaggattgtgtcatggccctagaaaccttgtttagtgttctgctttctctttgcagacttatagctccctacacaccttttctcactgaattgatgtaccagaatctaaaggtgctgattgaccctgtttctgttcaggacaaggacacactcagcattcactacctcatgctgccccgtgttcgagaagaattgattgacaagaaaacagagagtgcagtatctcagatgcagtctgtgattgaacttggaagagtgatcagagaccgaaaaactattcccataaagtatcctttgaaagaaattgtggttatccatcaagatccagaagctcttaaagatatcaagtctttggagaagtatatcattgaggaactcaatgttcgaaaagttacactgtctacagataaaaacaagtatggcattcggctaagggcagaaccagatcacatggtcctggggaagcgtctgaagggagcctttaaggcagtgatgacgtccatcaagcagttgagcagtgaggagctggagcagttccagaagactgggaccattgttgtggaaggccatgaattgcacgatgaagacatccgcctcatgtacacctttgatcaggccacaggtgggactgcgcaatttgaagcacactcagatgctcaggctttggtcctcttagatgtcactcctgaccagtcaatggtagatgaaggaatggctcgggaagtcatcaatcgcatacagaaacttcgcaaaaagtgcaatctggttccaactgatgaaatcacagtgtactataaagcaaagtctgaaggaacatatctgaatagtgttattgaaagccacacagagttcatatttaccaccataaaggctcccttgaaaccatatccagtttctccatcggataaagtccttattcaagaaaaaacacagttgaagggatctgaactggaaattacactcaccagaggatcttcccttcctggtcctgcttgtgcatatgtcaatcttaacatttgtgcaaatggcagtgaacaaggtggagtattgctcctggaaaatccaaaaggtgacaataggttggaccttttaaagctgaagagtgttgtcactagcatttttggtgtgaaaaatacagagctggctgtcttccatgatgaaacagaaatacaaaaccaaactgacttactgagtcttagtggaaaaacactttgtgtgactgcaggatcggctccctctctgatcaacagttctagtactcttctttgtcagtatatcatcagacactcctgaatgcaaagccacaagagtgtttaatggggacagtgggcactctcctgcttgaaaacccacttgggcagaatggactcacccaccaaggtcttctgtatgaagcagccaaggtgtttggccttcggagcaggaagctaaagctgtttctgaatgagacccaaacgcaggaaattacagaagacatccccgtgaagactttgaatatgaagactgtgtatgtttctgtgttaccaacaacagcagacttctagcatgtacttatcaatgttgttcggtcagcccttccctaattacacctatcccctacacatacatgcacatagacacacacatgaacacactgaagatatttccttcaggtgtgtgtaaaatatgctgcttggattgaaattcaaatgggattgattagtcaagtaacttgagacctcacagtaatcttcacacttaaccttagacacctatgcagtcatgttgggagcaggttacaatgttacttcagcccacagtttatttctattcttgagttcttaagtacagaagatagaagtgatttaaatggcatagtatatatatcattttctggccttttaaaatttatttgagacctcttgatgaaatggacatattatatatttctgccacctggattttcctggataatttgatggaatattttaagtttcagtaaatcagaacaataaacaaactcagatat

SEQ ID NO: 30918 - DNA, 2017 bp, Homo sapiens
cgggcagcgtggaccccggatgagttgcttttaggcttgctggcccgcggggctgtccaggcacgcgaggcccctcaacaaaatgcttcaacaagttccagaaaacataaattttcctgctgaagaagagaaaatcttggagttttggactgaatttaattgttttcaggaatgcttaaagcaatcaaaacataaaccaaaatttaccttctatgatggtcctccttttgcaactggactgcctcactatggacatatacttgcgggtacaattaaagatatagttacaagatatgctcaccagagtgggtttcatgttgacagaagatttggatgggattgccatggcttacctgtggaatatgaaattgataagacactgggaatcagaggaccagaggatgtggccaaaatggggattacagagtataacaatcagtgccgagcaattgtgatgagatattctgctgagtggaagtctactgttagcagacttggccgatggattgactttgacaatgactataaaactctgtatccacaattcatggaatcagtctggtgggtcttcaaacaactctatgataaaggccttgtttatagaggtgtgaaagtcatgcccttctctacggcatgtaacactccactttccaacttcgagtcacaccagaattataaggatgttcaagatccttcagtatttgtaactttccctttggaagaagatgaaactgtatctttagttgcttggacaaccactccctggactctacctagtaaccttgctgtgtgtgttaatccagaaatgcaatatgtgaaaattaaagatgttgccagaggacgattactcattttaatggaagccagattgtcagccctctataaattggagagtgactatgagatccttgaaagatttcctggtgcctatcttaaaggcaagaagtacaggcccctgtttgactatttcctgaagtgtaaagagaatggcgctttcactgtgcttgttgacaactatgtgaaggaagaagaaggcacaggggttgtccaccaagctccttacttcggtgctgaggactatcgggtctgtatggactttaacattattcggaaagactcactccctgtttgccctgtggatgcttcaggctgcttcacaacggaggtgacagatttcgcaggacagtatgtgaaggatgctgacaaaagtatcatcaggactttgaaggaacaaggccgacttctggttgccaccaccttcactcacagctaccctttttgctggagatcagacactcctgaatgcaaagccacaagagtgtttaatggggacagtgggcactctcctgcttgaaaacccacttgggcagaatggactcacccaccaaggtcttctgtatgaagcagccaaggtgtttggccttcggagcaggaagctaaagctgtttctgaatgagacccaaacgcaggaaattacagaagacatccccgtgaagactttgaatatgaagactgtgtatgtttctgtgttaccaacaacagcagacttctagcatgtacttatcaatgttgttcggtcagcccttccctaattacacctatcccctacacatacatgcacatagacacacacatgaacacactgaagatatttccttcaggtgtgtgtaaaatatgctgcttggattgaaattcaaatgggattgattagtcaagtaacttgagacctcacagtaatcttcacacttaaccttagacacctatgcagtcatgttgggagcaggttacaatgttacttcagcccacagtttatttctattcttgagttcttaagtacagaagatagaagtgatttaaatggcatagtatatatatcattttctggccttttaaaatttatttgagacctcttgatgaaatggacatattatatatttctgccacctggattttcctggataatttgatggaatattttaagtttcagtaaatcagaacaataaacaaactcagatat

SEQ ID NO: 30919 - DNA, 663 bp, Homo sapiens
ctaaatgactgacactgaatagccatcctttcaggagagagtccatttcagacccacaggaagtatgaccttagtctcaagacacctttatcaaaatacaacagttctaatagctgcctaagacttattcagatgaatctttttgttatacaaccacataagcatatggagaaagagaatattttgggaagtacctgtttatgcaacatgttttagcctttcagatagttcctgtggtacacatttggcttgtacactcaaaagatggatgtgaataccactctatcagagtaagttcatgaagcagccctgagagagaataaactagaacccatggggcgtagcgtgaaggacagcctggattgttcctttctcttaataggcttgtaccaactggactgcattttctgtctagttttaggtgaagtagatctttcagaacctgtcctggcccaaacctgaaaatggtcctgaagtcacaatgtctccagaatctaggagtgcctctctgaagtgcttggttgagacggaattttaccatgttgaccaggctgatctggaactcctgacctcagcatgaaaatccttacaagatgccagcaccatgctcttggagttcccggcttccagaactgtggaccaaataaaacactattgtttata

SEQ ID NO: 30920 - DNA, 458 bp, Homo sapiens
atttttttctagaccttaaaatttctaccaacataatgtaataagcaacccaaattttatataactgtttatgtttccaaactattaataattgaagtgacatggtattgtagaaagattattggcctctaaatagaccagggtctgaatcctggctctgcttcccagttgctgcttaaccttaagcatattattttaccactttgagcttgagtttctttaactgaaatagggatgacaatacttagagagttgttatgggaaacagagaacatgcttgcagtattgcagtgtagtaggtgtcgaataggtattaatattcatgatgataggaagcaatataccatagtggttagaagtcagacccagtccattccccaaccccgctgaggcagtaatttgttttctttctctgcttgaattgttgtttcacccttgtccatttcatgacctcttca

SEQ ID NO: 30921 - DNA, 468 bp, Homo sapiens
cacattctcattattgcttgtctgaattaacaggctgttaaataatcttgctgcctctgccagggcagaggcctgtttttgtgctacaggcccctctggcagtctattgaggccgatggtccccttctcagaataatgttttagaatacacaaaagaagatatgtaagattatagaggaaacatttcatacaagtggaattatcaaaatattaacaacaaacttttggtctagtattatatgtgcttctttattagtttaggaaaatggaaatcttttccaaaagtctgctagccaacttaccctcccatctcataatggcagatgactagttgttctttcaaaatccattctgcccattttctggggcatatagctgataagctagacactccgttttctgtacttcttgcagttaaatgtggtcatgtgactgtgctatcactaatataaaattcaatggaacatg

SEQ ID NO: 30922 - DNA, 285 bp, Homo sapiens
gataaacatcaaatacatatagcattcagaaataacgtttaataggtacttcataccaaatcgacaaacatgggctggagtggcaatcacttgcagaggtttaaacttcagtttcaaatttgtcctatttcacaagagtcttcctctatctcaacatacttcttatttttatagaagaagttaactacatatgaccatttttggcaaagacagatgaaaactaactctgaggctaaaattgattcaaaatgacagtagacttagctgtataaaagagagtggaaa

SEQ ID NO: 30923 - DNA, 94 bp, Homo sapiens
gaaggcactcatttgtttcctgtaaagcttgtaatatgcattatttattgtacggagagagcaaaaagggctttcttattcacgtgacaaattc

SEQ ID NO: 30924 - DNA, 767 bp, Homo sapiens
atctaacaagaagatgttacaaacataaatttatgtgcacctaacacaggagtgccaagattcataaaacatttactactgaatctaagaaatgagacaggcagcaacacaataatagtggtggacttcaccactctactgacagctctagacagatcatcgagacagaaagtcaacaaagaaataatggacttgaactacactctgtaataatgaacaaaacagatatttacagaacattctaccccaaaactgcagaatatacatttttctcatcaactcatgaaagtttctccaaggcagaccatatgatcagtcaaaaaaagtctcaataagtttaaaaatatcaaaattatataaagtttctttgcagaccacagtggaataaaactagaaatcttctacaaaaggaaccttcaaaactgtacaaataaatggaaggtaaacaatcctcctcaataatttttgtgttaactatgaaatcaagatgaaaatttaataaactattggaaataaatgataataataacacaagtaatcaaactctgggatacagcaaaagcagtgcaaagagaaaagtttgtagcactaaatgccaacctcaaaaagtctggaaaacaacaaattgacaactgaatgtcacacctcaaggaactagagaaacaataagaaactaaacccaaagttaacagcagaaaataaatagcaaaaatcagagcacaaaaaaaatgaaattgaaagaaacaaaccaaaaaaaaaaaaaaaac

SEQ ID NO: 30925 - DNA, 414 bp, Homo sapiens
gaaagaaattccctggtttagatgatacaatttctgattgactcttggaaatttacagaggtcttattgcataagtagataagttactgtttaacaattataaggtgttagagataactctcatttgaaggacttttaatgtcaaatagttcacagaagaggagaaatgtattgcctcctctcacccttaaacacacacctgcaaacgtatatgaaactttgctagtaacacagagaggacaaagtatttctggccataatagatttgtatgaagagtagaggagatttatgtattagaatacaacaaagaaggaagagatgtctggaagtgcaaaagcatttatcgtggttccctgcagccatactaacagtagcttgaaaacaaatactgggccaggcatggtggctcatac

SEQ ID NO: 30926 - DNA, 770 bp, Homo sapiens
  misc_feature (20)..(20): n is a, c, g, or t
  misc_feature (70)..(70): n is a, c, g, or t
  misc_feature (85)..(85): n is a, c, g, or t
  misc_feature (88)..(88): n is a, c, g, or t
  misc_feature (97)..(97): n is a, c, g, or t
  misc_feature (99)..(99): n is a, c, g, or t
  misc_feature (126)..(126): n is a, c, g, or t
  misc_feature (134)..(134): n is a, c, g, or t
  misc_feature (769)..(769): n is a, c, g, or t
taaattggaattttcagatnaaacattcggatcaaatattccaaagcagtttgtgcctgctgtagaaaangggtttttagatgcntgngagaaaggncntctttctggtcacaagctctctgggcnccggtttntcctgcaagatggagcacaccacatggttgattctaatgaaatctctttcatcccgagcaggagaaggtggctcttaaacaacggccttggcaaatgcaacattatgtattcttgaacctattatggctgtggaagttgtagctccaaatgaatttcagggacaagtaattgcaggaattaaccgacgccatggggtaatcactgggcaagatggagttgaggactattttacactgtatgcagatgtccctctaaatgatatgtttggttattccactgaacttaggtcatgcacagagggaaagggagaatacacaatggagtatagcaggtatcagccatgtttaccatccacacaagaagacgtcattaataagtatttggaagctacaggtcaacttcctgttaaaaaaggaaaagccaagaactaactttgcttactgtgagttgactgactctaattgaatctgcgtggttttgatactttgatggattccagtggaataaattcaggctgctgaaacaagaaattctgagcccaggaagcgggctcttctttcttcaaaagaagcccttcttgttcatattcaggagcctctgttatattcaaaggtaattctatgtctatctcaana

SEQ ID NO: 30927 - DNA, 797 bp, Homo sapiens
  misc_feature (20)..(20): n is a, c, g, or t
  misc_feature (70)..(70): n is a, c, g, or t
  misc_feature (85)..(85): n is a, c, g, or t
  misc_feature (88)..(88): n is a, c, g, or t
  misc_feature (97)..(97): n is a, c, g, or t
  misc_feature (99)..(99): n is a, c, g, or t
  misc_feature (126)..(126): n is a, c, g, or t
  misc_feature (134)..(134): n is a, c, g, or t
taaattggaattttcagatnaaacattcggatcaaatattccaaagcagtttgtgcctgctgtagaaaangggtttttagatgcntgngagaaaggncntctttctggtcacaagctctctgggcnccggtttntcctgcaagatggagcacaccacatggttgattctaatgaaatctctttcatcccgagcaggagaaggtggctcttaaacaacggccttggcaaatgcaacattatgtattcttgaacctattatggctgtggaagttgtagctccaaatgaatttcagggacaagtaattgcaggaattaaccgacgccatggggtaatcactgggcaagatggagttgaggactattttacactgtatgcagatgtaagtagtcttggtcattggcagtcctgcttttattaaccatagaaggaaatccaggttagcttttgtttttgcaaatggacacatttccttgctgaatttgtggctttatacatgtggcattttctgtaatttgctattaaagcaactcttaagtgcagaagttaaaaataagatttattttatcttgaccttttgtgaatgtgtcattttcttagatgtaccttatctccttctttattgaatagcacagatggacaaattaaaaagaaaaggaaaaataaaataagatgtatattatctctctcattttagctttatttgcataattactttattgttatctttaatttatccctcttaattaccttgcctgtacctttcttgacttaaatctcaataaagaaggaaaataat

SEQ ID NO: 30928 - DNA, 769 bp, Homo sapiens
  misc_feature (20)..(20): n is a, c, g, or t
  misc_feature (70)..(70): n is a, c, g, or t
  misc_feature (85)..(85): n is a, c, g, or t
  misc_feature (88)..(88): n is a, c, g, or t
  misc_feature (97)..(97): n is a, c, g, or t
  misc_feature (99)..(99): n is a, c, g, or t
  misc_feature (126)..(126): n is a, c, g, or t
  misc_feature (134)..(134): n is a, c, g, or t
taaattggaattttcagatnaaacattcggatcaaatattccaaagcagtttgtgcctgctgtagaaaangggtttttagatgcntgngagaaaggncntctttctggtcacaagctctctgggcnccggtttntcctgcaagatggagcacaccacatggttgattctaatgaaatctctttcatcccgagcaggagaaggtggctcttaaacaacggccttggcaaatgcaacattatgtattcttgaacctattatggctgtggaagttgtagctccaaatgaatttcagggacaagtaattgcaggaattaaccgacgccatggggtaatcactgggcaagatggagttgaggactattttacactgtatgcagatgtaagtagtcttggtcattggcagtcctgcttttattaaccatagaaggaaatccaggttagcttttgtttttgcaaatggacacatttccttgctgaatttgtggctttatacatgtggcattttctgtaatttgctattaaagcaactcttaagtgcagaagttaaaaataagatttattttatcttgaccttttgtgaatgtgtcattttcttagatgtaccttatctccttctttattgaatagcacagatggacaaattaaaaagaaaaggaaaaataaaataagatgtatattatctctctcattttagctttatttgcataattactttattgttatctttaattctgagcccatatttcacttaccttatttaaaataaat

SEQ ID NO: 30929 - DNA, 252 bp, Homo sapiens
tccctctaaatgatatgtttggttattccactgaacttaggtcatgcacagaggtaggcaaatttaaacttacccttcaaaagaccaccctacagaatgatcatattataaaatcttgaccttgtatgacttttacttgatagtttaaaaaacaaacaaacaaacaaaaaaccctctcttttttttaaatccctagggaaagggagaatacacaatggagtatagcaggtatcagccatgtttaccatccac

SEQ ID NO: 30930 - DNA, 468 bp, Homo sapiens
atctccttttgcagtttcaaaaaagattatcatttgaggcgattgttcctgatctttatggcactgaagaattgaagcactaggaccaaataacagaaattacagaaaacaagatctcggctcaaatgtgaaagactttcctcacactattctgagatctaataggaagccctagaaggtgttcaaacgtgagtcaaacaaatacctaatgtagaggttgtatttaaggtgcaagcaccagagtgatgttgaaatgaatgagatttaaaatattttccaatccaaagtctataagactccatgattttgtgaaatgaaaatttctcttgtactcacagaaaggatcattaaagtctttttcattgaaaaaggcatacagttttctagcttccttttgaattctagttaatgtattttaggccatggttgccagcctactccctataaatagttacataatgcaaaaaa

SEQ ID NO: 30931 - DNA, 4509 bp, Homo sapiens
gtgttgcaagggatatattttattagtttcattaatgaaattttaatagcaataaattcaggcttttaaatattacaaagtattttcaaatatctcatggggccttgatgttagcttcaggaagtatctagcaacctaatggctgtttgattagacttctcagactattattatccttgtcacataatagtgctttagtccatgtatcataggatcttcaagtattattcatttgtttccaaagcaaattgagctattccactcaaatgattacagtaaatagaatagaaacttgtggaatcatcttcctctctcgtaaatgaagtaacagcaaaatagcgcagcatctcagctgttccaggttcctcaaataagttttacttttgcaaaaccaacctcaaacttcctatattctctgttctgcattataagcaacatgaccagcagccacgtttgttgtaattttttaaatatgtggaaaaaaagcaagatatcaaccatgtattaccttaaccaagatgccaaattatctaacttgtttctccaggcaagcagcccaacaacagggacagctcccaggagccagtcaaggttgtctgtctgtccatccactcaggacatctgcagaatctgtcactgcgaaggggatgaagagagccccctcatcacaccctgtcgctgcactgggacactgcgctttgtccaccagtcctgcctccaccagtggataaagagctcagatacacgctgctgtgagctctgcaagtatgacttcataatggagaccaagctcaaacccctccggaagtgggagaaactacagatgaccacaagtgaaaggaggaaaatattctgctctgtcacattccacgtaatcgcaatcacctgtgtggtttggtctttgtatgtattgatagaccggacagcggaggaaatcaagcaaggcaatgacaatggtgtccttgaatggccattttggacaaaactggttgtggtagccattggcttcacaggaggtcttgtcttcatgtacgtacagtgtaaagtctatgttcagttgtggcgcaggctgaaggcctacaaccgtgtgatctttgtacaaaattgcccagacactgccaaaaaactggagaagaacttctcatgtaatgtaaacacagacatcaaagatgctgtggtagtgcctgtaccacaaacaggtgcaaattcactgccatctgcagagggtggcccccctgaagttgtatcagtctgatggaacctgttgggagtttcttcaccgaagaatatctttctagccctcagccactacaaatgacagaagtgatcttgaattatttactcccttcagctcctcctttctcctactgacacatttttcctgactttgttcaaagaggaaaggagaaaaacaaacagaccaaatgcccaggagcccatgaagtaatagcgtaaagtaaagtatgatatggaaatgtgaagtttgcaagagaatgatttccaagacaattaagaactactggggcaatgaatgcttttaggcagtaatcaaagattaaatggacccatgatactcttcttcacagtaacaggggaaaagttcaagaatacagacttgaattgcgatgtgtattacttctagggccttgtaatgttaactgtctcatctggaaataataactaacatatttggttttaagcctgaaattgtctgcattatccctaagtcacattggaagtgaacttggaggatgcatattttgatatgctttgacagctaacagatttgtatggtttagtggagtctggttattttgacagatgcatgttttttttaaatagatgcaatatacatttgaagacattgatatttggaattaattatgtttgtttaagtcacgcaaaagattttcagaaaatgttcggatataattagctctgttaaatacccacagaactgttatcaggtcttatatttattttcatctggttcctctaatacagtgctgtccaatagaaacacaacagccacaaatgcaggccacagatacaaatatttaacttcccagtagccctattttaaaaagtaaaaataaatgtttgtttgttaaaatgaattttgattttttaaaaacactatatgttatttcaacgtcatcaatataaaaaattgattgattgattgatagtttacatctgtttcttgaaccaagttttcaaaatccagttggtaatttaaaagtacacttcacttcaacttgaattaactatattggatagcacagccgtaaaattagagactaagcttctgctttatttaacagttgttgagtatttcaaaacagtttaattcattcttttatttcaaagtctcacaaaagttagttatgatttttaaaagcattaaattaagtgtcctcattttaaagtcagatgaagttcacatctctaaagggtaaaaatccaaaagtatagaaagataaaacaatcaatctgcctatagcagagttgtgaaataaataaattgttactatgaagtacttacaataggggaataaaattacctatttttgttattaaatcaaatgtgtaaggcttatttcatgcatatgaggtgtcaacttgacagatgatgagtaattatgactaagaatctagcccttacttttaaaagctgacaggatttcccttgctcagttagaaaacaaaaatattcaacagattctgtgataagtaattaatcgtttaggtttgacagttgattattgtgttctttgcatattcatgtaaaactgatgtgtgaatgacattgcagtgagctagattaacggtgattatagatacagtagcctgtcaaagaaagatgtcctacattaaaaaaggtgacttatttttgttagctgtcattatttattaacatgaaaaggcaatgatggccataagaaccaaagcatgagtatcacactgcacaaatctgggtatcacatggatgcactttgtaattatcagtgtgcttgttcttcacagatcataggaaaaagggaaaaaaaaaacaaacctttaaatgaggagaaagatggtataaatattagtagtggctgacactgagtccagatagtcttgattcctagaaataaacaaaaggtaaacaatgtcaattttgtgtgtgtgtatggcgtgtgtgtagtcatgtatatatgcggggaaaatgttaaggtattcagtcaggaaacaaaaggtttaaaactcatctttcttaaaacttgttataagcacagggaaagcaaagttgaggtaactaaactgaaccaaaaattctgtataaataaggatataagtaattaacgttttaaaaaacatgtggaccttaaacaaactgtatattaaattcctcttaaatgcccattttaaatatttaagataaatacatttatgaataacaaatctgtgggtgatttaaccatggcaccatatccaagggattaaccttaatgcaattttcctgttaattgtcctaagctttttactaatccattttccctgtgggttagtaatggcaacatgctgcttacagatattcccggggaaaaacatccagacaccagcaaacaaagaaatgttgatttctcttttgtttgctctgaaagtaaaataattatttactttaattaacatggaaaatattgtttaaattctgtacgaacctaaacaagatacgttgcagggctgatttcacagtggaggatgatcggctaaaataaagcctcatttattaagggctacacttttaacactaagaaaacatttctagaataaaaagcaaaggtaagcattattctattaatagtaaaagaggacatgggattttaaaactatacctaaattcttgcaattaacttttatgggcttggacattgttgaaatgagaaaataatataatatagcttcctggcaggttaaaagtcaacacttgattttgctattcttctgactttttgaaaccctgaagttctgaatttcaagcttttaagaagcttttcagcaatggttgtttgtttatggttcaaacatctgaaataactacctgcatttaaaatctaatgttgattattttctttttacattctgtgtggcaatggagcatttgccctttcaaacagtaaaacgatttagctttgtggcagtgcttttttgtagactgactgactatacccttcaaaaagaaaaactgctctacggaatgcaaattttgaggcatgtttacctgctcgtggaagaaataaaatggaattgaaaaaaaaaggactaaaattgaagaatgaaattacagttgtgttaaaaaccttggctctttataatcatgaatcttcagtattaaaccagacattgatgctgttaatttttttaaagaactatcactcttatcgtacaggagtaaagattaaattgtaaaagaaagaaattccaattttttaaaaagtaaagcccaaaaggcaattaagcttaagt

SEQ ID NO: 30932 - DNA, 4415 bp, Homo sapiens
gtgttgcaagggatatattttattagtttcattaatgaaattttaatagcaataaattcaggcttttaaatattacaaagtattttcaaatatctcatggggccttgatgttagcttcaggaagtatctagcaacctaatggctgtttgattagacttctcagactattattatccttgtcacataatagtgctttagtccatgtatcataggatcttcaagtattattcatttgtttccaaagcaaattgagctattccactcaaatgattacagtaaatagaatagaaacttgtggaatcatcttcctctctcgtaaatgaagtaacagcaaaatagcgcagcatctcagctgttccaggttcctcaaataagttttacttttgcaaaaccaacctcaaacttcctatattctctgttctgcattataagcaacatgaccagcagccacgtttgttgtaattttttaaatatgtggaaaaaaagcaagatatcaaccatgtattaccttaaccaagatgccaaattatctaacttgtttctccaggcaagcagcccaacaacagggacagctcccaggagccagtcaaggttgtctgtctgtccatccactcaggacatctgcagaatctgtcactgcgaaggggatgaagagagccccctcatcacaccctgtcgctgcactgggacactgcgctttgtccaccagtcctgcctccaccagtggataaagagctcagatacacgctgctgtgagctctgcaagtatgacttcataatggagaccaagctcaaacccctccggaagtgggagaaactacagatgaccacaagtgaaaggaggaaaatattctgctctgtcacattccacgtaatcgcaatcacctgtgtggtttggtctttgtatgtattgatagaccggacagcggaggaaatcaagcaaggcaatgacaatggtgtccttgaatggccattttggacaaaactggttgtggtagccattggcttcacaggaggtcttgtcttcatgtacgtacagtgtaaagtctatgttcagttgtggcgcaggctgaaggcctacaaccgtgtgatctttgtacaaaattgcccagacactgccaaaaaactggagaagaacttctcatgtaatgtaaacacagacatcaaagatgctgtggtagtgcctgtaccacaaacaggtgcaaattcactgccatctgcagagggtggcccccctgaagttgtatcagtctgatggaacctgttgggagtttcttcaccgaagaatatctttctagccctcagccactacaaatgacagaagtgatcttgaattatttactcccttcagctcctcctttctcctactgacacatttttcctgactttgttcaaagaggaaaggagaaaaacaaacagaccaaatgcccaggagcccatgaagtaatagcgtaaagtaaagtatgatatggaaatgtgaagtttgcaagagaatgatttccaagacaattaagaactactggggcaatgaatgcttttaggcagtaatcaaagattaaatggacccatgatactcttcttcacagtaacaggggaaaagttcaagaatacagacttgaattgcgatgtgtattacttctagggccttgtaatgttaactgtctcatctggaaataataactaacatatttggttttaagcctgaaattgtctgcattatccctaagtcacattggaagtgaacttggaggatgcatattttgatatgctttgacagctaacagatttgtatggtttagtggagtctggttattttgacagatgcatgttttttttaaatagatgcaatatacatttgaagacattgatatttggaattaattatgtttgtttaagtcacgcaaaagattttcagaaaatgttcggatataattagctctgttaaatacccacagaactgttatcaggtcttatatttattttcatctggttcctctaatacagtgctgtccaatagaaacacaacagccacaaatgcaggccacagatacaaatatttaacttcccagtagccctattttaaaaagtaaaaataaatgtttgtttgttaaaatgaattttgattttttaaaaacactatatgttatttcaacgtcatcaatataaaaaattgattgattgattgatagtttacatctgtttcttgaaccaagttttcaaaatccagttggtaatttaaaagtacacttcacttcaacttgaattaactatattggatagcacagccgtaaaattagagactaagcttctgctttatttaacagttgttgagtatttcaaaacagtttaattcattcttttatttcaaagtctcacaaaagttagttatgatttttaaaagcattaaattaagtgtcctcattttaaagtcagatgaagttcacatctctaaagggtaaaaatccaaaagtatagaaagataaaacaatcaatctgcctatagcagagttgtgaaataaataaattgttactatgaagtacttacaataggggaataaaattacctatttttgttattaaatcaaatgtgtaaggcttatttcatgcatatgaggtgtcaacttgacagatgatgagtaattatgactaagaatctagcccttacttttaaaagctgacaggatttcccttgctcagttagaaaacaaaaatattcaacagattctgtgataagtaattaatcgtttaggtttgacagttgattattgtgttctttgcatattcatgtaaaactgatgtgtgaatgacattgcagtgagctagattaacggtgattatagatacagtagcctgtcaaagaaagatgtcctacattaaaaaaggtgacttatttttgttagctgtcattatttattaacatgaaaaggcaatgatggccataagaaccaaagcatgagtatcacactgcacaaatctgggtatcacatggatgcactttgtaattatcagtgtgcttgttcttcacagatcataggaaaaagggaaaaaaaaaacaaacctttaaatgaggagaaagatggtataaatattagtagtggctgacactgagtccagatagtcttgattcctagaaataaacaaaaggtttaaaactcatctttcttaaaacttgttataagcacagggaaagcaaagttgaggtaactaaactgaaccaaaaattctgtataaataaggatataagtaattaacgttttaaaaaacatgtggaccttaaacaaactgtatattaaattcctcttaaatgcccattttaaatatttaagataaatacatttatgaataacaaatctgtgggtgatttaaccatggcaccatatccaagggattaaccttaatgcaattttcctgttaattgtcctaagctttttactaatccattttccctgtgggttagtaatggcaacatgctgcttacagatattcccggggaaaaacatccagacaccagcaaacaaagaaatgttgatttctcttttgtttgctctgaaagtaaaataattatttactttaattaacatggaaaatattgtttaaattctgtacgaacctaaacaagatacgttgcagggctgatttcacagtggaggatgatcggctaaaataaagcctcatttattaagggctacacttttaacactaagaaaacatttctagaataaaaagcaaaggtaagcattattctattaatagtaaaagaggacatgggattttaaaactatacctaaattcttgcaattaacttttatgggcttggacattgttgaaatgagaaaataatataatatagcttcctggcaggttaaaagtcaacacttgattttgctattcttctgactttttgaaaccctgaagttctgaatttcaagcttttaagaagcttttcagcaatggttgtttgtttatggttcaaacatctgaaataactacctgcatttaaaatctaatgttgattattttctttttacattctgtgtggcaatggagcatttgccctttcaaacagtaaaacgatttagctttgtggcagtgcttttttgtagactgactgactatacccttcaaaaagaaaaactgctctacggaatgcaaattttgaggcatgtttacctgctcgtggaagaaataaaatggaattgaaaaaaaaaggactaaaattgaagaatgaaattacagttgtgttaaaaaccttggctctttataatcatgaatcttcagtattaaaccagacattgatgctgttaatttttttaaagaactatcactcttatcgtacaggagtaaagattaaattgtaaaagaaagaaattccaattttttaaaaagtaaagcccaaaaggcaattaagcttaagt

SEQ ID NO: 30933 - DNA, 4450 bp, Homo sapiens
gtgttgcaagggatatattttattagtttcattaatgaaattttaatagcaataaattcaggcttttaaatattacaaagtattttcaaatatctcatggggccttgatgttagcttcaggaagtatctagcaacctaatggctgtttgattagacttctcagactattattatccttgtcacataatagtgctttagtccatgtatcataggatcttcaagtattattcatttgtttccaaagcaaattgagctattccactcaaatgattacagtaaatagaatagaaacttgtggaatcatcttcctctctcgtaaatgaagtaacagcaaaatagcgcagcatctcagctgttccaggttcctcaaataagttttacttttgcaaaaccaacctcaaacttcctatattctctgttctgcattataagcaacatgaccagcagccacgtttgttgtaattttttaaatatgtggaaaaaaagcaagatatcaaccatgtattaccttaaccaagatgccaaattatctaacttgtttctccaggcaagcagcccaacaacagggacagctcccaggagccagtcaaggttgtctgtctgtccatccactcaggacatctgcagaatctgtcactgcgaaggggatgaagagagccccctcatcacaccctgtcgctgcactgggacactgcgctttgtccaccagtcctgcctccaccagtggataaagagctcagatacacgctgctgtgagctctgcaagtatgacttcataatggagaccaagctcaaacccctccggaagtgggagaaactacagatgaccacaagtgaaaggattgtatgtattgatagaccggacagcggaggaaatcaagcaaggcaatgacaatggtgtccttgaatggccattttggacaaaactggttgtggtagccattggcttcacaggaggtcttgtcttcatgtacgtacagtgtaaagtctatgttcagttgtggcgcaggctgaaggcctacaaccgtgtgatctttgtacaaaattgcccagacactgccaaaaaactggagaagaacttctcatgtaatgtaaacacagacatcaaagatgctgtggtagtgcctgtaccacaaacaggtgcaaattcactgccatctgcagagggtggcccccctgaagttgtatcagtctgatggaacctgttgggagtttcttcaccgaagaatatctttctagccctcagccactacaaatgacagaagtgatcttgaattatttactcccttcagctcctcctttctcctactgacacatttttcctgactttgttcaaagaggaaaggagaaaaacaaacagaccaaatgcccaggagcccatgaagtaatagcgtaaagtaaagtatgatatggaaatgtgaagtttgcaagagaatgatttccaagacaattaagaactactggggcaatgaatgcttttaggcagtaatcaaagattaaatggacccatgatactcttcttcacagtaacaggggaaaagttcaagaatacagacttgaattgcgatgtgtattacttctagggccttgtaatgttaactgtctcatctggaaataataactaacatatttggttttaagcctgaaattgtctgcattatccctaagtcacattggaagtgaacttggaggatgcatattttgatatgctttgacagctaacagatttgtatggtttagtggagtctggttattttgacagatgcatgttttttttaaatagatgcaatatacatttgaagacattgatatttggaattaattatgtttgtttaagtcacgcaaaagattttcagaaaatgttcggatataattagctctgttaaatacccacagaactgttatcaggtcttatatttattttcatctggttcctctaatacagtgctgtccaatagaaacacaacagccacaaatgcaggccacagatacaaatatttaacttcccagtagccctattttaaaaagtaaaaataaatgtttgtttgttaaaatgaattttgattttttaaaaacactatatgttatttcaacgtcatcaatataaaaaattgattgattgattgatagtttacatctgtttcttgaaccaagttttcaaaatccagttggtaatttaaaagtacacttcacttcaacttgaattaactatattggatagcacagccgtaaaattagagactaagcttctgctttatttaacagttgttgagtatttcaaaacagtttaattcattcttttatttcaaagtctcacaaaagttagttatgatttttaaaagcattaaattaagtgtcctcattttaaagtcagatgaagttcacatctctaaagggtaaaaatccaaaagtatagaaagataaaacaatcaatctgcctatagcagagttgtgaaataaataaattgttactatgaagtacttacaataggggaataaaattacctatttttgttattaaatcaaatgtgtaaggcttatttcatgcatatgaggtgtcaacttgacagatgatgagtaattatgactaagaatctagcccttacttttaaaagctgacaggatttcccttgctcagttagaaaacaaaaatattcaacagattctgtgataagtaattaatcgtttaggtttgacagttgattattgtgttctttgcatattcatgtaaaactgatgtgtgaatgacattgcagtgagctagattaacggtgattatagatacagtagcctgtcaaagaaagatgtcctacattaaaaaaggtgacttatttttgttagctgtcattatttattaacatgaaaaggcaatgatggccataagaaccaaagcatgagtatcacactgcacaaatctgggtatcacatggatgcactttgtaattatcagtgtgcttgttcttcacagatcataggaaaaagggaaaaaaaaaacaaacctttaaatgaggagaaagatggtataaatattagtagtggctgacactgagtccagatagtcttgattcctagaaataaacaaaaggtaaacaatgtcaattttgtgtgtgtgtatggcgtgtgtgtagtcatgtatatatgcggggaaaatgttaaggtattcagtcaggaaacaaaaggtttaaaactcatctttcttaaaacttgttataagcacagggaaagcaaagttgaggtaactaaactgaaccaaaaattctgtataaataaggatataagtaattaacgttttaaaaaacatgtggaccttaaacaaactgtatattaaattcctcttaaatgcccattttaaatatttaagataaatacatttatgaataacaaatctgtgggtgatttaaccatggcaccatatccaagggattaaccttaatgcaattttcctgttaattgtcctaagctttttactaatccattttccctgtgggttagtaatggcaacatgctgcttacagatattcccggggaaaaacatccagacaccagcaaacaaagaaatgttgatttctcttttgtttgctctgaaagtaaaataattatttactttaattaacatggaaaatattgtttaaattctgtacgaacctaaacaagatacgttgcagggctgatttcacagtggaggatgatcggctaaaataaagcctcatttattaagggctacacttttaacactaagaaaacatttctagaataaaaagcaaaggtaagcattattctattaatagtaaaagaggacatgggattttaaaactatacctaaattcttgcaattaacttttatgggcttggacattgttgaaatgagaaaataatataatatagcttcctggcaggttaaaagtcaacacttgattttgctattcttctgactttttgaaaccctgaagttctgaatttcaagcttttaagaagcttttcagcaatggttgtttgtttatggttcaaacatctgaaataactacctgcatttaaaatctaatgttgattattttctttttacattctgtgtggcaatggagcatttgccctttcaaacagtaaaacgatttagctttgtggcagtgcttttttgtagactgactgactatacccttcaaaaagaaaaactgctctacggaatgcaaattttgaggcatgtttacctgctcgtggaagaaataaaatggaattgaaaaaaaaaggactaaaattgaagaatgaaattacagttgtgttaaaaaccttggctctttataatcatgaatcttcagtattaaaccagacattgatgctgttaatttttttaaagaactatcactcttatcgtacaggagtaaagattaaattgtaaaagaaagaaattccaattttttaaaaagtaaagcccaaaaggcaattaagcttaagt

SEQ ID NO: 30934 - DNA, 4866 bp, Homo sapiens
aatgagcctgtttctgagggtgttagaaaccttgtatctagatgccagctgctgctacagggggggattgcaactaactcccaggaatgaaaaatccccagggcgatctgcaagtcgatcaagtaacatttcaaaagcaagcagcccaacaacagggacagctcccaggagccagtcaaggttgtctgtctgtccatccactcaggacatctgcagatctgccatcttgcatgacatgtcagaagagtcatttgagtattgcacccctgtcatggtgctgagccctgctaggaaggagtctggtaagaaatcagtaatacaaagacctaggaggaggagaaaagcctctgagagatatgagcatgctgcagaagaacaaataagagggagaaaaaatgactttcaccttcaaatctcaagccccaggtggagggagctttacacagattcttcagattcatcttccacagatgagagtcattggattcaggcaaaaagaagagcccaggttaaattcagactgtcaagaagaaggaggagaaataataataagccgtgtgaaaacttagctgggtcttccactcctaacggaattgagctcgttgatctgggatccaaaggtaaagagcaacaagagctgattgaatgtgagagttgctctttaaatctccacagaggaaaacatacaaggtaccaagaatgcaacccttctctgactcaagggtcctctgaaattaagagatcctcaaggaatcatgagaagagcaaaggcagatatcaccacagagatcctcagctcttgcaaagtcttaggaaaaatgaaataatgaagaagacattttcagaaacagattccagcactgaaatactgggagttccagaaggcagcaaggacatgaatgatgcagggctccaggtgaataaccctgttcagaagcctcctgccacctatgacgatgggtctgataatttagaagtatgcagaatctgtcactgcgaaggggatgaagagagccccctcatcacaccctgtcgctgcactgggacactgcgctttgtccaccagtcctgcctccaccagtggataaagagctcagatacacgctgctgtgagctctgcaagtatgacttcataatggagaccaagctcaaacccctccggaagtgggagaaactacagatgaccacaagtgaaaggaggaaaatattctgctctgtcacattccacgtaatcgcaatcacctgtgtggtttggtctttgtatgtattgatagaccggacagcggaggaaatcaagcaaggcaatgacaatggtgtccttgaatggccattttggacaaaactggttgtggtagccattggcttcacaggaggtcttgtcttcatgtacgtacagtgtaaagtctatgttcagttgtggcgcaggctgaaggcctacaaccgtgtgatctttgtacaaaattgcccagacactgccaaaaaactggagaagaacttctcatgtaatgtaaacacagacatcaaagatgctgtggtagtgcctgtaccacaaacaggtgcaaattcactgccatctgcagagggtggcccccctgaagttgtatcagtctgatggaacctgttgggagtttcttcaccgaagaatatctttctagccctcagccactacaaatgacagaagtgatcttgaattatttactcccttcagctcctcctttctcctactgacacatttttcctgactttgttcaaagaggaaaggagaaaaacaaacagaccaaatgcccaggagcccatgaagtaatagcgtaaagtaaagtatgatatggaaatgtgaagtttgcaagagaatgatttccaagacaattaagaactactggggcaatgaatgcttttaggcagtaatcaaagattaaatggacccatgatactcttcttcacagtaacaggggaaaagttcaagaatacagacttgaattgcgatgtgtattacttctagggccttgtaatgttaactgtctcatctggaaataataactaacatatttggttttaagcctgaaattgtctgcattatccctaagtcacattggaagtgaacttggaggatgcatattttgatatgctttgacagctaacagatttgtatggtttagtggagtctggttattttgacagatgcatgttttttttaaatagatgcaatatacatttgaagacattgatatttggaattaattatgtttgtttaagtcacgcaaaagattttcagaaaatgttcggatataattagctctgttaaatacccacagaactgttatcaggtcttatatttattttcatctggttcctctaatacagtgctgtccaatagaaacacaacagccacaaatgcaggccacagatacaaatatttaacttcccagtagccctattttaaaaagtaaaaataaatgtttgtttgttaaaatgaattttgattttttaaaaacactatatgttatttcaacgtcatcaatataaaaaattgattgattgattgatagtttacatctgtttcttgaaccaagttttcaaaatccagttggtaatttaaaagtacacttcacttcaacttgaattaactatattggatagcacagccgtaaaattagagactaagcttctgctttatttaacagttgttgagtatttcaaaacagtttaattcattcttttatttcaaagtctcacaaaagttagttatgatttttaaaagcattaaattaagtgtcctcattttaaagtcagatgaagttcacatctctaaagggtaaaaatccaaaagtatagaaagataaaacaatcaatctgcctatagcagagttgtgaaataaataaattgttactatgaagtacttacaataggggaataaaattacctatttttgttattaaatcaaatgtgtaaggcttatttcatgcatatgaggtgtcaacttgacagatgatgagtaattatgactaagaatctagcccttacttttaaaagctgacaggatttcccttgctcagttagaaaacaaaaatattcaacagattctgtgataagtaattaatcgtttaggtttgacagttgattattgtgttctttgcatattcatgtaaaactgatgtgtgaatgacattgcagtgagctagattaacggtgattatagatacagtagcctgtcaaagaaagatgtcctacattaaaaaaggtgacttatttttgttagctgtcattatttattaacatgaaaaggcaatgatggccataagaaccaaagcatgagtatcacactgcacaaatctgggtatcacatggatgcactttgtaattatcagtgtgcttgttcttcacagatcataggaaaaagggaaaaaaaaaacaaacctttaaatgaggagaaagatggtataaatattagtagtggctgacactgagtccagatagtcttgattcctagaaataaacaaaaggtaaacaatgtcaattttgtgtgtgtgtatggcgtgtgtgtagtcatgtatatatgcggggaaaatgttaaggtattcagtcaggaaacaaaaggtttaaaactcatctttcttaaaacttgttataagcacagggaaagcaaagttgaggtaactaaactgaaccaaaaattctgtataaataaggatataagtaattaacgttttaaaaaacatgtggaccttaaacaaactgtatattaaattcctcttaaatgcccattttaaatatttaagataaatacatttatgaataacaaatctgtgggtgatttaaccatggcaccatatccaagggattaaccttaatgcaattttcctgttaattgtcctaagctttttactaatccattttccctgtgggttagtaatggcaacatgctgcttacagatattcccggggaaaaacatccagacaccagcaaacaaagaaatgttgatttctcttttgtttgctctgaaagtaaaataattatttactttaattaacatggaaaatattgtttaaattctgtacgaacctaaacaagatacgttgcagggctgatttcacagtggaggatgatcggctaaaataaagcctcatttattaagggctacacttttaacactaagaaaacatttctagaataaaaagcaaaggtaagcattattctattaatagtaaaagaggacatgggattttaaaactatacctaaattcttgcaattaacttttatgggcttggacattgttgaaatgagaaaataatataatatagcttcctggcaggttaaaagtcaacacttgattttgctattcttctgactttttgaaaccctgaagttctgaatttcaagcttttaagaagcttttcagcaatggttgtttgtttatggttcaaacatctgaaataactacctgcatttaaaatctaatgttgattattttctttttacattctgtgtggcaatggagcatttgccctttcaaacagtaaaacgatttagctttgtggcagtgcttttttgtagactgactgactatacccttcaaaaagaaaaactgctctacggaatgcaaattttgaggcatgtttacctgctcgtggaagaaataaaatggaattgaaaaaaaaaggactaaaattgaagaatgaaattacagttgtgttaaaaaccttggctctttataatcatgaatcttcagtattaaaccagacattgatgctgttaatttttttaaagaactatcactcttatcgtacaggagtaaagattaaattgtaaaagaaagaaattccaattttttaaaaagtaaagcccaaaaggcaattaagcttaagt

SEQ ID NO: 30935 - DNA, 4055 bp, Homo sapiens
gtgttgcaagggatatattttattagtttcattaatgaaattttaatagcaataaattcaggcttttaaatattacaaagtattttcaaatatctcatggggccttgatgttagcttcaggaagtatctagcaacctaatggctgtttgattagacttctcagactattattatccttgtcacataatagtgctttagtccatgtatcataggatcttcaagtattattcatttgtttccaaagcaaattgagctattccactcaaatgattacagtaaatagaatagaaacttgtggaatcatcttcctctctcgtaaatgaagtaacagcaaaatagcgcagcatctcagctgttccaggttcctcaaataagttttacttttgcaaaaccaacctcaaacttcctatattctctgttctgcattataagcaacatgaccagcagccacgtttgttgtaattttttaaatatgtggaaaaaaagcaagatatcaaccatttgtatgtattgatagaccggacagcggaggaaatcaagcaaggcaatgacaatggtgtccttgaatggccattttggacaaaactggttgtggtagccattggcttcacaggaggtcttgtcttcatgtacgtacagtgtaaagtctatgttcagttgtggcgcaggctgaaggcctacaaccgtgtgatctttgtacaaaattgcccagacactgccaaaaaactggagaagaacttctcatgtaatgtaaacacagacatcaaagatgctgtggtagtgcctgtaccacaaacaggtgcaaattcactgccatctgcagagggtggcccccctgaagttgtatcagtctgatggaacctgttgggagtttcttcaccgaagaatatctttctagccctcagccactacaaatgacagaagtgatcttgaattatttactcccttcagctcctcctttctcctactgacacatttttcctgactttgttcaaagaggaaaggagatatgatatggaaatgtgaagtttgcaagagaatgatttccaagacaattaagaactactggggcaatgaatgcttttaggcagtaatcaaagattaaatggacccatgatactcttcttcacagtaacaggggaaaagttcaagaatacagacttgaattgcgatgtgtattacttctagggccttgtaatgttaactgtctcatctggaaataataactaacatatttggttttaagcctgaaattgtctgcattatccctaagtcacattggaagtgaacttggaggatgcatattttgatatgctttgacagctaacagatttgtatggtttagtggagtctggttattttgacagatgcatgttttttttaaatagatgcaatatacatttgaagacattgatatttggaattaattatgtttgtttaagtcacgcaaaagattttcagaaaatgttcggatataattagctctgttaaatacccacagaactgttatcaggtcttatatttattttcatctggttcctctaatacagtgctgtccaatagaaacacaacagccacaaatgcaggccacagatacaaatatttaacttcccagtagccctattttaaaaagtaaaaataaatgtttgtttgttaaaatgaattttgattttttaaaaacactatatgttatttcaacgtcatcaatataaaaaattgattgattgattgatagtttacatctgtttcttgaaccaagttttcaaaatccagttggtaatttaaaagtacacttcacttcaacttgaattaactatattggatagcacagccgtaaaattagagactaagcttctgctttatttaacagttgttgagtatttcaaaacagtttaattcattcttttatttcaaagtctcacaaaagttagttatgatttttaaaagcattaaattaagtgtcctcattttaaagtcagatgaagttcacatctctaaagggtaaaaatccaaaagtatagaaagataaaacaatcaatctgcctatagcagagttgtgaaataaataaattgttactatgaagtacttacaataggggaataaaattacctatttttgttattaaatcaaatgtgtaaggcttatttcatgcatatgaggtgtcaacttgacagatgatgagtaattatgactaagaatctagcccttacttttaaaagctgacaggatttcccttgctcagttagaaaacaaaaatattcaacagattctgtgataagtaattaatcgtttaggtttgacagttgattattgtgttctttgcatattcatgtaaaactgatgtgtgaatgacattgcagtgagctagattaacggtgattatagatacagtagcctgtcaaagaaagatgtcctacattaaaaaaggtgacttatttttgttagctgtcattatttattaacatgaaaaggcaatgatggccataagaaccaaagcatgagtatcacactgcacaaatctgggtatcacatggatgcactttgtaattatcagtgtgcttgttcttcacagatcataggaaaaagggaaaaaaaaaacaaacctttaaatgaggagaaagatggtataaatattagtagtggctgacactgagtccagatagtcttgattcctagaaataaacaaaaggtaaacaatgtcaattttgtgtgtgtgtatggcgtgtgtgtagtcatgtatatatgcggggaaaatgttaaggtattcagtcaggaaacaaaaggtttaaaactcatctttcttaaaacttgttataagcacagggaaagcaaagttgaggtaactaaactgaaccaaaaattctgtataaataaggatataagtaattaacgttttaaaaaacatgtggaccttaaacaaactgtatattaaattcctcttaaatgcccattttaaatatttaagataaatacatttatgaataacaaatctgtgggtgatttaaccatggcaccatatccaagggattaaccttaatgcaattttcctgttaattgtcctaagctttttactaatccattttccctgtgggttagtaatggcaacatgctgcttacagatattcccggggaaaaacatccagacaccagcaaacaaagaaatgttgatttctcttttgtttgctctgaaagtaaaataattatttactttaattaacatggaaaatattgtttaaattctgtacgaacctaaacaagatacgttgcagggctgatttcacagtggaggatgatcggctaaaataaagcctcatttattaagggctacacttttaacactaagaaaacatttctagaataaaaagcaaaggtaagcattattctattaatagtaaaagaggacatgggattttaaaactatacctaaattcttgcaattaacttttatgggcttggacattgttgaaatgagaaaataatataatatagcttcctggcaggttaaaagtcaacacttgattttgctattcttctgactttttgaaaccctgaagttctgaatttcaagcttttaagaagcttttcagcaatggttgtttgtttatggttcaaacatctgaaataactacctgcatttaaaatctaatgttgattattttctttttacattctgtgtggcaatggagcatttgccctttcaaacagtaaaacgatttagctttgtggcagtgcttttttgtagactgactgactatacccttcaaaaagaaaaactgctctacggaatgcaaattttgaggcatgtttacctgctcgtggaagaaataaaatggaattgaaaaaaaaaggactaaaattgaagaatgaaattacagttgtgttaaaaaccttggctctttataatcatgaatcttcagtattaaaccagacattgatgctgttaatttttttaaagaactatcactcttatcgtacaggagtaaagattaaattgtaaaagaaagaaattccaattttttaaaaagtaaagcccaaaaggcaattaagcttaagt

SEQ ID NO: 30936 - DNA, 3246 bp, Homo sapiens
  misc_feature (1491)..(1491): n is a, c, g, or t
  misc_feature (2112)..(2112): n is a, c, g, or t
  misc_feature (2231)..(2231): n is a, c, g, or t
aatgagcctgtttctgagggtgttagaaaccttgtatctagatgccagctgctgctacagggggggattgcaactaactcccaggaatgaaaaatccccagggcgatctgcaagtcgatcaagtaacatttcaaaagcaagcagcccaacaacagggacagctcccaggagccagtcaaggttgtctgtctgtccatccactcaggacatctgcagatctgccatcttgcatgacatgtcagaagagtcatttgagtattgcacccctgtcatggtgctgagccctgctaggaaggagtctggtaagaaatcagtaatacaaagacctaggaggaggagaaaagcctctgagagatatgagcatgctgcagaagaacaaataagagggagaaaaaatgactttcaccttcaaatctcaagccccaggtggagggagctttacacagattcttcagattcatcttccacagatgagagtcattggattcaggcaaaaagaagagcccaggttaaattcagactgtcaagaagaaggaggagaaataataataagccgtgtgaaaacttagctgggtcttccactcctaacggaattgagctcgttgatctgggatccaaaggtaaagagcaacaagagctgattgaatgtgagagttgctctttaaatctccacagaggaaaacatacaaggtaccaagaatgcaacccttctctgactcaagggtcctctgaaattaagagatcctcaaggaatcatgagaagagcaaaggcagatatcaccacagagatcctcagctcttgcaaagtcttaggaaaaatgaaataatgaagaagacattttcagaaacagattccagcactgaaatactgggagttccagaaggcagcaaggacatgaatgatgcagggctccaggtgaataaccctgttcagaagcctcctgccacctatgacgatgggtctgataatttagaagtatgcagaatctgtcactgcgaaggggatgaagagagccccctcatcacaccctgtcgctgcactgggacactgcgctttgtccaccagtcctgcctccaccagtggataaagagctcagatacacgctgctgtgagctctgcaagtatgacttcataatggagaccaagctcaaacccctccggaaggtacagtatccataggaattggtttgggagggaccatttgcaaagcagacttgttttagaaatctatttcctttgccaatacgattctcctaatatgctaatatccattaagggtatgtgtcttgtgttgagctcagtgcacaaaatttatctaagtgtttgcagataatccttcctttcttctatgttttatattctagagcttctgattgatatattactttcaatgcttttttaaaagtcagtgtgtgcacgtaatagatataaacatatatatgtatatgcatgcaaaatgcacttgtaattcaatgtaattgaattgatgngaactatgatagcattgtgcttacggaagccagttctcaagaaggttacatgatacattgccttaaacaacatcaactcatcaaatttcttacaagttatttattaggtaatagaagagaatgatttcttctataaagtgtgtactatttatgtttgcttttatttgggaattggtttaatggcacatgtgtaattagagtaggtagaaataaaaagtactattttccatattgtgcatcaggctgtaagagagaggtaagtgtattttgtatctgtaatgtttgtcttcaaattcctcatttatgttatatttttctgaagaagaaaggtaagactgtgagtcagatacaaagttagtgtctcactcaaagccaccgaagaacagcttgtaaacaatacaaacaaggacaatgaacttatacaattcatgtttgatagctggacttctggattttagcatgtaacttatttatctttttgcctaactgtagccttacatatatggctgcctcagtttccaagggagagtatgaagaccacagtttaaataatgaatcatcccagagttgctttttttatttaaattgaatgcaaagcaaaagttataggacattgcctgnaaagaaacacaacgagttccagaatgagcagagttgaaatgcaaataagaatattctagcacatatctgattgctggctgaccattgcaattcttcattaattctgtaaattgtggagngagagaatcacattccttgcttttgtggtagcctcaatttttaaaatctgcaaatggtttatagctatcaaaaataatgcataaaattcctttaggatatgtgtggtctttttttaacaatggggtaacctgagtgctgcagggtaaccctgtttttctagggcccagaggtgtcaatgccagaaatagaaatggaccctgattccttgtcctttgcttcatccgctggacagatgctgagcattgtctgcagtagttaaatggcacattgtactccacgattttccaaatgttttttcttagttctcagggcactacaaattatttcatagaatctatatatttcttcattttttttctcatgctaaatttacataaaattttcatttcaactttgtcaaatacagtattttaatttgagggccacgatctaggataataacatattctaattttctcttctttaccatatctatcaccactactcatttttgtttaattaaaaaacatgatgctgagaagaaacttgaaaagtctttttattccaccgccagcttttgtagtatctagtataccctgtcaatacaactttcatcctttgttaatattccattctcaataatttacaactctcttaggaaatcttatttttttcctcaacaaacacacttataaaccagagaaaggcagcaaatatgtctatctttttaaatattcatgataatggaccaggcacggtggcttacacctggaatctcagcactttgggaggctgaggcaggcgtatcccttgagcccaggagtttgagaccaacctgggcaacaaagtgaaatcttgtctctacaaaaaagttaaaaaaaaaaattaacctggcatggtagcacacacctgtagttccagctactcaagaggctgaggaaggaggatcccttgagcctaggatttcaaggttccagtgagctttgattgcaccactgcaatcaagcctgagtgacagagccatactttgtctcc

SEQ ID NO: 30937 - DNA, 1859 bp, Homo sapiens
gtgttgcaagggatatattttattagtttcattaatgaaattttaatagcaataaattcaggcttttaaatattacaaagtattttcaaatatctcatggggccttgatgttagcttcaggaagtatctagcaacctaatggctgtttgattagacttctcagactattattatccttgtcacataatagtgctttagtccatgtatcataggatcttcaagtattattcatttgtttccaaagcaaattgagctattccactcaaatgattacagtaaatagaatagaaacttgtggaatcatcttcctctctcgtaaatgaagtaacagcaaaatagcgcagcatctcagctgttccaggttcctcaaataagttttacttttgcaaaaccaacctcaaacttcctatattctctgttctgcattataagcaacatgaccagcagccacgtttgttgtaattttttaaatatgtggaaaaaaagcaagatatcaaccatgtattaccttaaccaagatgccaaattatctaacttgtttctccaggcaagcagcccaacaacagggacagctcccaggagccagtcaaggttgtctgtctgtccatccactcaggacatctgcagaatctgtcactgcgaaggggatgaagagagccccctcatcacaccctgtcgctgcactgggacactgcgctttgtccaccagtcctgcctccaccagtggataaagagctcagatacacgctgctgtgagctctgcaagtatgacttcataatggagaccaagctcaaacccctccggaagtgggagaaactacagatgaccacaagtgaaaggaggaaaatattctgctctgtcacattccacgtaatcgcaatcacctgtgtggtttggtctttgtatgtattgatagaccggacagcggaggaaatcaagcaaggcaatgacaatggtgtccttgaatggccattttggacaaaactggttgtggtagccattggcttcacaggaggtcttgtcttcatgtacgtacagtgtaaagtctatgttcagttgtggcgcaggctgaaggcctacaaccgtgtgatctttgtacaaaattgcccagacactgccaaaaaactggagaagaacttctcatgtaatgtaaacacagacatcaaagatgctgtggtagtgcctgtaccacaaacaggtgcaaattcactgccatctgcagagggtggcccccctgaagttgtatcagtctgatggaacctgttgggagtttcttcaccgaagaatatctttctagccctcagccactacaaatgacagaagtgatcttgaattatttactcccttcagctcctcctttctcctactgacacatttttcctgactttgttcaaagaggaaaggagaaaaacaaacagaccaaatgcccaggagcccatgaagtaatagcgtaaagtaaagtatgatatggaaatgtgaagtttgcaagagaatgatttccaagacaattaagaactactggggcaatgaatgcttttaggcagtaatcaaagattaaatggacccatgatactcttcttcacagtaacaggggaaaagttcaagaatacagacttgaattgcgatgtgtattacttctagggccttgtaatgttaactgtctcatctggaaataataactaacatatttggttttaagcctgaaattgtctgcattatccctaagtcacattggaagtgaacttggaggatgcatattttgatatgctttgacagctaacagatttgtatggtttagtggagtctggttattttgacagatgcatgttttttttaaatagatgcaatatacatttga

SEQ ID NO: 30938 - DNA, 313 bp, Homo sapiens
ttttatttgtggctattgcaaataggattacttttttgaattcttttccagtttgttgactgttggcatatagaaatcctactgatttgtacatgttgattttgtattatgcaaatttactcaagttattacttctaatagttttttgatggatatattaggccattctcatattgctgtaaaaataatcagtgactagttaatttataaaggaaataggtttcattgcctcatggttctacaggctgtacagaaagcatagcactggcttctgcttctggtgaagcctctgacaactgacaatcaaggtgaa

SEQ ID NO: 30939 - DNA, 476 bp, Homo sapiens
atcgtggaaaaattgtcttccacgaaactgctccttggtgctaaaaaggttggggaccactgctttgtagtttataaaaacacttttatatgttccattttctttgattcttaggccaaaccagaaagacatttaggacaaagaagacatttgctattcatatgaatactctaagaattctgaggcccaagggccggggcactacggttcatgcttgtaatcccagcactttgggaggctgagacaggaggattgctagagctcaggagtttgacaccagcctgggcaatgtggcaaaaccgtctctacacaaaatataaaaattagccaggcatgcactacaggtgcacacctgtcatcccagctactcaggaggctgaggtgggaggattgcatgagcccaggaggtcgagactgcagtgagctgtgatcatcccactgcacttcagcctgagtgacagagcaagaccctgttt

SEQ ID NO: 30940 - DNA, 377 bp, Homo sapiens
gtggcaagtaaaagaaggaaactcaagtcaattaacgtgagtttatatcctgcctccaccattcttgagccttgtgaccttgagcagtttgcttaaccatcctgggcctcaatctcctcatcagttacatgaggtaatatgatacatacctcatgatgctaatttggggaaccagtgagttaatacatgaaaagtatttagaacagcaccacacatgaagttagttatcagtatgcctgttggaattttgcataaaaggaagtccacctgagtatacatggtaccggaggcctgctgtttgagagcgcctgctgcctgccggggcttcacagggccttgctggagggaggccagggcttggcttgcagctctggaga

SEQ ID NO: 30941 - DNA, 799 bp, Homo sapiens
gcctaggcctcccaaagtgttgggattataggtatgagccaccgcgcctggtctgggaaggtaattgattctggagccacacagctccccacccatgtaatgagagccctggctttgagctaagatagagtccctgccccactgccaccaccaagaagcataccagggggccatggttctgtcccatgtgtgttagatgacgtgccacctcctcaggaaaattaccccagccgctcaggaccattcagtcccaggcatgctggagggacttggggacattgggctacaaaggaccctaactgtgggactcaggggtggcaccctgcagcatctccttttcagagcccctcgcagtgaagtcctgccttgtttcaggtgggaaggaggccccagtactggtccttggtcatgtgtagaagttctacgtgtgatctttgattgccagacggaagggtgagatagaaaatcatagttcttttatgactctataagcttgttcaacagttgaatcattgtaatttaattttattttacaagcagtagaaagactcactgggattgaaaactgtgtatcatctccctaggagatgacctaacaaataactgtgatgctattttcaaaggcatttacggccgctctgcagcctcctgtagacaggctgacaggcggcggcagcccagcgtggctgcgcggggcaggagtgcttgtcagcaggaatgctgctcccgccatcgtgacctagagaaccactgttgacatccctgtctttctgccttttatgcaaacattttattcttt

SEQ ID NO: 30942 - DNA, 782 bp, Homo sapiens
tcatttaatcctccacagaaaacctacttttagaacttaggaaactgaggatgaagtgacttgaccaaggtctcctagctacttagcagaggaatactctttagagataaataattgtggtgacatttcaatcaaagtatctgataattgcagtgccttcccacacccaactctctaggagaagaaataatttaaaagatacatttattcataaacacacaagtactcattctgtgtcttttcctatcacaaagcccacggatatacagctgaataagtctgcaagtcagaggttaagaaaagttggctctggcatccgacaggctgacttggatgaggctctgcaatgctaccttggatgggtacttattttctctaacctcagtttcttcatctgcaaaatgggaaacaatattcgtgctttcctcatgattttgctgggaaaatgaaataagacaatatgtttttgcacagtacagtgcattaaacgctccatagtatgcacttgatatatactaggttttattgttgaataagcaaggacagccatggctcctctcagaggagctccctgattagggagaggagaaaaacgtttaaatagcatttcctgtccaatgtgatgcgagcagtagggaaaccagggaaaggcacgaatgactgccttggaaaagtctaaaaaggtttcatagaggtgacttttgagctggtgattttagggggagcagtgcttcaccggatggagaaggaggtagacattccggctatgtccaaacgtgggg

SEQ ID NO: 30943 - DNA, 4723 bp, Homo sapiens
agccagaggaggaggagaactcaggcagctctgcagagggggccaggagctcgggtgtttggtacccccagccccaccgctgttgctgctcctgcagcggggacacaggtgaggacgccccgagagagagggggagggggaccaccactagcgctgtcctcatccttccctggtccagcccccacgccctaacccatcctgggatagtccccaggggtcccactggaccttgcccttcccaggcctccttccagggaccccgcaccctccccctgcctatgccaccttctctcctatgcctggctgtggttgcttctcttcctcctgctgccgctgctgctactgccactgcccagtacacaccgccagcccctcggggtgtggtttccccagacctgcccccaacggtgggacccagccttctcccggcgtctcctgccagcttcctgcaaagcccaggagcccccctccctggagacacacccaactccctttcaacaccccacccccctcttaatcccattttggggttaacccccttcctcttatttagtcttcatagatcccctgggtgctctgggattgtgcccaacttcctaacatttgagtcccggcccttggaattccccaggcccctttttcctccctgtagaactcctgagagtgtcgaccaggctttgttggcccgtctagatacccacctcccccagataactctcagcctctcaaaaaataacccagccccctgtctacccctttagataaccccttcccctctccagccctactaggaggctctggcctctcctttcttccccagaactcctgtagagtatagacacccccccgggctattcttggcaactctaggcagtcccaagacacctttcagcctctttacaacctcctggatccacagccacccctcaagatgcaccagctccctttccagatccatgaggggggtctaaccctcttatgcttcccctagaagtcttgagggtgtggacaaccctcctcacctgtctcagcccctctagaacccccacttccaggcactctcagtctctttcaagcacctctggtcccatttctaccctctggatgccccagtctcctctccaccactgcaaaggaattccaggctcttctgccttccctgagactcttgagagtgcagagaattccccacgtgtttcttggcccctctagacgcccccagacacctctcaggcacaggctgactcctttagaatcatctcagtctctctaaaccctccctcagctccttcttggccccatccccacaccccttttctgctcttctccatgtccccaaggcccttctcagtccctcagaacattgcccaggcccctcctaggttctgtaaatgtcccccagactccttcccatctctttagttcttcctcctggttcctcttggcctctctagacacccccagtttccttgtttgggtggctcaaggtgtctccaagcccccaccatcctggagacagccacattctcctaaacgccaccctcactaagtctccctgggcttggggagtggcacgatggcggcaggcctggccacgtggctgccttttgctcgggcagcagcagtgggctggctgcccctggcccagcaacccctgcccccggcaccgggggtgaaggcatctcgaggagatgaggttctggtggtgaacgtgagcggacggcgctttgagacttggaagaatacgctggaccgctacccagacaccttgctgggcagctcggagaaggaattcttctacgatgctgactcaggcgagtacttcttcgatcgcgaccctgacatgttccgccatgtgctgaacttctaccgaacggggcggctgcattgcccacggcaggagtgcatccaggccttcgacgaagagctggctttctacggcctggttcccgagctagtcggtgactgctgccttgaagagtatcgggaccgaaagaaggagaatgccgagcgcctggcagaggatgaggaggcagagcaggccggggacggcccagccctgccagcaggcagctccctgcggcagcggctctggcgggccttcgagaatccacacacgagcaccgcagccctcgttttctactatgtgaccggcttcttcatcgccgtgtcggtcatcgccaatgtggtggagaccatcccatgccgcggctctgcacgcaggtcctcaagggagcagccctgtggcgaacgcttcccacaggcctttttctgcatggacacagcctgtgtactcatattcacaggtgaatacctcctgcggctgtttgccgcccccagccgttgccgcttcctgcggagtgtcatgagcctcatcgacgtggtggccatcctgccctactacattgggcttttggtgcccaagaacgacgatgtctctggcgcctttgtcaccctgcgtgtgttccgggtgtttcgcatcttcaagttctccaggcactcacagggcttgaggattctgggctacacactcaagagctgtgcctctgagctgggctttctcctcttttccctaaccatggccatcatcatctttgccactgtcatgttttatgctgagaagggcacaaacaagaccaactttacaagcatccctgcggccttctggtataccattgtcaccatgaccacgcttggctacggagacatggtgcccagcaccattgctggcaagattttcgggtccatctgctcactcagtggcgtcttggtcattgccctgcctgtgccagtcattgtgtccaactttagccgcatctaccaccagaaccagcgggctgacaagcgccgagcacagcagaaggtgcgcttggcaaggatccgattggcaaagagtggtaccaccaatgccttcctgcagtacaagcagaatgggggccttgaggacagcggcagtggcgaggaacaggctctttgtgtcaggaaccgttctgcctttgaacagcaacatcaccacttgctgcactgtctagagaagacaacgtgccatgagttcacagatgagctcaccttcagtgaagccctgggagccgtctcgccgggtggccgcaccagccgtagcacctctgtgtcttcccagccagtgggacccggaagcctgctgtcttcttgctgccctcgcagggccaagcgccgcgccatccgccttgccaactccactgcctcagtcagccgtggcagcatgcaggagctggacatgctggcagggctgcgcaggagccatgcccctcagagccgctccagcctcaatgccaagccccatgacagccttgacctgaactgcgacagccgggacttcgtggctgccattatcagcatccctacccctcctgccaacaccccagatgagagccaaccttcctcccctggcggcggtggcagggccggcagcaccctcaggaactccagcctgggtaccccttgcctcttccccgagactgtcaagatctcatccctgtgaggggtaggcctgctgattcagagggtcctcttcatttttgggaactcctttccaaagccatatttttgggaggcagagaggggcaggcttgggcaccccttctgccccccccactgagaactatgcaatggagtttcatgaaatggtccacatagtggggaagtagccaggaaatgagaaacttcctcccaccccagacatttttcctggtgggagctgaagcactgggcttccacaggcccctggcctccttgccctagcacactgggactggccccactctcccagctggactcctgcatgctcctccccttgggctctcagatgaaggcaaagctttgatccgacatctgagctctagcctaagaaggagagttgagatttcctcctccctctggctgggatatggagctttggaggttcagagaagagaaccctcacctctgatctggcctctacgagaggtcctcatctccatctggcccaacaattcccagattctgaagcttggaatgcaaacacaggcttcatgggctgtggcctctgcagcgacctgccatccccaggccttgcctgaggggtcaggctgcctctcccaacacacactcagatagcacaaattctaccatccccttccctggctgctggaaatggaccccgcaaccctgtcctctgctgggcccccagcaaactctagcaatagcagctgctgccgtgtcattatgcaaagcctctgaccagtttgctgcagcatttacatctgccctaatcagaggggccacctctaactcctcctcctcctctcttctcctctggtttgcgtccttcctgggttgggctggagtctggactggctgagataagagcctggcaaccagcaagagctgggctgtatttggagatcatgggctgattccatgttcttgggcaacagtccagaagcatcaggggctccggcctgggatgtttctgaactttgggagttataggagacaggaggaacttctcctcctcctcctcccctacaattccttttcacatattcctttcttctccctcttgggtgaccttccaaaactctgctctcaggctgaaatctggcatcatctcaggttccctgtccccagcactgtccccatggagctggtggctgacaaagatgtagtttccatcagtcaataaaacctgagaggagagatgagg

SEQ ID NO: 30944 - DNA, 1861 bp, Homo sapiens
gggtcggggcctggatagggttggggtgagccataacggggaggaaggtgctgcccttatcgctctgctccatctactccaggacagcggcagtggcgaggaacaggctctttgtgtcaggaaccgttctgcctttgaacagcaacatcaccacttgctgcactgtctagagaagacaacgtgccatgagttcacagatgagctcaccttcagtgaagccctgggagccgtctcgccgggtggccgcaccagccgtagcacctctgtgtcttcccagccagtgggacccggaagcctgctgtcttcttgctgccctcgcagggccaagcgccgcgccatccgccttgccaactccactgcctcagtcagccgtggcagcatgcaggagctggacatgctggcagggctgcgcaggagccatgcccctcagagccgctccagcctcaatgccaagccccatgacagccttgacctgaactgcgacagccgggacttcgtggctgccattatcagcatccctacccctcctgccaacaccccagatgagagccaaccttcctcccctggcggcggtggcagggccggcagcaccctcaggaactccagcctgggtaccccttgcctcttccccgagactgtcaagatctcatccctgtgaggggtaggcctgctgattcagagggtcctcttcatttttgggaactcctttccaaagccatatttttgggaggcagagaggggcaggcttgggcaccccttctgccccccccactgagaactatgcaatggagtttcatgaaatggtccacatagtggggaagtagccaggaaatgagaaacttcctcccaccccagacatttttcctggtgggagctgaagcactgggcttccacaggcccctggcctccttgccctagcacactgggactggccccactctcccagctggactcctgcatgctcctccccttgggctctcagatgaaggcaaagctttgatccgacatctgagctctagcctaagaaggagagttgagatttcctcctccctctggctgggatatggagctttggaggttcagagaagagaaccctcacctctgatctggcctctacgagaggtcctcatctccatctggcccaacaattcccagattctgaagcttggaatgcaaacacaggcttcatgggctgtggcctctgcagcgacctgccatccccaggccttgcctgaggggtcaggctgcctctcccaacacacactcagatagcacaaattctaccatccccttccctggctgctggaaatggaccccgcaaccctgtcctctgctgggcccccagcaaactctagcaatagcagctgctgccgtgtcattatgcaaagcctctgaccagtttgctgcagcatttacatctgccctaatcagaggggccacctctaactcctcctcctcctctcttctcctctggtttgcgtccttcctgggttgggctggagtctggactggctgagataagagcctggcaaccagcaagagctgggctgtatttggagatcatgggctgattccatgttcttgggcaacagtccagaagcatcaggggctccggcctgggatgtttctgaactttgggagttataggagacaggaggaacttctcctcctcctcctcccctacaattccttttcacatattcctttcttctccctcttgggtgaccttccaaaactctgctctcaggctgaaatctggcatcatctcaggttccctgtccccagcactgtccccatggagctggtggctgacaaagatgtagtttccatcagtcaataaaacctgagaggagagatgagg

SEQ ID NO: 30945 - DNA, 189 bp, Homo sapiens
cctcttggacacagcagaaagttcatggatattggacacctattggatccaaattttgaattttaattctgctatttgaaaaccctgtaacctagaacaaattatggaaagagaaggggattagcactatctctgtgttaccagctttactgatataaataaataatacattacttacctgcattgctt

SEQ ID NO: 30946 - DNA, 431 bp, Homo sapiens
gaataacagaaggtcacctaattcctgacataagaaaatgaccattcctggaaagtttatccataaagagacacgaaaaagtggaccagaagacaacctagaattgaaagatcagcgtagtcatcataaactagactagtggtcttcaaactggattgcatgatgaactcatttggaaggcttgttaaagcacagattgcttggcacaggcccgtaagtttccattcagaaggcctggggtcgggcaggagattccacagttctaacaaagtctcaggtaaccttgataatgatagttccaggaccacaccccgagaacccctggactactacacgataagcatttccttgagtaactgctggttaaagttctcacaaattcagtcttgatgttggattaaaagtcagttgaaaaagtacaggataagtaa

SEQ ID NO: 30947 - DNA, 390 bp, Homo sapiens
agcgtgaacagagcccagctttgcagccagaaagatctggcttttactcctggcaccccacttcaagctgtgtgacattggacaaatcacatatcctagctcaggcgcagtttctttacctgtgaaccgtctgtcccacctaccttaaagagttgccatgagggccagacaatgcaatgactaagagcgctttggaaaggagaatgctggatgcaggtgtcgtcgttattagtgtccagcccatcctttttatgtgcagctctgtgaagacatcttcccttgatgtcagaaccaaaaaacccaagcaaagcaaagacccagggctacatttctgctctggagtctcttgtatgacagtatctatgttgggcttttcagtgtgtaaaccga

SEQ ID NO: 30948 - DNA, 411 bp, Homo sapiens
taactacattcttttttacttgccataatggaaaaactttattaaacaaattatgcccactgttgctctgggatttggggactaggtaggcatgatttcaatggaaaataatttagtaatggtatgtctcaataatgtatcaacaacctggaaagtatatattctttgacttaggattttcatttctaagaatttgtcttatagaaataatagtaggtcaaaacaagaatgtagtcataagagtatttactgcaatgttgtttagaagagggagaaaacaaatgaaaatgggctgggtgcagtggctcacgcctgtaatcccagcactttggaaggctgaggtgggtagaccacttgaggccaggagtttgagaccagcctggtgaaaccccatctctactgaaaaaacaa

SEQ ID NO: 30949 - DNA, 378 bp, Homo sapiens
gcccagaaaagtctataatgggtagattcaattgacagtctggagacttgattttatgtcctggctccttccccagattgtacaccataatctctctctgtctcaaattccccatccttcaaacatgtccaacaacccgctatgtaaccccaactttaactgcattgcttatgagtttgaatgaaataacaatatgagtaaaggacacaggaaaaaaaatcaactgtctatgccaatatcaggcttgtaaagggtatgggtcactttctatcaagaaaccttgggtagttgagtgaaccacatttttctttagtgtgcctttagtgaaaaatgactaattgaataggattgctaggcaccagaacttcagctttcaaa

SEQ ID NO: 30950 - DNA, 1329 bp, Homo sapiens
tgccgtggttactacgggctcctctttcatccgggctctactggtgaaaataactgcagacggctggtaaaaagttggaatagctttcgttaagcgtcggatgtgtagagtgctgagttaggggctggactagagacgttgggacatctcccgggaacagcagcctggaggggaaaaatctcctgacctaagtggtcattcggccttggcgcttggacacgggagtgcggcgacagccatatgtccatccatcttggcacttttccgtcctctgcctttgaagatgggtgtgcccggcaggctgtgaaagataaacattagagggttgtttagaagacttttttgacctgagcccatgaggtgcataccctttgtttggcggagaaaccagtggcttctgaagatcagggacgggccacaagtgcgaggcattgcagacatttcgaacccagacttccagcctggagacatccacacgcttccagtttcttgcactggtacttcattctgtcattatgattgccaccactcgtaactgagagttgcgtgccctcaagttttgagtgtctgcagggtacctttgagctttcttagctgtgtagtgagtggggggaatggagaaaatgaaggacagatgactgatttgtagtttttcatttggacactgtccttgccgcacaagcacagcagcttgaacctctttgaacaagagtcgagagttcttttacagctaattacccactagttaaacttgatcatactgtgctgttttcttcctctccattgtcaatgtaatacggctcctgacaaaagttaaattcgctgggcgtggtggctcacccctgtactcccagcactttgggggctgaggcgggtggatcacctgaagtcaggaattcaagaccagcctggccaacatggtgaaaccccgtctctactaaaaatacaaaagttagctgcgtgtggtggcgggcgcctgtaatcccagctactcaggaggctgaggcaggagaatcgtttgaacccgggggggcggaggttgcagtgagctgagatcgcgccactgcacttcagcctgggtgacagagtgaaactccgtctcaaaaaaaaaaaaaaaagccgggcgctgtggctcacacctataatcccagcactttgggaagccgaggggggaggatctcgaggtcaggagttggagaccagcctgaccaacatggagaaacctcgtctctactaaaaatacaaaattagccaggcgtggtggtgggcacctgtaatcccagctactggggaggccgaggcaggagaatcctttgatcccgggaagca

SEQ ID NO: 30951 - DNA, 1046 bp, Homo sapiens
tgccgtggttactacgggctcctctttcatccgggctctactggtgaaaataactgcagacggctggtaaaaagttggaatagctttcgttaagcgtcggatgtgtagagtgctgagttaggggctggactagagacgttgggacatctcccgggaacagcagcctggaggggaaaaatctcctgacctaagtggtcattcggccttggcgcttggacacgggagtgcggcgacagccatatgtccatccatcttggcacttttccgtcctctgcctttgaagatgggtgtgcccggcaggctgtgaaagataaacattagagggttgtttagaagacttttttgacctgagcccatgaggtgcataccctttgtttggcggagaaaccagtggcttctgaagatcagggacgggccacaagtgcgaggcattgcagacatttcgaacccagacttccagcctggagacatccacacgcttccagtttcttgcactgtaaatcctgctgctgctcactctttgggtctgcactgcctttatgagctgtaacactcaccggaaggtctgcagcttcactcctgaagccagcgagaccatgaacccaccgggagaagagaacagtgctgtctttatgagctgtaacactgtaacactcactgcaaaggtcgaaggtctgcggcttcactcctgaagtcagcgagaacatgaacccaccagaaggaagaaactccggatacacctgaacatcagaaagaataaactccggacacaccatctttaaaaactgtaacactcaccgcgagggtccgtggcttcattcttgaagtcaacgagaccaagaacccaccggaaggaacaaatttcggacacaataggaaatctctaaggtggaatactatatcaaaagagagaagccaaaatgatatcatacgctgaaaatgttaatggaattccacaaccttgcctattaaaaactccacagtttgagcacagcatggaatcaaaatttaaaaaataaacatgacatagtatttttatcatttga

SEQ ID NO: 30952 - DNA, 475 bp, Homo sapiens
gccttgggttgcaggagctttgagaactatggggaaagaaacatgcgacgaagaggaagccgtggtcagagtgcagcacatactgagggtgttgttacatttacttgaactgcagtaaaaggccattgaaaggatttgggcaggactgttacattatccagctaaggtattaaatgatcttgtgagctgctatgtaggaataagattggaaaagatttctgtttttcccagtatggcggacaaggtcctctaaacaccccttttgctgtaaagcagctagaaatgctgcatttaaaaataaatgtcatttaaaatgaattgctgagttggtaagaaatccttagaggccaaaattgaagtgaaaacaggaatccagaaaagaaaggaagccagctctgcagctggcggctacccagggtaacatccagagtcagaggaaggagatatatttaaatgcgaggacatttggataatt

SEQ ID NO: 30953 - DNA, 1333 bp, Homo sapiens
ataagttattacttataatcagtttttttattgttactatggcaatattttatacacaagaatggctgaggttaggaatttgtgccctgaaaattgtatcaacatatcaaatatgaagtaaataacaatttcttgctttaaatataacaaagatgtgggaagaagtggtaggcaagagtctctgtgttaccatgggaacgattaagttttccaaggtgcaaaccagcctcattccagcttcagggtcaatgacttactagctcagagggaaatgtataaatatttaagtacatacctactatctgtacagagtgactctcattacccagagaactgctgtaaaatattatttattcacagattacacaaaaccaatctaaattagtacttttatacattctatttggggagtacttaaggtgtatgagcaaacaaattgttatccaggtcactccagaactgttgtatacagattaagaattgatgttggatactaattaaaatcattaaagcaaaatcaaaaaacactttggctagcatttcaattattttttaaacaggatttcttaaaacaatccccaaagtagtcttgtaatttgttcattttaaggatctatgttactctgaggccaatcaagggggctaacagtctagttggggagccaagatagccattcatcaattcattcattcattcagtaaaatgtattgagaacctactatgtaccaagcaatgtgctgggcactaagcattgaagaatacctgaaacatggcacctgacctcaaaaagcttaaaattaggagacatagacatgtaagtaaataactgctataggcaaatctcagcaactgccacacctgcttgctcctttagcagaacttctctgattggccatattctgcacatagtgaccaactcacctcttttccctatctgctttccttgctatagctgagaaaaaagctgtggcccaaaagtttctcccctgagagggacaggatcagattgtcttttcaagagttcccatgtgcaatacagagctgaagttgaagctgaaaggattcatagagaaaggccagtataaatcttcagcataccaaagttatgagaaaggagaaagcttgcaatgcatgtatagaggaggtgctgaggagttggtggtagcagcagacaagggaggagaaatggatagaatcatggttattgtcaaggtggaggatccgtgaactgcaactgaagagggctagtgacatgacccagttcttagggctgtctctattcctgaatatttacttaatataaggcaattcttatatagcattagggtaaaa

SEQ ID NO: 30954 - DNA, 522 bp, Homo sapiens
ataagttattacttataatcagtttttttattgttactatggcaatattttatacacaagaatggctgaggttaggaatttgtgccctgaaaattgtatcaacatatcaaatatgaagtaaataacaatttcttgctttaaatataacaaagatgtgggaagaagtggtaggcaagagtctctgtgttaccatgggaacgattaagttttccaaggtgcaaaccagcctcattccagcttcagggtcaatgacttactagctcagagggaaatgtataaatatttaagtacatacctactatctgtacagagtgactctcattacccagagaactgctgtaaaatattatttattcacagattacacaaaaccaatctaaattagtacttttatacattctatttggggagtacttaaggtgtatgagcaaacaaattgttatccaggtcactccagaactgttgtatacagattaagaattgatgttggatactaattaaaatcattaaagcaaaatcaaa

SEQ ID NO: 30955 - DNA, 909 bp, Homo sapiens
ataagttattacttataatcagtttttttattgttactatggcaatattttatacacaagaatggctgaggttaggaatttgtgccctgaaaattgtatcaacatatcaaatatgaagtaaataacaatttcttgctttaaatataacaaagatgtgggaagaagtggtaggcaagagtctctgtgttaccatgggaacgattaagttttccaaggtgcaaaccagcctcattccagcttcagggtcaatgacttactagctcagagggaaatgtataaatatttaagtacatacctactatctgtacagagtgactctcattacccagagaactgctgtaaaatattatttattcacagattacacaaaaccaatctaaattagtacttttatacattctatttggggagtacttaaggtgtatgagcaaacaaattgttatccaggtcactccagaactgttgtatacagattaagaattgatgttggatactaattaaaatcattaaagcaaaatcaaacggcacgagctcgtgccgcccagctgctggggaggctgaagtaggaggatcatttatgcttgggaggtcgaggctgcagtgagtcatgattgtatgactgcactccagcctgggtgacagagcaagaccctgtttcaaaaagaaaaaccctgggaaaagtgaagtatggctgtaagtctcatggttcagtcctagcaagaagcgagaattctgagatcctccagaaagtcgagcagcacccaccttcaaccttgggccaatgtcttcaagctttactggggacctgcgagctggcctaatggtgtggcctgcaagccaggccatccctgggcgccacagacgaacttccagccaggttagggtttggaaggcccaagcttaacctta

SEQ ID NO: 30956 - DNA, 2471 bp, Homo sapiens
  misc_feature (223)..(223): n is a, c, g, or t
  misc_feature (293)..(293): n is a, c, g, or t
  misc_feature (1790)..(1790): n is a, c, g, or t
  misc_feature (1853)..(1853): n is a, c, g, or t
  misc_feature (1922)..(1922): n is a, c, g, or t
  misc_feature (2323)..(2323): n is a, c, g, or t
  misc_feature (2470)..(2470): n is a, c, g, or t
tggcgcggcgttttcctctggctcctgcgagggcttggtttagggcttcagctctctgcgttctcggctccgggaggcctcggtgattcagccacagcctctgcctcccgttgctctgtgacctgagggtattggacaatttgtagctaagactcccggataccctgaagtcgggaaatggtgagtgtgcggggcagggcgtccggaggctggggaggcctcntcggaaccggcgggaaatggcggcggcgggaccgagtctgcgaacggagtccccgctgccgcctctcagncctcagtcccctccggtgacggaccgggctcctgtcggtccccgcacggcggctctggcccagcctgcggccctccttgtgcagttctgcgcccgcagccccgcaccttccctgggccgtggggtgaggaggagctcatctggaagacgccggcgcccgcgtgcgaggtgcccgcctgggaggagctgtggtccgggggtccggtccctactttaccctgttcggaatgagatcgaggccccatcgaaacaaagttcatgtgagcaaacggggtctcattaatgggacagcgtcggccgcggctcctggtttggggactgccagcgggtcttgaaggaaaggcttttgtgaggtgtgtgagcaagcgaagcaaatcacccgcccgctccaactattccaccagtccctttgccctgtgcacctcctccgcgtggctgttcctgagtaacatcttttagaatacgctggtgtcggtgcgcacggcgcttctcagttctgtgagtagttctgccacattgctgaacttgagggtgtgggcgcccctggtttgtagacaggcgttcagaaatgaagacgggtgtccagaggcagggactggcgtctgcagcgggagcagttgtgggaagagcgctgagcttgtggggtctgcgctgactctgggtggtgtcgttagtgagttgctggacaccgcgttggggttggagcattgactggtgttgaggaaactccgcacgttttctgtcagaagaaagacatggctgagcctgggctggagaaagatgcctggtgtctgcgggaggcgcggccgggttctgcatatgtgctgtcccgctgggcactgtccttttcctccaggtctccttccggggagagaggggacccagaacaaagaggaaaggagttctgagaaacatcccttccctgcaccctgctgccagcccccacccaatgctagtccactcctgagcacgcccaccgggcattcgcattgccccactcttcccagtacaggattccacctcaggaattgtgcccatggcagctttgcgcctagcgttttctgccaaaaacacacgcagtgcccagaagtctcctggctcatctcaaccgcagaccggatctacagcaggaacctgcttccttcacccacccaggcttccggaccacctgatcctaatcccttctgtctttgtagacatggaatcagagcgtagccctgcctcggcctgtacctgtggcacaaaccagtgctttagtcagtcctgccctgctcccactcatggctttttttttttgagatggcgtcttgctctgttgcccaggctggagtgcagtggcgtgatctcggcttactgcaagctccgcctcccaggttcacgccattctcctaactcagtctcccgagtagctgggattacaggcgcccgccaccatgcctggctaatttttttttttttgtatttttagtagagacggggtttcaccgtgttagccagnatggtctggatctcctgaccttgagccctcccgcctcggcctgccaaagtgctgggattacangcgtgagccaccgcgcccggcctcccacccatggctgttgatagctcctttctcttctgctttttcctnccccacaaattctcttttctgtgtacacggtgtgcccaagtccatccctcaggtgcctatgagaattcagacgttagtgagttcgaaaccaggccttttggcctggctgttgtaggagcaaacacaaattagaagaggcttaatgctttctctttagaacgagggaagaatttttgctcttctcctttttcttaaagcatttagtttgagaacttttatatttaaatattttctctgcttctttgaaatatatgtaaatcatttttatcagttaaataggtcatttgtcttttttggctcaaaattgtcttcatctgggacctgggaactattgctttgaaatgtaaatagcaagaatatacaccctatttcacagtttctgtaggggactaggaggctgncttcagcaggtacctagctccacattgcaaatctacatcctgtcacgaagatgtggatgtttattttttctttaatgattagaaaaaattagaaaacccagatgacctctcaaattacatgatgaaattataataaattgtgtatgnc

SEQ ID NO: 30957 - DNA, 1264 bp, Homo sapiens
tggcgcggcgttttcctctggctcctgcgagggcttggtttagggcttcagctctctgcgttctcggctccgggaggcctcggtgattcagccacagcctctgcctcccgttgctctgtgacctgagggtattggacaatttgtagctaagactcccggataccctgaagtcgggaaatggaactcgtaacattcagggatgtggccatagaattctcccctgaagagtggaaatgtctggaccctgcccagcagaatttgtatagagatgtgatgttggagaactacaggaacctggtctccctgggttttgtgatctctaacccagacctggtcacctgtctggagcaaataaaagagccctgcaatttgaagatacatgagacagcagccaaacccccagttgttcagcacttctggtctcttcagttctgatatgattttaggattgcttcttttttttttttgaggcggagtggagtgcagtggcgccatctcgtttcattgcaagttccgcctcccatgttcacaccattgtcctgcctcagcctccctagtagctgggactacaggtgcccgccaccacgcccggctaattttttgtattttagtagagacggggtttcactgagttagccaggatggtctcgatctcctgacctcgtgatccgcccatttcggcctcccgaagtgctgggattacaggtgtgagccactgcaccacgtcaggattgcgtcttatgttaatgcgaaatatgcatagctgtcatccgaagtataccaccattcccttcagcactctacgtcagaggaggcacgtcaggggagacaaaattcctcttcggacagtccctcaaaagacaggaatgtggacatatattccacatttctctttgtctcctgaggaagaagcatagagttgggagtttctcctggattgcaccatgctgtattgggaggaggtcaggctgcgctgggcatatctaataagctttttcttctcttctacatgtttttggcattgtgctcaactgaagtagtacaaattcttaactatgttcaggaattctcacaaaggcaatgtgatcagcgtggtgttaagttcatatatctatgaagaaacgaggaccagtggtgtttgtttttacgcttttcattttaaatttatattttatttattattttaatttttgtgaggacgtagtacctatatgtatctatggattatatcagtgattttgatgaaggcatgaaatgcacaaaa

SEQ ID NO: 30958 - DNA, 790 bp, Homo sapiens
tggcgcggcgttttcctctggctcctgcgagggcttggtttagggcttcagctctctgcgttctcggctccgggaggcctcggtgattcagccacagcctctgcctcccgttgctctgtgacctgagggtattggacaatttgtagctaagactcccggataccctgaagtcgggaaatggaactcgtaacattcagggatgtggccatagaattctcccctgaagagtggaaatgtctggaccctgcccagcagaatttgtatagagatgtgatgttggagaactacaggaacctggtctccctgggttttgtgatctctaacccagacctggtcacctgtctggagcaaataaaagagccctgcaatttgaagatacatgagacagcagccaaacccccagctatatgttctcctttcagccaagacctttcaccagtgcaggggatagaagattcattccacaaacttatactgaaaagatacgagaaatgtggacatgagaatttacaattaagaaaaggctgtaaacgtgtgaatgagtgtaaggtgcagaaaggagttaataatggagtttaccagtgcttgtcaactacccagagcaaaatatttcaatgtaatacatgtgttaaagtttttagtaaattttcaaattcaaacaaacataagataagacatactggagagaaaccctttaaatgtacagaatgtggcagatcgttttacatgtcacacctaactcaacatacaggaattcatgctggagagaaaccctacaatgtgaaaaatg

SEQ ID NO: 30959 - DNA, 293 bp, Homo sapiens
ctcactccctcgaacatgctctggatcacaggtagtgccggtgtagaggtgctgttgtggagggacaaggatggagaatgatcacaaacaatggtctttgtctaagagacgtttgcactttgggatggggcagtgactccctccagagggagccccgttcctcccggggcgttctaatccatgtcagccccattccagctgggtgaggacgctctatggggtgtactggcagaactccccgctggagctcactggggtccatggcagctgccccagggtagctctgcccatcg

SEQ ID NO: 30960 - DNA, 532 bp, Homo sapiens
gaccttgtttcaaaaaaaaaaaaaagagttaattgtaccaggaacatgtggtgtcaaaatttaaaatatgtgaactctttgacccagcaatgctattttcagggatatatcctaagatcatcaccagcaaagtatataaggatgtgcatgcaaaaatattcatcatggctttctttatacaatgaaaaattggaaataaacttctcattaatgggatgctggttaaagaaaatcattactgtaatatgcagccatctaaaagggtaatttatatgtatatatatttacataagaaaaccctcatgtcatattgctgagtaaaaagaaagatgtcaatgagtattcatgatgtgattctatttatccttgcaaatggtggaaattcaattatatggtattttctctcttttctgtttgtttttcatatatgtatatatttcctttgaaatcagaaaaaaatcaagctattttcatcagaggaaaaaaatcattactctgtatttcagtcacactaaaatagtcacccaagaag

SEQ ID NO: 30961 - DNA, 335 bp, Homo sapiens
agctgggaacatatgaggattattttagaaggatttgtgcctcagatttaggctcgcccactattatttttgatggtaagtctgagtctacaatcatgttgagatagccatgtgttctttccctgtaacttcttaatatatgatttaagctgtttctgaaagctgttggcattgaactccatgtttatcgagtcgacttcaaatatttgaaggtgttggtaatgtttgttatttgccccgagaagccctgaatccatactgctgggtacagtttggctttctttcataatttcaacatatataaaaataagataatacaataaagtgattgaaga

SEQ ID NO: 30962 - DNA, 147 bp, Homo sapiens
atgcttgaaacttggtaggtgttcagtaatgctgttattatgatgatgatgaaaatgcctgaggattaaataaattaaggaatcattaagaactttaacagcccagagactgagttagagccatacttttagaactctatgccctgg

SEQ ID NO: 30963 - DNA, 320 bp, Homo sapiens
ttcaggctggcctcgaactcctgggttcaagataccctctggcctcagcctcctgagtagctgggactataggcgagcaccgctgtacttggcttatgtacaagatgttgtgtgaccctgtctcaaagataccaaaaaaacaaagcaaaacttacatacaaatgtttattacagcattcttcataatagccaaaaagtgaaaacaacccaaatgcccatcaacaacagataaaatggggtctctccatacaatggaatattatttaaacataaaaaggaatgaaatggtgatatgtgctacaccgcatagatgaaccttg

SEQ ID NO: 30964 - DNA, 329 bp, Homo sapiens
tttttgagacggagtcttgcagtcttgctctaacaccaggctggagtgcagtggcacaatctcggctcactgcaacctccgcctcctgcgttcaagcaattcccctacctcagcctcccgagtagctaggactacagtcatgtgccaccacacccggctaattttttgtattttagtagagatggggtttcaccatgtcggccaggattgaccttgtgatcttcctgcctcggcctcccaaagtgctgggattacaggtgtgagccatggcactctgcctctagctttctaattatctatgagctgtgtccacctggctattcagttca

SEQ ID NO: 30965 - DNA, 483 bp, Homo sapiens
ggcacatacacacacacacgcacacacacgggcctcctgtggtctcacttggtcctctttgtgacagtgccattgttaccatttacagaggaggaactgaagctcatggttgagcctctcacttgcccactttgccaaaccctggtagggatgggattagaggctccttttctttcgtgaaatgagacaacgatctgggggatcgttggaaggattaaaatgagtattcagattacaatgctggattcttaatagtgtcctctgttaataataataataatgtagtagcaacagtcacgtagtctttacagtcacaggtgcatgtgtgtagatggggttctctctgtattagccaggctggtctccaactcctggcctcaggctatcttcgcacctctgcctcccttagtgctggtattacagatgtgagccactacaccagcctgcagtttttactacaactctgtgaggtgattagtacta

SEQ ID NO: 30966 - DNA, 460 bp, Homo sapiens
ttttctatacctgataggcgaacttcaattgtaagaccaggtaaaatgttaccagtaaatagctctcagctcctgagccagaattcattgcttctgtaggggctggtaacttggtccagttctgctcagctgctcctttgttgcagactgagcccatgaccagaagcctcagctgctccagcagatggtggctagaattttttgagttgtttttaacctggtgctctgagactggggtgaacctagggagctgaagcagcaatgccacacccccaacacatcatacacacacacacacacacacacacacacacaccaggcacacgcataacatggacttacaacatgccatcatgttggcatgatgggcacgttataaggatgggctggcagggcgcggtgactcacgcctataaccccagcactttggcaggccgaggcaggcagatcacttgaggtc

SEQ ID NO: 30967 - DNA, 533 bp, Homo sapiens
caggttgaaaccaagataagcctgtgcattgagtctgaagaattgtactttttccaaatattacagttttgaaaactaatttatgaattgaagtagctaagttccatccagtttccaactcccattttttgacacagatcagaatgaaaaacctagaagccaatatccaaactttactccagacctttccactgttcaggcagtagttgaggactgagacagacgttctgaatgacaactttacggtgacaactgactgttaatgtcatgtgataacatgtctgtagcttttttggaaataatctaggatgatagaatgggaggtatctcttcaaaaatatgtatttagcctaattgctgaaatactttatatttttaggactgatatgactgctttttttcatttatttagtttataacttcatgtagtatgaattcagcctgaaattgacatttaaattttgtacctaaattcgtaggtttagtttttttaagaaaacaatggctttccagtaaataaaataatattttta

SEQ ID NO: 30968 - DNA, 443 bp, Homo sapiens
attaacagatcttctccctcaaagaaggcatgtaaatgttttacattattgtcaaactgtaaacaataatgaaccagctctttaggtaaaagaagttaaacaatactactactaataataatttgcctctataaagggactttttccaaactctcgaggaaccagctgtagctgggtagcatccttccctcaggagtctgagaacacattctgaggggcccctgttctgtgcttctaggttctgataattcaaccactacttctttccccaatctagggaggtagatgcctcctacagttactattagtagtaacctcatcagggtttttttggtttattttttgtttgtttacaaatgctttttgctctttaagttttcaaatgtattttaaactaattttctaaattaacttctttctgttgaaataaaaattttccattc

SEQ ID NO: 30969 - DNA, 128 bp, Homo sapiens
catagtgaattatgatcccaaatttttattttcttttcacattgctataacaattacccaaagatgtgaaagtggctttagaactgggtaatgggcagagacttggaagaatttcaaggaacaggcta

SEQ ID NO: 30970 - DNA, 485 bp, Homo sapiens
gtcttctataaactaacttctactccacccatcttggtaataaccactgttctctgttggcttctgcctcctttctcaaaacatccattccctttgccctccccatgttcttagtggagaagtcctgtgcagtttctgtacttgataccgcatccactttgcagttgacttgaaataacaactaaacctttgtcattgacacctgtttcgtctccacactgcatccttcttcagattcttggtctgtcacaatccttgttgctgttcagtaggtgaaggcaaagtcaaagggttgagtctaaagctgatattgtatgtgggtgtaccacacatgcaacagtctagaaaaatctatcacaaggctgggcctggtggctcatgcctgtagtcccagctgctcgggaggctgaggcaggagaatcgcttgaacccaggagggggaggttgcggtgagctgaggtggcgccactgcactccagcctggg

SEQ ID NO: 30971 - DNA, 380 bp, Homo sapiens
atcttcattctattacctccatgtacagtaatataaagtaacatttcccaaaatatattctaaggaaaacttaggtcctcaggagacaaggatgaacaacgttaaataaatctcttctttagtgaaatatctctcacagatcttattttgcacactgtgaatctgagagggggaaataccatacattataagatcaaatcacctttatagtgaaggatctggcaagtccagaaattgctcgaaacactgatgtaaaccattactaaggcctctaagagcaaagaaaataccatggatgagtcagtactagtgcagaaagattctaaatactagaggagaactctagtatttagaattagtagtagttaaccaaatgttca

SEQ ID NO: 30972 - DNA, 683 bp, Homo sapiens
attaaacaccatgcagaagctgtatgattttggacccccttacatcaatctccttatctgtgaaatgggaataataaaatctacctcacagaattattaacagaattaaatgagataatccatggaaagctagtagcagcatgactaacacagaagtaagcactgaataatgtacacatgttgatgacagttgatttttatatgcgttcttatgtcatagacatttgttgttattaaaaatatcacaggggagcgtggccctgctgtaaaaaaaacattacaagatatcatggtggtggagaatgattccattgtggtgacttccatcacagctctcagctgtgaaacagccccagggccctggaaaagagcccccaaggacttagtttctaggaagaaggttcggcctttggaggggaacagtttgcccattgcctccacaagctctgctttctttccctagcctggagatttttgtgatattcatagtaaggaaaataaatttttgtcttgacttagtaatgatagttaatgggtactataataaacagtcctacaggccaggcgcggtgactcacgcctgtaatcccagcactttgggaggctgagacaggcggatcacctgaggtcaggagttcgagatcagcctgaccgacatgatgaaaccccgtctctactaaaaa

SEQ ID NO: 30973 - DNA, 438 bp, Homo sapiens
agttcttatatttaatctgaatatgaatactgatacagaataacaaagaattgaggaaagtgatttttatttctttatactaaaataaaatcctttttgctttcagtttaagattatttcagaagtttgacaatttccggattcttgtttgtggaggcgatggaagtgtaggttgggttttgtcagaaatcgataagctcaacttgaataaacagtgtcagctgggagtgttgcctttgggtacaggaaatgaccttgcccgagttcttggctggggaggttcatatgacgatgacacccaacttcctcagatcctagagaaactggaacgagccagtaccaaaatgttggacaggtaaaagtaaattcttttctacaactagatggaaaatggcatactgaaatcatttttttgatgatttcttaataaatatttat

SEQ ID NO: 30974 - DNA, 458 bp, Homo sapiens
agttcttatatttaatctgaatatgaatactgatacagaataacaaagaattgaggaaagtgatttttatttctttatactaaaataaaatcctttttgctttcagtttaagattatttcagaagtttgacaatttccggattcttgtttgtggaggcgatggaagtgtaggttgggttttgtcagaaatcgataagctcaacttgaataaacagtgtcagctgggagtgttgcctttgggtacaggaaatgaccttgcccgagttcttggctggggaggttcatatgacgatgacacccaacttcctcagatcctagagaaactggaacgagccagtaccaaaatgttggacaggtggagtataatgacatatgaactcaaattgccaccaaaagcttccctacttccaggacctccagaagcatctgaagaattttatgtaagacttaacccttta

SEQ ID NO: 30975 - DNA, 415 bp, Homo sapiens
aaaccttttttaaacaaactatggctatttttaaatctacattacatcttccatatcttcctactgccttctagcatttcacttttgagaaaccctgattttgagggacatcttatgcattcatatttaatgaccagccaggcttacacatgtaattgcagtactttgagaggcagaggtgggaagatcacttgagcccagtagttagagaccagcatggacaatgaagtaagaccttgtctgtacaaaaaactttaaaaaaattagccaggcatggtggtgtgtgcccatagtcccagctctttgggaggctgagatgggaggataatttgagtccaggagatcgaagctacagttaactgtgatcatgccactgcactccaacctggatgacagagtaagaccttctttcaaa

SEQ ID NO: 30976 - DNA, 1187 bp, Homo sapiens
cattaacaaagatggtgcttatggggcaggttccctaacagtcaggattccggttgcagtttttctcccccgccccaaagatacgtggttgcagacggagaaatggaggccagagacaaacaagtactccgctcacttcgcctggagctgggtgcagaggtattggtggagggactggttcttcagtacctctaccaggaaggaatcttgacggaaaaccatattcaagaaatcaatgctcaaaccacaggcctccggaaaacaatgctcctgctggatatcctaccttccaggggccctaaagcatttgatacattcctagattccctacaggagtttccctgggtcagggagaagctgaagaaggcaagggaagaggccatgaccgacctgcctgcaggtgacagattgactgggatcccctcgcacatcctcaacagctccccatcagaccggcagattaaccagctggcccagaggctgggccctgagtgggagcccatggtgctgtctctgggactgtcccagacggatatctaccgctgtaaggccaaccacccccacaacgtgcagtcgcaggtggtggaggccttcatccgttggcggcagcgcttcgggaagcaggccaccttccagagcctgcacaacgggctgcgggctgtggaggtggacccctcgctgctcctgcacatgttggagtgatggtgcctccagcaaccgctggggagtgtgtccctgagtcatgtgggctgaatcctgactttcactcagagcaggtggttttttgtgtaggtttgttttttatttttgatgatcttcagatggaaggagaaaacagggtttccactagacattacttgaaaggccagattactcagcagatctcccatgttggctcaacaattctttgtttttaattgcttgaagattgcattgttgtaattgttcagtttttaaatgtgtaatggcattttaatagactagtaaatcacagtggttcaaaatatatatccatatatatatatatccatatatatatctcatgtcatcacattacaggcaggtgtctcatatgtaaaacatttacctgaatgttgtctgaggactgaactgtggactttactattcataatgataaaataataaaatgcgaattactataaaaaaaatgtgcctcactcatgaga

SEQ ID NO: 30977 - DNA, 632 bp, Homo sapiens
cattaacaaagatggtgcttatggggcaggttccctaacagtcaggattccggttgcagtttttctcccccgccccaaagatacgtggttgcagacggagaaatggaggccagagacaaacaagtactccgctcacttcgcctggagctgggtgcagaggtattggtggagggactggttcttcagtacctctaccaggaaggaatcttgacggaaaaccatattcaagaaatcaatgctcaaaccacaggcctccggaaaacaatgctcctgctggatatcctaccttccaggggccctaaagcatttgatacattcctagattccctacaggagtttccctgggtcagggagaagctgaagaaggcaagggaagaggccatgaccgacctgcctgcagttgccatcatcaggcttcctagagaattgagcctgcccactctgttatgaagtctacccagaagagctggcagagtaggccccttcactgggactgcagcaacactgaccaaagcaaatccttctcttggaagaaacaaactcattcctcacacctgcctcaccccgctcccaccgccaccccctgcaccacacgccagcccttaataaaaactaaaactgatgtcattgta

SEQ ID NO: 30978 - DNA, 1469 bp, Homo sapiens
atgcgccacgccctgttcctccttcatcacccagctcctcctcctagtgttcagggcttagctttagcctccttcccctggaaggccttccctaatgaagttaggagctcctctgtataaccaaaggcactgctcactggttttgctgggcacatttataaccattcactcaatgtcatgcttcttagcagactggcctcaggcaaataagaatctagttcaggaagtgtaaggtcagatttcctcgttgccccgtctcatacttcctgttcctcttctgggctctgcagaacggtaactccactcttgtggcctctgctatgaacaaaccccgctctcttcccttcctgctaccctatggccccttaggtttattttgttctcagcagccctcttggctctggcttctgttagcagctacacgttttctcggtaatatttcaagttcaacctcatcggcgagggtagctgtttggtttagcctttgtcctctagcacgtgcctttcctgcagggaggggcattcccagccttggaacaggccccatcactaaggccacagacagtgccagagggagctggggtctgtgcagccattcttgaattcccccagaatgccttgcctggccttgagtaaaagggatagaagtgaaaaaagcctgttacaaagcagcatgtacgaggtgacagattgactgggatcccctcgcacatcctcaacagctccccatcagaccggcagattaaccagctggcccagaggctgggccctgagtgggagcccatggtgctgtctctgggactgtcccagacggatatctaccgctgtaaggccaaccacccccacaacgtgcagtcgcaggtggtggaggccttcatccgttggcggcagcgcttcgggaagcaggccaccttccagagcctgcacaacgggctgcgggctgtggaggtggacccctcgctgctcctgcacatgttggagtgatggtgcctccagcaaccgctggggagtgtgtccctgagtcatgtgggctgaatcctgactttcactcagagcaggtggttttttgtgtaggtttgttttttatttttgatgatcttcagatggaaggagaaaacagggtttccactagacattacttgaaaggccagattactcagcagatctcccatgttggctcaacaattctttgtttttaattgcttgaagattgcattgttgtaattgttcagtttttaaatgtgtaatggcattttaatagactagtaaatcacagtggttcaaaatatatatccatatatatatatatccatatatatatctcatgtcatcacattacaggcaggtgtctcatatgtaaaacatttacctgaatgttgtctgaggactgaactgtggactttactattcataatgataaaataataaaatgcgaattactataaaaaaaatgtgcctcactcatgaga

SEQ ID NO: 30979 - DNA, 1194 bp, Homo sapiens
ttaaaagaaaggattcaaacttagtactaatctgcatctggagaactaatctggtatgtgttattttcaagtcacccaactaaagcagtctgttgtatggaactctgctccctcttagtcaaacaaatgcaaccataaaaagcagtgcaaattcagtgtcaccttttctccatgggattgggtggtttcttttggagcagagagagtttccagagaatcaatatagtagccagaagaaaagtggagggtggccttaccttgtccactccgtgctgcctgagggtgaaatggaacctcggatgttgtacacctttaaattgtccatgttgcctgtttcatagccttcccgggccagggagctgtgtagtcagtttatagttctaagaaccagagcaggactgctgtgcttgtaattgcatgctttttatggaacaggcaatgttgtttagggaatttgggcagctggaacctgccacattagcaatttggactgaggaagaatttcagggtgataaaataaagctcattatataaattcacttgggtatttaggaggctgagaagggagaggatgagagtattccaaaggcaagcaggagagtttcataaacaggtccctttctattcgtttttactgtaagtgttgaattgagctaggaggatcacatggcccattttgcaaagggcagtcatgttctgctgtttcttagctgttttgtcagttggaacaaaacaacagcgctgctcattttttgcagggttagaggaaaaaggaaggactggccgaagaatggggtggggagctggagaagagaagggccaaaagtgtcagactgtggggatgaggacctgaaggaggcccatgagacctcaggcatgggccctggaactctgcctttttgaagcctgttgacaatctcaccctaatttaaccctttgtggaattcttccatgagatgcagttgccatcatcaggcttcctagagaattgagcctgcccactctgttatgaagtctacccagaagagctggcagagtaggccccttcactgggactgcagcaacactgaccaaagcaaatccttctcttggaagaaacaaactcattcctcacacctgcctcaccccgctcccaccgccaccccctgcaccacacgccagcccttaataaaaactaaaactgatgtcattgta

SEQ ID NO: 30980 - DNA, 435 bp, Homo sapiens
ttcatgtcccgccggacattcaaggaatccgactatgttttctatataaacatatagtatttttcacatctgaaaatatacactgaattttccaggactgtgtataaatagaggtacaagaatctgagcctcccttgtcctttagtgcaatcaagcagagtatccacatactgaaatacacaacattttctgattacaaaggcccaggaatagctagttagcttgccctggtgtcactgctcactcctgtgaagaataaggataaaccatgaggatagtagtggtaatggtgaaacagaaagaacacagaaagctgattctagagtagggctatctaatagaaatatcatgcaagccaccaattggagccacatatgtggtttacatttggaagtagctacattttaaaaagtaaaaagaatatgtaacattaat

SEQ ID NO: 30981 - DNA, 1133 bp, Homo sapiens
cattaacaaagatggtgcttatggggcaggttccctaacagtcaggattccggttgcagtttttctcccccgccccaaagatacgtggttgcagacggagaaatggaggccagagacaaacaagtactccgctcacttcgcctggagctgggtgcagaggtattggtggagggactggttcttcagtacctctaccaggaaggaatcttgacggaaaaccatattcaagaaatcaatgctcaaaccacaggcctccggaaattcctagattccctacaggagtttccctgggtcagggagaagctgaagaaggcaagggaagaggccatgaccgacctgcctgcaggtgacagattgactgggatcccctcgcacatcctcaacagctccccatcagaccggcagattaaccagctggcccagaggctgggccctgagtgggagcccatggtgctgtctctgggactgtcccagacggatatctaccgctgtaaggccaaccacccccacaacgtgcagtcgcaggtggtggaggccttcatccgttggcggcagcgcttcgggaagcaggccaccttccagagcctgcacaacgggctgcgggctgtggaggtggacccctcgctgctcctgcacatgttggagtgatggtgcctccagcaaccgctggggagtgtgtccctgagtcatgtgggctgaatcctgactttcactcagagcaggtggttttttgtgtaggtttgttttttatttttgatgatcttcagatggaaggagaaaacagggtttccactagacattacttgaaaggccagattactcagcagatctcccatgttggctcaacaattctttgtttttaattgcttgaagattgcattgttgtaattgttcagtttttaaatgtgtaatggcattttaatagactagtaaatcacagtggttcaaaatatatatccatatatatatatatccatatatatatctcatgtcatcacattacaggcaggtgtctcatatgtaaaacatttacctgaatgttgtctgaggactgaactgtggactttactattcataatgataaaataataaaatgcgaattactataaaaaaaatgtgcctcactcatgaga

SEQ ID NO: 30982 - DNA, 978 bp, Homo sapiens
ttcatgtcccgccggacattcaaggaatccgactatgttttctatataaacatatagtatttttcacatctgaaaatatacactgaattttccaggactgtgtataaatagaggtacaagaatctgagcctcccttgtcctttagtgcaatcaagcagagtatccacatactgaaatacacaacattttctgtgacagattgactgggatcccctcgcacatcctcaacagctccccatcagaccggcagattaaccagctggcccagaggctgggccctgagtgggagcccatggtgctgtctctgggactgtcccagacggatatctaccgctgtaaggccaaccacccccacaacgtgcagtcgcaggtggtggaggccttcatccgttggcggcagcgcttcgggaagcaggccaccttccagagcctgcacaacgggctgcgggctgtggaggtggacccctcgctgctcctgcacatgttggagtgatggtgcctccagcaaccgctggggagtgtgtccctgagtcatgtgggctgaatcctgactttcactcagagcaggtggttttttgtgtaggtttgttttttatttttgatgatcttcagatggaaggagaaaacagggtttccactagacattacttgaaaggccagattactcagcagatctcccatgttggctcaacaattctttgtttttaattgcttgaagattgcattgttgtaattgttcagtttttaaatgtgtaatggcattttaatagactagtaaatcacagtggttcaaaatatatatccatatatatatatatccatatatatatctcatgtcatcacattacaggcaggtgtctcatatgtaaaacatttacctgaatgttgtctgaggactgaactgtggactttactattcataatgataaaataataaaatgcgaattactataaaaaaaatgtgcctcactcatgaga

SEQ ID NO: 30983 - DNA, 844 bp, Homo sapiens
tgaggtgtgcctttcaccttctgccatgattgtgaagcctccccaccacatggaacggtgacagattgactgggatcccctcgcacatcctcaacagctccccatcagaccggcagattaaccagctggcccagaggctgggccctgagtgggagcccatggtgctgtctctgggactgtcccagacggatatctaccgctgtaaggccaaccacccccacaacgtgcagtcgcaggtggtggaggccttcatccgttggcggcagcgcttcgggaagcaggccaccttccagagcctgcacaacgggctgcgggctgtggaggtggacccctcgctgctcctgcacatgttggagtgatggtgcctccagcaaccgctggggagtgtgtccctgagtcatgtgggctgaatcctgactttcactcagagcaggtggttttttgtgtaggtttgttttttatttttgatgatcttcagatggaaggagaaaacagggtttccactagacattacttgaaaggccagattactcagcagatctcccatgttggctcaacaattctttgtttttaattgcttgaagattgcattgttgtaattgttcagtttttaaatgtgtaatggcattttaatagactagtaaatcacagtggttcaaaatatatatccatatatatatatatccatatatatatctcatgtcatcacattacaggcaggtgtctcatatgtaaaacatttacctgaatgttgtctgaggactgaactgtggactttactattcataatgataaaataataaaatgcgaattactataaaaaaaatgtgcctcactcatgaga

SEQ ID NO: 30984 - DNA, 508 bp, Homo sapiens
cattaacaaagatggtgcttatggggcaggttccctaacagtcaggattccggttgcagtttttctcccccgccccaaagatacgtggttgcagacggagaaatggaggccagagacaaacaagtactccgctcacttcgcctggagctgggtgcagaggtattggtggagggactggttcttcagtacctctaccaggaaggaatcttgacggaaaaccatattcaagaaatcaatgctcaaaccacaggcctccggaaaacaatgctcctgctggatatcctaccttccaggggccctaaagcatttgatacattcctagattccctacaggagtttccctgggtcagggagaagctgaagaaggcaagggaagaggccatgaccgacctgcctgcaggtaggcctcagaaagatcactttgaaccagctccaaaatgttgtaactatgctctttgcttttttgtttatttgtttgtttgtttttgagacagagtcttgctctgtt

SEQ ID NO: 30985 - DNA, 466 bp, Homo sapiens
taacagtcaggattccggttgcagtttttctcccccgccccaaagatacgtggttgcagacgtaagtaacaggaatccatctttctttgaaagtcctgcattgtagcgtctgcgacctgggccctgcgggggcttccccgccccgctaacttgctccgcatttccgatccgggccaaggctgggtggctgcggcagtgccggaggcccgctctccccttggtccgctctttagttcattcccagcactccctctttagcgggtcaagttgccgcagaaaccgcccgtagtcttcctgtttgatacaagggtttcagcggccgaagcagagcctttttaaatagttcccaatgggcgctcacggccaaacgtgaacacctcccctcctcacctgtcacctcctgaactttacagggttgcgagggggagtgtgggatcgggtgtcgcctagccgtggtcgtactgcc

SEQ ID NO: 30986 - DNA, 328 bp, Homo sapiens
atggaggccagagacaaacaagtactccgctcacttcgcctggagctgggtgcagaggtattggtggagggactggttcttcagtacctctaccaggaaggaatcttgacggaaaaccatattcaagaaatcaatgctcaaaccacaggcctccggaaaacaatgctcctgctggatatcctaccttccaggggccctaaagcatttgatacattcctagattccctacaggagtttccctgggtcagggagaagctgaagaaggcaagggaagaggccatgaccgacctgcctgcaggtaggcctcagaaagatcactttgaaccag

SEQ ID NO: 30987 - DNA, 461 bp, Homo sapiens
gacccgcagtgtgatccctggcacgcactgactttgatattccaggcacacggactggctatttatcaccacttctttttccccactaagattcctgtgccttttaaggcagagggagatccctatggcgttagtcttcccaggccttaaagggcccttgtcttcactcacaaacctcttatctcttcttctccttcctctacattttaaagggggagagggaaaagtaaccgggagacaaattgagccacatattttcagacacttgttaccatattttaaaatctggcttcacatacacagagtctttgctatgcaccatgtactgttctaagcttcttaaaaatagaatctcaattattattttgcaggcaatactctgtgcattcattagctaggacaacaatgcatttgcagtagtgagatttcgttaaaaaattaaagccatttactatgatctg

SEQ ID NO: 30988 - DNA, 470 bp, Homo sapiens
ggacgcgtgggtcgacccacgcgtccggacccacgcgtcgcccacgcgtcgcgcaaacccaagaggcggagggtcggtgacgtggaaccgtcacgcaaacccaagaggcggagggccgctgacgtggaaccatcatcacccgaacccaagaggcggagggtcggtgatgtggaaccgtcacgcaaacccaagaggcggagggccgctgacgtggaaccatcatcacccgaacccaagaggcggagggtcggtgacgtggaaccgtcacgcaaacccaagaggcggagggccgctgacgtggaaccatcattacccgaacccaagaggcggaggttgagctgagaagaggccagtgcactcaagcctgagcaataagaataaaaccgagtagaacaaaataaaaaattcaaaaaacaaaacaaaacccacactccaaaaactaacaaagaataaataaataatataaaaat

SEQ ID NO: 30989 - DNA, 356 bp, Homo sapiens
gagtctgagtctttctctgttgcccaggctggagtgcagtggcacaatcatggctcactgcagccttgaactcccaaatagctaggactacaggcacgtgccaccacacccagctaatttttttattttttggtcggtgacgtggaaccgtcacgcaaacccaagaggcggagggccgctgacgtggaaccatcattacccgaacccaagaggcggaggttgagctgagaagaggccagtgcactcaagcctgagcaataagaataaaaccgagtagaacaaaataaaaaattcaaaaaacaaaacaaaacccacactccaaaaactaacaaagaataaataaataatataaaaat

SEQ ID NO: 30990 - DNA, 1181 bp, Homo sapiens
atgataatatcaagacacctgccgagcgtctgcgggggccgcttccaccctcagcggatgataatctcaagacaccttccgagcgtcagctcactccccttccaccctcagctccaccctcagcagatgataatatcaagacacctgccgagcgtctgcgggggccgcttccaccctcagcggatgataatctcaagacaccttccgagcgtcagctccccttccaccctcagctccaccctcagcagatgataatatcaagacacctgccgagcgtctgcgggggccgcttccaccctcagcggatgataatctcaagacaccttccgagcgtcagctcactccccttccaccctcagctccaccctcagcagatgataatatcaagacacctgccgagcgtctgcgggggccgcttccaccctcagcggatgataatctcaagacaccttccgagcgtcagctcactccccttccaccctcagctccaccctcagcagatgataatatcaagacacctgccttccaccctcagcggatgataatctcaagacaccttccgagcgtcagctcactccccttccaccctcagctccaccctcagcagatgataatatcaagacacctgccgagcgtctgcgggggccgcttccaccctcagccgatgataatctcaagacacctcccttagctactcaggaggctgaggcagaaaaaccacgcaaacccaagaggcagagggcggctgagatggaaccacctcccgaacccaagaggcggagggtcggtgacgtggaaccgtcacgcaaacccaagaggcggagggccgctgacgtggaaccatcatcacccgaacccaagaggcggagggtcggtgatgtggaaccgtcacgcaaacccaagaggcggagggccgctgacgtggaaccatcatcacccgaacccaagaggcggagggtcggtgacgtggaaccgtcacgcaaacccaagaggcggagggccgctgacgtggaaccatcattacccgaacccaagaggcggaggttgagctgagaagaggccagtgcactcaagcctgagcaataagaataaaaccgagtagaacaaaataaaaaattcaaaaaacaaaacaaaacccacactccaaaaactaacaaagaataaataaataatataaaaat

SEQ ID NO: 30991 - DNA, 453 bp, Homo sapiens
ttaagtgtgttaagacaacgatcagctgccctcagcactgatgtcagcattggcatctcgggtagaaccagtcagacaggcagacacccggtgtgggagcttgggttctgcctggcactgagagttcctaaaggcttgtcttgggcacacagtgtgaggtgctgtcttctcgctggtgctgaaattcacgtttctgctgtgtctttcctgtgagggccagtcccagacatgcttctggacattaccatatcccttctaggaagatgctgaacatctccagggacaaattggagcctgaagcctcagagctactgatgatgaaggaaagaggcaaacattcaggagccacagtgcaagctgaggacaagagaaaggcaagtggggccaggccacacacaccttgttcccacctttgggctttttatcttcttcttcttccgtttgtgccgtctg

SEQ ID NO: 30992 - DNA, 487 bp, Homo sapiens
tttttagaagattcagtgagagccaagttttcttttctcactgtaatcatagggattggttcattaggtaaattaagaaaatgaaattaaaaattaaaacagaaaaggaactccaaaaacaaaaacaacaaaacaaaattcatttatcctcttcttagaatttcagccaaataaaggtatatccaagttgaacctcccaatctaaaaatctgaaatctgaaatgctccaaaatccaaaactttttgaggcaccaatataacaccataagtgaaaaattccacatctgactgcatgtggcagggtgcagtcaaatgcattcgaaactttgtttcatgctccaaattatttaaaatcatgtataaaattaccttcagggctacctgtataaagtgtatattaaaacgtaaatgaatttcgtgtttagacttgggtcctatcccctatcctgaagatacttcattgtgtttatgtaaatattccaaaata

SEQ ID NO: 30993 - DNA, 567 bp, Homo sapiens
ttttcgactgatttttgtattcaaaattttgtggatgatttttaaatttacggtgtgctaggcattgaaggtaaaaatggtgaacaagtccttgtagagatgaattatcttcccatctcattaccttcatctcttcaaacttgggtgctttagaaaacgtgtgagggtacttgcagcaatgggatttttgagatttgcattaggagggcattctgaggtggcctgtcctgggacttcctgatgccagttaaaaactagtgtttcttgcttttgtgtatccaagctttgtgatataccacctgtctgtctaatggagagtgcatctttagttgtgtatgatatgtgctctcaggagaaaatgctttcttgcatgttatgcaatagctatgatttcctcttatgagtttacatcaggaatatcatggtatttatattagaaatttatatgaggctgggtgaggtggctaacacctgtaatcctagcactttgggaggctgaggtgggaggattgcttgagcctaagtgtttgagaccagcctgggcaacatagcaacacctcatgtgta

SEQ ID NO: 30994 - DNA, 544 bp, Homo sapiens
ggttttctagatcttaccgctattggtttccaatttaattctgatgtggtcacagaacatactgggtttgattttaatgtttttaaatttactgagactttttgtataggccagcatactgtctatctttctttggaaagaagtacatcctgtagttggtaaatgctttgttccataaatattggttacgtccatctagaagttttgggcgtttcccccaacaactcctacttcctcactttgtttcatttactgagagataaatgttataatctattactgaaatgtagatttatctaattcttccttcagttctataaatttctgattcatgtactttgaagctattaaatacacacaaatttaggattgttatgacttattctgaattaatactttcatagtgatttaatgatcctctttatttcttatcaggtggtctataattcaactttgtgatacattaaaaaataggggtagcagcttttttctttcaagcacatctcttttaggcagcatatacttgggctttgctttttcctct

SEQ ID NO: 30995 - DNA, 456 bp, Homo sapiens
ttatgattgccaattagtgactatgtggccttgggcgagtcttactgagccatcgactctccttttcctcatgatctgggggatagtaatgcatacattatagattggcatgagaataaaggaaggtaccagtgaaaactgagacttggggctggccacatagcagatgattaaaaaaaaattggcatccttgccgggcacagttgctcatgcctgtaatcccagcactttgggaggctgaggctggtggatcacgaggtcaggagatcgagaccatcctgggtaacgcggtgaaaccccgtctctactaaaaataccaaaaaaaaattaacagggcgtggtgggtgcctatagtcccagctactcgggaggctgaggcaaggagaatggtgtgaacccaggaggcggagcttgcagcgagccgagattgcgccactgcactccagcctgggtgac

SEQ ID NO: 30996 - DNA, 866 bp, Homo sapiens
tgaaaagaaagaaaacccacaaagtacctttatgcaagagatgtcttaagtataggaatacaaaggtttgaagtaaacaagaatggaaaaattataatatgaaatacaaaaaacaaaaacgatagggcaggggactatggtggctattgcaacattattcaatgtagaccttaaggtgaaaagtattacaaagagagacaatttgtaatgataaaagatttgattcaccagaaagtttcaacaggtctaatattttaatgatttaacaatatagcctcaaatatataagcagaaatgaacagaactaaaatgagaaaagacaagtctgcattcccagattttaatatactcagtaacagaacagcagccatgcaaaaatacgtaaatatgtaaagattggaataatactttaaaacttaacctaattggcatatatgaaacagaatacccaacaactgcaaaatacacattattttcaaatgcagatagaatatttatcaaaactgaccatattccaagtcataggaatggaatatattctttggccatgtatcattcacttagaaatcaataataatttcaaaaatagaaaaattctattaagttcataaattaagaaatacacttttaaataactcatggatcagacaataaattacaatgaaaattagaatatatttgaactgagtagtgaaagtgctacatgtcaaaacttatggtagacgcctaaagccatgcttagaaggaaatttatagtcttaaacgcacattaaaaaaaaaagattgaaaatgaacctagtagttaaaatattctaagaatagcaaattaaacctgaagaaaataaaggaaataataaagaacaaga

SEQ ID NO: 30997 - DNA, 1206 bp, Homo sapiens
ccgcccctccccgtctctccccgcccctccccgtccctcccgccgaagctccgtcccgcccgcgggccggctccgccctcacctcccggccgcggctgccctctgcccgggttgtccaagatggagggcgctccaccggggtcgctcgccctccggctcctgctgttcgtggcgctacccgcctccggctggctgacgacgggcgcccccgagccgccgccgctgtccggagccccacaggacggcatcagaattaatgtaactacactgaaagatgatggggacatatctaaacagcaggttgttcttaacataacctatgagagtggacaggtgtatgtaaatgacttacctgtaaatagtggtgtaacccgaataagctgtcagactttgatagtgaagaatgaaaatcttgaaaatttggaggaaaaagaatattttggaattgtcagtgtaaggattttagttcatgagtggcctatgacatctggttccagtttgcaactaattgtcattcaagaagaggtagtagagattgatggaaaacaagttcagcaaaaggatgtcactgaaattgatattttagttaagaaccggggagtactcagacattcaaactataccctccctttggaagaaagcatgctctactctatttctcgagacagtgacattttatttacccttcctaacctctccaaaaaagaaagtgttagttcactgcaaaccactagccagtatcttatcaggaatgtggaaaccactgtagatgaagatgttttacctggcaagttacctgaaactcctctcagagcagagccgccatcttcatataaggtaatgtgtcagtggatggaaaagtttagaaaagatctgtgtaggttctggagcaacgttttcccagtattctttcagtttttgaacatcatggtggttggaattacaggagcagctgtggtaataaccatcttaaaggtgtttttcccagtttctgaatacaaaggaattcttcagttggataaagtggacgtcatacctgtgacagctatcaacttatatccagatggtccagagaaaagagctgaaaaccttgaagataaaacatgtatttaaaacgccatctcatatcatggactccgaagtagcctgttgcctccaaatttgccacttgaatataattttctttaaatcgttaagaatcagttt

SEQ ID NO: 30998 - DNA, 1057 bp, Homo sapiens
ctgtgttgggcaggctggtctcaaactcctgacctcaggtaatccacccacctagacctcccaaaatgctggaattacaggcgtgagccaccatgcccggccatggttggtttttttgagaccactttatatttaggccaaataggtatgtgtgtgatgggggtggagaggatgacaagtagaatgaaggagtgatgtttcactttgccagactttaaattaattacattgcatggagctctattatgcaatactctctccatactgctgaaaaaaataatctgcaacttacaatttgatccttgagttaccaaccagtaacacttgttctttacaccctttctcattccctaagtcattagaaagcaccagttctaactccaaatgatgacatggtcttattttatctattaaccataagcttacagattctagtgaagaaaaaactttaggaggctacatggtctattggagagtgtaggctctgcagtcagaagatccctacccaggcttctgtctttctcagtaagacttgggaccacagcaaggtccgcaatctcctgaggctctgttttctatggttgggataacatggtaagttattttcttctaagtagtcacacatggaaatcttatctaaaattttataccattaacttttatttcacttattaactcataccattaatactttactttagctatgtttggtatgcatgagttaatgagtgattagagtactatgagcagcacaggtttagaaatgcctatttgcctatagtgcagcctcttacataggcaaaataaaagtcaagtaagaattttattttatttttttaaaatgcaaagtaaaatgtgtctttaaaactctcccaggaggtgaagggaagctaccataacaccaggtgggaaggaagacatactgggcttggctcatgctttaattagctactgtgtaaaaatgttcagggattttcagttatccgctggcacccagaggcaatgggtaaggttaactggagctagagccaatatttttttcttcctagaaggagta

SEQ ID NO: 30999 - DNA, 2830 bp, Homo sapiens
ccgcccctccccgtctctccccgcccctccccgtccctcccgccgaagctccgtcccgcccgcgggccggctccgccctcacctcccggccgcggctgccctctgcccgggttgtccaagatggagggcgctccaccggggtcgctcgccctccggctcctgctgttcgtggcgctacccgcctccggctggctgacgacgggcgcccccgagccgccgccgctgtccggagccccacaggacggcatcagaattaatgtaactacactgaaagatgatggggacatatctaaacagcaggttgttcttaacataacctatgagagtggacaggtgtatgtaaatgacttacctgtaaatagtggtgtaacccgaataagctgtcagactttgatagtgaagaatgaaaatcttgaaaatttggaggaaaaagaatattttggaattgtcagtgtaaggattttagttcatgagtggcctatgacatctggttccagtttgcaactaattgtcattcaagaagaggtagtagagattgatggaaaacaagttcagcaaaaggatgtcactgaaattgatattttagttaagaaccggggagtactcagacattcaaactataccctccctttggaagaaagcatgctctactctatttctcgagacagtgacattttatttacccttcctaacctctccaaaaaagaaagtgttagttcactgcaaaccactagccagtatcttatcaggaatgtggaaaccactgtagatgaagatgttttacctggcaagttacctgaaactcctctcagagcagagccgccatcttcatataaggtaatgtgtcagtggatggaaaagtttagaaaagatctgtgtaggttctggagcaacgttttcccagtattctttcagtttttgaacatcatggtggttggaattacaggagcagctgtggtaataaccatcttaaaggtgtttttcccagtttctgaatacaaaggaattcttcagttggataaagtggacgtcatacctgtgacagctatcaacttatatccagatggtccagagaaaagagctgaaaaccttgaagataaaacatgtatttaaaacgccatctcatatcatggactccgaagtagcctgttgcctccaaatttgccacttgaatataattttctttaaatcgttaagaatcagtttatacactagagaaattgctaaactctaagactgcctgaaaattgacctttacagtgccaagttaaagtttaccttattctcggccgggtgcagtggctcatgcctgtaatcccaggactttgggaggccaatgcgggcggatcacgaggtcagatcaagaccatcctgccaacatggtgaaaccctgtctctactaaaaaaaataaaaaaattagctgggtgtggcggtgcacgcctgtagtcccagctacttgggaggctgaggcaggagaattgcttgaacccgggaggcggaggctgcagtgagccaagatcacgccactgcactccagcctgggtgacagagcgagactctgtttcaaaaaaaaaaaagttgaccttattctctaaaagggctggctattcatatgatgaattgttaaggaaaacttaaagtggaagagaacacatgtgaagagactttgaaattatcaaaagaaaaaaaaaagaccagacaaaatctcatgtgccaataacttttcaaggtgcctttgttaaggaaattatatccacttaattactataatatataagactttatgaaaagcactttataaaattctaatttaaaaggtcaagaacttaacacttatttttttattcagtacagtgtgcctttatattaagtatgtgactcagtataaaatcactgaagtgtatcatgatttgattgtatcctgtaccaagactacttaccttgaatgctccaagatttaaaagtagtatgacatgttctcactctaaaataaactttttttttttttttttggaggaaaaaaaaaaaaaaaaaaaaaaaaaaaaaaaaaaaaaaaaaaaaaaaaaaaaaaaaaaaaaaaaaaaaaaaaaaaaaaaaaaaaaaaaaaaaaaaagaagagggggggcggggccccataaccccccgggggggccccaccaccccccccttttttaggagccgcccccccccatatggaggcgaggtttattataataaaagggagaacgagacgcggcccggctatataaaaaaacaccagcggttcgaggggagaacaaaccgacacgcaggagcgaatgtgatgcttcaatggggagaaacaaccccaccaccattgtgggggggggggaaaaacaaatgtagggaacacccacacacacaagcagaatagtataacggcgcccacggggggaaaaaaaaaacaacggagcggtagatggatggtgggtgaacacaccacggtagtctagctctggggcgacagaaaattgcttcaccacagaaggattgataccccacctccactcccgcgccggggccagtacttaaaaaaaatggaggataaacacagtataagcatgcacgacggaaccaataaaacatagacaaataataagatggtcatatagaagaaatggaaataaagtgcaaggagtgacggagataaaaaaaaaaaccagacaaaatacaaaatgaatacatagtaagcagctacatagaagatatgtagaaggagaggaaaaataagtaaagataataggagagaatagtatgatactatagaaagagagaaatacaaaataaaaaaagagaatagaagaataaaaa

SEQ ID NO: 31000 - DNA, 2265 bp, Homo sapiens
ccgcccctccccgtctctccccgcccctccccgtccctcccgccgaagctccgtcccgcccgcgggccggctccgccctcacctcccggccgcggctgccctctgcccgggttgtccaagatggagggcgctccaccggggtcgctcgccctccggctcctgctgttcgtggcgctacccgcctccggctggctgacgacgggcgcccccgagccgccgccgctgtccggagccccacaggacggcatcagaattaatgtaactacactgaaagatgatggggacatatctaaacagcaggttgttcttaacataacctatgagagtggacaggtgtatgtaaatgacttacctgtaaatagtggtgtaacccgaataagctgtcagactttgatagtgaagaatgaaaatcttgaaaatttggaggaaaaagaatattttggaattgtcagtgtaaggattttagttcatgagtggcctatgacatctggttccagtttgcaactaattgtcattcaagaagaggtagtagagattgatggaaaacaagttcagcaaaaggatgtcactgaaattgatattttagttaagaaccggggagtactcagacattcaaactataccctccctttggaagaaagcatgctctactctatttctcgagacagtgacattttatttacccttcctaacctctccaaaaaagaaagtgttagttcactgcaaaccactagccagtatcttatcaggaatgtggaaaccactgtagatgaagatgttttacctggcaagttacctgaaactcctctcagagcagagccgccatcttcatataaggtaatgtgtcagtggatggaaaagtttagaaaagatctgtgtaggttctggagcaacgttttcccagtattctttcagtttttgaacatcatggtggttggaattacaggagcagctgtggtaataaccatcttaaaggtgtttttcccagtttctgaatacaaaggaattcttcagttggataaagtggacgtcatacctgtgacagctatcaacttatatccagatggtccagagaaaagagctgaaaaccttgaagataaaacatgtatttaaaacgccatctcatatcatggactccgaagtagcctgttgcctccaaatttgccacttgaatataattttctttaaatcgttaagaatcagtttatacactagagaaattgctaaactctaagactgcctgaaaattgacctttacagtgccaagttaaagtttaccttattctcggcgtgagccaccatgcccggccatggttggtttttttgagaccactttatatttaggccaaataggtatgtgtgtgatgggggtggagaggatgacaagtagaatgaaggagtgatgtttcactttgccagactttaaattaattacattgcatggagctctattatgcaatactctctccatactgctgaaaaaaataatctgcaacttacaatttgatccttgagttaccaaccagtaacacttgttctttacaccctttctcattccctaagtcattagaaagcaccagttctaactccaaatgatgacatggtcttattttatctattaaccataagcttacagattctagtgaagaaaaaactttaggaggctacatggtctattggagagtgtaggctctgcagtcagaagatccctacccaggcttctgtctttctcagtaagacttgggaccacagcaaggtccgcaatctcctgaggctctgttttctatggttgggataacatggtaagttattttcttctaagtagtcacacatggaaatcttatctaaaattttataccattaacttttatttcacttattaactcataccattaatactttactttagctatgtttggtatgcatgagttaatgagtgattagagtactatgagcagcacaggtttagaaatgcctatttgcctatagtgcagcctcttacataggcaaaataaaagtcaagtaagaattttattttatttttttaaaatgcaaagtaaaatgtgtctttaaaactctcccaggaggtgaagggaagctaccataacaccaggtgggaaggaagacatactgggcttggctcatgctttaattagctactgtgtaaaaatgttcagggattttcagttatccgctggcacccagaggcaatgggtaaggttaactggagctagagccaatatttttttcttcctagaaggagta

SEQ ID NO: 31001 - DNA, 456 bp, Homo sapiens
gacagctgtagttcgtattccctacctatcctcatgtaatataacttccatttaacttaaattacatgaaaatattattgacattgttaatatgaaatattactaaacttgattgtgtttattaaaaacattgctaatacctgctttgtaacacttagaacgagggcaggaccttgtctgttttattcattgtacttagtggatattacttagaaaaatatttttgagacccccccatccctcaaaaaaatttccattttttttttcactgctcaaatcacatagactttaaaaggctatgttcttatgtgtattaagagagggatgttgaaaaatagccttcccttcaaattctgtgtgtaaatccttccatttgttgagtatctgtgaagcactagcctcctgtatgttacctcaggaaatacccagagatatagggagatatttctgtcatca

SEQ ID NO: 31002 - DNA, 453 bp, Homo sapiens
tgcacatatgttcacagaagacttattcacaatagcccaaaggtgggaacaacccaagcgttcgcagaggaatgaatggatacgcaatgtggtctatccatacgatgggatattatccaggcttaaaagggaatgacattctgacacaccctgctacatgaatgaaccttgaggacatcatgcaaagtgaaataagccagacacaaaaggcaacatattgcatgattccacttctaagaattacctagagtcatccatttcgtagggacagagaatggagaaatgtttgccagggctggaggagaagggaatggagagtttgtgtttaatgggtacagaatttcaggttgggaagatgacaatgttctgtggatggatggtggtgacagttgcccgacaatgtgactgtgcccagtgccaccagactgtatgctgaaaatgactaagatggta

SEQ ID NO: 31003 - DNA, 389 bp, Homo sapiens
ggttaggtgtggatttctctgaaataggccagggaaaaggctgtgacctctccttgggtctgctgcagcgttctagccttggctaggtgaggggaactgttgggccgatgctgtgtggctggagcagaacccacagtgctgtccatagaggagaacaagcaacgaagatcatggctaaagatcttagagatccttaaaatgccgattcctaatctcttgctgaaaactactgacttttagatattttcccgcttgccactctgtaatccagaatattaggaacaagttcttaaactcgagtttacttttcactggtgtttgcatgtgtgggggacaaaagtttatgttcttgtggcaggaaactgtgggatctgcagcatggaggagtt

SEQ ID NO: 31004 - DNA, 1839 bp, Homo sapiens
gggagcgggggcggtacttcagcggaggccggagcgaggcgtcgggatgcagcgccccgggcccttcagcaccctctacgggcgggtcttggccccgctgcccgggagggccgggggcgcggcctccggcggaggagggaacagctgggacctcccgggttcccacgtgcggctgccggggcgtgcacagtctgggacccgtggcggtgctggcaacacaagcaccagctgcggggactccaacagcatctgcccggccccctccacgatgtccaaggccgaggaggccaagaagctggcgggccgcgcggctgtggagaaccacgtgaggaataaccaagtgctgggaattggaagtggttctacaattgtccatgctgtgcagcgaatagctgaaagggtgaagcaagagaatctgaacctcgtctgtattcccacttccttccaggcccgccagctcatcctgcagtatggcttgaccctcagtgatctggatcgacacccagagatcgaccttgccatcgatggtgctgatgaagtagatgctgatctcaatctcatcaagggtggcggaggctgcctgacccaggagaagattgtggctggctatgctagtcgcttcatcgtgatcgctgatttcaggaaagattcgaagaatctcggggatcagtggcacaagggaatccccatcgaggtcatcccaatggcctatgtcccagtgagccgagctgtgagccagaagtttgggggcgtggttgaacttcgaatggctgtcaacaaggctggtcctgtggtgacagataatgggaattttatcttggactggaagtttgaccgggtacacaaatggagtgaagtgaatacagctatcaaaatgatcccaggtgtggtggacacaggcctattcatcaacatggctgagagagtctactttgggatgcaggatggctcagtgaacatgagggagaagcctttctgttgaccctgcaaggagcagagtgtgttcaccttgagtctccagcccacagccaaggtggacgtacctctccaggagcctttgccttaatgtatctctgcctggacaacttgtggtggggggtggggggaagagtgggagggggagttaaatccagtcttatgaagtattgttattaaatgtctttttaaaaagagaaatataaacatatatttttactattaaaatattcagttttttaaatgaagtagaacttgagttcatgttttatatgaaatatttaccaaaaaaaaaaaatgaggtaaactgtatttaaaacctttgacttgagtctgctggtaaagcttctgaatattgagtttgctgagaaataaaaatcaaaacttctttaagctggtaaagtgaggggcccaccagcagtgatctcctgatgccttactggaaactttgtttacttgtctgctaccctctgatttgtttttagttagtttttattgtgagcacacatagtacctagttacatcttaagatcaggtttataaaactgtggagtggagcggtatggtatggaatgacttggaatgtaagctgtcagggagaaaatgttgttacacttttgctaagatctgggggtttcttcatattcctgctgttggaagcagttgaccagaaatgcttgccagtactgccaaagcactgctgtgaaatgtgaagtactttgtttttttatttttaatgattttctttttgttattaatatttttctctgttcctttgttattacttgcatggtttggcgtcagaagtccttacctctttatattgtttgcaggtttaaataaaacagtgtggtgccattttga

SEQ ID NO: 31005 - DNA, 1848 bp, Homo sapiens
  misc_feature (337)..(337): n is a, c, g, or t
  misc_feature (341)..(341): n is a, c, g, or t
  misc_feature (343)..(344): n is a, c, g, or t
  misc_feature (360)..(360): n is a, c, g, or t
  misc_feature (364)..(364): n is a, c, g, or t
  misc_feature (374)..(374): n is a, c, g, or t
  misc_feature (378)..(378): n is a, c, g, or t
  misc_feature (403)..(403): n is a, c, g, or t
  misc_feature (409)..(410): n is a, c, g, or t
  misc_feature (415)..(415): n is a, c, g, or t
  misc_feature (439)..(439): n is a, c, g, or t
  misc_feature (454)..(454): n is a, c, g, or t
  misc_feature (463)..(463): n is a, c, g, or t
  misc_feature (471)..(471): n is a, c, g, or t
  misc_feature (488)..(488): n is a, c, g, or t
  misc_feature (505)..(505): n is a, c, g, or t
  misc_feature (509)..(509): n is a, c, g, or t
  misc_feature (511)..(511): n is a, c, g, or t
  misc_feature (533)..(533): n is a, c, g, or t
  misc_feature (539)..(539): n is a, c, g, or t
  misc_feature (543)..(543): n is a, c, g, or t
  misc_feature (548)..(548): n is a, c, g, or t
  misc_feature (556)..(556): n is a, c, g, or t
  misc_feature (565)..(565): n is a, c, g, or t
  misc_feature (578)..(578): n is a, c, g, or t
gggagcgggggcggtacttcagcggaggccggagcgaggcgtcgggatgcagcgccccgggcccttcagcaccctctacgggcgggtcttggccccgctgcccgggagggccgggggcgcggcctccggcggaggagggaacagctgggacctcccgggttcccacgtgcggctgccggggcgtgcacagtctgggacccgtggcggtgctggcaacacaagcaccagctgcggggactccaacagcatctgcccggccccctccacgatgtccaaggccgaggaggccaagaagctggcgggccgcgcggctgtggagaaccacgtgaggtataancaantnntgggaattgtgaattngttntacaattttncatnttttttatctaatatttttttaggnttaatnnatatntttttttttttttttttttttttnatttttttttagttnttttatttntttttttnttttttttttatttttnttttttttttatttacntttntnttttttttttttttatttattntttttntttnttttntttttatntcatatctnattaatggttttngtataggctgcctgacccaggagaagattgtggctggctatgctagtcgcttcatcgtgatcgctgatttcaggaaagattcgaagaatctcggggatcagtggcacaagggaatccccatcgaggtcatcccaatggcctatgtcccagtgagccgagctgtgagccagaagtttgggggcgtggttgaacttcgaatggctgtcaacaaggctggtcctgtggtgacagataatgggaattttatcttggactggaagtttgaccgggtacacaaatggagtgaagtgaatacagctatcaaaatgatcccaggtgtggtggacacaggcctattcatcaacatggctgagagagtctactttgggatgcaggatggctcagtgaacatgagggagaagcctttctgttgaccctgcaaggagcagagtgtgttcaccttgagtctccagcccacagccaaggtggacgtacctctccaggagcctttgccttaatgtatctctgcctggacaacttgtggtggggggtggggggaagagtgggagggggagttaaatccagtcttatgaagtattgttattaaatgtctttttaaaaagagaaatataaacatatatttttactattaaaatattcagttttttaaatgaagtagaacttgagttcatgttttatatgaaatatttaccaaaaaaaaaaaatgaggtaaactgtatttaaaacctttgacttgagtctgctggtaaagcttctgaatattgagtttgctgagaaataaaaatcaaaacttctttaagctggtaaagtgaggggcccaccagcagtgatctcctgatgccttactggaaactttgtttacttgtctgctaccctctgatttgtttttagttagtttttattgtgagcacacatagtacctagttacatcttaagatcaggtttataaaactgtggagtggagcggtatggtatggaatgacttggaatgtaagctgtcagggagaaaatgttgttacacttttgctaagatctgggggtttcttcatattcctgctgttggaagcagttgaccagaaatgcttgccagtactgccaaagcactgctgtgaaatgtgaagtactttgtttttttatttttaatgattttctttttgttattaatatttttctctgttcctttgttattacttgcatggtttggcgtcagaagtccttacctctttatattgtttgcaggtttaaataaaacagtgtggtgccattttga

SEQ ID NO: 31006 - DNA, 1240 bp, Homo sapiens
gactacaatctaagtctttctgatttcaaagctcctgcttattaccacttcacagcacacctagaaagcataaggtgggagcaggttaaaatgcatacttgtctttggttatcccctctactttcctgtccttctctgcctacctgtatctgcatccttggtcactgtggaaaattatcttctagggtcctgtggtgacagataatgggaattttatcttggactggaagtttgaccgggtacacaaatggagtgaagtgaatacagctatcaaaatgatcccaggtgtggtggacacaggcctattcatcaacatggctgagagagtctactttgggatgcaggatggctcagtgaacatgagggagaagcctttctgttgaccctgcaaggagcagagtgtgttcaccttgagtctccagcccacagccaaggtggacgtacctctccaggagcctttgccttaatgtatctctgcctggacaacttgtggtggggggtggggggaagagtgggagggggagttaaatccagtcttatgaagtattgttattaaatgtctttttaaaaagagaaatataaacatatatttttactattaaaatattcagttttttaaatgaagtagaacttgagttcatgttttatatgaaatatttaccaaaaaaaaaaaatgaggtaaactgtatttaaaacctttgacttgagtctgctggtaaagcttctgaatattgagtttgctgagaaataaaaatcaaaacttctttaagctggtaaagtgaggggcccaccagcagtgatctcctgatgccttactggaaactttgtttacttgtctgctaccctctgatttgtttttagttagtttttattgtgagcacacatagtacctagttacatcttaagatcaggtttataaaactgtggagtggagcggtatggtatggaatgacttggaatgtaagctgtcagggagaaaatgttgttacacttttgctaagatctgggggtttcttcatattcctgctgttggaagcagttgaccagaaatgcttgccagtactgccaaagcactgctgtgaaatgtgaagtactttgtttttttatttttaatgattttctttttgttattaatatttttctctgttcctttgttattacttgcatggtttggcgtcagaagtccttacctctttatattgtttgcaggtttaaataaaacagtgtggtgccattttga

SEQ ID NO: 31007 - DNA, 1751 bp, Homo sapiens
gggagcgggggcggtacttcagcggaggccggagcgaggcgtcgggatgcagcgccccgggcccttcagcaccctctacgggcgggtcttggccccgctgcccgggagggccgggggcgcggcctccggcggaggagggaacagctgggacctcccgggttcccacgtgcggctgccggggcgtgcacagtctgggacccgtggcggtgctggcaacacaagcaccagctgcggggactccaacagcatctgcccggccccctccacgatgtccaaggccgaggaggccaagaagctggcgggccgcgcggctgtggagaaccacgtgaggaataaccaagtgctgggaattggaagtggttctacaattgtccatgctgtgcagcgaatagctgaaagggtgaagcaagagaatctgaacctcgtctgtattcccacttccttccaggcccgccagctcatcctgcagtatggcttgaccctcagtgatctggatcgacacccagagatcgaccttgccatcgatggtgctgatgaagtagatgctgatctcaatctcatcaagggtggcggaggctgcctgacccaggagaagattgtggctggctatgctagtcgcttcatcgtgatcgctgatttcaggaaagattcgaagaatctcggggatcagtggcacaagggaatccccatcgaggtcatcccaatggcctatgtcccagtgagccgagctgtgagccagaatttgaccgggtacacaaatggagtgaagtgaatacagctatcaaaatgatcccaggtgtggtggacacaggcctattcatcaacatggctgagagagtctactttgggatgcaggatggctcagtgaacatgagggagaagcctttctgttgaccctgcaaggagcagagtgtgttcaccttgagtctccagcccacagccaaggtggacgtacctctccaggagcctttgccttaatgtatctctgcctggacaacttgtggtggggggtggggggaagagtgggagggggagttaaatccagtcttatgaagtattgttattaaatgtctttttaaaaagagaaatataaacatatatttttactattaaaatattcagttttttaaatgaagtagaacttgagttcatgttttatatgaaatatttaccaaaaaaaaaaaatgaggtaaactgtatttaaaacctttgacttgagtctgctggtaaagcttctgaatattgagtttgctgagaaataaaaatcaaaacttctttaagctggtaaagtgaggggcccaccagcagtgatctcctgatgccttactggaaactttgtttacttgtctgctaccctctgatttgtttttagttagtttttattgtgagcacacatagtacctagttacatcttaagatcaggtttataaaactgtggagtggagcggtatggtatggaatgacttggaatgtaagctgtcagggagaaaatgttgttacacttttgctaagatctgggggtttcttcatattcctgctgttggaagcagttgaccagaaatgcttgccagtactgccaaagcactgctgtgaaatgtgaagtactttgtttttttatttttaatgattttctttttgttattaatatttttctctgttcctttgttattacttgcatggtttggcgtcagaagtccttacctctttatattgtttgcaggtttaaataaaacagtgtggtgccattttga

SEQ ID NO: 31008 - DNA, 1924 bp, Homo sapiens
  misc_feature (1240)..(1240): n is a, c, g, or t
  misc_feature (1251)..(1251): n is a, c, g, or t
  misc_feature (1415)..(1415): n is a, c, g, or t
  misc_feature (1435)..(1435): n is a, c, g, or t
gggagcgggggcggtacttcagcggaggccggagcgaggcgtcgggatgcagcgccccgggcccttcagcaccctctacgggcgggtcttggccccgctgcccgggagggccgggggcgcggcctccggcggaggagggaacagctgggacctcccgggttcccacgtgcggctgccggggcgtgcacagtctgggacccgtggcggtgctggcaacacaagcaccagctgcggggactccaacagcatctgcccggccccctccacgatgtccaaggccgaggaggccaagaagctggcgggccgcgcggctgtggagaaccacgtgaggaataaccaagtgctgggaattggaagtggttctacaattgtccatgctgtgcagcgaatagctgaaagggtgaagcaagagaatctgaacctcgtctgtattcccacttccttccaggcccgccagctcatcctgcagtatggcttgaccctcagtgatctggatcgacacccagagatcgaccttgccatcgatggtgctgatgaagtagatgctgatctcaatctcatcaagggtggcggaggctgcctgacccaggagaagattgtggctggctatgctagtcgcttcatcgtgatcgctgatttcaggaaagattcgaagaatctcggggatcagtggcacaagggaatccccatcgaggtcatcccaatggcctatgtcccagtgagccgagctgtgagccagaagtttgggggcgtggttgaacttcgaatggctgtcaacaaggctggtcctgtggtgacagataatgggaattttatcttggactggaagtttgaccgggtacacaaatggagtgaagtgaatacagctatcaaaatgatcccaggtgtggtggacacaggcctattcatcaacatggctgagagagtctactttgggatgcaggatggctcagtgaacatgagggagaagcctttctgttgaccctgcaaggagcagagtgtgttcaccttgagtctccagcccacagccaaggtggacgtacctctccaggagcctttgccttaatgtatctctgcctggacaacttgtggtggggggtggggggaagagtgggagggggagttaaatccagtcttatgaagtattgttattaaatgtctttttaaaaagagaaatataaacatatatttttactattaaaatattcagttttttaaatgaagtagaacttgagaacangtaaaaataanaaaaaaaaaacacaaaaaaaaaaaaaaaagagaaaaaaaagaaaaaaaaaaacaaaaaaaaaaaaaaaaaagacaaaaaaaaaaaaaaaaaaaaaaaaaaaaaaaaaaaaaaaaaaaaaaaaaaaaaaaaaaaaaaaaaaaaaaaaaaaaaaaaaaaaaaaaanaaaaaaaaaaaaaaaaaaanaaaaaaaaaaaaaaaaaaaaaaaaaaaaaaaaaaaaaaaaaaaaaaaaaaaaaaaaaacaaaaaaaaaaaaaaaaaaaaaaaaaaaaaaaaaaaaaaaaaaaaaaaaaaaaaaaaaaaaaaaaaaaaaaaaaaaaaaaaaaaaaaaaaaaaaaaaaaaaaaaaaaaaaaaaaaaaaaaaaaaaaaaaaaaaaaaaaaaaaaattggaatgtaagctgtcagggagaaaatgttgttacacttttgctaagatctgggggtttcttcatattcctgctgttggaagcagttgaccagaaatgcttgccagtactgccaaagcactgctgtgaaatgtgaagtactttgtttttttatttttaatgattttctttttgttattaatatttttctctgttcctttgttattacttgcatggtttggcgtcagaagtccttacctctttatattgtttgcaggtttaaataaaacagtgtggtgccattttga

SEQ ID NO: 31009 - DNA, 1276 bp, Homo sapiens
  misc_feature (1177)..(1177): n is a, c, g, or t
gggagcgggggcggtacttcagcggaggccggagcgaggcgtcgggatgcagcgccccgggcccttcagcaccctctacgggcgggtcttggccccgctgcccgggagggccgggggcgcggcctccggcggaggagggaacagctgggacctcccgggttcccacgtgcggctgccggggcgtgcacagtctgggacccgtggcggtgctggcaacacaagcaccagctgcggggactccaacagcatctgcccggccccctccacgatgtccaaggccgaggaggccaagaagctggcgggccgcgcggctgtggagaaccacgtgaggaataaccaagtgctgggaattggaagtggttctacaattgtccatgctgtgcagcgaatagctgaaagggtgaagcaagagaatctgaacctcgtctgtattcccacttccttccaggcccgccagctcatcctgcagtatggcttgaccctcagtgatctggatcgacacccagagatcgaccttgccatcgatggtgctgatgaagtagatgctgatctcaatctcatcaagggtggcggaggctgcctgacccaggagaagattgtggctggctatgctagtcgcttcatcgtgatcgctgatttcaggaaagattcgaagaatctcggggatcagtggcacaagggaatccccatcgaggtcatcccaatggcctatgtcccagtgagccgagctgtgagccagaagtttgggggcgtggttgaacttcgaatggctgtcaacaaggctggtcctgtggtgacagataatgggaattttatcttggactggaagtttgaccgggtacacaaatggagtgaagtgaatacagctatcaaaatgatcccaggtgtggtggacacaggcctattcatcaacatggctgagagagtctactttgggatgcaggatggctcagtgaacatgagggagaagcctttctgttgaccctgcaaggagcagagtgtgttcaccttgagtctccagcccacagccaaggtggacgtacctctccaggagcctttgccttaatgtatctctgcctggacaacttgtggtggggggtggggggaagactttttacctcctcttttttcccctcatatctaaccatctataacctatgttatcttttcttcactnccaccgcccagtggtatttcacaaacccttcctaaaaatccggatatagcatttttaaatgtacaatctctcgatgtcccctatatgtttctcttatta

SEQ ID NO: 31010 - DNA, 2914 bp, Homo sapiens
gacgggagctgcggcgctggctacgagagtgacccagtcagcgttggttcccgtcttggccatggcctcgttcgtgacagaagttttggcacactccgggaggctggaaaaggaggatctggggacccggatcagccgcctgacccggcgggtggaggagatcaagggtgaggtgtgcaatatgattagcaagaagtacagtgaattcctgcctagcatgcagagcgcgcagggcctgattacccaggtggataagctatctgaagacattgacctgctgaaatccaggatagagagtgaggtccgccgggatcttcacgtatcaaccggtgaatttacagacttaaagcagcagttggaaagagactcagttgtcctaagtttgcttaaacagttgcaggagttttccactgctattgaagaatataattgtgcattaacagagaagaagtatgtcactggtgctcagcgtctggaagaggcacagaaatgcttgaagttattaaaatccagaaaatgctttgatttaaaaatattgaaatctctcagcatggagctcacaatacagaaacagaacatactttatcaccttggagaagagtggcagaagctgattgtatggaagttcccaccatcaaaagataccagcagtttggaatcttacctacaaactgaacttcatttatacactgaacaatcgcacaaagaggagaagacccctatgccacccatcagttctgtcctcttggcattttctgttcttggagaactacacagcaagcttaaatcatttggtcagatgctgctgaagtatatccttaggccgctggcatcttgcccatcccttcatgctgtgatagaaagccagcctaacatagttattattcgttttgaatctataatgactaacttggaatatccatcaccatctgaagtttttacaaagatcagactggtactagaagtgctccagaaacagcttctagatttgccacttgacactgacctggaaaatgaaaaaacatctactgtcccattggctgagatgcttggagacatgatctgggaggacttgtctgagtgcctcatcaaaaactgtttggtttattcgattccaacaaatagcagcaaattacagcaatatgaagagatcatacagtccactgaagaatttgaaaatgccctaaaggaaatgagatttttaaaaggagatactacagatttgctgaaatacgctcgtaacatcaattctcattttgcaaacaaaaagtgccaggatgtgattgtggcagccagaaatctaatgacctcagaaattcataacactgtgaagattattcctgattctaagataaatgtgccagagttacccactcctgatgaggataacaaactggaagtacagaaagtatccaatactcagtaccacgaagtgatgaatttagagcctgaaaatacattggaccaacattccttttccttgcccacatgccgtatcagtgagtctgtgaagaaattaatggaactcgcctatcagactttactagaggcaacaaccagtagtgatcaatgtgctgttcaacttttctactcagtgaggaatatcttccatttgttccatgatgttgtaccaacatatcacaaggagaaccttcaaaaacttccccagttggctgctattcatcacaacaactgtatgtacattgctcaccacttgctgaccctcgggcatcagttcagattgcgtcttgcccccattctttgtgatggcactgctacttttgtggatcttgtacctggcttcaggagacttgggacagaatgctttttggcccaaatgcgggcacagaaaggtgaacttctggaaagattatcaagtgctaggaacttttcaaatatggacgatgaagagaattattctgcagcaagtaaagcagtccggcaggtactgcaccaactaaagagacttggaattgtgtggcaggatgtcctgccagtgaatatatattgcaaggctatggggactttactcaatacagcaatttctgaggtcattggcaaaattactgccctagaggacatatctactgaagatggtgataggttatattccttatgcaaaacagtgatggatgaaggaccccaagtatttgcacctttatctgaagaaagcaagaacaagaaatatcaagaagaggttccagtctatgtgccaaaatggatgccattcaaggaattgatgatgatgctacaagccagcttgcaagaaattggggatcggtgggcagatggaaaaggacccctggcagctgcgttctcttccagtgaagtaaaagctttaattcgtgccttgtttcagaacacagaaagaagagcagctgcccttgctaaaattaaatagctccatcttcttaagaaagctatgtcttgaatatgtggattcttcccttggcataattactcccttaaagacttctttgaatcgcccattggttttggtgaaccagtacatcttggaagtttgactttacagaagaacgtcttacctcctggcctgtacgaggctttgtttaagaactgtttattaagataaattgtcaagtaaagcacctcaattcattgactttctagccatcttcctttgattagctaacaaactgtcaggcagcattatttcatgctgcttccagagccctctgggagctatatacattgtaaatgcaggccctagctttggaacgaggaattgggagattccaggagtcagggtagagaatttctgagcaaatcggagatattttaggggtgtggaggaggggaagggaggaatgggccaccatatttggccttacaggaattaaggagacttcctgtaatatttctttccaataaatattgctttttacaaataagg

SEQ ID NO: 31011 - DNA, 671 bp, Homo sapiens
gacgggagctgcggcgctggctacgagagtgacccagtcagcgttggttcccgtcttggccatggcctcgttcgtgacagaagttttggcacactccgggaggctggaaaaggaggatctggggacccggatcagccgcctgacccggcgggtggaggagatcaagggtgaggtgtgcaatatgattagcaagaagtacagtgaattcctgcctagcatgcagagcgcgcagggcctgattacccaggtggataagctatctgaagacattgacctgctgaaatccaggatagagagtgaggtccgccgggatcttcacgtatcaaccggtgaatttacagacttaaagcagcagttggaaagagactcagttgtcctaagtttgcttaaacagttgcaggagttttccactgctattgaagaatataattgtgcattaacagagaagaagtatgtcactggtgctcagcgtctggaagaggcacagaaatgcttgaagttattaaaatccagaaaatgctttgatttaaaaatattgaaatctctcagcatggagctcacaatacagaaacagaacatactttatcaccttggagaagagtggcagaagctgattgtatggaagttcccaccatcaaaaggtgctgctgacctcaggtggactgctttgc

SEQ ID NO: 31012 - DNA, 2574 bp, Homo sapiens
gacgggagctgcggcgctggctacgagagtgacccagtcagcgttggttcccgtcttggccatggcctcgttcgtgacagaagttttggcacactccgggaggctggaaaaggaggatctggggacccggatcagccgcctgacccggcgggtggaggagatcaagggtgaggtgtgcaatatgattagcaagaagtacagtgaattcctgcctagcatgcagagcgcgcagggcctgattacccaggtggataagctatctgaagacattgacctgctgaaatccaggatagagagtgagataccagcagtttggaatcttacctacaaactgaacttcatttatacactgaacaatcgcacaaagaggagaagacccctatgccacccatcagttctgtcctcttggcattttctgttcttggagaactacacagcaagcttaaatcatttggtcagatgctgctgaagtatatccttaggccgctggcatcttgcccatcccttcatgctgtgatagaaagccagcctaacatagttattattcgttttgaatctataatgactaacttggaatatccatcaccatctgaagtttttacaaagatcagactggtactagaagtgctccagaaacagcttctagatttgccacttgacactgacctggaaaatgaaaaaacatctactgtcccattggctgagatgcttggagacatgatctgggaggacttgtctgagtgcctcatcaaaaactgtttggtttattcgattccaacaaatagcagcaaattacagcaatatgaagagatcatacagtccactgaagaatttgaaaatgccctaaaggaaatgagatttttaaaaggagatactacagatttgctgaaatacgctcgtaacatcaattctcattttgcaaacaaaaagtgccaggatgtgattgtggcagccagaaatctaatgacctcagaaattcataacactgtgaagattattcctgattctaagataaatgtgccagagttacccactcctgatgaggataacaaactggaagtacagaaagtatccaatactcagtaccacgaagtgatgaatttagagcctgaaaatacattggaccaacattccttttccttgcccacatgccgtatcagtgagtctgtgaagaaattaatggaactcgcctatcagactttactagaggcaacaaccagtagtgatcaatgtgctgttcaacttttctactcagtgaggaatatcttccatttgttccatgatgttgtaccaacatatcacaaggagaaccttcaaaaacttccccagttggctgctattcatcacaacaactgtatgtacattgctcaccacttgctgaccctcgggcatcagttcagattgcgtcttgcccccattctttgtgatggcactgctacttttgtggatcttgtacctggcttcaggagacttgggacagaatgctttttggcccaaatgcgggcacagaaaggtgaacttctggaaagattatcaagtgctaggaacttttcaaatatggacgatgaagagaattattctgcagcaagtaaagcagtccggcaggtactgcaccaactaaagagacttggaattgtgtggcaggatgtcctgccagtgaatatatattgcaaggctatggggactttactcaatacagcaatttctgaggtcattggcaaaattactgccctagaggacatatctactgaagatggtgataggttatattccttatgcaaaacagtgatggatgaaggaccccaagtatttgcacctttatctgaagaaagcaagaacaagaaatatcaagaagaggttccagtctatgtgccaaaatggatgccattcaaggaattgatgatgatgctacaagccagcttgcaagaaattggggatcggtgggcagatggaaaaggacccctggcagctgcgttctcttccagtgaagtaaaagctttaattcgtgccttgtttcagaacacagaaagaagagcagctgcccttgctaaaattaaatagctccatcttcttaagaaagctatgtcttgaatatgtggattcttcccttggcataattactcccttaaagacttctttgaatcgcccattggttttggtgaaccagtacatcttggaagtttgactttacagaagaacgtcttacctcctggcctgtacgaggctttgtttaagaactgtttattaagataaattgtcaagtaaagcacctcaattcattgactttctagccatcttcctttgattagctaacaaactgtcaggcagcattatttcatgctgcttccagagccctctgggagctatatacattgtaaatgcaggccctagctttggaacgaggaattgggagattccaggagtcagggtagagaatttctgagcaaatcggagatattttaggggtgtggaggaggggaagggaggaatgggccaccatatttggccttacaggaattaaggagacttcctgtaatatttctttccaataaatattgctttttacaaataagg

SEQ ID NO: 31013 - DNA, 2861 bp, Homo sapiens
gacgggagctgcggcgctggctacgagagtgacccagtcagcgttggttcccgtcttggccatggcctcgttcgtgacagaagttttggcacactccgggaggctggaaaaggaggatctggggacccggatcagccgcctgacccggcgggtggaggagatcaagggtgaggtgtgcaatatgattagcaagaagtacagtgaattcctgcctagcatgcagagcgcgcagggcctgattacccaggtggataagctatctgaagacattgacctgctgaaatccaggatagagagtgaggtccgccgggatcttcacgtatcaaccggtgaatttacagacttaaagcagcagttggaaagagactcagttgtcctaagtttgcttaaacagttgcaggagttttccactgctattgaagaatataattgtgcattaacagagaagaagtatgtcactggtgctcagcgtctggaagaggcacagaaatgcttgaagttattaaaatccagaaaatgctttgatttaaaaatattgaaatctctcagcatggagctcacaatacagaaacagaacatactttatcaccttggagaagagtggcagaagctgattgtatggaagttcccaccatcaaaagataccagcagtttggaatcttacctacaaactgaacttcatttatacactgaacaatcgcacaaagaggagaagacccctatgccacccatcagttctgtcctcttggcattttctgttcttggagaactacacagcaagcttaaatcatttggtcagatgctgctgaagtatatccttaggccgctggcatcttgcccatcccttcatgctgtgatagaaagccagcctaacatagttattattcgttttgaatctataatgactaacttggaatatccatcaccatctgaagtttttacaaagatcagactggtactagaagtgctccagaaacagcttctagatttgccacttgacactgacctggaaaatgaaaaaacatctactgtcccattggctgagatgcttggagacatgatctgggaggacttgtctgagtgcctcatcaaaaactgtttggtttattcgattccaacaaatagcagcaaattacagcaatatgaagagatcatacagtccactgaagaatttgaaaatgccctaaaggaaatgagatttttaaaaggagatactacagatttgctgaaatacgctcgtaacatcaattctcattttgcaaacaaaaagtgccaggatgtgattgtggcagccagaaatctaatgacctcagaaattcataacactgtgaagattattcctgattctaagataaatgtgccagagttacccactcctgatgaggataacaaactggaagtacagaaagtatccaatactcagtaccacgaagtgatgaatttagagcctgtctgtgaagaaattaatggaactcgcctatcagactttactagaggcaacaaccagtagtgatcaatgtgctgttcaacttttctactcagtgaggaatatcttccatttgttccatgatgttgtaccaacatatcacaaggagaaccttcaaaaacttccccagttggctgctattcatcacaacaactgtatgtacattgctcaccacttgctgaccctcgggcatcagttcagattgcgtcttgcccccattctttgtgatggcactgctacttttgtggatcttgtacctggcttcaggagacttgggacagaatgctttttggcccaaatgcgggcacagaaaggtgaacttctggaaagattatcaagtgctaggaacttttcaaatatggacgatgaagagaattattctgcagcaagtaaagcagtccggcaggtactgcaccaactaaagagacttggaattgtgtggcaggatgtcctgccagtgaatatatattgcaaggctatggggactttactcaatacagcaatttctgaggtcattggcaaaattactgccctagaggacatatctactgaagatggtgataggttatattccttatgcaaaacagtgatggatgaaggaccccaagtatttgcacctttatctgaagaaagcaagaacaagaaatatcaagaagaggttccagtctatgtgccaaaatggatgccattcaaggaattgatgatgatgctacaagccagcttgcaagaaattggggatcggtgggcagatggaaaaggacccctggcagctgcgttctcttccagtgaagtaaaagctttaattcgtgccttgtttcagaacacagaaagaagagcagctgcccttgctaaaattaaatagctccatcttcttaagaaagctatgtcttgaatatgtggattcttcccttggcataattactcccttaaagacttctttgaatcgcccattggttttggtgaaccagtacatcttggaagtttgactttacagaagaacgtcttacctcctggcctgtacgaggctttgtttaagaactgtttattaagataaattgtcaagtaaagcacctcaattcattgactttctagccatcttcctttgattagctaacaaactgtcaggcagcattatttcatgctgcttccagagccctctgggagctatatacattgtaaatgcaggccctagctttggaacgaggaattgggagattccaggagtcagggtagagaatttctgagcaaatcggagatattttaggggtgtggaggaggggaagggaggaatgggccaccatatttggccttacaggaattaaggagacttcctgtaatatttctttccaataaatattgctttttacaaataagg

SEQ ID NO: 31014 - DNA, 1528 bp, Homo sapiens
ctcagcctcccgagtagctgggattaaaggtgcccatcaccacatccgcctaatttttgtattttcagtagagatggggttttgccatgttggctaggctggtcttgaactcctgacctcatgtgatctgccttcctcggcctcccaaagtgttgggattacaggtgtgagccaccactcctggcctgaaatccattcttgatggtatgtgtagctgcagttcattttcaccatcgcatcattccattgtacaaatatttcatagtttatttgtcctgtttagtctcattttcaccagtatttggaattatcagactggaaagtttcagctgatctaattggcatgcaatgataggttattgtcattttaatttgcatttccctaaattctaatgatgttgagcatcttttcattggtcattcatgtttcttctattatgtaatgcctgttcatatttttttgcccgttattctaataggttgtttgtggtttcactattgattcatgggacttctttatatatttttgtactagtccttcatcagttaaaattggttgcctgtggttactttgtaatacagttataaagcctaaggcatgagagtatggtcatcattattagttcaaagaggccttggtatagaataagggagaatagtctcatattcctcacttggtctcttcatctggctgtgctgataaccagttgtagtgggtgagcaaagaggtcagacacattgaggggcagttctataaagaagaggaaagatgcccaggatttgttttatttccatttcaagcaaataagcatttggatcaaacaggcaatttttaagtcttgcttatacttcagagacctaataggaaatggaactctatctttcgttttgcaggtgggcagatggaaaaggacccctggcagctgcgttctcttccagtgaagtaaaagctttaattcgtgccttgtttcagaacacagaaagaagagcagctgcccttgctaaaattaaatagctccatcttcttaagaaagctatgtcttgaatatgtggattcttcccttggcataattactcccttaaagacttctttgaatcgcccattggttttggtgaaccagtacatcttggaagtttgactttacagaagaacgtcttacctcctggcctgtacgaggctttgtttaagaactgtttattaagataaattgtcaagtaaagcacctcaattcattgactttctagccatcttcctttgattagctaacaaactgtcaggcagcattatttcatgctgcttccagagccctctgggagctatatacattgtaaatgcaggccctagctttggaacgaggaattgggagattccaggagtcagggtagagaatttctgagcaaatcggagatattttaggggtgtggaggaggggaagggaggaatgggccaccatatttggccttacaggaattaaggagacttcctgtaatatttctttccaataaatattgctttttacaaataagg

SEQ ID NO: 31015 - DNA, 2446 bp, Homo sapiens
gacgggagctgcggcgctggctacgagagtgacccagtcagcgttggttcccgtcttggccatggcctcgttcgtgacagaagttttggcacactccgggaggctggaaaaggaggatctggggacccggatcagccgcctgacccggcgggtggaggagatcaagggtgaggtgtgcaatatgattagcaagaagtacagtgaattcctgcctagcatgcagagcgcgcagggcctgattacccaggtggataagctatctgaagacattgacctgctgaaatccaggatagagagtgaggtccgccgggatcttcacgtatcaaccggtgaatttacagacttaaagcagcagttggaaagagactcagttgtcctaagtttgcttaaacagttgcaggagttttccactgctattgaagaatataattgtgcattaacagagaagaagtatgtcactggtgctcagcgtctggaagaggcacagaaatgcttgaagttattaaaatccagaaaatgctttgatttaaaaatattgaaatctctcagcatggagctcacaatacagaaacagaacatactttatcaccttggagaagagtggcagaagctgattgtatggaagttcccaccatcaaaagataccagcagtttggaatcttacctacaaactgaacttcatttatacactgaacaatcgcacaaagaggagaagacccctatgccacccatcagttctgtcctcttggcattttctgttcttggagaactacacagcaagcttaaatcatttggtcagatgctgctgaagtatatccttaggccgctggcatcttgcccatcccttcatgctgtgatagaaagccagcctaacatagttattattcgttttgaatctataatgactaacttggaatatccatcaccatctgaagtttttacaaagatcagactggtactagaagtgctccagaaacagcttctagatttgccacttgacactgacctggaaaatgaaaaaacatctactgtcccattggctgagatgcttggagacatgatctgggaggacttgtctgagtgcctcatcaaaaactgtttggtttattcgattccaacaaatagcagcaaattacagcaatatgaagagatcatacagtccactgaagaatttgaaaatgccctaaaggaaatgagatttttaaaaggagatactacagatttgctgaaatacgctcgtaacatcaattctcattttgcaaacaaaaagtgccaggatgtgattgtggcagccagaaatctaatgacctcagaaattcataacactgtgaagattattcctgattctaagataaatgtgccagagttacccactcctgatgaggataacaaactggaagtacagaaagtatccaatactcagtaccacgaagtgatgaatttagagcctgaaaatacattggaccaacattccttttccttgcccacatgccgtatcagtgagtctgtgaagaaattaatggaactcgcctatcagactttactagaggcaacaaccagtagtgatcaatgtgctgttcaacttttctactcagtgaggaatatcttccatttgttccatgatgttgtaccaacatatcacaaggagaaccttcaaaaacttccccagttggctgctattcatcacaacaactgtatgtacattgctcaccacttgctgaccctcgggcatcagttcagattgcgtcttgcccccattctttgtgatggcactgctacttttgtggatcttgtacctggcttcaggagacttgggacagaatgctttttggcccaaatgcgggcacagaaaggtgaacttctggaaagattatcaagtgctaggaacttttcaaatatggacgatgaagagaattattctgcagcaagtaaagcagtccggcaggtactgcaccaactaaagagacttggaattgtgtggcaggatgtcctgccagtgaatatatattgcaaggctatggggactttactcaatacagcaatttctgaggtcattggcaaaattactgccctagaggtaagggccattagatgctacactagccttgagatgcaattcatgtcccagattgtgactttgctaagaaagtgatgttgaagaaattgttcatgtttcatgtctaactcatgctgtttttttttttttcagttttgttttatatctgttttgctagaaactgtttaatctcttttatatgaaagtaggattgaactatttctcagcctaccatctagattataaatgaggaagttagaaactgggtagtggtcctgagatgcgttgtatagtgtaaagtcatttaatttgcaagtaaactcaataatttgatttagtaaagtgaatgcagtcttgtgcaggttccatttttccaacacactgttgcag

SEQ ID NO: 31016 - DNA, 1268 bp, Homo sapiens
gacgggagctgcggcgctggctacgagagtgacccagtcagcgttggttcccgtcttggccatggcctcgttcgtgacagaagttttggcacactccgggaggctggaaaaggaggatctggggacccggatcagccgcctgacccggcgggtggaggagatcaagggtgaggtgtgcaatatgattagcaagaagtacagtgaattcctgcctagcatgcagagcgcgcagggcctgattacccaggtggataagctatctgaagacattgacctgctgaaatccaggatagagagtgaggtccgccgggatcttcacgtatcaaccggtgaatttacagacttaaagcagcagttggaaagagactcagttgtcctaagtttgcttaaacagttgcaggagttttccactgctattgaagaatataattgtgcattaacagagaagaagtatgtcactggtgctcagcgtctggaagaggcacagaaatgcttgaagttattaaaatccagaaaatgctttgatttaaaaatattgaaatctctcagcatggagctcacaatacagaaacagaacatactttatcaccttggagaagagtggcagaagctgattgtatggaagttcccaccatcaaaagataccagcagtttggaatcttacctacaaactgaacttcatttatacactgaacaatcgcacaaagaggagaagacccctatgccacccatcagttctgtcctcttggcattttctgttcttggagaactacacagcaagcttaaatcatttggtcagatgctgctgaagtatatccttaggccgctggcatcttgcccatcccttcatgctgtgatagaaagccagcctaacatagttattattcgttttgaatctataatgactaacttggaatatccatcaccatctgaagtttttacaaagatcagactggtactagaagtgctccagaaacagcttctagatttgccacttgacactgacctggaaaatgaaaaaacatctactgtcccattggctgagatgcttggagacatgatctgggaggacttgtctgagtgcctcatcaaaaactgtttggtttattcgattccaacaaatagcagcaaattacagcaatatgaagagatcatacagtccactgaagaatttgaaaatgctattttaggtactttgccattctctttataaatgtgtatttgagtggttctgtatattctatttacttatcatgtgtgaatatgtt

SEQ ID NO: 31017 - DNA, 529 bp, Homo sapiens
tcgtgaagccaataaatgctaacacggagaccagaaataatcctaggagaagtcatgtaaatattgtacatatttgtggaaataacatatatacgaattttagagttgaacttgagcaaagaaacccctgtgacactgagtgggccacctcagcttggcagtgaagcaagtggacaagttggaaacggaatgtctcagctgctcttatctttgtaaaagaccattagtttgcttaaaggcaatattcctttaagatgtttgacagaaataattacaataaacatagttttataatattagaatataaatgtgatatgaaataaataacttctcttgcctgttatcaagaagttggtaataggaagaactaatataaaagacattaaaaatcaggccgggcatggtggctcatgcttgtaattccagcactttgggaggctaagacaggaggataacttgaggccaggagttgtagaccagcctgagcaatatagtgaaacctcatccctaccacaaaataaaaaataaa

SEQ ID NO: 31018 - DNA, 436 bp, Homo sapiens
gatgagcttcattatagttcttaaaataatgactattttagaaaacagtaatcatcttacattttaaatcattggatatttatgtttgttaaatgtggcaaaatagagcatgagagttgtctatgtgaatttattgggcttttgtactatagctttaaaatattcattgctttttatgaattcaaataacaaatagaggcaactgagaaacatttactatgttaagtaagcctgggatgtacagcctgcctggttctcttagcaacagttgttgaggcaacagggcaaaggttgtgctatataaccaggttaactggacaccgtcaggttgctgaacagagcagttcctctcagaagggctgaaggtggcgaggcaacataaatacatctgcaattcattcattgcccatttacactctaggcttgcaatcatctg

SEQ ID NO: 31019 - DNA, 450 bp, Homo sapiens
tccctttttcctcacaacttctacagaagtgctgagaaaaatgacttttctcaatccttggcaggagccatcctcagaaacattaccctttcttaaacctctttttaggtgggaaaattgtaaaatgtttcataagagttcctcctcatgtgcagtcagattaaggcatgtgtgtttaccaggtaggtaatcaaataggcactcactgctcacaaaagagacttaaaatttttatgtttaaaaaaaattattattattattattattattattattattgagacagggtatcactctgtcacccaggctggagccaagatcgcaccattgccctccagcctgggcaacaagagtgcaactccgtctcacaaaaaacacaacaacgcagagactggagccaggcatcggtgccacgcctgcgatcccaccactctgggagtcacaggcagc

SEQ ID NO: 31020 - DNA, 595 bp, Homo sapiens
acataaggaaatttggccctcaaggccaagaattggccacgagggggagacttcttacaatgaaaattcccaggcctccatggccaaaaattatttcttagtaggtcttcagtggaaccttggaatatacatgtttaataattccctcaagtgattcccatgcaagtggaacctcagctgcatcagaagataaacatacaaagaacaataacaaaatgtaaacaatcaacatatgttcctgctgtgatgaaccaagtaagtggaacaacagctttgtattatgataaaagtagagactaaaaggtaggcttgggtttagcatttcttaaatgttaaaatatataaaataagacacatgaacaattggtgaaatcttcccagttaaactcataaccccaagtcatcattagtccattaaaaagtatctagcaacatcgtcctatccccaccataacctggaactacactggaagggtgggaggtatggggtcacgttcttgtcatttggcatataagaaatgttgacttaatggagttcttcttttagggttatgaggactcagtcccctacaacctacttcataaaaaaaaaaaa

SEQ ID NO: 31021 - DNA, 4036 bp, Homo sapiens
ggcggcctagaagatggcggacggcgacagcggcagcgagcgcggcggcggcggtgggccgtgcgggttccagcccgcgtcccgcggcggcggcgagcaagagacgcaggagctggcctcgaagcggctggacatccagaacaagcgcttctacttagatgtgaagcagaacgccaagggccgcttcctcaagatcgccgaggtgggcgcgggcggttccaagagccgcctcacgctgtccatggcggtggccgccgagttccgcgactcgctgggcgacttcatagaacactacgcgcagctgggccctagcagccccgagcagctggcggctggcgccgaggagggcggcgggccgcggcgcgcgctcaagagcgaattcttggtgcgtgagaaccgcaagtactacctggacctcaaggagaaccagcgcggccgcttcctgcgcatccgccaaacggtcaaccgcggcggtggcggcttcggcgcgggccccgggccgggcggcttgcagagcggccagaccatcgcgctgcctgcgcagggcctcatcgagttccgcgacgcgctggcgaagctcatagacgactacggaggcgaggacgacgagctggcaggcggcccgggaggcggcgccgggggcccagggggcggcctgtatggagagctcccggagggcacctccatcaccgtggactccaagcgcttcttcttcgatgtgggctgcaacaaatacggggtgtttctgcgagtgagcgaggtgaagccgtcctaccgcaatgccatcaccgtacccttcaaagcctggggcaagttcggaggcgccttttgccggtatgcggatgagatgaaagaaatccaggaacgacagagggataagctttatgagcgacgtggtgggggcagcggcggcggcgaagagtcagagggtgaggaggtggatgaggattgaaacgggcagcttcccctacaggcctccacccaaccaccatccccttggctagagaattccctttcctgctcatccccagtgagctagtggagagggagcaagggaggccgcagagggaaaaaacaaaacgtaacacagttaagagaaataatcgtaagagaacagtgacggacaacttgagaaaagcagtcaagttccaaggaactgacagcaacctgcaaagaggaaaacagcatctcctcacctgcgtaaaattgtctcagcttctgttgtttctcaactgaggttcgtaaacccatcaggataatccctggagggaatagatccttgcacatccagggcaagaaacatgtccaagttacccagaccattgataacagttgcatttaggttgcacctgggtaatctggcataaaagatctctctaggcctcactgttgcggtgtctatcccttcacctccattgaaatcagcattttggatctaggtcttcatggaatccttgagaagagaggcctttacaattacccagttctgagggttcaggttcacgaaaagaaatgcaacttgggataatcatgaacaggttaaagataagatttcaagaagccatctaagaatacagaaccaaattggatccatttttttaaaaaaatggttttgcatggaacctggaccaaggcaaatgtcttttcttcgcagaattgttttccaggatgccagtggattcagatagcaatgcttggagtagaatccgttactaaaatagtttcaaagttgacaaaaaattttcaaagataaaagcagttttacattgggggttgctgaggtaggcacaagaaaaagtcaggcataaagcacaaggcagactgtttgagtggattggttgctgctcactaaagttgttcccctgatctctaaatatggaggtcattaccaagaaatgctttggtatgaatgagagccagatctccactgtgtgagccagtgaattatggctaattcggctgttacagccactggttggctggattttaaaccataaaacttgaagattacctacaaaagtaacagtgtggctataagcctgagctttaatggatatacatcctcacagaaaagttggaaataaccaaaactgaagtcttaatttaccttcagtttaatctgtggatttgttcaaatactaaagatcctcaggtccagaattccagcatcatttattcttttaaaatttttaagaacttgatccattgtatcagtacctcacaatcagagttggcaaatgatggatgagtgattcaagcagtgcacccggtggaagctgaaatccatctgtgaatggaactgaagtgaacgtgaatatgctgactatatcctggaagcatttttataccatcttgaaatttcaacaaactggcttttgccagttaatccagctgtctttcaagaataaaagttggggttttcaaggatcgcctcttctatattttaaatggattttcagtagaaatgatttttactaatcaagttaatcccaccccatcaaaaggtattcctagaaatgtcatagacctaggtaactttgaattgaatgggagctaacgttctttccaaagttttcaggtattctttgtgtgacaccttctcaaccaggaggcaagtaaccccgcctccacaatcttagtattttttttaaactgcatgcctgccccttatttgagctgcctttttaatttattgcatatcctttttattatcttattttggtattattcaatctatacaatctttttgtatttattgggaaatgagtaatatacaaaaaggttttcatgtatttgtggctgagagggcgggaaataattgtgtacataaaattaggcttttttaaaaaaatagattatgatgcagaatattgttgatcttagattaaaaagtggaagagccacaaacattggtgcccttttcagactatttctctactctcatcatccacagtagaatttttaaacagatttttttaaagcttttcttttaaatttttctccgttgcaaagaatgtttcctaaattgtatgggagcaatagtatttttgatgttttaatgacatccgtatacttgtactgtattttgtactacaaggcagctgtttttcaataatgtcctgctgtatttacctacgtgttttgagtgtctatttctttgctgcggagaacaaattcctaaatagttttagtaaaggagctgagaagctagcattaggtttgcagaaactatttaagtttcaactctgaggcagcaatgaaaatttaagttgcagctattagttgattgctgtaactttttcattttcaaaccatgtacaattcttgtatagaccaacttgttttcttgcttcagtggtggttctgttgctcagctgcagtgagccagttcaattttgcaaaggtgcagtacctctcctttttaaggggttggtttattcttttttctttttgtttggctgaattgcagtaactagccttgcctttctattctgtagaaatgacagggtcttcacaatccttcaccagtggctactaagctataattagctgaatagaaagaatgtggaagtggtctgaggcatatagagtatatgccaagaacactaccatatatggcatcagctttggttaccagagaaattttcttagtcattagaccatgtaacagtaatatatcatatgtaaatctttagatatcaatttgaaaatcctccaaaaaaaggagcaaagaatgcataagctatgtgttggcaaaagtaatttatattaaaattttgacctgcctatgtaagattaagtggtaatgtcatagtggtgggtttttaagtcttaaccaatctctaaggtttgtttctcctgcaagggatggttcatggcctctcttcccactgcaggaagattgcagaaggctgtggattaattgtagcatttcactgatcttcactccagtcactagggacaatagaaacctgcaaaacacagattcattcgtaaatattattaatagcttattaaaggaaatggtctttgttaa

SEQ ID NO: 31022 - DNA, 1002 bp, Homo sapiens
cagcatttccagcttctactagatgtcagtagcaaaccatccttccactagtggcaactgaaaatgcatgtaggcattgatacatggaccccagggagcaaaatcatccctttttaacttgagaatcttgaggggcttttaagaggagactctgattggtaagtcttaaggttgcttttgccctgttccccaggatttagagggaaagatcattgtagatgaactgaagcaagaagttatcagtaccagcagcaaggcagaaccaccccagtgcacctccctggcctggtctgctgatggccaggtaagtgggtctgtcctctcaggtgattctgcttccagttaattttctccctctcattctgttagtatatctagtctgtcagacacaagagcagtgtccttggcataaagtgaaatgacaagccaggttgatgaggatgccctcgtttgccatgccagtgaatgtgtttctgcatcagagggaagactgatgtggaacgcagtggctgtcagccttcaattaataccttaattaatctgaccagttttcaaatgtctggagccttatcaccagctgtttcttcctcaaggaatacataaccaccacttacaagctggctgttgaaatgagagcggtttcttacagtctacccagcgttgtggcacatgcctactggaggctgaggtgggaggatctcttgaactgcaggggcttaaggctgtagtgagccaggatcgcacccctgcactccagcctagacaatggagcaaggtggacggatctcaaaaaaagccacttgggctcaatctagtgagactgcagaatttatgccagcctgacctgtcactgtcatttcttccctgcagactctgtttgctggctacacggacaacctggtgcgagtgtggcaggtgaccattggcacacgctagaagtttatggcagagctttacaaataaaaaaaaaaactggcctggcttttctgacttttaggtttt

SEQ ID NO: 31023 - DNA, 756 bp, Homo sapiens
acccacgcgtccgcggacggcgtgggtcgacccacgcgtccggggcaccaccacgaggcgatttgtgggccataccaaggatgtgctgagtgtggccttctcctctgacaaccggcagattgtctctggatctcgagataaaaccatcaagctatggaataccctgggtgtgtgcaaatacactgtccaggatgagagccactcagagtgggtgtcttgtgtccgcttctcgcccaacagcagcaaccctatcatcgtctcctgtggctgggacaagctggtcaaggtatggaacctggctaactgcaagctgaagaccaaccacattggccacacaggctatctgaacacggtgactgtctctccagatggatccctctgtgcttctggaggcaaggatggccaggccatgttatgggatctcaacgaaggcaaacacctttacacgctagatggtggggacatcatcaacgccctgtgcttcagccctaaccgctactggctgtgtgctgccacaggccccagcatcaagatctgggatttagagggaaagatcattgtagatgaactgaagcaagaagttatcagtaccagcagcaaggcagaaccaccccagtgcacctccctggcctggtctgctgatggccagactctgtttgctggctacacggacaacctggtgcgagtgtggcaggtgaccattggcacacgctagaagtttatggcagagctttacaaataaaaaaaaaaactggc

SEQ ID NO: 31024 - DNA, 356 bp, Homo sapiens
actaaattcgcgggcgtgtacaccaacgaaggcaaacacctttacacgctagatggtggggacatcatcaacgccctgtgcttcagccctaaccgctactggctgtgtgctgccacaggccccagcatcaagatctgggatttagagggaaagatcattgtagatgaactgaagcaagaagttatcagtaccagcagcaaggcagaaccaccccagtgcacctccctggcctggtctgctgatggccagactctgtttgctggctacacggacaacctggtgcgagtgtggcaggtgaccattggcacacgctagaagtttatggcagagctttacaaataaaaaaaaaaactggc

SEQ ID NO: 31025 - DNA, 337 bp, Homo sapiens
gcctactactactactactaaattcgcggccgctcgacggggacatcatcaacgccctgtgcttcagccctaaccgctactggctgtgtgctgccacaggccccagcatcaagatctgggatttagagggaaagatcattgtagatgaactgaagcaagaagttatcagtaccagcagcaaggcagaaccaccccagtgcacctccctggcctggtctgctgatggccagactctgtttgctggctacacggacaacctggtgcgagtgtggcaggtgaccattggcacacgctagaagtttatggcagagctttacaaataaaaaaaaaaactggc

SEQ ID NO: 31026 - DNA, 411 bp, Homo sapiens
cagcatttccagcttctactagatgtcagtagcaaaccatccttccactagtggcaactgaaaatgcatgtaggcattgatacatggaccccagggagcaaaatcatccctttttaacttgagaatcttgaggggcttttaagaggagactctgattggtaagtcttaaggttgcttttgccctgttccccaggatttagagggaaagatcattgtagatgaactgaagcaagaagttatcagtaccagcagcaaggcagaaccaccccagtgcacctccctggcctggtctgctgatggccagactctgtttgctggctacacggacaacctggtgcgagtgtggcaggtgaccattggcacacgctagaagtttatggcagagctttacaaataaaaaaaaaaactggc

SEQ ID NO: 31027 - DNA, 787 bp, Homo sapiens
gcattgctgaggagtgtggctgaacatttttgccaggtgcaacagttctgagtgggcagcagtttgaacatgttttaccttgaaagctcaggtaattggcaggtggaattagagggtcctggtgatgacagatggcattgtcagccaatccccaagtgggagtgaggacatgtcctgcaattctgaagggattctctgtcacttggctcttctctttcatatactcagtcacttgactctgtgatcagagccaaatccagggttgtatgagtgatgcaatgagacagagacaaagcccaggaaatgagtctgaccgttgaatgagagtgtttgctaagtctgagaatgacaaactcctccctctcaggggcacgggcaccaccacgaggcgatttgtgggccataccaaggatgtgctgagtgtggccttctcctctgacaaccggcagattgtctctggatctcgagataaaaccatcaagctatggaataccctgggtgtgtgcaaatacactgtccaggatgagagccactcagagtgggtgtcttgtgtccgcttctcgcccaacagcagcaaccctatcatcgtctcctgtggctgggacaagctggtcaaggtgagcgtcaagccaaggcaggggctttaccagtcagggtgtgctcccaggtggtcatacactccaagtcctgtggaaagctttgcagatgccctcagttgactctttctcttgtcacatggtctgatgtcccttgtaagtcagcacactgcattggatatgtgttataa

SEQ ID NO: 31028 - DNA, 1675 bp, Homo sapiens
cccgtgttattcggagagggagaggttgtggtgctagtttctctaagccatccagtgccatcctcgtcgctgcagcgacacacgctctcgccgccgccatgactgagcagatgacccttcgtggcaccctcaagggccacaacggctgggtaacccagatcgctactaccccgcagttcccggacatgatcctctccgcctctcgagataagaccatcatcatgtggaaactgaccagggatgagaccaactatggaattccacagcgtgctctgcggggtcactcccactttgttagtgatgtggttatctcctcagatggccagtttgccctctcaggctcctgggatggaaccctgcgcctctgggatctcacaacgggcaccaccacgaggcgatttgtgggccataccaaggatgtgctgagtgtggccttctcctctgacaaccggcagattgtctctggatctcgagataaaaccatcaagctatggaataccctgggtgtgtgcaaatacactgtccaggatgagagccactcagagtgggtgtcttgtgtccgcttctcgcccaacagcagcaaccctatcatcgtctcctgtggctgggacaagctggtcaaggtatggaacctggctaactgcaagctgaagaccaaccacattggccacacaggctatctgaacacggtgactgtctctccagatggatccctctgtgcttctggaggcaaggatggccaggccatgttatgggatctcaacgaaggcaaacacctttacacgctagatggtggggacatcatcaacgccctgtgcttcagccctaaccgctactggctgtgtgctgccacaggccccagcatcaagatctgggatttagagggaaagatcattgtagatgaactgaagcaagaagttatcagtaccagcagcaaggcagaaccaccccagtgcacctccctggcctggtctgctgatggccagactctgtttgctggctacacggacaacctggtgcgagtgtggcaggtgaccattggcacacgctagaagtttatggcagagctttacaaataaaaaaaaaaactggcaaaaaaaaaaaaaaaaaaaaaaaaaaaaaaaaaaaaaaaaaaaaaaaaaaaaaaaaaaaaaaaaaaaaaaaaacagaaatgaagagagagaaaacgcaggatagcaaggactgcggaaagccaccacaccgaaagacgcggcggagcgccgacgccccacgcgtgcccggcttcgagaggagaccccataggcttgccagctggctgctttgtgtgcacggggccgcgatcgcccgatctgagtgcgtagacctcattttactcgccgccgatcgcagcctggcgtatgccgaattaactcattcgtcgcgacatgacagacacttccggagctcgtgactcaaagggcgagccgacacaaatgcgtcgtccggggtcaatcgctcgtgcaccctccgtccaccactagcctatcggcgcgtgtcagtacctggcagaaccaggttcgatggatgtgcgcacgacaagctcacagcgacgaggacgacgtatcgtccgtctctccgtcgcccggaattcatcgaggacgaatagagcgaagcggcgacgctgcggtccccgcgcccccctctcccgcacgcc

SEQ ID NO: 31029 - DNA, 1655 bp, Homo sapiens
tcggcacggagggctacctcgctggtaccatccagtgccatcctcgtcgctgcagcgacacacgctctcgccgccgccatgactgagcagatgacccttcgtggcaccctcaagggccacaacggctgggtaacccagatcgctactaccccgcagttcccggacatgatcctctccgcctctcgagataagaccatcatcatgtggaaactgaccagggatgagaccaactatggaattccacagcgtgctctgcggggtcactcccactttgttagtgatgtggttatctcctcagatggccagtttgccctctcaggctcctgggatggaaccctgcgcctctgggatctcacaacgggcaccaccacgaggcgatttgtgggccataccaaggatgtgctgagtgtggccttctcctctgacaaccggcagattgtctctggatctcgagataaaaccatcaagctatggaataccctgggtgtgtgcaaatacactgtccaggatgagagccactcagagtgggtgtcttgtgtccgcttctcgcccaacagcagcaaccctatcatcgtctcctgtggctgggacaagctggtcaaggtatggaacctggctaactgcaagctgaagaccaaccacattggccacacaggctatctgaacacggtgactgtctctccagatggatccctctgtgcttctggaggcaaggatggccaggccatgttatgggatctcaacgaaggcaaacacctttacacgctagatggtggggacatcatcaacgccctgtgcttcagccctaaccgctactggctgtgtgctgccacaggccccagcatcaagatctgggatttagagggaaagatcattgtagatgaactgaagcaagaagttatcagtaccagcagcaaggcagaaccaccccagtgcacctccctggcctggtctgctgatggccagactctgtttgctggctacacggacaacctggtgcgagtgtggcaggtgaccattggcacacgctagaagtttatggcagagctttacaaataaaaaaaaaaactggcaaaaaaaaaaaaaaaaaaaaaaaaaaaaaaaaaaaaaaaaaaaaaaaaaaaaaaaaaaaaaaaaaaaaaaaaacagaaatgaagagagagaaaacgcaggatagcaaggactgcggaaagccaccacaccgaaagacgcggcggagcgccgacgccccacgcgtgcccggcttcgagaggagaccccataggcttgccagctggctgctttgtgtgcacggggccgcgatcgcccgatctgagtgcgtagacctcattttactcgccgccgatcgcagcctggcgtatgccgaattaactcattcgtcgcgacatgacagacacttccggagctcgtgactcaaagggcgagccgacacaaatgcgtcgtccggggtcaatcgctcgtgcaccctccgtccaccactagcctatcggcgcgtgtcagtacctggcagaaccaggttcgatggatgtgcgcacgacaagctcacagcgacgaggacgacgtatcgtccgtctctccgtcgcccggaattcatcgaggacgaatagagcgaagcggcgacgctgcggtccccgcgcccccctctcccgcacgcc

SEQ ID NO: 31030 - DNA, 1687 bp, Homo sapiens
tcggcacggagggctacctcgctggtaccatccagtgccatcctcgtcgctgcagcgacacacgctctcgccgccgccatgactgagcagatgacccttcgtggcaccctcaagggccacaacggctgggtaacccagatcgctactaccccgcagttcccggacatgatcctctccgcctctcgagataaggacctctctatcgatgtggagagagcgataagaccatcatcatgtggaaactgaccagggatgagaccaactatggaattccacagcgtgctctgcggggtcactcccactttgttagtgatgtggttatctcctcagatggccagtttgccctctcaggctcctgggatggaaccctgcgcctctgggatctcacaacgggcaccaccacgaggcgatttgtgggccataccaaggatgtgctgagtgtggccttctcctctgacaaccggcagattgtctctggatctcgagataaaaccatcaagctatggaataccctgggtgtgtgcaaatacactgtccaggatgagagccactcagagtgggtgtcttgtgtccgcttctcgcccaacagcagcaaccctatcatcgtctcctgtggctgggacaagctggtcaaggtatggaacctggctaactgcaagctgaagaccaaccacattggccacacaggctatctgaacacggtgactgtctctccagatggatccctctgtgcttctggaggcaaggatggccaggccatgttatgggatctcaacgaaggcaaacacctttacacgctagatggtggggacatcatcaacgccctgtgcttcagccctaaccgctactggctgtgtgctgccacaggccccagcatcaagatctgggatttagagggaaagatcattgtagatgaactgaagcaagaagttatcagtaccagcagcaaggcagaaccaccccagtgcacctccctggcctggtctgctgatggccagactctgtttgctggctacacggacaacctggtgcgagtgtggcaggtgaccattggcacacgctagaagtttatggcagagctttacaaataaaaaaaaaaactggcaaaaaaaaaaaaaaaaaaaaaaaaaaaaaaaaaaaaaaaaaaaaaaaaaaaaaaaaaaaaaaaaaaaaaaaaacagaaatgaagagagagaaaacgcaggatagcaaggactgcggaaagccaccacaccgaaagacgcggcggagcgccgacgccccacgcgtgcccggcttcgagaggagaccccataggcttgccagctggctgctttgtgtgcacggggccgcgatcgcccgatctgagtgcgtagacctcattttactcgccgccgatcgcagcctggcgtatgccgaattaactcattcgtcgcgacatgacagacacttccggagctcgtgactcaaagggcgagccgacacaaatgcgtcgtccggggtcaatcgctcgtgcaccctccgtccaccactagcctatcggcgcgtgtcagtacctggcagaaccaggttcgatggatgtgcgcacgacaagctcacagcgacgaggacgacgtatcgtccgtctctccgtcgcccggaattcatcgaggacgaatagagcgaagcggcgacgctgcggtccccgcgcccccctctcccgcacgcc

SEQ ID NO: 31031 - DNA, 1093 bp, Homo sapiens
cccgtgttattcggagagggagaggttgtggtgctagtttctctaagccatccagtgccatcctcgtcgctgcagcgacacacgctctcgccgccgccatgactgagcagatgacccttcgtggcaccctcaagggccacaacggctgggtaacccagatcgctactaccccgcagttcccggacatgatcctctccgcctctcgagataagaccatcatcatgtggaaactgaccagggatgagaccaactatggaattccacagcgtgctctgcggggtcactcccactttgttagtgatgtggttatctcctcagatggccagtttgccctctcaggctcctgggatggaaccctgcgcctctgggatctcacaacgggcaccaccacgaggcgatttgtgggccataccaaggatgtgctgagtgtggccttctcctctgacaaccggcagattgtctctggatctcgagataaaaccatcaagctatggaataccctgggtgtgtgcaaatacactgtccaggatgagagccactcagagtgggtgtcttgtgtccgcttctcgcccaacagcagcaaccctatcatcgtctcctgtggctgggacaagctggtcaaggtatggaacctggctaactgcaagctgaagaccaaccacattggccacacaggctatctgaacacggtgactgtctctccagatggatccctctgtgcttctggaggcaaggatggccaggccatgttatgggatctcaacgaaggcaaacacctttacacgctagatggtggggacatcatcaacgccctgtgcttcagccctaaccgctactggctgtgtgctgccacaggccccagcatcaagatctgggatttagagggaaagatcattgtagatgaactgaagcaagaagttatcagtaccagcagcaaggcagaaccaccccagtgcacctccctggcctggtctgctgatggccagactctgtttgctggctacacggacaacctggtgcgagtgtggcaggtgaccattggcacacgctagaagtttatggcagagctttacaaataaaaaaaaaaactggc

SEQ ID NO: 31032 - DNA, 825 bp, Homo sapiens
tcggcacggagggctacctcgctggtaccatccagtgccatcctcgtcgctgcagcgacacacgctctcgccgccgccatgactgagcagatgacccttcgtggcaccctcaagggccacaacggctgggtaacccagatcgctactaccccgcagttcccggacatgatcctctccgcctctcgagattgtctctggatctcgagataaaaccatcaagctatggaataccctgggtgtgtgcaaatacactgtccaggatgagagccactcagagtgggtgtcttgtgtccgcttctcgcccaacagcagcaaccctatcatcgtctcctgtggctgggacaagctggtcaaggtatggaacctggctaactgcaagctgaagaccaaccacattggccacacaggctatctgaacacggtgactgtctctccagatggatccctctgtgcttctggaggcaaggatggccaggccatgttatgggatctcaacgaaggcaaacacctttacacgctagatggtggggacatcatcaacgccctgtgcttcagccctaaccgctactggctgtgtgctgccacaggccccagcatcaagatctgggatttagagggaaagatcattgtagatgaactgaagcaagaagttatcagtaccagcagcaaggcagaaccaccccagtgcacctccctggcctggtctgctgatggccagactctgtttgctggctacacggacaacctggtgcgagtgtggcaggtgaccattggcacacgctagaagtttatggcagagctttacaaataaaaaaaaaaactggc

SEQ ID NO: 31033 - DNA, 1456 bp, Homo sapiens
  misc_feature (1)..(1): n is a, c, g, or t
nctagctgcagacgactctcttaattatcccataagaccatcatcatgtggaaactgaccagggatgagaccaactatggaattccacagcgtgctctgcggggtcactcccacttttctcctcagatggccagtttgccctctcaggctcctgggatggaaccctgcgcctctgggatctcacaacgggcaccaccacgaggcgatttgtgggccataccaaggatgtgctgagtgtggccttctcctctgacaaccggcagattgtctctggatctcgagataaaaccatcaagctatggaataccgatgagagccactcagagtgggtgtcttgtgtccgcttctcgcccaacagcagcaaccctatcatcgtctcctgtggctgggacaagctggtcaaggtatggaacctggctaactgcaagctgaagaccaaccacattggccacacaggctatctgaacacggtgactgtctctccagatggatccctctgtgcttctggaggcaaggatggccaggccatgttatgggatctcaacgaaggcaaacacctttacacgctagatggtggggacatcatcaacgccctgtgcttcagccctaaccgctactggctgtgtgctgccacaggccccagcatcaagatctgggatttagagggaaagatcattgtagatgaactgaagcaagaagttatcagtaccagcagcaaggcagaaccaccccagtgcacctccctggcctggtctgctgatggccagactctgtttgctggctacacggacaacctggtgcgagtgtggcaggtgaccattggcacacgctagaagtttatggcagagctttacaaataaaaaaaaaaactggcaaaaaaaaaaaaaaaaaaaaaaaaaaaaaaaaaaaaaaaaaaaaaaaaaaaaaaaaaaaaaaaaaaaaaaaaacagaaatgaagagagagaaaacgcaggatagcaaggactgcggaaagccaccacaccgaaagacgcggcggagcgccgacgccccacgcgtgcccggcttcgagaggagaccccataggcttgccagctggctgctttgtgtgcacggggccgcgatcgcccgatctgagtgcgtagacctcattttactcgccgccgatcgcagcctggcgtatgccgaattaactcattcgtcgcgacatgacagacacttccggagctcgtgactcaaagggcgagccgacacaaatgcgtcgtccggggtcaatcgctcgtgcaccctccgtccaccactagcctatcggcgcgtgtcagtacctggcagaaccaggttcgatggatgtgcgcacgacaagctcacagcgacgaggacgacgtatcgtccgtctctccgtcgcccggaattcatcgaggacgaatagagcgaagcggcgacgctgcggtccccgcgcccccctctcccgcacgcc

SEQ ID NO: 31034 - DNA, 1118 bp, Homo sapiens
cccgtgttattcggagagggagaggttgtggtgctagtttctctaagccatccagtgccatcctcgtcgctgcagcgacacacgctctcgccgccgccatgactgagcagatgacccttcgtggcaccctcaagggccacaacggctgggtaacccagatcgctactaccccgcagttcccggacatgatcctctccgcctctcgagataagaccatcatcatgtggaaactgaccagggatgagaccaactatggaattccacagcgtgctctgcggggtcactcccactttgttagtgatgtggttatctcctcagatggccagtttgccctctcaggctcctgggatggaaccctgcgcctctgggatctcacaacgggcaccaccacgaggcgatttgtgggccataccaaggatgtgctgagtgtggccttctcctctgacaaccggcagattgtctctggatctcgagataaaaccatcaagctatggaataccctgggtgtgtgcaaatacactgtccaggatgagagccactcagagtgggtgtcttgtgtccgcttctcgcccaacagcagcaaccctatcatcgtctcctgtggctgggacaagctggtcaaggtatggaacctggctaactgcaagctgaagaccaaccacattggccacacaggctatctgaacacggtgactgtctctccagatggatccctctgtgcttctggaggcaaggatggccaggccatgttatgggatctcaacgaaggcaaacacctttacacgctagatggtggggacatcatcaacgccctgtgcttcagccctaaccgctactggctgtgtgctgccacaggccccagcatcaagatctgggatttagagggaaagatcattgtagatgaactgaagcaagaagttatcagtaccagcagcaaggcagaaccaccccagtgcacctccctggcctggtctgctgatggccagactctgtttgctggctacacggacaacctggtgcgagtgtggcaggtgaccattggcacacgctagaagtttatggcagagctttacaaataaaaaaaaaaactggcaaaaaaaaacggcacgagctcgtgc

SEQ ID NO: 31035 - DNA, 1028 bp, Homo sapiens
cccgtgttattcggagagggagaggttgtggtgctagtttctctaagccatccagtgccatcctcgtcgctgcagcgacacacgctctcgccgccgccatgactgagcagatgacccttcgtggcaccctcaagggccacaacggctgggtaacccagatcgctactaccccgcagttcccggacatgatcctctccgcctctcgagataagaccatcatcatgtggaaactgaccagggatgagaccaactatggaattccacagcgtgctctgcggggtcactcccactttgttagtgatgtggttatctcctcagatggccagtttgccctctcaggctcctgggatggaaccctgcgcctctgggatctcacaacgggcaccaccacgaggcgatttgtgggccataccaaggatgtgctgagtgtggccttctcctctgacaaccggcagattgtctctggatctcgagataaaaccatcaagctatggaataccctgggtgtgtgcaaatacactgtccaggatgagagccactcagagtgggtgtcttgtgtccgcttctcgcccaacagcagcaaccctatcatcgtctcctgtggctgggacaagctggtcaaggtatggaacctggctaactgcaagctgaagaccaaccacattggccacacaggctatctgaacacggtgactgtctctccagatggatccctctgtgcttctggaggcaaggatggccaggccatgttatgggatctcaacgaaggcaaacacctttacacgctagatggtggggacatcatcaacgccctgtgcttcagccctaaccgctactggctgtgtgctgccacaggccccagcatcaagatctgggatttagagggaaagatcattgtagatgaactgaagcaagaagttatcagtaccagcagcaaggcagaaccaccccagtgcacctccctggcctggtctgctgatggccagactctgttatttaacaatgcgccctacgagctgggacaaacc

SEQ ID NO: 31036 - DNA, 1684 bp, Homo sapiens
cccgtgttattcggagagggagaggttgtggtgctagtttctctaagccatccagtgccatcctcgtcgctgcagcgacacacgctctcgccgccgccatgactgagcagatgacccttcgtggcaccctcaagggccacaacggctgggtaacccagatcgctactaccccgcagttcccggacatgatcctctccgcctctcgagataagaccatcatcatgtggaaactgaccagggatgagaccaactatggaattccacagcgtgctctgcggggtcactcccactttgttagtgatgtggttatctcctcagatggccagtttgccctctcaggctcctgggatggaaccctgcgcctctgggatctcacaacgggcaccaccacgaggcgatttgtgggccataccaaggatgtgctgagtgtggccttctcctctgacaaccggcagattgtctctggatctcgagataaaaccatcaagctatggaataccctgggtgtgtgcaaatacactgtccaggatgagagccactcagagtgggtgtcttgtgtccgcttctcgcccaacagcagcaaccctatcatcgtctcctgtggctgggacaagctggtcaaggtatggaacctggctaactgcaagctgaagaccaaccacattggccacacaggctatctgaacacggtgactgtctctccagatggatccctctgtgcttctggaggcaaggatggccaggccatgttatgggatctcaacgaaggcaaacacctttacacgctagatggtggggacatcatcaacgccctgtgcttcagccctaaccgctactggctgtgtgctgccacaggccccagcatcaagatctgggatttagagggaaagatcattgtagatgaactgaagcaagaagttatcagtaccagcagcaaggcagaaccaccccagtgcacctccctggcctggtctgctgatggccaggtaagtgggtctgtcctctcaggtgattctgcttccagttaattttctccctctcattctgttagtatatctagtctgtcagacacaagagcagtgtccttggcataaagtgaaatgacaagccaggttgatgaggatgccctcgtttgccatgccagtgaatgtgtttctgcatcagagggaagactgatgtggaacgcagtggctgtcagccttcaattaataccttaattaatctgaccagttttcaaatgtctggagccttatcaccagctgtttcttcctcaaggaatacataaccaccacttacaagctggctgttgaaatgagagcggtttcttacagtctacccagcgttgtggcacatgcctactggaggctgaggtgggaggatctcttgaactgcaggggcttaaggctgtagtgagccaggatcgcacccctgcactccagcctagacaatggagcaaggtggacggatctcaaaaaaagccacttgggctcaatctagtgagactgcagaatttatgccagcctgacctgtcactgtcatttcttccctgcagactctgtttgctggctacacggacaacctggtgcgagtgtggcaggtgaccattggcacacgctagaagtttatggcagagctttacaaataaaaaaaaaaactggcctggcttttctgacttttaggtttt

SEQ ID NO: 31037 - DNA, 1370 bp, Homo sapiens
cccgtgttattcggagagggagaggttgtggtgctagtttctctaagccatccagtgccatcctcgtcgctgcagcgacacacgctctcgccgccgccatgactgagcagatgacccttcgtggcaccctcaagggccacaacggctgggtaacccagatcgctactaccccgcagttcccggacatgatcctctccgcctctcgagataagaccatcatcatgtggaaactgaccagggatgagaccaactatggaattccacagcgtgctctgcggggtcactcccactttgttagtgatgtggttatctcctcagatggccagtttgccctctcaggctcctgggatggaaccctgcgcctctgggatctcacaacgggcaccaccacgaggcgatttgtgggccataccaaggatgtgctgagtgtggccttctcctctgacaaccggcagattgtctctggatctcgagataaaaccatcaagctatggaataccctgggtgtgtgcaaatacactgtccaggatgagagccactcagagtgggtgtcttgtgtccgcttctcgcccaacagcagcaaccctatcatcgtctcctgtggctgggacaagctggtcaaggtatggaacctggctaactgcaagctgaagaccaaccacattggccacacaggctatctgaacacggtgactgtctctccagatggatccctctgtgcttctggaggcaaggatggccaggccatgttatgggatctcaacgaaggcaaacacctttacacgctagatggtggggacatcatcaacgccctgtgcttcagccctaaccgctactggctgtgtgctgccacaggccccagcatcaagatctgggatttagagggaaagatcattgtagatgaactgaagcaagaagttatcagtaccagcagcaaggcagaaccaccccagtgcacctccctggcctggtctgctgatggccaggaatacataaccaccacttacaagctggctgttgaaatgagagcggtttcttacagtctacccagcgttgtggcacatgcctactggaggctgaggtgggaggatctcttgaactgcaggggcttaaggctgtagtgagccaggatcgcacccctgcactccagcctagacaatggagcaaggtggacggatctcaaaaaaagccacttgggctcaatctagtgagactgcagaatttatgccagcctgacctgtcactgtcatttcttccctgcagactctgtttgctggctacacggacaacctggtgcgagtgtggcaggtgaccattggcacacgctagaagtttatggcagagctttacaaataaaaaaaaaaactggc

SEQ ID NO: 31038 - DNA, 801 bp, Homo sapiens
  misc_feature (1)..(1): n is a, c, g, or t
nctagctgcagacgactctcttaattatcccataagaccatcatcatgtggaaactgaccagggatgagaccaactatggaattccacagcgtgctctgcggggtcactcccacttttctcctcagatggccagtttgccctctcaggctcctgggatggaaccctgcgcctctgggatctcacaacgggcaccaccacgaggcgatttgtgggccataccaaggatgtgctgagtgtggccttctcctctgacaaccggcagattgtctctggatctcgagataaaaccatcaagctatggaataccgatgagagccactcagagtgggtgtcttgtgtccgcttctcgcccaacagcagcaaccctatcatcgtatggaacctggctaactgcaagctgaagaccaaccacattggccacacaggctatctgaacacggtgactgtctctccagatggatccgatggccaggccatgttatgggatctcaacgaaggcaaacacctttacacgctagatggtggggacatcatcaacgccctgtgcttcagcctgccacaggccccagcatcaagatctgggatttagagggaaagatcattgtagatgaactgaagcaagaagttatcagtaccagcagcaaggcagaaccaccccagtgcacctccctggcctggtctgctgatggccagactctgtttgctggctacacggacaacctggtgcgagtgtggcaggtgaccattggcacacgctagaagtttatggcagagctttacaaataaaaaaaaaaactggc

SEQ ID NO: 31039 - DNA, 709 bp, Homo sapiens
tctaaagggattctattgagcttaaaggtttgggttcttggtttttgaaaggtgctgccagccatcatcctactgaggggtagggctgggaggtctagcatttcatgggataggactgtttgccctaatttcctttccatcttctgtagatgagagccactcagagtgggtgtcttgtgtccgcttctcgcccaacagcagcaaccctatcatcgtctcctgtggctgggacaagctggtcaaggtgagcgtcaagccaaggcaggggctttaccagtcagggtgtgctcccaggtggtcatacactccaagtcctgtggaaagctttgcagatgccctcagttgactctttctcttgtcacatggtctgatgtcccttgtaagtcagcacactgcattggatatgtgttataatctaacgtgaagtggccaggacatgttactgaatgagaaatggctaccgtatccagaagtgccaagcccttttttgttgggcctgaccctagctcatcaagagctaggatgttcacctgtcaaccgcacgtctatgcgtatggaacctggctaactgcaagctgaagaccaaccacattggccacacaggctatctgaacacggtgactgtctctccagatggatccctctgtgcttctggaggcaaggtatttggggacaaggcgtctcctactcagtggaagacagcgtcatg

SEQ ID NO: 31040 - DNA, 385 bp, Homo sapiens
gaataaaagtcctttttcagatgtgtatttaatgaatattttctcctagtgtgacttttttgttgttcctgtgtttcagagaacagaagaagtttgtaagtttgatgaaactcggttcactttttcgtttttttttttgttttgtttattttgtatcgtgtcaggaatctgtctacctgaagatcataaagttgtttttttttttgttttcacttttaagctctgttggacttgagaaagttttgttttttgggttttttttttcatattctagaagttttgtagttttagcttttatgtttaggtctctgatccatttctagttagtttttatgtatgaggtaagggtgaagattttttaaaaaacttgaggtcccacacctgt

SEQ ID NO: 31041 - DNA, 346 bp, Homo sapiens
gctctaatctttccccactcctttctctcccaagtccagtgactgtcagtccgctgcagtttctccagtgtgacttccatgcctcttctgccatctagcggccactgctggtcctcagcatcattacccacagctacaggccccgcgtcccagccttcatagagatccaactcgacaaacacgtattagctgtccactataagcactgcatgggatgtaaaagtaggcaagcacagcctctttcttcaaagaggttacaatatagtaaaatccattaaactggcgaataatttattgattttgaaaaatcagaacctcatggcaaaggaaatactccaaaaaaaaa

SEQ ID NO: 31042 - DNA, 377 bp, Homo sapiens
tgaagagatccagtggattctcagagctgcatagttggatctcagatttccaagatgtactatatatattgcaaataacaaagtctgctaatgtatttttcatagatgcaatagaacttgcttttatatatacaggagattaaagtttagataattgattattcattacttattgcattctttaaagtagattgtataaaacatttatcctgtttagtagtttatattttgtataaacatatgatattgtagcttttaagaacaaactgggctcatgcctgtaatcccagcactttgggaggccaaggtgggcggatcacgaggtcagcagtttgggaccagcctgaccaacatgatgaaacctctctactaaaaat

SEQ ID NO: 31043 - DNA, 886 bp, Homo sapiens
agagaataatttgtgccaagggacaaaaatcaggacgcaggaatctgctgccaagttcaagggccatatttgttaggaacagaaactaagtagaaaaccaaggatgcctggaatgaaatgagccaagaaaaaaggataagaaccaagcaaaacttgctggaaattgccttggatttaatatagaccattggtcaacatgaaaactgaagatagtgtctgatcatgactttgcaaagtaacagacgaagtgatcttcaggagagaataagatgaggaatttaggaagtatgataaggctttttcatcagacactgcagattgggagaaaatggagctgaccatggacaagttataaatttgcctagcattgataaagtatcagctgaggctgaaaaccaccaattttaacaaaaatcagcatatttcttcagtattgtgtggtgcttatctccttgggagcagaaagcagagactggattaatccaaaatcagggataaactgaccaggaggagcagaggaataatgggccaagagtactgaggatgcaagtaaaagtgctcaaattactgtattgaccttgtaatcccaagctgatcggggaaggaaaaaaaaaaaacaggagagggctggaaaattgtcacaggtaatgacagaggatcagatgtgctatagaaatgtgctgttgaaaatggtagactaagcccctctccaattatactgtggaatgagccgtataacatgttgtgattattggtttctcccttctggacctggagtgtcagttcttctaaagcagagacttccctttaatctctgtttaaacttggtgcctaggacaatgtaatggcatccataaaatatctaatggaatggagtttaacatgt

SEQ ID NO: 31044 - DNA, 763 bp, Homo sapiens
attttagagaagtggcaagacaaaggaaagcaggtttaggctcccaaaggagggacctctgagaagttacctccacgaagcagctcggctggtgccagagagaacatcggtacaggtctgggaatttccctgggagctggccccaagccacagccctccccagctccgtagtttgtttgttcttcctctcctgggctcaatcatctggacaagcctcactgcagggaaaacccctggggagacacagggctgctttcccagcagaaggtcagtgtctgaagagaaactgggggtcccccagggaccagattcggctccggtggtaaggtgccccaggtggcccaggaggagaggttatcttctgggagctcttccaggaaacccgagtccttggagaattcaggtggtgggagagattcttggtgcccatccccacccggcccttggcctggccccttctcagccaaatagccagaggacccagccctgtcccaggaggagtccacagtgctggcccagcttctgtctgaagaatcccaagcagaggagccttcgcttgggaccagaggagccctgggcctccctgagtccaccccaccagcctccgagtgccctggagcctggtgctcttgccccaggaaagaaggcggttcaatgtagggctggaagctgacgccatcttctgtgtcctcctcatcctcctcctcttcgtcctctgcaaggtccttcttccatcttgtctgttgggtggctggggccctga

SEQ ID NO: 31045 - DNA, 1556 bp, Homo sapiens
ccagtcgacttttttttttttctttaaaaatagagctctttatttaaacagtttagggtaataccaacaagcagtaggatatcgtttaaatatgacataaacatagaaaaaatagaaataaatacaaatacataagaacaacatataccgttagtagtctaaagggatacatgttgctttcacctaaggcactaacacttttcacgggatatgcttccagcacaggcccagcccacaccgcgcagttcccacctgctgtgcatgtgaaagggctttgtaaacagttaagtgctgaccacacaaggcaaattattatactgattatcatgccctttccaaatgcttctcctggctttttgtgaatgacttaatgacgataaaggagatggagtttagagttactggaaaacttaagctatgtcagaaattaaactctggaaaaaattctttaaaaaaatagtaaggtttggctgggcgcggtggctcacgcctgtaatcccagcactttgggaggccgaggcgggcggatcacctgaggtcaggagttcgagaccagcctggccaacatggtgaaaccccgtctctactaaaaatacaaaaaaattagccaggtgtggtggcgggtgcctgtaatcccagctacttgggaggctgaggcaggagaatcacttgaacccgggaggtggaggttgcagtgagccgagattgtaccactgcactccagcctaggcaaaaagaacaaaactccgactcaaaaaaacaaaacaaaacaaaaatggtaaggtttaagaatagaaacggagtggttatttcatacaagtctaagatgatgctgatgatagcttttacttttttgaagttacctccacgaagcagctcggctggtgccagagagaacatcggtacaggtctgggaatttccctgggagctggccccaagccacagccctccccagctccgtagtttgtttgttcttcctctcctgggctcaatcatctggacaagcctcactgcagggaaaacccctggggagacacagggctgctttcccagcagaaggtcagtgtctgaagagaaactgggggtcccccagggaccagattcggctccggtggtaaggtgccccaggtggcccaggaggagaggttatcttctgggagctcttccaggaaacccgagtccttggagaattcaggtggtgggagagattcttggtgcccatccccacccggcccttggcctggccccttctcagccaaatagccagaggacccagccctgtcccaggaggagtccacagtgctggcccagcttctgtctgaagaatcccaagcagaggagccttcgcttgggaccagaggagccctgggcctccctgagtccaccccaccagcctccgagtgccctggagcctggtgctcttgccccaggaaagaaggcggttcaatgtagggctggaagctgacgccatcttctgtgtcctcctcatcctcctcctcttcgtcctctgcaaggtccttcttccatcttgtctgttgggtggctggggccctga

SEQ ID NO: 31046 - DNA, 424 bp, Homo sapiens
tttaagaatagaaacggagtggttatttcatacaagtctaagatgatgctgatgatagcttttacttttttgaagttacctccacgaagcagctcggctggtgccagagagaacatcggtacaggtctgggaatttccctgggagctggccccaagccacagccctccccagctccgtagtttgtttgttcttcctctcctgggctcaatcatctggacaagcctcactgcagggaaaacccctggggagacacaggtgtgtgtcgtatgtgtgtatgcatgtgtgtgtgtgtgccccagcagcggtgaaggcctcctgacccttagaaatcctggctgtgaccttcatattttactgacatggacaaggggtcagaggttggcccggctgtgcagagatcgaagctcttacccttggggatgt

SEQ ID NO: 31047 - DNA, 405 bp, Homo sapiens
agcgggaggctgctgtcgcccgaggttcgacgtcctgtggcctaggaacgcgaagtgccaaaccgatcgtgagccaaggccgtctatgaaattccgagttcacacatacacgaagactggaggatcctccccattacagaagaacccttcacttcgcaaggcgattcataatagacttcactcagtagccagcccaactacccaatggaaaatgtactgtccccaaatgattatttcattcattttttcaaggacacagtaattgcgtagaactgtgaggttccctccagtgtgccaagaactgtgctggacttttaggaaactcaaagaaatgagagatcaactctttcccctgaataatttacaatctaattaaagagcacaattcctggaaagctgcaggta

SEQ ID NO: 31048 - DNA, 430 bp, Homo sapiens
aggcccaagaatcagccctccaggacccactaatgctgcagcaagctaaagtaagctgctctggggcctaaaaacagggacacttaatccattgctgccaccaccagggcccaaatactggcttagttgatgtccaagtccccagcaaagcttcaccacagcctcacctaataactactctaagccacctaggaaatcacagataccactgaccctgtgtattgctgagtgtcatacaaagattatactacctcaggtgcccaaaatcaaagccaaagtatgctactcaaccagaaaaaatacatcttcagaataaaattctcccctacaaaagcaatttttaaaaatgggaacaagtgattactataccagatgtgtaattatcaaaggaaggacataaaaaacatgaaaaagcatggaaataggacac

SEQ ID NO: 31049 - DNA, 642 bp, Homo sapiens
ttgagcttcaataccctgactaggaccctgttttcaaaacagcatcattgcacctcacaattgacaaaaccagacaacggtgaaagggacagtgacatggcagacacaaaagctcaacacattatggccactctaaacagagtacaaaaggaagggagtcagtgatgtgtaaaccaaacaatgtgaggggaaaaatattgaataatttctgtcatgaggcactgactacagccaggctctaattgaattaaactcccatttatttgctcaggcctaaacaacaggctgggaggaagaaaaaaaaaaaaaaaaaaaaacttaaggtttgctcaactgttctgaggtaccacctttcctcacccctgtataaatccaccatctgtgctcacaagcacacatgttccctctctcaacaaatgcatggagaccctaccaggcacagaagccaaaaaagcacaaggcacacaaaagctccccaggctgccccaggtctaaaggagcaaaaggggtagaaaagatcttttgctcattgcccaggtgagacggcctggtgcgtcctctcagcctcgacacgcgtcaagtaaaagaaaggttaaaattagaaaattcaatttatttgataatttcccagaataattagag

SEQ ID NO: 31050 - DNA, 406 bp, Homo sapiens
tattttttagatgggattacctttaaattaggagactgaatacagtagattaccctccataatatgcgtggacctcagttaaagatcttaagagagaagactggccaggtgcaataactcacgccccctatatctcaacactttgggatgctgacgtgggacaatcttttgagcccaggagttcgagaccagtccaggcaatgtagcaagactctgtctttacaaaacaacaacaacaacgacaacaacaaaagaattagccaggcatagtggtgcaaacctgcagtcccagctgctcaggaatttgaggcaggaggatttttcaagcccagggatttaaggctgcagctctaatcctgcgtctgcactctagcctaagtgacagactgagactttgtctctaaaa

SEQ ID NO: 31051 - DNA, 388 bp, Homo sapiens
gttctgagtctttgaaaagaatgttaaaggtcaatagtagttggaagaactaagcctgactgtctcccaactcatggttttaccaaaaactctattaaaaaactgttgtgggccgggcacggtggctcatgtctgtaatcccagcactttgggaggccgaggagggcggatctacaaggtcaggagatcgagaccatcctggctggcatggtgaaaccctgtctctactaaaaatacaaaaaaaaaattggccaggtgtggtggtggatgcctgtagtcccagctcctcaggaggctgaggcaggagaatggtgtgaaccctagaggtggagtttgcagtgagctgagattgtgccactgcactccagcctgggtgacatagtgagac

SEQ ID NO: 31052 - DNA, 412 bp, Homo sapiens
atgaggttgttagtgaaacaggacagaggagaagcaaagatctttgtttaatcttagagataagtggcggctcattcttgattctcccagtgagctagagtatcgatgtcaatatattgatatgatcaacattttacggagtgttgattaacattcatttgggttttggaagatttctatttgtttatgttaaataacaaaaacatgaggttgtcaggaaattgttagggagggatgcctttgctgccctgtcaatttccaagcaacagggctgtgttctagcccagggaggctgagctgtagttagaaatgactttctgtgtgcaaaacagaacttggtgaaatacttaaccagtagttaatttgctgcctttgctcaatagattctgaatgccttcaagtagaaatccca

SEQ ID NO: 31053 - DNA, 411 bp, Homo sapiens
gaacctggacattttatagtgccattgagtaaggaagcgcttttaaaaaaatgactggggtatgtcaaagggacatagaagccaagtgaaagagctcccaacagccaaagctgaaataatttgagcaacaaaataaataaaatagtactgattataatccaaagtataaaagaaatatctatcagtccattctaatatagataaatgactaaatgaataaatggagagaagagagaaatctcctatgcagaataatttaataataacttatgtagatattccacccttaaagacatggagcatcactctccactccttatgtgtggactgtacagagtgacctccttctaaagaacacagtatagaaaacagggggggtaggaagagtagctttactgtggaaaagcctga

SEQ ID NO: 31054 - DNA, 2190 bp, Homo sapiens
  misc_feature (1354)..(1354): n is a, c, g, or t
ctccaagggtataccattcctaaaggcacattgatcttacccaacctgtggtcagtacatagagacccagccatttgggagaaaccggaggatttctaccctaatcgatttctggatgaccaaggacaactaattaaaaaagaaacctttattccttttgggatagggaagcgggtgtgtatgggagaacaactggcaaagatggaattattcctaatgtttgtgagcctaatgcagagtttcgcatttgctttacctgaggattctaagaagcccctcctgactggaagatttggtctaactttagccccacatccatttaatataactatttcaaggagatgaagagcatctccaagaagagatggtaaaaagatatataaatacatatccttctaagcagattcttcctactgcaaaggacagtgaatccagcaactcagtggatccaagctgggctcagaggtcggaaggagggtagagcacactgggaggtttcatcttggaggattcctcagcaggatacttcagccattttagtaatgcaggtctgtgatttgggggatagaaaacaaagtacctatgaaacgggatatctggattttacttgcagtggcttccaccgatgggccaatcttctcatttcttagtgcctcagacatcccatatgtaaaatgagagtaataaaacttggcttctctctacctctcagcactaatgatggtcaaatgccttacatcttttctgatatctctaaaatgctgttaagttctggagaagaacttcaggagaagaagatctatcagctggcttttaaagacctatgacaacatgaaagtggtgttcagcctggaatgctttgtcagagatgggtgtggatttaggttatactgggggagaacttttctcagcacagattctatgccagcttctttgggcttgttctgtcactatctttttgtttatgattttagtttttactttttgtagatgtgggatgaagtggactctgtcgtgtatattgaggaaaaaagaaattataattttaaaaaatcccttgtaggattattatctaaatttatatgtctaacttctactacaactacaggaacagtgagccttgctacttctttagtagcttcttggcagaattcctttctactgagttatttgcaaagatgcagctctacctttttacttaaggcctgaatggtgagcatggggattttgatactgggactcatcaggaaaggattctgctttcaaactatactgaacattcctgtcctagcgtccctgccaccaggcccaatgcatctgatccttgaatatactctcaaagaattcactctcnttttattaagagaactaaattgtttctaaatgtagatggtccctctggaaaagcagttttcagcaggggtggtaaccccttcagagggagtttggaaatgtgtgggtatgattcttggttatcataatgatgggggtgctactggccttctgctgccatgggaccaggatgctaaatgtcaaggtagtcctatacagtgaagaattgtcctgctcaagatgccaggatttcccccagtgagaacatgctctaaggaatgaccacccctttcttttattctcccacagtgctccatgtacagaagtaagcatagcagtcatatgagcaaccacattcctgaacctttcctcatgctggctctacacttaatcctttacttgtatgtttctgtaattcttacataaattctattaagagggtggcatactgtagtggatgaagctgaggcttatagtaggtaaggcacaaagttaaaaagtaacatcactgggtttcaaacctactggtctctgtgactaaagaacactttcagaaccacttcttgattctgccaccacttgatcccataacaggctaccccttggcctcatgctggagttgtgtgtgtctgtcttcatcccaggctgagctccttgaggtgaggatgttgtgctgtttgcctccctcacagtgccttggtcttagtggatgcccagttgtcttgtgaatgacttttaagaagtgtacttaagagaaaaatcctaccttatttgaataattacaagtcatgtttttgttgcttaaaggtgataaatcagtgtatattatttgttaatgtccattaaagccagttttta

SEQ ID NO: 31055 - DNA, 3458 bp, Homo sapiens
  misc_feature (1354)..(1354): n is a, c, g, or t
ctccaagggtataccattcctaaaggcacattgatcttacccaacctgtggtcagtacatagagacccagccatttgggagaaaccggaggatttctaccctaatcgatttctggatgaccaaggacaactaattaaaaaagaaacctttattccttttgggatagggaagcgggtgtgtatgggagaacaactggcaaagatggaattattcctaatgtttgtgagcctaatgcagagtttcgcatttgctttacctgaggattctaagaagcccctcctgactggaagatttggtctaactttagccccacatccatttaatataactatttcaaggagatgaagagcatctccaagaagagatggtaaaaagatatataaatacatatccttctaagcagattcttcctactgcaaaggacagtgaatccagcaactcagtggatccaagctgggctcagaggtcggaaggagggtagagcacactgggaggtttcatcttggaggattcctcagcaggatacttcagccattttagtaatgcaggtctgtgatttgggggatagaaaacaaagtacctatgaaacgggatatctggattttacttgcagtggcttccaccgatgggccaatcttctcatttcttagtgcctcagacatcccatatgtaaaatgagagtaataaaacttggcttctctctacctctcagcactaatgatggtcaaatgccttacatcttttctgatatctctaaaatgctgttaagttctggagaagaacttcaggagaagaagatctatcagctggcttttaaagacctatgacaacatgaaagtggtgttcagcctggaatgctttgtcagagatgggtgtggatttaggttatactgggggagaacttttctcagcacagattctatgccagcttctttgggcttgttctgtcactatctttttgtttatgattttagtttttactttttgtagatgtgggatgaagtggactctgtcgtgtatattgaggaaaaaagaaattataattttaaaaaatcccttgtaggattattatctaaatttatatgtctaacttctactacaactacaggaacagtgagccttgctacttctttagtagcttcttggcagaattcctttctactgagttatttgcaaagatgcagctctacctttttacttaaggcctgaatggtgagcatggggattttgatactgggactcatcaggaaaggattctgctttcaaactatactgaacattcctgtcctagcgtccctgccaccaggcccaatgcatctgatccttgaatatactctcaaagaattcactctcnttttattaagagaactaaattgtttctaaatgtagatggtccctctggaaaagcagttttcagcaggggtggtaaccccttcagagggagtttggaaatgtgtgggtatgattcttggttatcataatgatgggggtgctactggccttctgctgccatgggaccaggatgctaaatgtcaaggtagtcctatacagtgaagaattgtcctgctcaagatgccaggatttcccccagtgagaacatgctctaaggaatgaccacccctttcttttattctcccacagtgctccatgtacagaagtaagcatagcagtcatatgagcaaccacattcctgaacctttcctcatgctggctctacacttaatcctttacttgtatgtttctgtaattcttacataaattctattaagagggtggcatactgtagtggatgaagctgaggcttatagtaggtaaggcacaaagttaaaaagtaacatcactgggtttcaaacctactggtctctgtgactaaagaacactttcagaaccacttcttgattctgccaccacttgatcccataacaggctaccccttggcctcatgctggagttgtgtgtgtctgtcttcatcccaggctgagctccttgaggtgaggatgttgtgctgtttgcctccctcacagtgccttggtcttagtggatgcccagttgtcttgtgaatgacttttaagaagtgtacttaagagaaaaatcctaccttatttgaataattacaagtcatgtttttgttgcttaaaggtgataaatcagtgtatattatttgttaatgtccattaaagccagtttttaaaaaaatcactggacttttgtgtttaccatttaaaacaaccattttaaacaaacttagaacgatgccttagctgtttataggtaacagaatgtaaactcccaccacctggagactaggccatatccagggacctcacactgactttcctaaaggagagaagcagctacgctgttcatactgatagagaagagggcaagaaaagatccagagtggctgttactttgaaaattaaacgaaagatgaaattctgaacttaaaacacttctgtttggccttctataactgatcacccttctttgctctgttttccagataaatggagacaccagatctccctaacctctgacttctgccgttagccatactctgtgtagttagatctcagtctgggaatggcattccagggcaattgtgaacatgaggctagatttttcctttgatttagcacattcctaggcagacttttgcaagctcaaaaaatgaaaataatatctgcttaaccaaaacataatcataggaagaagaaaaattttaaaatgattgatttttgactctacattctttatctaccatactgctcttttcctttttagaaatattactaagcactttcagtatagataaatgaaatacaggctaatctttaggtgtcttaggaatttttgctttttgaaaaagaaaagctaatagcctaactgcagaggaactgagtggatggggtagctgctgtatagatttttagatgagatgatacagtgtggattacactgtaccttgggcgggagagtttgttcttgatatggaattcatatgcttttgaattgcactaataactcagcattaacaagtatattactccttaaattatacatgcattttcaatattcctaaccaaatagtttatagcttattgagaagaagtctgttcttggagagatgttgaaattagatgtttattaaactttaaaatataatgccttaagctgtggcactttaaaaacatctttatatataaattgctaaaaggactgttaatgcttttctcagacacattggcattttacaattttgcacatggtttatttgaaatcaaaaaataactatactttgttttataagtctacctaatatctcatttttgattctcatcgttagcacagttttgttgcttttattaaactattttaactgagaaagtgtcatgtctgttttttgttttgatttaaatgtacgcaaaattttgttttaccagatgtcaagttaatgt

SEQ ID NO: 31056 - DNA, 283 bp, Homo sapiens
tctctggctcttttattgttatttcatagtattcttttcctttaacatgtaacgtgctatttattttaataagacgtgcatttaaagctatgatctccctaagaatacaactgaggcttgttcagtgggctcctggaaatcgtctgagaactatcttttaatgtaaatagtataatggaatggttcagcagggtacagtaaaaacacttaggtaatttctcccttaaacatggggtgcttcctttaacttcaagaggtattgtaattaacagtcaccaatttg

SEQ ID NO: 31057 - DNA, 301 bp, Homo sapiens
aatcataatgttaattattataactaggtatcagtaaacagctaagtagcagtgtgatatggatgtgtgtgggtatctgaagaagcaggcattctagccccttctttaaaagaaagatgtttttcaaaattatttaacattcaggagctaaattctccaaattataaagtgacaacaaactatctgaatattctacaattcatgcactctgagatacatatacttttgtgatagaattgctgtgtttttttaacacagccttgaggtaactgaatactccccgatctcattatttctttta

SEQ ID NO: 31058 - DNA, 138 bp, Homo sapiens
tggaaatacaaaggtctgctatactcacgactgtaccctgattctgtgcccaagcttatacaacttgtgtgggctagacctggaatgagagtctaaaaagtctagctctagaatcagctctcttaaaacctacagtat

SEQ ID NO: 31059 - DNA, 217 bp, Homo sapiens
gactatttttgttagtgttagagagtagaacttcacaagttgggagtttgtctttttggcgcctttaaatacctatgaaccagttacacactaactattgttttaatcttgaaataagagcaaggagtagatagtagataggcctgaattcgagtcccagctgtgaccttccaatttgtactatctcactttcccatttataaggtgggaataacaa

SEQ ID NO: 31060 - DNA, 1089 bp, Homo sapiens
  misc_feature (100)..(101): n is a, c, g, or t
  misc_feature (181)..(182): n is a, c, g, or t
  misc_feature (343)..(343): n is a, c, g, or t
  misc_feature (548)..(548): n is a, c, g, or t
  misc_feature (770)..(770): n is a, c, g, or t
  misc_feature (772)..(772): n is a, c, g, or t
  misc_feature (973)..(973): n is a, c, g, or t
atgggaaaagtgaggtgccaggagccccactgtaaattgccggtggtcgggtcgaggggtgaggtggctgcagaaatctgggccgacaggagggcagatnncaggcagcgactttatgtgggccccagggcagtgccgggactcaggcccagctccctggttttggggctactgtggcccnnagggatgggagcttggtctccttacaaatcccatccatgcgtcactacaaacagctctaataattcctgccctgcagtacctgtgcactttaccatatccacaccccccagcatcccaccccactggcaggggctgacagctctggtgctcttgcactctngggcacatggccgcacacccagacccactcgctcatctcagactcataccacactcaggaaggcccctaactggtctaattcccagcagtggccttccccgcacccgcccctcgcccctccccgctctagcttcccgactttcgtggggaaggggcaccggaacgcagggcagctgagaaggaccgggcagaggagagcgacggnccctcccggtgtcagcttcctcgccgcagtcccattaatcacagtgccgcagtccagttggggatcccgggcgcccagggccgcccgcagccccagggacaatgggattatttccggggagagaggccgcctcgggccggggctcaggcggagacgcctccttccctcaatccgtccctcggcacccaaggagcgcctgcggcggccggagacgagtggcanancggacgcgggtggcgcgcgggtggcagggcctggccgacctaattcaattagctgggccgccgccgcctccgtgcgactctgggcccgccgggactccagctctgggcagctgctctttgtgcacgaagaccatgcatatggatgcggttcctcccccttcggcgctcaccccacccacacccacttctggcacctgcggnttgccccgccctcccactccttccccgcgagggaaggcgaccgtggcctccccaggaaagttgggaaactgtggttgcttttgagctccctgtggccgtcttcagagtatgtgtga

SEQ ID NO: 31061 - DNA, 1113 bp, Homo sapiens
atgcagggtgcaaatccggccgcgatgaacgcgagcgccgcctcgctcaacgactcccaggtggtggtagtggcggccgaaggagcggcggcggcggccacagcagcaggggggccggacacgggcgaatggggaccccctgctgcggcggctctaggagccggcggcggagctaatgggtctctggagctgtcctcgcagctgtcggctgggccaccgggactcctgctgccagcggtgaatccgtgggacgtgctcctgtgcgtgtcggggacagtgatcgctggagaaaacgcgctggtggtggcgctcatcgcgtccactccggcgctgcgcacgcccatgttcgtgctggtaggcagcctggccaccgctgacctgttggcgggctgtggcctcatcttgcactttgtgttccagtacttggtgccctcggagactgtgagtctgctcacggtgggcttcctcgtggcctccttcgccgcctctgtcagcagcctgctggccattacggtggaccgctacctgtccctgtataacgcgctcacctattactcgcgccggaccctgttgggcgtgcacctcctgcttgccgccacttggaccgtgtccctaggcctggggctgctgcccgtgctgggctggaactgcctggcagagcgcgccgcctgcagcgtggtgcgcccgctggcgcgcagccacgtggctctgctctccgccgccttcttcatggtcttcggcatcatgctgcacctgtacgtgcgcatctgccaggtggtctggcgccacgcgcaccagatcgcgctgcagcagcactgcctggcgccaccccatctcgctgccaccagaaagggtgtgggtacactggctgtggtgctgggcactttcggcgccagctggctgcccttcgccatctattgcgtggtgggcagccatgaggacccggcggtctacacttacgccaccctgctgcccgccacctacaactccatgatcaatcccatcatctatgccttccgcaaccaggagatccagcgcgccctgtggctcctgctctgtggctgtttccagtccaaagtgccctttcgttccaggtctcccagcgaggtctga

SEQ ID NO: 31062 - DNA, 202 bp, Homo sapiens
gccccttctctaggcctagcccaacttccctctcccctctaagggccagcctttggctccttccccaacctatatttgaatgagtggcctcaggctcttgacttcctgcagtccagatccttacttacaacactgaagtgggcagggtttacggatttgggaagctggcccagataattgaatgattcgcctgagagtgtcc

SEQ ID NO: 31063 - DNA, 366 bp, Homo sapiens
gtcacctataagtccagaaagaagcctcagaaggaattaactctaccaatatcttgatctcagacttctagcttccagaactgtgagaaaataaatttctcatttgagccactcagtctgtggtactttcttatggcagtcctagcaaactaacacatcatctgaagcgccacctaacacgtgtaagaacaaaaatgtcctatccttatctctttcttcccctagagcttctcaaaggctccccgtcacccccactgtggaataacgaagattacaaggttcttccctttttcatgacattgctcagaaaaggatggaagagttaaacaaagctttggtaagttgggaggtaaggcaaagggaaga

SEQ ID NO: 31064 - DNA, 504 bp, Homo sapiens
atattatgccaccatctttaagattatatattagatctatgacactgtctttttattcttctcttcctctgtccctgtgggcattgacctggaaatctttctaaataagtattatcacttgtacggcttgcctttattatttgtcctacattcatttattttttaaatggcaaatttcaatctgacactcccctcccacttttttaaaggcacatttctagtgaccagcagtataaaccaactccaacttcagcagttcagctcccctcctagatattaacagaacagtagaagacaatgccaagttaaaagtgtgcttaaacatacatcctaaatgtcactgagctgagatcatgccactgcactccagcctcggcgacagagctagactctttcataaataaatgacgggttgatgggtgcagcaaaccatcatggcacgtgtatacctatgtaacaaacctgcatgttctacacatgtatcccagaacttaaagtataata

SEQ ID NO: 31065 - DNA, 468 bp, Homo sapiens
atcaatatcacctaacacatcgtatataagatataacatgatagatagttggtcgattacattgctatactgcttagttttaactggtttatttttattgtagcagaaatgaactgaaaaaaaatatgggtttgataatccacacacatgaaagtacccattttgtaactcaacaaaagataaaacattcttcatcaaaaggcttctcgcttggtgtcaggttgtcacatgtgaccactgtgcaatgcgaagccatacttcttcagtgcacaaagtcatgtttaaacttggaaaagaggatgctacagtagtttcaaagttcagtgttgtggacccaggaaattttccataagtcttgcttgataacaatgtgattgtacaaaataaatgttcttaaggaaacaacttatgtaacatttgctacctttatgtaaacataaataaatcccatttaaaagataaaactta

SEQ ID NO: 31066 - DNA, 416 bp, Homo sapiens
ccaacctccagagggcctgcaacctcactggcttaatcaagctccacttccacctgaggaggagtcctgggtctgaggcacatgagcgtgttgggtaggagggaagcaaaaaggatggccatgtatacactggattcacagctgcgggaacagaagggatgttccctcacctccacacagggccttgggcaggagtgggtcagaagacaaatatagactccatctgctcatctgagcaaaggggcaacccactgctctcactccaactccagaggtaggccaggggcagtaggaccatcctgtatctcattactctcccctagaacggctcaccacactcctggcctctggcccctggccatgcccacctgtttccataactcccataagttattaaatgcatgtgattctgccct

SEQ ID NO: 31067 - DNA, 336 bp, Homo sapiens
aattttttttgtagagatgaggtctccctatgttgtccaggctgggcttaagcaattcttctgccttgtcctctcagagtgcagggattatagatgtgagccacagagctcagtcaggatcactttaacagatgaaactgaatcttagagaagttaagtaactcttgccaaggtttcatagccagcaggtggcagagcctggattccaacccaggtaatttagtctagagctcttattcttaactactttactgtcctaagagtatgcgaatgtacagaaatggagccttgctacctctggtaacttgaaggcaccaattttgcgttcagttaaca

SEQ ID NO: 31068 - DNA, 948 bp, Homo sapiens
atggaaattgtctccacaggaaacgaaactattactgaatttgtcctccttggcttctatgacatccctgaactgcatttcttgttttttattgtattcactgctgtctatgtcttcatcatcatagggaatatgctgattattgtagcagtggttagctcccagaggctccacaaacccatgtatattttcttggcgaatctgtccttcctggatattctctacacctccgcagtgatgccaaaaatgctggagggcttcctgcaagaagcaactatctctgtggctggttgcttgctccagttctttatcttcggctctctagccacagctgaatgcttactgctggctgtcatggcatatgaccgctacctggcaatttgctacccactccactacccactcctgatggggcccagacggtacatggggctggtggtcacaacctggctctctggatttgtggtagatggactggttgtggccctggtggcccagctgaggttctgtggccccaaccacattgaccagttttactgtgactttatgcttttcgtgggcctggcttgctcggatcccagagtggctcaggtgacaactctcattctgtctgtgttctgcctcactattccttttggactgattctgacatcttatgccagaattgtggtggcagtgctgagagttcctgctggggcaagcaggagaagggctttctccacatgctcctcccacctagctgtagtgaccacattctatggaacgctcatgatcttttatgttgcaccctctgctgtccattcccagctcctctccaaggtcttctccctgctctacactgtggtcacccctctcttcaatcctgtgatctataccatgaggaacaaggaggtgcatcaggcacttcggaagattctctgtatcaaacaaactgaaacacttgattga

SEQ ID NO: 31069 - DNA, 391 bp, Homo sapiens
tgtctctaaaagaaatgtatttaaacaggagagaccaaggcccctgagagaggttgaaggactggggatgactgcccaggttggggggagctggggatgaaggggcagggcagggcatggcacctgtcaccacacacatgaatgaccacaaagaagatgagaaactagactagtttgtgcacctcgtggatccgcactacaacaggtagggttggtgttcaagaagagcagcagggcctcggggtaagaatgtactttctgaagaacggagcttttcaacaccaaaaagcaggacgctttgagcagcagctcccatccctaggggagcttgcagggctgactggatggcagcagcaggtggggttttttgagtggattcacctcctggctg

SEQ ID NO: 31070 - DNA, 473 bp, Homo sapiens
acgcaagccttcactcctgtggctagggcaggaggataggacaggaggaatatcatccagttatggggaacatctatcatgccttatatgtttagagaacatttaagttccctagggaagtctttctctgtgtcttcagcaactttggtatctgatcactataacagggtaataggctggaattttctttttctttttttttttcttgagacagagtctcgctcagttacccaggctggagtgcggtggtgtgatctcagctcactacaagctccgcctcccgggttcatgccattgtcctgcctcagcctctcgagtagctgggactacaggagcctgccaccacgcccggctaatttttttgtactttttagtagagacggggtttcactgtgttagccaggatggtctcaatctcctgacctcttgattcgcccgcgttggcctcccagaatgctgggattacaggcgtg

SEQ ID NO: 31071 - DNA, 343 bp, Homo sapiens
tcttaggttgagataaaaggttctatcaccattttttttttcctactaccattcttgatgttaaatctccgctgaggccactggaaaataacaaaagggctttacagatgaaacacagggctgtgaggcctgatatttttcttagcaaataaacactggacagaaagtagttcagagtgtaagaagtgcctgaccaaaggcctgatgcgcagctttaaaataaattatagaaataattacaaatgctgtaatcaaccataatttacatattagtacatgtatactaagtataaagcttcctaaagtgaagagagcaacacagtaattcataactcaaaaaaga

SEQ ID NO: 31072 - DNA, 468 bp, Homo sapiens
gcattgcgtggcgtagagagtacgtgttcggaaaccagagagatctgagcagaaatcccacacgggaccaagaggctgtatggctgggcctgggcccactcactgagatgctgcgagtctcacttttctcatctgcaaaatagtgataaggctacttctgcagggctgctgtgaagataagaggggaaaaatatgtccagccccaagagcaatgccttgcacactgcatgtggctgagcaaaggggtgaagaatatccaatagtatagacttgcccatttatgaactaagaccaagtaattctgcccctcctccttacatggataactgatctacctttagaaggcctacaaacaggccgggcatgggggtcacgcctgtaattccagcactttgggaggccgaggcgggagaactgcttgggcccaggagtttgagactagcctaggccatgtggagagaccctatc

SEQ ID NO: 31073 - DNA, 418 bp, Homo sapiens
gattctcctgcctcagcctcccaagtagctgggatcacaggtgcccgccaccatacctggctaattttttgtatttttagtagatacaaggtttctccatgttggccaggctagtcttgaacacctgacctcaagtgatccatctgcctcagccttccaaagtgctgggattacaggcatgaccaactgcactcagcccaataaatatgttctataatacgctacttaatgatacctattacattatattgtatggaagttccattacttacttaatctgttcttcctggacatctgatttttctttattgtaaaatgtgacatcttaaacatctttacatattcatcttcttccacgtctttgattacatcctttgtatagctcttagtagtgtttttgctgggtcaatgtttttgt

SEQ ID NO: 31074 - DNA, 427 bp, Homo sapiens
gtcagacttgtggatacatacttactgtttggccttgagcgggaacctccatccctctgagtctttgtttcctcatttgtaaagtgaggaggaagagaaaagcctttcccagcttctcaggatggcacccgggtacagatcatagagatgatgcatgaggcatgctttgtgaacttgaaagtgctgagcagtacttggtcattttaaaacaatgacatcttctttgaataattcttaaatcctggtacagaattaagaaaggatcatctattcaattagtcaactatttgttcaagaaatatgtactgagccttccattatgtgccaggtacttctaagcaataactaagacagacatggattgcctgtcatgaaatgtcaattctagagtaggaggcagagaatagggaagaaaggacgggaggag

SEQ ID NO: 31075 - DNA, 1190 bp, Homo sapiens
cagctacttgggaggctgaggcaggcaggagttcaaggctgcagtgagctgtctgtgccacggcactccaacctgggcaaaagaggagacctcatctaaagaaaaatccaccaaaaaccctgtgttttaaagtgcaaactgatgatggaggaatgggtaaattccaggggtctatatttccaaaaggacatgtgtttttgtgcactaatacttgtttttgaagaacacatctcagtgttaagtggctgttgctgaggaaggggactgaggaactgggtgtgtctgtgtcattctgtttgaatgtctgtcaggggtatagaaactaggagggagacttgtacttttcactttttaaacttcctgtaaaatttgaattttccaagcaagaatattacttttgcttatttaatgtcaacggaattatatgtggatggtggggtggagctaaggattactctactctggctatcccaaaaaaagctccatttgtttaaaaaaattaagtaaatcaaacacagctaattgaggacccttattgtttaatgtgagtgattgtagtgaaaacacttattttagtgtgtataacactagtgaaattatttttgtagttaaatctgctggaagtgtgctattaagcttttattgtttggagccctcaggaaactaatttttctgaataaccacattttccaaatgattaagagctcatccttttaagcaatgaaacttttaaaaggtctttatcaaaaatttttcataaatgttacattcttaaatggtatatgataaataatcatcttttttgttggtttatttttttattttttattttattttattttttgagacggagtctcgctctgtctccaggctggagtacagtggcgcaatctcggctcactgctgcctccgcttcctgggttcaagtgattcttcctgcctcactactcagaaggctgaggtgggagtattgatcgagcccaggaggtcaaggctgcagcaagctgtcgcaccactgcactctagcctgggcaacagcaagaccctcgtctcaaaaaagaaaaaaaaaaagtacaatttttgtattgattatgtattccttaagtaggagtggaataaaagtattttaccgtggattggcttctgtgaaggaaagaagtgaatattagtagatatttggaaaaaagaaa

SEQ ID NO: 31076 - DNA, 1106 bp, Homo sapiens
attgcttcttcccagactggtcccaagaatgctgtggttggttttgtgtcttttccagcacttttcttacttgctgtcagttgtcaatctcaacaccttgaccaaaatgaactttcttgagtcatttcttctctgtttagctataagattagaattcatactgaaagatttctaggacttttgtattaaggtaggaaagaggaactaggttctgggagaaagactcctttggaataaaattcatgagctttattggttcctttaacagatcttcattgagtttcatgtgccaggcatccaactagtctctgcttttatagttgtcagtctgacagggctctagtatgtgcacaccgtgacacctgttggctgccaggagactgtttggcttatttcctggttcttagcaatattccaggttggcctggagaattccaaaggtaaatatgaaaatgtatacctacaaaagaatttttgctttataggaagaatttgtaggatttattgagatgtaagctacctatatacatcaagtatgtgatatgattgtaaaaagttacagaagtgtgtgagtcatgaagtacctgtgagggaagtttatatattttttcaaactcttttagtaccattttcatccactaggtggaagcaattacagtatgacctgcattaaagacatgtacagttttttggccggctgcagtggctcacacctgtgatctcaacactttgggaagctgagacgggaggattgcttgagcccaggagtttgagaccagcttgggcaacgtgatgaaaccctgtctctacaaataaaaaaaaaattagccaggcatggtggcacaagcctgtggtcccagctactcagaaggctgaggtgggagtattgatcgagcccaggaggtcaaggctgcagcaagctgtcgcaccactgcactctagcctgggcaacagcaagaccctcgtctcaaaaaagaaaaaaaaaaagtacaatttttgtattgattatgtattccttaagtaggagtggaataaaagtattttaccgtggattggcttctgtgaaggaaagaagtgaatattagtagatatttggaaaaaagaaa

SEQ ID NO: 31077 - DNA, 1083 bp, Homo sapiens
cagctacttgggaggctgaggcaggcaggagttcaaggctgcagtgagctgtctgtgccacggcactccaacctgggcaaaagaggagacctcatctaaagaaaaatccaccaaaaaccctgtgttttaaagtgcaaactgatgatggaggaatgggtaaattccaggggtctatatttccaaaaggacatgtgtttttgtgcactaatacttgtttttgaagaacacatctcagtgttaagtggctgttgctgaggaaggggactgaggaactgggtgtgtctgtgtcattctgtttgaatgtctgtcaggggtatagaaactaggagggagacttgtacttttcactttttaaacttcctgtaaaatttgaattttccaagcaagaatattacttttgcttatttaatgtcaacggaattatatgtggatggtggggtggagctaaggattactctactctggctatcccaaaaaaagctccatttgtttaaaaaaattaagtaaatcaaacacagctaattgaggacccttattgtttaatgtgagtgattgtagtgaaaacacttattttagtgtgtataacactagtgaaattatttttgtagttaaatctgctggaagtgtgctattaagcttttattgtttggagccctcaggaaactaatttttctgaataaccacattttccaaatgattaagagctcatccttttaagcaatgaaacttttaaaaggtctttatcaaaaatttttcataaatgttacattcttaaatggtatatgataaataatcatcttttttgttggtttatttttttattttttattttattttattttttgagacggagtctcgctctgtctccaggctggagtacagtggcgcaatctcggctcactgctgcctccgcttcctgggttcaagtgattcttcctgcctcagcttcccaagtagctgggattacaggcgcgtgccaccacgctggctaatttttgtatttttaatagagatggggtttcaccatgttggccaggatggtctcaatctcttgaccttgtgatctgcccaccttggcttccc

SEQ ID NO: 31078 - DNA, 348 bp, Homo sapiens
agccattctcagcatatccatcccacagagaatgtggtgttcctgctgggactcttaccggcagttgttttttgtaaaacggttataattttgctcagatgtaagagccaaacttttttgatgtcagagaagatggagccaaattctgtcattccaccaattattattaaatattacatttattttaaacatcacatgatatatatatttgttttgtggtaaaagtccaagcagagatggaatttagacattaagaaggtgatgcaacataaggatggtagggaataacgtgttattatatgtgaaatttatgctaaatgagattttagctgtttttgccacaaaagc

SEQ ID NO: 31079 - DNA, 516 bp, Homo sapiens
ttgttatttgtaagtacttccaaattctgaaacttaaagcaagcataactcagaaatgggggaaaaaaagatttaaaacattcttgttaactaatgtggtgccatagtagaaatgataactggcaaattctgggaataacaggaaaacagagggatgactgggggctagggaactaaatgagaaaatgaaaagaagaaatggcttgagaactaactggctaaagtacacacatctcaggcagtttatgagagatgatccttgtagcaaagcataagagaagggatcactgaggaaaacggaagcacaaatgtgaattaggaaggatactactgaaaatactggcaaacttcaagacatccatttatagttagaagacagaaataaattaactactaagaatctgttatcagaacactggatatattttatttgctttaacttattcttaggcttccaaaaggcaaatgtaagagagttaattgtttgtatccactcagaactattaataattaagt

SEQ ID NO: 31080 - DNA, 182 bp, Homo sapiens
tgcacctagaagtggtgtctgggtgcaaatgtaagcagtggtggatccagaaataagagctttgtgtaataaggttcttaaaacagtcctttcttacacgtgcccggtgccagaccctcggtcttggccttgttcaggagctgggatatctgcgcttggtgaaaatgaaatgaattcctgac

SEQ ID NO: 31081 - DNA, 479 bp, Homo sapiens
aagatggtacagctcataagcagaaaaactaggaagaccagctaaagggtgactactataatccaagcagggcactgtggtggcttgggcccaacagtgatgccatgatagggagagaagtcagggaaacgggatgcaccctgaggatgaggctgatgggatcttctgatgaaccagctgaatttgagaggggaaggcaggactaagaatgattccttgttggcatttttacagacataaaggataagtttttgcattaacttgggagaactaacatgtttatgatgtccaagaacaacaaatgtatttccagagttcaagtcttctgttccaagtgctcgaatgccctggctagagtgcagtgttgtgatcacagttcactgcaacctcaacctcttgatgacactcccgcctcagcctcccaagtagctgggaccacaggcatgaggcaccatgcccaactattttttttttttttt

SEQ ID NO: 31082 - DNA, 208 bp, Homo sapiens
cttgttgccataagagaaagccattattcattactgaataattgaatgttcaatattcaatcattattttaaggttattatgattagatatgtattaaagccattaaccttgcctagtaggtgctccaaaacagaaaagctcctgggacatcctgggagataggaagtcacatatttatcatataaaacgtgttgccaaaaaaaaaaa

SEQ ID NO: 31083 - DNA, 522 bp, Homo sapiens
taggaatttaatttagactccctcataagaaattttggccccccaggaccaaaaattattcccgggggaagagcagctaaagtccacactgggccttgtcaagggctgttcatcaatttcattgtattaaataagttaacacagttatcacagtgacttttcttttgtcagcaaaaaaagccttctttcctcctatatttccagttccaaggtggtatgtgaccgttctctgctgtcatgctgtcgctgacatttattcctctagtgtggagacggggctgtccatctgcctggtggctgctgaccccctagctagtgaggcgtgaggtgggctccgaaagagccagtgaggaggacaccaagcaggggctcctctgccagcctcttaaaaagaggaggtgctatttggttatgtcatggttccatttggttacatgagttccttctcagacccttctctgtgtgtccaccttggggtgatgtgtgtgcgtgaaccaacctgccgaaaattaaacagacaaa

SEQ ID NO: 31084 - DNA, 501 bp, Homo sapiens
gccaaggactggacatcttgacaccaagaaacatagcaaaatccagtcaaaagtgactttgcaagcagtatgatgaatttctatatggttctccagctccagcattttcttagggaaagcatggccagaaatgcccaagtctgtattttggcaacagcccaagcttctcagactccactggccagttccagatctttaagtaactataataagagccatgctgtctgtctctaaaaagtgaagcatgaatcaaaagtgactttgttttaatttaacagcattgagactgtgaaaggcactggatatgtttaggcacctgtaaacggagaatgtggggtgaaaaaagagaggcatagctgggtgcgatggctcacgcctgtaatcccagcactttgggaggctgaagcaggcagatcacttgaggccaggagtttgagaccagcctggccaacacggtaaaaccccgtctctactaaaaatactaaaaattagctgggtgtg

SEQ ID NO: 31085 - DNA, 957 bp, Homo sapiens
atggcagataaagtgcagactactttattgttcttagcagttggagagttttcagtggggatcttagggaatgcattcattggattggtaaactgcatggactgggtcaagaagaggaaaattgcctccattgatttaatcctcacaagtctggccatatccagaatttgtctattgtgcgtaatactattagattgttttatattggtgctatatccagatgtctatgccactggtaaagaaatgagaatcattgacttcttctggacactaaccaatcatttaagtatctggtttgcaacctgcctcagcatttactatttcttcaagataggtaatttctttcacccacttttcctctggatgaagtggagaattgacagggtgatttcctggattctactggggtgcgtggttctctctgtgtttattagccttccagccactgagaatttgaacgctgatttcaggttttgtgtgaaggcaaagaggaaaacaaacttaacttggagttgcagagtaaataaaactcaacatgcttctaccaagttatttctcaacctggcaacgctgctccccttttgtgtgtgcctaatgtcctttttcctcttgatcctctccctgcggagacatatcaggcgaatgcagctcagtgccacagggtgcagagaccccagcacagaagcccatgtgagagccctgaaagctgtcatttccttccttctcctctttattgcctactatttgtcctttctcattgccacctccagctactttatgccagagacggaattagctgtgatttttggtgagtccatagctctaatctacccctcaagtcattcatttatcctaatactggggaacaataaattaagacatgcatctctaaaggtgatttggaaagtaatgtctattctaaaaggaagaaaattccaacaacataaacaaatctga

SEQ ID NO: 31086 - DNA, 520 bp, Homo sapiens
  misc_feature (2)..(2): n is a, c, g, or t
  misc_feature (21)..(21): n is a, c, g, or t
  misc_feature (27)..(27): n is a, c, g, or t
  misc_feature (49)..(49): n is a, c, g, or t
  misc_feature (78)..(78): n is a, c, g, or t
  misc_feature (161)..(161): n is a, c, g, or t
anaaaaaacggcttgcccggntcctgnaaactcaaaaatgtgccccaanaagaaagtcccccaactgaaggctgtggnccccaactctgcccccggaaaataagctatttgcctgaattcctgggaaggggtggggtgggggtcggaagtgattcaagccnatgccctggacccctgggcttccctctttgcaacacccatggctctccccacacttgttcctggatgcctgccttgttttttaccccaacatgacttgtgtgttttctgtctcaaagttttgcctaaagggataagttgtgggtgcttcattcattcttcttcttcttttgttgagaccttgtctctaaaaaagaaagaaaaataaatgcaaagaaccaaaagcagtccaagcaattttaagaaggaagaacacagaggattcacactactaacactatccaatctcatgacttactaaaatcaggagagtaaaatattggtataaaaatagatagattaatggaacagaacagagtac

SEQ ID NO: 31087 - DNA, 258 bp, Homo sapiens
ggcttgagcccggaagttttaggatgcagtaagctaggactgcgtcactgcactacagcctgccgacagagcaagaccttgtctctaaaaaagaaagaaaaataaatgcaaagaaccaaaagcagtccaagcaattttaagaaggaagaacacagaggattcacactactaacactatccaatctcatgacttactaaaatcaggagagtaaaatattggtataaaaatagatagattaatggaacagaacagagtac

SEQ ID NO: 31088 - DNA, 409 bp, Homo sapiens
  misc_feature (374)..(374): n is a, c, g, or t
cttagcatgatgaaataaacatttttactctctaaatagttttcttaacttttaaatgttaaacctatactgtccttgatttaaattactgtgcccatcaattttgtagctggttattgttactgggtattttgatagtcttcttttttttcttttgtttgctcttgaacaatatcatatgtatctttgtgtatatagctttttgttgttggatactttcatctggatacattcttggaaataggatcattggggttttttgtgccagggtggtatatacactttttttgcctttgatatggccagattgctttttaaaggagtttataatgctaccagcactatataagtgtctactagacaccattgaccantatgcacgccatcattttatgaattgccaaaaaag

SEQ ID NO: 31089 - DNA, 319 bp, Homo sapiens
tgcccgccacccacacttggcctaatttttttgaatttttagtagagacggggattcacccatgttggccagccctggtctcgaactcctgacctcaaatgattcgcccacctcagcctcccaaagtgctgggattacaggcatgagccacctcgcccggcccctaatactttttattgactttactaactgctgtctgttaagtcccaaataacagcagcaacttctgtttacccaattttgtggaaaaacaagtaccttctaggtagattcactcattcctcgtctttttagtttattctaagattcctcaggagat

SEQ ID NO: 31090 - DNA, 1907 bp, Homo sapiens
gtctcctggtggggtgcaaggagccgaggcgagatgggcgtcctgggccgggtcctgctgtggctgcagctctgcgcactgacccaggcggtctccaaactctgggtccccaacacggacttcgacgtcgcagccaactggagccagaaccggaccccgtgcgccggcggcgccgttgagttcccggcggacaagatggtgtcagtcctggtgcaagaaggtcacgccgtctcagacatgctcctgccgctggatggggaactcgtcctggcttcaggagccggattcggcgtctcagacgtgggctcgcacctggactgtggcgcgggcgaacctgccgtcttccgcgactctgaccgcttctcctggcatgacccgcacctgtggcgctctggggacgaggcacctggcctcttcttcgtggacgccgagcgcgtgccctgccgccacgacgacgtcttctttccgcctagtgcctccttccgcgtggggctcggccctggcgctagccccgtgcgtgtccgcagcatctcggctctgggccggacgttcacgcgcgacgaggacctggctgttttcctggcgtcccgcgcgggccgcctacgcttccacgggccgggcgcgctgagcgtgggccccgaggactgcgcggacccgtcgggctgcgtctgcggcaacgcggaggcgcagccgtggatctgcgcggccctgctccagcccctgggcggccgctgtccccaggccgcctgccactttgccctccggccccaggggcagtgctgtgacctctgtggagccgttgtgttgctgacccacggccccgcatttgacctggagcggtaccgggcgcggatactggacaccttcctgggtctgcctcagtaccacgggctgcaggtggccgtgtccaaggtgccacgctcgtcccggctccgtgaggccgatacggagatccaggtggtgctggtggagaatgggcccgagacaggcggagcggggcggctggcccgggccctcctggcggacgtcgccgagaacggcgaggccctcggcgtcctggaggcgaccatgcgggagtcgggcgcacacgtctggggcagctccgcggctgggctggcgggcggcgtggcggctgccgtgctgctggcgctgctggtcctgctggtggcgccgccgctgctgcgccgcgcggggaggctcaggtggaggaggcacgaggcggcggccccggctggagcgcccctcggcttccgcaacccggtgttcgacgtgacggcctccgaggagctgcccctgccgcggcggctcagcctggttccgaaggcggccgcagacagcaccagccacagttacttcgtcaaccctctgttcgccggggccgaggccgaggcctgagcggccgcctgaccgtcgaccttggggctctccaccccctctggccccagtcgaactgggggctagccacctcctcgtccagcccccaaacctccccttcctttccccctcctccgggggccaaggacagggtggccttactcagtaaaggtgtttcctgcacctgctgtcagcctggctatgccgccaccggccccgcccatgaggactaggagcccagccttgcgccgcattcgcactgggggacatgggaggggtctagctggccactgctggaggcagcgctggtcgtcacctgggcggccagaggctgggatctgcgaagttgaacccagaactaggagtggggcttcccccgccttccggtgaggggagggtgaggagctggagggaggggcgggagagaggcaaggggtggacggagccaaaggccgtgcctggtggggcggacggaaaaggggtgggcatccctcctggtaccaagctgctgggtgcgaaggcagatcatatgg

SEQ ID NO: 31091 - DNA, 927 bp, Homo sapiens
gtctcctggtggggtgcaaggagccgaggcgagatgggcgtcctgggccgggtcctgctgtggctgcagctctgcggtgagccgggaccacaccggtgcgggcccggacggtagcggtctgtcaggacccagggccgaggtcgctctaggcctggagggtgaagatcttccgaggagtgggcagggagggctttggagggttgggggcgtgaaactcggccctgcctccctcgtctggcgagtgcgcagcccggaagtgcgcggccagtgcatcgggcggtgcgggagaggagaggaggggctccgggaacctcggccagccccggcctccggcggctcctgccctcgcggtttttccgtctgcgaaatgggcgcggtccccagaacctgccgagagcagcgagtgtgcgcctgcggggctcggcagaccgcctcagcttcccggtccccaagggagcactgagccctcctccgccttcacaccaggccggcgcgtgtccctggcgcccccttccctaaacccctcgcggctccctcaggacaacgcccacccaccacattcagggccggcctgacctggtcctgccgcccccagccccttcttacttctcataccgggttgcgctctgtcgcagctcttcccggcccaggtaggactcctccgggaagccttcctgattccaaggccgagaagaggtctgtgctgccccatcctcctccatgccccagttgtcactgtccttaacaacgctgtcctctgctccagcgccaggcaaactgggggcagtgccgggaggctatctaggcaggcgtcctgcagggcgcgtttgagcgggctctgcaggtatcagtagaagtccgttggagagcgcccgggcagggcgcccacagtctggccgggagggaccagggtctgggtccgggccc

SEQ ID NO: 31092 - DNA, 843 bp, Homo sapiens
gcgtggcgtggcgtggcgtggcgtggtgtggcgcggcgcttgttccgtggagctcagggatgtgctccggctcaggcgaacctgccgtcttccgcgactctgaccgcttctcctggcatgacccgcacctgtggcgctctggggacgaggcacctggcctcttcttcgtggacgccgagcgcgtgccctgccgccacgacgacgtcttctttccgcctagtgcctccttccgcgtggggctcggccctggcgctagccccgtgcgtgtcacagcaccagccacagttacttcgtcaaccctctgttcgccggggccgaggccgaggcctgagcggccgcctgaccgtcgaccttggggctctccaccccctctggccccagtcgaactgggggctagccacctcctcgtccagcccccaaacctccccttcctttccccctcctccgggggccaaggacagggtggccttactcagtaaaggtgtttcctgcacctgctgtcagcctggctatgccgccaccggccccgcccatgaggactaggagcccagccttgcgccgcattcgcactgggggacatgggaggggtctagctggccactgctggaggcagcgctggtcgtcacctgggcggccagaggctgggatctgcgaagttgaacccagaactaggagtggggcttcccccgccttccggtgaggggagggtgaggagctggagggaggggcgggagagaggcaaggggtggacggagccaaaggccgtgcctggtggggcggacggaaaaggggtgggcatccctcctggtaccaagctgctgggtgcgaaggcagatcatatgg

SEQ ID NO: 31093 - DNA, 1654 bp, Homo sapiens
gcgtggcgtggcgtggcgtggcgtggtgtggcgcggcgcttgttccgtggagctcagggatgtgctccggctcaggcgaacctgccgtcttccgcgactctgaccgcttctcctggcatgacccgcacctgtggcgctctggggacgaggcacctggcctcttcttcgtggacgccgagcgcgtgccctgccgccacgacgacgtcttctttccgcctagtgcctccttccgcgtggggctcggccctggcgctagccccgtgcgtgtccgcagcatctcggctctgggccggacgttcacgcgcgacgaggacctggctgttttcctggcgtcccgcgcgggccgcctacgcttccacgggccgggcgcgctgagcgtgggccccgaggactgcgcggacccgtcgggctgcgtctgcggcaacgcggaggcgcagccgtggatctgcgcggccctgctccagcccctgggcggccgctgtccccaggccgcctgccactttgccctccggccccaggggcagtgctgtgacctctgtggagccgttgtgttgctgacccacggccccgcatttgacctggagcggtaccgggcgcggatactggacaccttcctgggtctgcctcagtaccacgggctgcaggtggccgtgtccaaggtgccacgctcgtcccggctccgtgaggccgatacggagatccaggtggtgctggtggagaatgggcccgagacaggcggagcggggcggctggcccgggccctcctggcggacgtcgccgagaacggcgaggccctcggcgtcctggaggcgaccatgcgggagtcgggcgcacacgtctggggcagctccgcggctgggctggcgggcggcgtggcggctgccgtgctgctggcgctgctggtcctgctggtggcgccgccgctgctgcgccgcgcggggaggctcaggtggaggaggcacgaggcggcggccccggctggagcgcccctcggcttccgcaacccggtgttcgacgtgacggcctccgaggagctgcccctgccgcggcggctcagcctggttccgaaggcggccgcagacagcaccagccacagttacttcgtcaaccctctgttcgccggggccgaggccgaggcctgagcggccgcctgaccgtcgaccttggggctctccaccccctctggccccagtcgaactgggggctagccacctcctcgtccagcccccaaacctccccttcctttccccctcctccgggggccaaggacagggtggccttactcagtaaaggtgtttcctgcacctgctgtcagcctggctatgccgccaccggccccgcccatgaggactaggagcccagccttgcgccgcattcgcactgggggacatgggaggggtctagctggccactgctggaggcagcgctggtcgtcacctgggcggccagaggctgggatctgcgaagttgaacccagaactaggagtggggcttcccccgccttccggtgaggggagggtgaggagctggagggaggggcgggagagaggcaaggggtggacggagccaaaggccgtgcctggtggggcggacggaaaaggggtgggcatccctcctggtaccaagctgctgggtgcgaaggcagatcatatgg

SEQ ID NO: 31094 - DNA, 2052 bp, Homo sapiens
gtctcctggtggggtgcaaggagccgaggcgagatgggcgtcctgggccgggtcctgctgtggctgcagctctgcgcactgacccaggcggtctccaaactctgggtccccaacacggacttcgacgtcgcagccaactggagccagaaccggaccccgtgcgccggcggcgccgttgagttcccggcggacaagatggtgtcagtcctggtgcaagaaggtcacgccgtctcagacatgctcctgccgctggatggggaactcgtcctggcttcaggagccggattcggcgtctcagacgtgggctcgcacctggactgtggcgcgggcgaacctgccgtcttccgcgactctgaccgcttctcctggcatgacccgcacctgtggcgctctggggacgaggcacctggcctcttcttcgtggacgccgagcgcgtgccctgccgccacgacgacgtcttctttccgcctagtgcctccttccgcgtggggctcggccctggcgctagccccgtgcgtgtccgcagcatctcggctctgggccgggtgagcactgaggggagggaggctcgggtcccctctccccacctcggcccgaccccgcccctcctggtctgcacacgttgggtctgagcactcaggtgaagtctcttcctcgggctggctccggtggggacccggctgcccgcagacgttcacgcgcgacgaggacctggctgttttcctggcgtcccgcgcgggccgcctacgcttccacgggccgggcgcgctgagcgtgggccccgaggactgcgcggacccgtcgggctgcgtctgcggcaacgcggaggcgcagccgtggatctgcgcggccctgctccagcccctgggcggccgctgtccccaggccgcctgccactttgccctccggccccaggggcagtgctgtgacctctgtggagccgttgtgttgctgacccacggccccgcatttgacctggagcggtaccgggcgcggatactggacaccttcctgggtctgcctcagtaccacgggctgcaggtggccgtgtccaaggtgccacgctcgtcccggctccgtgaggccgatacggagatccaggtggtgctggtggagaatgggcccgagacaggcggagcggggcggctggcccgggccctcctggcggacgtcgccgagaacggcgaggccctcggcgtcctggaggcgaccatgcgggagtcgggcgcacacgtctggggcagctccgcggctgggctggcgggcggcgtggcggctgccgtgctgctggcgctgctggtcctgctggtggcgccgccgctgctgcgccgcgcggggaggctcaggtggaggaggcacgaggcggcggccccggctggagcgcccctcggcttccgcaacccggtgttcgacgtgacggcctccgaggagctgcccctgccgcggcggctcagcctggttccgaaggcggccgcagacagcaccagccacagttacttcgtcaaccctctgttcgccggggccgaggccgaggcctgagcggccgcctgaccgtcgaccttggggctctccaccccctctggccccagtcgaactgggggctagccacctcctcgtccagcccccaaacctccccttcctttccccctcctccgggggccaaggacagggtggccttactcagtaaaggtgtttcctgcacctgctgtcagcctggctatgccgccaccggccccgcccatgaggactaggagcccagccttgcgccgcattcgcactgggggacatgggaggggtctagctggccactgctggaggcagcgctggtcgtcacctgggcggccagaggctgggatctgcgaagttgaacccagaactaggagtggggcttcccccgccttccggtgaggggagggtgaggagctggagggaggggcgggagagaggcaaggggtggacggagccaaaggccgtgcctggtggggcggacggaaaaggggtgggcatccctcctggtaccaagctgctgggtgcgaaggcagatcatatgg

SEQ ID NO: 31095 - DNA, 2076 bp, Homo sapiens
gtctcctggtggggtgcaaggagccgaggcgagatgggcgtcctgggccgggtcctgctgtggctgcagctctgcgcactgacccaggcggtctccaaactctgggtccccaacacggacttcgacgtcgcagccaactggagccagaaccggaccccgtgcgccggcggcgccgttgagttcccggcggacaagatggtgtcagtcctggtgcaagaaggtcacgccgtctcagacatgctcctgccgctggatggggaactcgtcctggcttcaggagccggattcggcgtctcagacgtgggctcgcacctggactgtggcgcgggcgaacctgccgtcttccgcgactctgaccgcttctcctggcatgacccgcacctgtggcgctctggggacgaggcacctggcctcttcttcgtggacgccgagcgcgtgccctgccgccacgacgacgtcttctttccgcctagtgcctccttccgcgtggggctcggccctggcgctagccccgtgcgtgtccgcagcatctcggctctgggccggacgttcacgcgcgacgaggacctggctgttttcctggcgtcccgcgcgggccgcctacgcttccacgggccgggcgcgctgagcgtgggccccgaggactgcgcggacccgtcgggctgcgtctgcggcaacgcggaggtgagcgaggccgcagtggagtcgcgggggccgcgcgagggtcgggactgtgcccgggacagggccgctgcgctcccacggtctctcgccggcttgcttctcggaggcatcgcccttctcgctgcggtccgctctggccctccgcgctgaccaccgcccctcgcaccaggcgcagccgtggatctgcgcggccctgctccagcccctgggcggccgctgtccccaggccgcctgccactttgccctccggccccaggggcagtgctgtgacctctgtggagccgttgtgttgctgacccacggccccgcatttgacctggagcggtaccgggcgcggatactggacaccttcctgggtctgcctcagtaccacgggctgcaggtggccgtgtccaaggtgccacgctcgtcccggctccgtgaggccgatacggagatccaggtggtgctggtggagaatgggcccgagacaggcggagcggggcggctggcccgggccctcctggcggacgtcgccgagaacggcgaggccctcggcgtcctggaggcgaccatgcgggagtcgggcgcacacgtctggggcagctccgcggctgggctggcgggcggcgtggcggctgccgtgctgctggcgctgctggtcctgctggtggcgccgccgctgctgcgccgcgcggggaggctcaggtggaggaggcacgaggcggcggccccggctggagcgcccctcggcttccgcaacccggtgttcgacgtgacggcctccgaggagctgcccctgccgcggcggctcagcctggttccgaaggcggccgcagacagcaccagccacagttacttcgtcaaccctctgttcgccggggccgaggccgaggcctgagcggccgcctgaccgtcgaccttggggctctccaccccctctggccccagtcgaactgggggctagccacctcctcgtccagcccccaaacctccccttcctttccccctcctccgggggccaaggacagggtggccttactcagtaaaggtgtttcctgcacctgctgtcagcctggctatgccgccaccggccccgcccatgaggactaggagcccagccttgcgccgcattcgcactgggggacatgggaggggtctagctggccactgctggaggcagcgctggtcgtcacctgggcggccagaggctgggatctgcgaagttgaacccagaactaggagtggggcttcccccgccttccggtgaggggagggtgaggagctggagggaggggcgggagagaggcaaggggtggacggagccaaaggccgtgcctggtggggcggacggaaaaggggtgggcatccctcctggtaccaagctgctgggtgcgaaggcagatcatatgg

SEQ ID NO: 31096 - DNA, 2221 bp, Homo sapiens
gtctcctggtggggtgcaaggagccgaggcgagatgggcgtcctgggccgggtcctgctgtggctgcagctctgcgcactgacccaggcggtctccaaactctgggtccccaacacggacttcgacgtcgcagccaactggagccagaaccggaccccgtgcgccggcggcgccgttgagttcccggcggacaagatggtgtcagtcctggtgcaagaaggtcacgccgtctcagacatgctcctgccgctggatggggaactcgtcctggcttcaggagccggattcggcgtctcagacgtgggctcgcacctggactgtggcgcgggcgaacctgccgtcttccgcgactctgaccgcttctcctggcatgacccgcacctgtggcgctctggggacgaggcacctggcctcttcttcgtggacgccgagcgcgtgccctgccgccacgacgacgtcttctttccgcctagtgcctccttccgcgtggggctcggccctggcgctagccccgtgcgtgtccgcagcatctcggctctgggccgggtgagcactgaggggagggaggctcgggtcccctctccccacctcggcccgaccccgcccctcctggtctgcacacgttgggtctgagcactcaggtgaagtctcttcctcgggctggctccggtggggacccggctgcccgcagacgttcacgcgcgacgaggacctggctgttttcctggcgtcccgcgcgggccgcctacgcttccacgggccgggcgcgctgagcgtgggccccgaggactgcgcggacccgtcgggctgcgtctgcggcaacgcggaggtgagcgaggccgcagtggagtcgcgggggccgcgcgagggtcgggactgtgcccgggacagggccgctgcgctcccacggtctctcgccggcttgcttctcggaggcatcgcccttctcgctgcggtccgctctggccctccgcgctgaccaccgcccctcgcaccaggcgcagccgtggatctgcgcggccctgctccagcccctgggcggccgctgtccccaggccgcctgccactttgccctccggccccaggggcagtgctgtgacctctgtggagccgttgtgttgctgacccacggccccgcatttgacctggagcggtaccgggcgcggatactggacaccttcctgggtctgcctcagtaccacgggctgcaggtggccgtgtccaaggtgccacgctcgtcccggctccgtgaggccgatacggagatccaggtggtgctggtggagaatgggcccgagacaggcggagcggggcggctggcccgggccctcctggcggacgtcgccgagaacggcgaggccctcggcgtcctggaggcgaccatgcgggagtcgggcgcacacgtctggggcagctccgcggctgggctggcgggcggcgtggcggctgccgtgctgctggcgctgctggtcctgctggtggcgccgccgctgctgcgccgcgcggggaggctcaggtggaggaggcacgaggcggcggccccggctggagcgcccctcggcttccgcaacccggtgttcgacgtgacggcctccgaggagctgcccctgccgcggcggctcagcctggttccgaaggcggccgcagacagcaccagccacagttacttcgtcaaccctctgttcgccggggccgaggccgaggcctgagcggccgcctgaccgtcgaccttggggctctccaccccctctggccccagtcgaactgggggctagccacctcctcgtccagcccccaaacctccccttcctttccccctcctccgggggccaaggacagggtggccttactcagtaaaggtgtttcctgcacctgctgtcagcctggctatgccgccaccggccccgcccatgaggactaggagcccagccttgcgccgcattcgcactgggggacatgggaggggtctagctggccactgctggaggcagcgctggtcgtcacctgggcggccagaggctgggatctgcgaagttgaacccagaactaggagtggggcttcccccgccttccggtgaggggagggtgaggagctggagggaggggcgggagagaggcaaggggtggacggagccaaaggccgtgcctggtggggcggacggaaaaggggtgggcatccctcctggtaccaagctgctgggtgcgaaggcagatcatatgg

SEQ ID NO: 31097 - DNA, 1883 bp, Homo sapiens
gtctcctggtggggtgcaaggagccgaggcgagatgggcgtcctgggccgggtcctgctgtggctgcagctctgcgcactgacccaggcggtctccaaactctgggtccccaacacggacttcgacgtcgcagccaactggagccagaaccggaccccgtgcgccggcggcgccgttgagttcccggcggacaagatggtgtcagtcctggtgcaagaaggtcacgccgtctcagacatgctcctgccgctggatggggaactcgtcctggcttcaggagccggattcggcgtctcagacgtgggctcgcacctggactgtggcgcgggcgaacctgccgtcttccgcgactctgaccgcttctcctggcatgacccgcacctgtggcgctctggggacgaggcacctggcctcttcttcgtggacgccgagcgcgtgccctgccgccacgacgacgtcttctttccgcctagtgcctccttccgcgtggggctcggccctggcgctagccccgtgcgtgtcacgttcacgcgcgacgaggacctggctgttttcctggcgtcccgcgcgggccgcctacgcttccacgggccgggcgcgctgagcgtgggccccgaggactgcgcggacccgtcgggctgcgtctgcggcaacgcggaggcgcagccgtggatctgcgcggccctgctccagcccctgggcggccgctgtccccaggccgcctgccactttgccctccggccccaggggcagtgctgtgacctctgtggagccgttgtgttgctgacccacggccccgcatttgacctggagcggtaccgggcgcggatactggacaccttcctgggtctgcctcagtaccacgggctgcaggtggccgtgtccaaggtgccacgctcgtcccggctccgtgaggccgatacggagatccaggtggtgctggtggagaatgggcccgagacaggcggagcggggcggctggcccgggccctcctggcggacgtcgccgagaacggcgaggccctcggcgtcctggaggcgaccatgcgggagtcgggcgcacacgtctggggcagctccgcggctgggctggcgggcggcgtggcggctgccgtgctgctggcgctgctggtcctgctggtggcgccgccgctgctgcgccgcgcggggaggctcaggtggaggaggcacgaggcggcggccccggctggagcgcccctcggcttccgcaacccggtgttcgacgtgacggcctccgaggagctgcccctgccgcggcggctcagcctggttccgaaggcggccgcagacagcaccagccacagttacttcgtcaaccctctgttcgccggggccgaggccgaggcctgagcggccgcctgaccgtcgaccttggggctctccaccccctctggccccagtcgaactgggggctagccacctcctcgtccagcccccaaacctccccttcctttccccctcctccgggggccaaggacagggtggccttactcagtaaaggtgtttcctgcacctgctgtcagcctggctatgccgccaccggccccgcccatgaggactaggagcccagccttgcgccgcattcgcactgggggacatgggaggggtctagctggccactgctggaggcagcgctggtcgtcacctgggcggccagaggctgggatctgcgaagttgaacccagaactaggagtggggcttcccccgccttccggtgaggggagggtgaggagctggagggaggggcgggagagaggcaaggggtggacggagccaaaggccgtgcctggtggggcggacggaaaaggggtgggcatccctcctggtaccaagctgctgggtgcgaaggcagatcatatgg

SEQ ID NO: 31098 - DNA, 1472 bp, Homo sapiens
gtctcctggtggggtgcaaggagccgaggcgagatgggcgtcctgggccgggtcctgctgtggctgcagctctgcgcactgacccaggcggtctccaaactctgggtccccaacacggacttcgacgtcgcagccaactggagccagaaccggaccccgtgcgccggcggcgccgttgagttcccggcggacaagatggtgtcagtcctggtgcaagaaggtcacgccgtctcagacatgctcctgccgctggatggggaactcgtcctggcttcaggagccggattcggcgtctcagacgtgggctcgcacctggactgtggcgcgggcgaacctgccgtcttccgcgactctgaccgcttctcctggcatgacccgcacctgtggcgctctggggacgaggcacctggcctcttcttcgtggacgccgagcgcgtgccctgccgccacgacgacgtcttctttccgcctagtgcctccttccgcgtggggctcggccctggcgctagccccgtgcgtgtcgcgaggccctcggcgtcctggaggcgaccatgcgggagtcgggcgcacacgtctggggcagctccgcggctgggctggcgggcggcgtggcggctgccgtgctgctggcgctgctggtcctgctggtggcgccgccgctgctgcgccgcgcggggaggctcaggtggaggaggcacgaggcggcggccccggctggagcgcccctcggcttccgcaacccggtgttcgacgtgacggcctccgaggagctggtgagggggctggaggggggaccggggcctcctcggggccgggactcggcgccgaccgccgcctgaccctgtcaccccgcagcccctgccgcggcggctcagcctggttccgaaggcggccgcagacagcaccagccacagttacttcgtcaaccctctgttcgccggggccgaggccgaggcctgagcggccgcctgaccgtcgaccttggggctctccaccccctctggccccagtcgaactgggggctagccacctcctcgtccagcccccaaacctccccttcctttccccctcctccgggggccaaggacagggtggccttactcagtaaaggtgtttcctgcacctgctgtcagcctggctatgccgccaccggccccgcccatgaggactaggagcccagccttgcgccgcattcgcactgggggacatgggaggggtctagctggccactgctggaggcagcgctggtcgtcacctgggcggccagaggctgggatctgcgaagttgaacccagaactaggagtggggcttcccccgccttccggtgaggggagggtgaggagctggagggaggggcgggagagaggcaaggggtggacggagccaaaggccgtgcctggtggggcggacggaaaaggggtgggcatccctcctggtaccaagctgctgggtgcgaaggcagatcatatgg

SEQ ID NO: 31099 - DNA, 1411 bp, Homo sapiens
gtctcctggtggggtgcaaggagccgaggcgagatgggcgtcctgggccgggtcctgctgtggctgcagctctgcgcactgacccaggcggtctccaaactctgggtccccaacacggacttcgacgtcgcagccaactggagccagaaccggaccccgtgcgccggcggcgccgttgagttcccggcggacaagatggtgtcagtcctggtgcaagaaggtcacgccgtctcagacatgctcctgccgctggatggggaactcgtcctggcttcaggagccggattcggcgtctcagacgtgggctcgcacctggactgtggcgcgggcgaacctgccgtcttccgcgactctgaccgcttctcctggcatgacccgcacctgtggcgctctggggacgaggcacctggcctcttcttcgtggacgccgagcgcgtgccctgccgccacgacgacgtcttgcgaggccctcggcgtcctggaggcgaccatgcgggagtcgggcgcacacgtctggggcagctccgcggctgggctggcgggcggcgtggcggctgccgtgctgctggcgctgctggtcctgctggtggcgccgccgctgctgcgccgcgcggggaggctcaggtggaggaggcacgaggcggcggccccggctggagcgcccctcggcttccgcaacccggtgttcgacgtgacggcctccgaggagctggtgagggggctggaggggggaccggggcctcctcggggccgggactcggcgccgaccgccgcctgaccctgtcaccccgcagcccctgccgcggcggctcagcctggttccgaaggcggccgcagacagcaccagccacagttacttcgtcaaccctctgttcgccggggccgaggccgaggcctgagcggccgcctgaccgtcgaccttggggctctccaccccctctggccccagtcgaactgggggctagccacctcctcgtccagcccccaaacctccccttcctttccccctcctccgggggccaaggacagggtggccttactcagtaaaggtgtttcctgcacctgctgtcagcctggctatgccgccaccggccccgcccatgaggactaggagcccagccttgcgccgcattcgcactgggggacatgggaggggtctagctggccactgctggaggcagcgctggtcgtcacctgggcggccagaggctgggatctgcgaagttgaacccagaactaggagtggggcttcccccgccttccggtgaggggagggtgaggagctggagggaggggcgggagagaggcaaggggtggacggagccaaaggccgtgcctggtggggcggacggaaaaggggtgggcatccctcctggtaccaagctgctgggtgcgaaggcagatcatatgg

SEQ ID NO: 31100 - DNA, 378 bp, Homo sapiens
ctttgtaaatagggcgaccacatgatttctcatccaaaacacttggctgtgaaaggaggcctattaataattacattgggacaacaggagtgaagtagaatgaatattccccatacttacaaagaatatgattcaatttacacaaaataagagaccaaagaggatttgtcttatttctgttcatcccctcttggcttttaaaacagtgccttgtgcagctaaatgcttattgagattagcaatattaaggctgggcatgatggctcatgcctgtaatcccagcactttgggaagctgaggcaggtagatagcttgagcccaggagttcaagaccagcctaggcaacagggcaaaacccgtctctatttaaaaaaaaaa

SEQ ID NO: 31101 - DNA, 294 bp, Homo sapiens
ctttgtaaatagggcgaccacatgatttctcatccaaaacacttggctgtgaaaggaggcctattaataattacattgggacaacaggagtgaagtagaatgaatattccccatacttacaaagaatatgattcaatttacacaaaataagagaccaaagaggatttgtcttatttctgttcatcccctcttggcttttaaaacaatgaaaattcccttagacaaccaggccatccaaatcttcagatatttttctgacaattttctgattctgtattctactacctgcctcta

SEQ ID NO: 31102 - DNA, 224 bp, Homo sapiens
aaaactgtagcccagggcattgaaaacctctcggagagggccaggtgtgaccagccctgtgcccatcctgctgtgattcaggagtctcgcagaagacatcagaatgcctttctctgagtcacagtctgtatcttctagaaaaggctgtccatcttcaccccaagcccactggctcctgagatacgacatccagacccagtgcagctggacctggcccaggtaag

SEQ ID NO: 31103 - DNA, 246 bp, Homo sapiens
tataatttaacgtaactttttcattattcagacagggattatctacaccttaagtatattaagtgttttgttcaaggttacagtgctaaactagttactagagcctgctctagaattcacatctcttccttcttcgttctttgtggtggttttatactacactggataatggtgtcctgttaaaactccatcaatccaagaattgctcttttgctggaataccaggatggccctcttgctagaata

SEQ ID NO: 31104 - DNA, 472 bp, Homo sapiens
tcacttttcagattttttttcttcttttttaagagataggatctcgttctgtcacccaggctggagggcagtggtgcaatcatagctcactgcagcctctaactcctgggctcaagtgtcctcttgcctcagcctcccgaataactgggaccataggtgcaagccaccagctttttagattatttagtgctcagagtaatcagatacatcacccgtacgtgcggaagacagtgagtaaaccccaagataatgctgctacctcaataacagcttagtctatgacctaatacaacaccagctaacacttgctaagtattactccatgccagccactattcatgggttatcccatgtaatcctctcaatgacattgggggtgtgtgctatcttatctctatgtcataaatgaggctcaagtggggcccagacaggttcaggaacatgcttgctcaagtagccaccgctgccagag

SEQ ID NO: 31105 - DNA, 342 bp, Homo sapiens
actccaattctctttccccttccaagttacccccacctgaactacctgctcaacgaaagtttaccacaaagttattttcaattactacccaattacaatctccctgtggttgcacaatctgttttcataaaactaattaatgactttgatgcatcagcgaccccctgaaatgaagcattaattgcccagcctggatgctctttgccagcctgctaaaatggttccatttaaccccttggctcctgacactacccagttcaataccaccaggccccttttccctaatataactagatatgcctgatagtccccagcagaaagctccttacagtaaagtcgctg

SEQ ID NO: 31106 - DNA, 569 bp, Homo sapiens
ttacagggctaatatctttaatctttacacatttgacaatatccaataaaaagaacaccaaactacatcaagacaaaggagcaacagacatgggcctgcagaggacaaaagagaaaacaggagcactcaataaccaggaactcagggactttggaggcaacctgtgtgggttaaacatgcttttgaagatttttatcattatttctcattagaaatataaaaagtgggctgggcgccgtggctcacgcctgtaatcccagcactttgggaggccgaggcaagtggatcacgagatcaggagttcaagaccagcctggccaacatggtgaaaccccatctctactaaaaatccaaaaattagttgggtgtggtggagggcgcctgtaatcccagctactggggaggctgaggcaggaggattgcttgacctcaggaggcagaggttgcagtaagctgagatcacaccactgcattccagcctgggtgacagagtgagactctgtctcagaaaaaaagaaaagaaaagaaaagaaaagaaaagaaagaaagaaagaaagaaagaaagaaag

SEQ ID NO: 31107 - DNA, 412 bp, Homo sapiens
cttagagaatttaaagggtggtgctgataaacaagggaacttcataagtccaggctattagactagtaagatatgttttttttacatttataataccctaaacattagagaattaacatttgataagcccaaggatgttaataatttaaggagtactttgaatatactgaactttccctggatattaatgctttttctgtgttagtgcagaaaaactggagaacgccaggaaaggattttttcagcataattaaggaagaaaaacatgccctctgcagaatggcaaagcagtttggttatttaaactggagaagagcaaaggctggcatactcactgctttcagcgtctgcagggttgttttgtagtccctcagtgctccgtcacactgtgaatggagacatagcagaaaga

SEQ ID NO: 31108 - DNA, 273 bp, Homo sapiens
gacgctgccatcaaagggtgaaagtgaatgtaggtgatatgtaaatgaatgaacagggctatgacccactatagcattatttataagcaacttggtggcactgatttgtaattttccaacctctgccctagattaaacatctcccaatttttcacacatttttcctcatctggtgactatacaaagagccagtctccaaacctaattacaatggtttaagaccacctaggattttttttatcttaatgtagaccatagataatgaaataaaag

SEQ ID NO: 31109 - DNA, 462 bp, Homo sapiens
tgtgccattgggcaagttgtttctatttctggggtattgatttccccgtctcaaaataaatatcttttcctgctccgatcattctttccttttaagtattacctggctggtgaatgtttatattgaattctctttgtacaattcctttcaacaatattgcttggaattataaaaacttaataattgttttaaattgaaatgacaattgcaggttatccttgctttcaaaaagattttgtttctgaaatgtagcttgttaaaagtttggaaataaagcatcacatgaagaaataaagttatatcaagaaagatgcctaacacacacacacacacacacagtctcccccaccccatatatatatatatatattttttttttccagaggtatttcagagtaggtcacttatatcattgcctctacccctaagtacagtgtgtatttcttaataataaaaaaaata

SEQ ID NO: 31110 - DNA, 360 bp, Homo sapiens
ggaccaactagtagtttaatgcagagcggggaagcaactaagattttgaaagggaatgtcttgaatctgtggatcacttgggggagtattgccatctgaacaatatcaagtcttccaaatcattaacatgggatgttttgccaattatttaggtcttttaaaatttctttcaataatattgggcagttgttagtgtaaacattttgcacttctttgttaaatttattcataaatattttattctttttgatactgttaaaatagaattgttgtcttaattccattttcaacttgttcattgctagtgtatagaaatagaatttattgattttatcacatattgatatatcgatcttgtat

SEQ ID NO: 31111 - DNA, 490 bp, Homo sapiens
acaagggtggggtcagaggagccccgtggcgctgtggagggtgaccgggtgccagggtcccgggagctgcagggtttggggctgaggcgcaggatgaggccgacacaggggtcctggggcgcgggcggtccgagccgtcccctcaccgcccagcctcgtaggggcccgctgtgggccaactgcagcaggagctggggacacagccgtctcacacctgcctcctggtgcgtttctggggctcagggataggcgtcctcactcaggacacacaggactggtctggccgtggggtcaggccaggaggcatcccctttgcacctcctcacaccctgtggggaggggagggccctgggaacccatagacgcctgccccacagcagctgaggtcccgcagcagccagcagggctgggccacttgaggcctccggctctgatcgcccagagggcgcacggggtttggtgcagcctctgatgggcacgaggcggccgc

SEQ ID NO: 31112 - DNA, 328 bp, Homo sapiens
tgaaggaaagagttgatcttctcctagagttcaaattgctttcattgactccgaatgttccaccaaaaaatgaatgcaaaggaacctaagggcagatgagtattagaataagtccaccaaaagcaatgttctcaaagcaccagtgcttcaagctggcaacgcagcaaggtggctaagaaatgggttttgaactacacagacctggatgcaaatattgcctcttcaatcaacgagcaaaaaaaaagaaaaccttcagcaagtctctaatttcactaagctttagtttcttcattcattaaataaaaatcctagtcacacctatgactag

SEQ ID NO: 31113 - DNA, 351 bp, Homo sapiens
aagcattgactacgaaagaaaataatcttctatttgtaggattattggaagaaagaaatgtccttgctgaaagtattactgtagtgaaatatgctcacacttgattggccagagggggttacttgtgatacatgaatagatttagtgttttcttaacttctagaatgctattttccctaattttcgaatatcagtccacattttctgggtaaagggaggtgaggaagttgtttttgaatcaaattagattgaacaaacctaccatgggttattttctttaaaaatttattactttaaaataaaaactgaacgagagacataaataaaagtgatcatgtaaacaagtcgaat

SEQ ID NO: 31114 - DNA, 272 bp, Homo sapiens
aataaaaagattagcttaaaataattgaaatctgagaagttaattttgttgaccaacgaataggtttatgaagcatcccattttgaaatcagaaaatttatatttccaaactcgaatctgcctaaaaatgctacttttccaggcatggcagttgttctgattagattttgtataatgtacatgattagactatcagtttcatgtaggattctatataggtttataaattgtaaactctcagtatataataaattaaaaataagaaggctagt

SEQ ID NO: 31115 - DNA, 309 bp, Homo sapiens
ttttttttcttactctttcttcttcttcttttttttaagaaacgatcttgctcaggtgtgcaccatcacaaccagctaatttttaaattttttgtagagataggggtcttgctatcttgcccaggctggtcttgaactcctggtctcaagtaatcatcctgccatggcctgccaaagtgctgggatcataagtgtgagccaccacacgtaagcacattgcttttcttttgagtgaagccttttcattctgagttagtcgtctgttcacaaattttattcatttattaagtcattgatcaaatggtcgat

SEQ ID NO: 31116 - DNA, 655 bp, Homo sapiens
caaagagggtagccattgccggctcgaatacttgggtttagatcccgatcattgtccctcccactgtgctctcaggcagtagatgattgcctatttctttacctcttgtttttgcctaattagcattttagtgagctctctctactacctgattggtcgggtgtgagctaagttgcaagtcccatgtttaaaggtggaagcggtcaccttcccatctaggcttagggattcttagttggcctaggaaatccagctagtcctatctctcaaaacgagcctcaataaatttaagaaaattgaaattatatcaagcattctctcagaccacagtggaataaaactggaaatcaactccaaagggaaacttcaaaaccatgcaaatacatggaaattaaataacctgctcctgaatgagcactgggtcaaaaacaaaatcaagatggaaattaaaacattcttgaactgaatgacaataatggcacagcctatcaaaacctctgggatacagcaaaggcggtgctaagaggaaagttcacagccctaaacgcctacatcaaaaagtatgaaagagcacagacagacaatctaaggtcacacctcaaggaactagagaaacaacaaaccaaacccaaatccagcagaagaaaagaaataa

SEQ ID NO: 31117 - DNA, 742 bp, Homo sapiens
tctcctatctcagcctcctgaataactggggttacaggcacatgccaccatgcctggctaatttttgtattttcagtagagatgggatttcattatattggtcaggctggtcttaaactcctgacctcgggtgatcagcccgcctcggccttccaaagtgctgggattacaggcatgagccactgcacccagccgaatttatgtttcttatggtctagtctcagctaaattagactgagttggtaggagacaaccaacttcttaatgttggcatgaaattgtcattagcctctggatgctcatggtccagaagagatagaataggctgcttaaactagaggtaacataggagtgtggttgatactacatgacatactgcctgaaatactattcttcttctaacttgattaacatacataataatgtgttagtttttcattgttttggttttgttttgttttgagacggagttttgctcttgttgcccaggctggagtgcaatggcatgatcttggctcactgcaacctccgcctcctgggttcaagtgattccactgcctcagcctccctagtagctgggattacaggcatgagccaccgtgctcagcccagtttttcatattttttagataagtttaatataaaagcgatggctccagctactcgggaggctgaggtaggaggattgcttgtggctgggaattcaagacctctctaggcaacatagtgagacccacctcta

SEQ ID NO: 31118 - DNA, 562 bp, Homo sapiens
aacgagatgtggcacatcactgcatgtacctagcaagtacctagtaaaatgacataaactgatccctcaggtttttaagttgaaatagaaaggtttttattgtagcttttaaattctgtagttataaaggatgatattttcatatattgtattgaccatttaaaaataacattcctcaaatcactgttcctaaatcaggaatggaaggggatttcccctaacctgatgaagggtgtcctatatctgaattctttaaaaattttaaaaaataattttgatttattttttttagagatagagtctcgctctgttgcccaggctagaggtggagtgcagtggtgcaatcatagctcattgcagcctcaaactcctgggctcaagggatccttccgcctttgcctcttgagtagcctgatagagtatctataaaaggcttaaagcaagcatcatcttaaattggaaaatgttgaaagcatccctttaaaattaaaaaagtagaaaagtatgccaggttagaaccacttctattaaagattgtattgatggtcttagccagtgcagt

SEQ ID NO: 31119 - DNA, 504 bp, Homo sapiens
atggctggaagacacccgcagaaaccgcgggcactggagagcaagtgcagctttaatctccaggcgtgatttagatggaaagcagcctgaagaccagttaagagaaccgcgagcagagcgcgctggactagcaccaacagacgtgagttcgagaccgtcctgccccttaatcctgtgtgaccttggtccattttttaagtctgtgagcctcgcagtgttctcattcctgaaaagagcctgccccatctccggactgcagtgagaacaaaaggagactatgaacatgactttttgccacttttgaagccccacactgaggaaagattttcctagcacttgggagattttctttagcaccagctgccaagaatgctgggaaggagacagccccatcccagaaggaagacaccttaaatcagaactttatttttcctcctatgaaaatacaatctaatactggagaagtgtaaaaattaaggagtcattagaagccaaatgttgttg

SEQ ID NO: 31120 - DNA, 243 bp, Homo sapiens
cttcctagggctagcaggggtggctttctgttcagtccagtgaagaagctggtcctcagtgaggtcagcagcacgtggggtcctgagtctgcctagtgttgggtcgcgggtggtggaggggaggcagctgctttgggaggccagccacgggctgcagacaggcggctcacagaccagcggacagactgaggacagacaggaggcatcccttgggagcagccgggcccaccttgctggttgagt

SEQ ID NO: 31121 - DNA, 437 bp, Homo sapiens
  misc_feature (332)..(332): n is a, c, g, or t
  misc_feature (336)..(336): n is a, c, g, or t
  misc_feature (339)..(340): n is a, c, g, or t
cactgcattccagcctgggcaacagaacaagacttcgtctccataaaaaaagaatctgggatgactgcaggttctttcaggcaaagttcttttgcttgccatggtagaaatccacgtcaagtggaattagtgaaggagggacctcgttggaagtatatcaggtacgttgcagggcaggggcagttggctcagaaggaccgggtaccaaaccctggaagatggactccccaggaatcctcagaagcagcaacaccccacgtttggctgctgtcagctgcacttaagtttcctcagcctgctcgccccagcctcgggggcctgtggtgggaggngganggnnaggttggcacagccccttggctctgcagcacactgcctgtagtgcaccatgaattaatatttttaataaatcctgtaattatcttgtgaacagaaca

SEQ ID NO: 31122 - DNA, 302 bp, Homo sapiens
ctgattcaaggtttaccagaaatagcaaaacgctgccaaggggtgttccctcagagaggtcaagacgatcaacactgcctccaaatgttggttttctcctgcaccaggattgttctggttcagatttcccatgtgagctttaagaactgcatgttgtacatgacttgaacagaggagccaactcagctatggagcatctcctttttctacctatgcctttttctaccttacctaggatggcacccgatataacacaaagacaatgcaaatgagattcaacatgaatcactggtcatacctag

SEQ ID NO: 31123 - DNA, 333 bp, Homo sapiens
tttcttccagaagttttacattttctactcctaaatttaggtttatgatccatttgagttaatatttatgtatggtatgaggtcaaatgtgtgtgtgtgactgtccaatttttctagcagaattcgctggaaagggtatccttctactattgaatcctcttgacacctttgttgaagtcaattgaccacaagtgttaacagtttatttctggactctctcttgccttccattaatctatatgcctatccttgtgctaattccacactatctttgtttaatgtggctttatactaagttttgaaatcaggtggtataattcctccaactttgtt

SEQ ID NO: 31124 - DNA, 207 bp, Homo sapiens
ctactactactaaattcgcggcccgtcgacgaagttgctgctgacacactgggtgaagaatggaagggttatgtggtccgaatcagtggtgggaacgacaaataaggtttccccatgaagcagggtgtcttgacccatggccatgtccacctgctactgagtaaggggcattcctgttacagaccaaggagaactggagaaaggaag

SEQ ID NO: 31125 - DNA, 1083 bp, Homo sapiens
  misc_feature (344)..(345): n is a, c, g, or t
  misc_feature (368)..(369): n is a, c, g, or t
  misc_feature (465)..(466): n is a, c, g, or t
atggcccccacagagccctggagccccagcccggggtcagcgccctgggactactcggggttggacggcctggaggagctggagctgtgtccggccggggacctgccctacggctacgtctacatccccgcgctctacctggcggccttcgccgtgggcctgctgggcaacgcctttgtggtgtggctgctggccgggcggcggggcccgcggcggctggtggataccttcgtgctgcacctggcggcagctgacctgggcttcgtgctcacgctgccgctgtgggccgcggcggcggctaggcggccgtggccgttcggcgatggcctctgcaagctcagcannttcgcgctggcgggcacgcgctnngcgggcgcgctgctgctggcgggcatgagcgtggaccgctacctggccgtggtgaagctgctcgaggcgaggccactgcgcaccccgcgctgcgcnntggcctcgtgctgcggcgtctgggccgtggcgctgctggccggcctgccctccctggtctaccgggggttgcagcccctgcctgggggccaggacagccagtgcggcgaggagccctcccacgccttccagggcctcagcttgctgctgctgctgctgaccttcgtgctgcccctggtcgtcaccctcttctgctactgccgcatctcgcgccgcctgcgacggccgccgcacgtgggtcgggcccggaggaactcgctgcgcatcatcttcgccatcgagagcacgtttgtgggctcctggctgcccttcagcgccctgcgggccgtcttccacctggcgcgtctgggggcgctgccgctgccgtgccccctgctgctggcgctgcgctggggcctcaccattgccacctgcctggccttcgtcaacagctgcgccaacccgctcatctacctcctgctggaccgctcattccgagcccgggcgctggacggggcctgcgggcgcaccggccgcctggcgcgaaggatcagctcagcctcctcgctctccagggacgacagttccgtgttccgttgccgggcccaggccgcgaacactgcctcggcctcctggtag

SEQ ID NO: 31126 - DNA, 748 bp, Homo sapiens
caacctgtggatcaagagatcccctcgtgagcccacgccaccaggaccttgggtcccaagtacatagctatgcagactctaggcagcaggctggagactgcttaagatgactgagttcccggagcagaagggctgccgccatcactgcagctccagtcagcaatttcccctgcaggtaccagggagactgggcggtttggaccaggaggaattccccacagcacagcggcttatggcagatcttggccagattgcttctttaaggtgggaaccagatccaaccctccttcaccagactgggcctccctgtgggaatttcagcaactccagccaggggtttacggacagaactctgatctccctgggatggagccctttgaggggaggggtggccacgttctccatggttcagtggacttagtctttcctgcctggtggctctgaagagtccaggcagtctggatgaagggaatgtgcccctaacgcagtgcacccactctgccaagggacagccagagtgcttcattaagcgggtccctgatactgtgcctcctgactgggtgagaccccacaacagaggttattagaaaccttgtaaaagagcattcccgccggcatcaggtcagtgtccctctgggatggagatcccagaaaaagtagcaggcagccatctttgctgttctgtagcctccactggggacacctccaggtgtgggagggacccaggcaaatagggtctggaatgaac

SEQ ID NO: 31127 - DNA, 447 bp, Homo sapiens
aaaagcccccaagtagtcctggcattcaagctcttggtagatcagagtcccttcagctcttctgtctccatgctcttgttctaacaagttcaaaagacattgttaccgtggatataaatttagttagcatattgaaaaataaaaaattattttcttgtatcctccttacattcctgaatgtttccttatcctattctatgtgcttgttcaatcacctaccactcattaatttaatccaatctttttttttctagattagaaattcttaaaagttaagtgtaccttagaattatctggaggttgtgttaaaacacacatttctggctcttcaaccagggtttctgatttgcagctctggagtgaggcctgaagatgtacatttctagtaagctgctagacgatgctggttcagggactatactttgaaaactactattttaggatatt

SEQ ID NO: 31128 - DNA, 456 bp, Homo sapiens
aattgcaattatggcctgcgctttaaagtactgcggcaatgttatatttattgaatttgataactgtgcagtggttatctttatattagagaatattcttcttaggaaatttcgactttaaatattgaggtgtaaagggcgtgatatatgcaacttacccacaagcggttcagaataatacatttatttatctatgtttatatagatgtgtagtacatatacacataaacatatccatgagagtgagaagagagagaatgaaagttaatgaaaaatgttaaaaattgatgaatctaggtaataggcaggcattctctatactgttcttgtaacttttcactaagtttgaaattatttttaaaatgcaaagttaaagttgtaagttaaaaagtaaaataaaaacagtttttctaaatggttgcaaatatgagtatacttgctaaagacaagctttat

SEQ ID NO: 31129 - DNA, 484 bp, Homo sapiens
tgccatgggtggggcagagcgtctgggatgcgctgggagcctaggatccccgacagttttgcagaacactgaaatctatggactctaaaatggacttcatttaaagaaacccacggaccattaatggacaaaaacatgagtcaatatgtattgtggcattcaaatcctagcactctgggagagcatcaagtaccacgtttttgaagaccatggcctatcatcattatgcattcaagatttgagtttgaataacctcatcaagacttagatcttcttcagaagcttcaagtctcatctgcattaaagctctccattgaaccctctcacaaaagtacaagcttaaaggggctaaaatccattaatacattccattttatatcccttcctctgacttctcttcaatttccttggcctctagggtccttcatattgcttacgttcctttagactagagccaaggagacagtgctttccaaaaaaaaaa

SEQ ID NO: 31130 - DNA, 553 bp, Homo sapiens
attctgttgcaattttcagtgaagggtattaatcaaagagataagccaatgaacatattcagccattttgtctactgtaccttttcaaaaaaatttttttccttttctttgtttttgattttctccttttgttctttcagcatggtatctagtaatctgattaattactgacccaaaagtagtttttaatttcccttaaaaaaattattagacttgtagtagaatttttttgtgttttgttttgttttcaagcatcaagtaccacgtttttgaagaccatggcctatcatcattatgcattcaagatttgagtttgaataacctcatcaagacttagatcttcttcagaagcttcaagtctcatctgcattaaagctctccattgaaccctctcacaaaagtacaagcttaaaggggctaaaatccattaatacattccattttatatcccttcctctgacttctcttcaatttccttggcctctagggtccttcatattgcttacgttcctttagactagagccaaggagacagtgctttccaaaaaaaaaa

SEQ ID NO: 31131 - DNA, 343 bp, Homo sapiens
caaaagatttaagtcttccttcctcgtgattgtactgctttattgcactgcttgcagactgcagtagaaaataagcttttaagactttctagattttcaggctttctactaagctgttgtagcttctccatcccacatctgggtttgctcactttatttctatgtgccaaatcatgattgagactcgttgagacacacagtagaccacaggttgccatatttagcagagcagggaaagaactctggagagtttgcctttttgattagggagaaacgctgtgggaggtatttgttgagcagctactctgggcaggaccctgagaactatcaatttttggatgcg

SEQ ID NO: 31132 - DNA, 316 bp, Homo sapiens
tgattgacattccttctatatgacatagctataaatgtgcatctctaaattttgcatcttagttgaagggaaatctggagatcattcagtgattgttcgagaataaattgacctttacaatcttacttgttaggtatctaagccaaatgttacaaccattatcccttccactaaacttttgtggaccaggagttccaatgacgtacacattcacagttatctctccaccccaactgaagcttgataactcttggagctgccatcattctaagtagataataaaactttggggatataaatagcccttaatcgattt

SEQ ID NO: 31133 - DNA, 901 bp, Homo sapiens
cctgcagacttgctgatgtgttgatcctgcagccagaagcctattaaggctagaaatgagtgtgacggatgcaaatgctgtggtggccatacttagtgccccctttcccagagccgcttgtgctgagtctagctcattaacttgctgcaaacccctaaggggcaaagaagggccgggtaaggcagtggtgggctgccaggtgggtggccaggcaggatgagggtggcaggagcctgccacttcctcggtttggtgcgatccgccaggacggagaaaggagagggaaggtatggacccccacagtgccctatcaccccaataattgaggaaatggcacttcctagtatcggcagcatgccaggcactgcgtggatgtgtaagaccctatagttaacataacactgattatttccatcccaggctcagaaagatggatttggtccaggttgcagagccaggcttctgaactctctcctgtgccctgagcctcttgtcaggaggagctggagcctggggttgggccttgggctcgcattccggctccgcttgccatgtgacctcctgcctttagtttctactcatacatcgttaggcttcatagtggaggacactgaaaacccttagcaaactgtaaagttccagagaattaaccttccctgacccagtgagctgggtttgaagcaggaatgtcagagcatggcaggtgtggagaaacctcgaattcagccctgccctgcccgggcctcgccagagctccctctccagctcctcttgcctccctgccccaggatccccttcccggccttgggggtccaaggcggccttaaaagaaggactactttctccgaaggggacttgaagttgaggccgctcagcaactgcagaggtcgggcctccggga

SEQ ID NO: 31134 - DNA, 541 bp, Homo sapiens
cctgcagacttgctgatgtgttgatcctgcagccagaagcctattaaggctagaaatgagtgtgacggatgcaaatgctgtggtggccatacttagtgccccctttcccagagccgcttgtgctgagtctagctcattaacttgctgcaaacccctaaggggcaaagaagggccgggtaaggcagtggtgggctgccaggtgggtggccaggcaggatgagggtggcaggagcctgccacttcctcggtttggtgcgatccgccaggacggagaaaggagagggaaggtatggacccccacagtgccctatcaccccaataattgaggaaatggcacttcctagtatcggcagcatgccaggcactgcgtggatgtgtaagaccctatagttaacataacactgattatttccatcccaggctcagaaagatggatttggtccaggttgcagagccaggcttctgaactctctccctgtcgggcttttcgggggttgcagagccaggcttctgaactctctccctgtcgggctagtcgggg

SEQ ID NO: 31135 - DNA, 358 bp, Homo sapiens
aacatcatttcaaaggatacggggaaaagagatgtcacatgaacacgtcttagaatttacactgtaaatcaaacaatgttgctgcaaaggcatgtaagttaatatagaaacaatggaagaatgtaaagaaaactcagagacagggaagaaagccaggataggctccaagatcagctggatgagatcacaacatgtgaccctcacagatgatagatcaagaaaatgggaagagcttcaaagccctgaaaccatataaaggagagtcacccaacaactaaaagcacccatcctaaactattatgtgaacaagaaacaaacctctattaatatatttgaattattaaatattttgagtcta

SEQ ID NO: 31136 - DNA, 574 bp, Homo sapiens
aattaactgcatcagttatattaataccaaggataggaagcctacatacaccggtttagaggggctattacttaagcgactaaaggctattgcctaagaaatctggttaggaggaacagctgaaaactaggaatctttctaaagccgaggttgcacatgggagtcacctggggagcttgtacaattccctccacctaagctgcaccctgggctagcgaaatcccagtctctggggccggggtccgttttccttgaagttctgcagattccagtagacgatcagtgttgagatttagtaccctaacaggaatgtttttttaataaagcaaacaaacttttaaaggcggcacactcacgcctgtaatcccagcactttgggaggccgaggcgggcggatcacgaggtcaggagatcgagaccatcccggctaaaacggtgaaaccccgtctctactaaaaatacaaaaaaattagccgggcgtagtggcgggcgcctgtagtcccagctactcgggaggctgaggcaggagaatggcgtgaacccgggaggcggagcttgcagtgagccgagatcc

SEQ ID NO: 31137 - DNA, 3132 bp, Homo sapiens
agcggagtcggagccgggcttgcccgggcatgtgggagctgccggctttccggacgccacgtgcagaccggaagagacacgcggggcttcaggctgctgccccattggaagattactccccaggcttcccttgccccaagcagtgagctgactggaatggtaccccgggaggcccctgagtctgctcagtgcctgtgcccttccctcaccatcccaaatgccaaggatgtgcttcggaagaggcacaagagaaggagccgacagcaccagcggttcatggcccggaaggccttgctgcaggagcaggggctgctgagcatgcctccagaaccagggtcctccccactgcccacccctttcggggcagcgacagcaactgaagctgccagcagtgggaagcagtgtctgagggctggatctggcagtgccccatgcagcagaaggcctgctcccgggaaagcctcagggcccttgcccagcaagtgtgtggctatcgactgtgagatggtgggcacgggaccccgagggcgggtaagcgagctggcccgctgttccattgtgagctaccatggcgatgtcctctatgacaagtacatcaggcctgagatgcccatcgctgactaccgtacccgctggagtggcatcactcggcagcacatgcgcaaggctgtccccttccaggtggcccagaaagagatccttaagctcctgaagggcaaggtggtggtggggcacgcgctgcacaacgacttccaggcgctcaagtatgtccaccctcggagccagacccgggataccacctatgtcccaaacttcctcagcgagcccggcctccacacccgggcccgggtctctctaaaggacctggccctgcagctgctgcacaagaagatccaggtgggccagcacgggcactcatcagtagaagatgccacgacagccatggagctctaccggctggtggaggtgcagtgggaacagcaggaggcccgcagcctctggacctgccccgaggacagagaacctgacagcagcacagacatggaacagtacatggaggaccagtactggcccgatgacctggcccacggcagcagaggaggagccagggaggcacaggacagaaggaattgagaagggggcggggctccctggctgggcttccggtgtggccggtaggaagtgggggccaggagagcagcgggcactccttcctgggcagggtggggcaggatgcagtgagccagccccagggccagaggagttggggtcatctgttaccttgacaccctctgcacacagcatagccctctctctctccagggctgttggttctttctcctgactcctgtggttttgctaatggcactttacagactccatggagatgtcaggtggaccatcttctagggcccagcaggagtagggaatgtgccaacagactgcccaggttgccgtggccttccccaccccccagatctcctgagtcatcatgctgtgctaatgaaagggatcatatcatcctctctggggatggtgggtgggggtgtcaatatcctggagctcccttaccccaactcaatgacttgggggtaaagttctcttccttttgttgcctacctcttcctccactcatttgggttcagaataaacatgccctgaagttaaagaggagttaagtcctaaaggaggcatttcttccccacctccctgacctggaactctggctacagccattgtaggaactccgtgcctggcctgtcagctccctgctaggctacagtggaatagcagagcccacaggcttctcgtggggagttggctccttaacatttcttggcaacagaaagccccaggcacagctcagggaggagggaaggcaggtaagctttggacgagaactggcatatttattttgacccaaatcagggatttccccagtccacccagtactgggctcttaagcaaaagtctgagaaacaagacagtggtttgaattctggggcctttgtgtaggattgtgcctgacctttatttatttattaacagcagggccactcgtctagggcagtggagtctgcgtgtctcctggggctggggcagggcattggcagttacgcagtggccctgaacctggtctggtgcccccgaacctggtctgatgccccctcagctctttgacaatcactgtggctgttgggttttctcctatttctaaaaatgttctcttctttcctaagtgacagttttgaagtattggataaccaagagctcaggtcacacagaccttggagccccatctttgcttgcagcttagctttgagatactaagcaagcgagggacttcactcttgagcctgttttttcctcatctgtaaagtggggatagtggtacggcctacctcatagggttgtaatgagcactaaatgtgaagtgcttggcacagtgcctggcacatggtgagccacagctactgtgagtttctgtttatcccccttttttttttttaagcccattgtttattctttgagaatttgttgtaacttcttcaggataacacctgagtccacaggctgagcagctgtggcccagacagaactgctccggcttggctgttccagcaggtggggcgctggcctcggtgagggcacagcagcaaggttcacggatatccgtgtgtcttgtctgtggccaccaggcacaggtttggcttccggtcagtgtcccgacactgtgcgggaggtgacaacagagcaaagcagcgcaggggtcagggaggtggagacactgctgaaatcacactaccccaccctcagctgaagccccacgttccacaaacttggggtcatagattgtccagtcactggctccctccctgtcagcacagcacagaggaaggggctaactgaatcttttaccacttctggcctggctccagaactttgttctagattccttaaaagtcggtagctgatgtcaaactcaattgagcagtagctttgatcccttggtctgggggtcgaaggaagatggcgctgttatcagcggggaaatgtactatttaagatcagctttgttgtaaaaccatttgttctagaataaaactcaattggaaacgtgaaaaaaaaaac

SEQ ID NO: 31138 - DNA, 3391 bp, Homo sapiens
cgcaggtccccgcgcgttgtttccgccccggcctgcggcggggacgcctgaactgggctgaccctgccctaccggcccgcagaaaagcaggccgggcgccgcctgtctccagccctcgctctgctcgggggtccagggccagagggggcggcgctggtcgttgggactcggcccagctgccgcggccagcaagtgaccaacgcccgagtccttcccggtgagatcaggcctcccacgcgtcacgcctgggagaacgccagccggcggggaggtcgtgccaggatagcagactttagttgttgtcgttgttccgtggactttttagcagcacaggggaccttatcgagccaggctgctgccccattggaagattactccccaggcttcccttgccccaagcagtgagctgactggaatggtaccccgggaggcccctgagtctgctcagtgcctgtgcccttccctcaccatcccaaatgccaaggatgtgcttcggaagaggcacaagagaaggagccgacagcaccagcggttcatggcccggaaggccttgctgcaggagcaggggctgctgagcatgcctccagaaccagggtcctccccactgcccacccctttcggggcagcgacagcaactgaagctgccagcagtgggaagcagtgtctgagggctggatctggcagtgccccatgcagcagaaggcctgctcccgggaaagcctcagggcccttgcccagcaagtgtgtggctatcgactgtgagatggtgggcacgggaccccgagggcgggtaagcgagctggcccgctgttccattgtgagctaccatggcgatgtcctctatgacaagtacatcaggcctgagatgcccatcgctgactaccgtacccgctggagtggcatcactcggcagcacatgcgcaaggctgtccccttccaggtggcccagaaagagatccttaagctcctgaagggcaaggtggtggtggggcacgcgctgcacaacgacttccaggcgctcaagtatgtccaccctcggagccagacccgggataccacctatgtcccaaacttcctcagcgagcccggcctccacacccgggcccgggtctctctaaaggacctggccctgcagctgctgcacaagaagatccaggtgggccagcacgggcactcatcagtagaagatgccacgacagccatggagctctaccggctggtggaggtgcagtgggaacagcaggaggcccgcagcctctggacctgccccgaggacagagaacctgacagcagcacagacatggaacagtacatggaggaccagtactggcccgatgacctggcccacggcagcagaggaggagccagggaggcacaggacagaaggaattgagaagggggcggggctccctggctgggcttccggtgtggccggtaggaagtgggggccaggagagcagcgggcactccttcctgggcagggtggggcaggatgcagtgagccagccccagggccagaggagttggggtcatctgttaccttgacaccctctgcacacagcatagccctctctctctccagggctgttggttctttctcctgactcctgtggttttgctaatggcactttacagactccatggagatgtcaggtggaccatcttctagggcccagcaggagtagggaatgtgccaacagactgcccaggttgccgtggccttccccaccccccagatctcctgagtcatcatgctgtgctaatgaaagggatcatatcatcctctctggggatggtgggtgggggtgtcaatatcctggagctcccttaccccaactcaatgacttgggggtaaagttctcttccttttgttgcctacctcttcctccactcatttgggttcagaataaacatgccctgaagttaaagaggagttaagtcctaaaggaggcatttcttccccacctccctgacctggaactctggctacagccattgtaggaactccgtgcctggcctgtcagctccctgctaggctacagtggaatagcagagcccacaggcttctcgtggggagttggctccttaacatttcttggcaacagaaagccccaggcacagctcagggaggagggaaggcaggtaagctttggacgagaactggcatatttattttgacccaaatcagggatttccccagtccacccagtactgggctcttaagcaaaagtctgagaaacaagacagtggtttgaattctggggcctttgtgtaggattgtgcctgacctttatttatttattaacagcagggccactcgtctagggcagtggagtctgcgtgtctcctggggctggggcagggcattggcagttacgcagtggccctgaacctggtctggtgcccccgaacctggtctgatgccccctcagctctttgacaatcactgtggctgttgggttttctcctatttctaaaaatgttctcttctttcctaagtgacagttttgaagtattggataaccaagagctcaggtcacacagaccttggagccccatctttgcttgcagcttagctttgagatactaagcaagcgagggacttcactcttgagcctgttttttcctcatctgtaaagtggggatagtggtacggcctacctcatagggttgtaatgagcactaaatgtgaagtgcttggcacagtgcctggcacatggtgagccacagctactgtgagtttctgtttatcccccttttttttttttaagcccattgtttattctttgagaatttgttgtaacttcttcaggataacacctgagtccacaggctgagcagctgtggcccagacagaactgctccggcttggctgttccagcaggtggggcgctggcctcggtgagggcacagcagcaaggttcacggatatccgtgtgtcttgtctgtggccaccaggcacaggtttggcttccggtcagtgtcccgacactgtgcgggaggtgacaacagagcaaagcagcgcaggggtcagggaggtggagacactgctgaaatcacactaccccaccctcagctgaagccccacgttccacaaacttggggtcatagattgtccagtcactggctccctccctgtcagcacagcacagaggaaggggctaactgaatcttttaccacttctggcctggctccagaactttgttctagattccttaaaagtcggtagctgatgtcaaactcaattgagcagtagctttgatcccttggtctgggggtcgaaggaagatggcgctgttatcagcggggaaatgtactatttaagatcagctttgttgtaaaaccatttgttctagaataaaactcaattggaaacgtgaaaaaaaaaac

SEQ ID NO: 31139 - DNA, 3061 bp, Homo sapiens
aggccgggtggtgcgatgaccgctgctgccccattggaagattactccccaggcttcccttgccccaagcagtgagctgactggaatggtaccccgggaggcccctgagtctgctcagtgcctgtgcccttccctcaccatcccaaatgccaaggatgtgcttcggaagaggcacaagagaaggagccgacagcaccagcggttcatggcccggaaggccttgctgcaggagcaggggctgctgagcatgcctccagaaccagggtcctccccactgcccacccctttcggggcagcgacagcaactgaagctgccagcagtgggaagcagtgtctgagggctggatctggcagtgccccatgcagcagaaggcctgctcccgggaaagcctcagggcccttgcccagcaagtgtgtggctatcgactgtgagatggtgggcacgggaccccgagggcgggtaagcgagctggcccgctgttccattgtgagctaccatggcgatgtcctctatgacaagtacatcaggcctgagatgcccatcgctgactaccgtacccgctggagtggcatcactcggcagcacatgcgcaaggctgtccccttccaggtggcccagaaagagatccttaagctcctgaagggcaaggtggtggtggggcacgcgctgcacaacgacttccaggcgctcaagtatgtccaccctcggagccagacccgggataccacctatgtcccaaacttcctcagcgagcccggcctccacacccgggcccgggtctctctaaaggacctggccctgcagctgctgcacaagaagatccaggtgggccagcacgggcactcatcagtagaagatgccacgacagccatggagctctaccggctggtggaggtgcagtgggaacagcaggaggcccgcagcctctggacctgccccgaggacagagaacctgacagcagcacagacatggaacagtacatggaggaccagtactggcccgatgacctggcccacggcagcagaggaggagccagggaggcacaggacagaaggaattgagaagggggcggggctccctggctgggcttccggtgtggccggtaggaagtgggggccaggagagcagcgggcactccttcctgggcagggtggggcaggatgcagtgagccagccccagggccagaggagttggggtcatctgttaccttgacaccctctgcacacagcatagccctctctctctccagggctgttggttctttctcctgactcctgtggttttgctaatggcactttacagactccatggagatgtcaggtggaccatcttctagggcccagcaggagtagggaatgtgccaacagactgcccaggttgccgtggccttccccaccccccagatctcctgagtcatcatgctgtgctaatgaaagggatcatatcatcctctctggggatggtgggtgggggtgtcaatatcctggagctcccttaccccaactcaatgacttgggggtaaagttctcttccttttgttgcctacctcttcctccactcatttgggttcagaataaacatgccctgaagttaaagaggagttaagtcctaaaggaggcatttcttccccacctccctgacctggaactctggctacagccattgtaggaactccgtgcctggcctgtcagctccctgctaggctacagtggaatagcagagcccacaggcttctcgtggggagttggctccttaacatttcttggcaacagaaagccccaggcacagctcagggaggagggaaggcaggtaagctttggacgagaactggcatatttattttgacccaaatcagggatttccccagtccacccagtactgggctcttaagcaaaagtctgagaaacaagacagtggtttgaattctggggcctttgtgtaggattgtgcctgacctttatttatttattaacagcagggccactcgtctagggcagtggagtctgcgtgtctcctggggctggggcagggcattggcagttacgcagtggccctgaacctggtctggtgcccccgaacctggtctgatgccccctcagctctttgacaatcactgtggctgttgggttttctcctatttctaaaaatgttctcttctttcctaagtgacagttttgaagtattggataaccaagagctcaggtcacacagaccttggagccccatctttgcttgcagcttagctttgagatactaagcaagcgagggacttcactcttgagcctgttttttcctcatctgtaaagtggggatagtggtacggcctacctcatagggttgtaatgagcactaaatgtgaagtgcttggcacagtgcctggcacatggtgagccacagctactgtgagtttctgtttatcccccttttttttttttaagcccattgtttattctttgagaatttgttgtaacttcttcaggataacacctgagtccacaggctgagcagctgtggcccagacagaactgctccggcttggctgttccagcaggtggggcgctggcctcggtgagggcacagcagcaaggttcacggatatccgtgtgtcttgtctgtggccaccaggcacaggtttggcttccggtcagtgtcccgacactgtgcgggaggtgacaacagagcaaagcagcgcaggggtcagggaggtggagacactgctgaaatcacactaccccaccctcagctgaagccccacgttccacaaacttggggtcatagattgtccagtcactggctccctccctgtcagcacagcacagaggaaggggctaactgaatcttttaccacttctggcctggctccagaactttgttctagattccttaaaagtcggtagctgatgtcaaactcaattgagcagtagctttgatcccttggtctgggggtcgaaggaagatggcgctgttatcagcggggaaatgtactatttaagatcagctttgttgtaaaaccatttgttctagaataaaactcaattggaaacgtgaaaaaaaaaac

SEQ ID NO: 31140 - DNA, 2620 bp, Homo sapiens
cgcaggtccccgcgcgttgtttccgccccggcctgcggcggggacgcctgaactgggctgaccctgccctaccggcccgcagaaaagcaggccgggcgccgcctgtctccagccctcgctctgctcgggggtccagggccagagggggcggcgctggtcgttgggactcggcccagctgccgcggccagcaagtgaccaacgcccgagtccttcccggctgctgccccattggaagattactccccaggcttcccttgccccaagcagtgagctgactggaatggtacctatgtcccaaacttcctcagcgagcccggcctccacacccgggcccgggtctctctaaaggacctggccctgcagctgctgcacaagaagatccaggtgggccagcacgggcactcatcagtagaagatgccacgacagccatggagctctaccggctggtggaggtgcagtgggaacagcaggaggcccgcagcctctggacctgccccgaggacagagaacctgacagcagcacagacatggaacagtacatggaggaccagtactggcccgatgacctggcccacggcagcagaggaggagccagggaggcacaggacagaaggaattgagaagggggcggggctccctggctgggcttccggtgtggccggtaggaagtgggggccaggagagcagcgggcactccttcctgggcagggtggggcaggatgcagtgagccagccccagggccagaggagttggggtcatctgttaccttgacaccctctgcacacagcatagccctctctctctccagggctgttggttctttctcctgactcctgtggttttgctaatggcactttacagactccatggagatgtcaggtggaccatcttctagggcccagcaggagtagggaatgtgccaacagactgcccaggttgccgtggccttccccaccccccagatctcctgagtcatcatgctgtgctaatgaaagggatcatatcatcctctctggggatggtgggtgggggtgtcaatatcctggagctcccttaccccaactcaatgacttgggggtaaagttctcttccttttgttgcctacctcttcctccactcatttgggttcagaataaacatgccctgaagttaaagaggagttaagtcctaaaggaggcatttcttccccacctccctgacctggaactctggctacagccattgtaggaactccgtgcctggcctgtcagctccctgctaggctacagtggaatagcagagcccacaggcttctcgtggggagttggctccttaacatttcttggcaacagaaagccccaggcacagctcagggaggagggaaggcaggtaagctttggacgagaactggcatatttattttgacccaaatcagggatttccccagtccacccagtactgggctcttaagcaaaagtctgagaaacaagacagtggtttgaattctggggcctttgtgtaggattgtgcctgacctttatttatttattaacagcagggccactcgtctagggcagtggagtctgcgtgtctcctggggctggggcagggcattggcagttacgcagtggccctgaacctggtctggtgcccccgaacctggtctgatgccccctcagctctttgacaatcactgtggctgttgggttttctcctatttctaaaaatgttctcttctttcctaagtgacagttttgaagtattggataaccaagagctcaggtcacacagaccttggagccccatctttgcttgcagcttagctttgagatactaagcaagcgagggacttcactcttgagcctgttttttcctcatctgtaaagtggggatagtggtacggcctacctcatagggttgtaatgagcactaaatgtgaagtgcttggcacagtgcctggcacatggtgagccacagctactgtgagtttctgtttatcccccttttttttttttaagcccattgtttattctttgagaatttgttgtaacttcttcaggataacacctgagtccacaggctgagcagctgtggcccagacagaactgctccggcttggctgttccagcaggtggggcgctggcctcggtgagggcacagcagcaaggttcacggatatccgtgtgtcttgtctgtggccaccaggcacaggtttggcttccggtcagtgtcccgacactgtgcgggaggtgacaacagagcaaagcagcgcaggggtcagggaggtggagacactgctgaaatcacactaccccaccctcagctgaagccccacgttccacaaacttggggtcatagattgtccagtcactggctccctccctgtcagcacagcacagaggaaggggctaactgaatcttttaccacttctggcctggctccagaactttgttctagattccttaaaagtcggtagctgatgtcaaactcaattgagcagtagctttgatcccttggtctgggggtcgaaggaagatggcgctgttatcagcggggaaatgtactatttaagatcagctttgttgtaaaaccatttgttctagaataaaactcaattggaaacgtgaaaaaaaaaac

SEQ ID NO: 31141 - DNA, 2247 bp, Homo sapiens
agcggagtcggagccgggcttgcccgggcatgtgggagctgccggctttccggacgccacgtgcagaccggaagagacacgcggggcttcaggctgctgccccattggaagattactccccaggcttcccttgccccaagcagtgagctgactggaatggtaccccgggaggcccctgagtctgctcagtgcctgtgcccttccctcaccatcccaaatgccaaggatgtgcttcggaagaggcacaagagaaggagccgacagcaccagcggttcatggcccggaaggccttgctgcaggagcaggggctgctgagcatgcctccagaaccagggtcctccccactgcccacccctttcggggcagcgacagcaactgaagctgccagcagtgggaagcagtgtctgagggctggatctggcagtgccccatgcagcagaaggcctgctcccgggaaagcctcagggcccttgcccagcaagtgtgtggctatcgactgtgagatggtgggcacgggaccccgagggcgggtaagcgagctggcccgctgttccattgtgagctaccatggcgatgtcctctatgacaagtacatcaggcctgagatgcccatcgctgactaccgtacccgctggagtggcatcactcggcagcacatgcgcaaggctgtccccttccaggtggcccagaaagagatccttaagctcctgaagggcaaggtggtggtggggcacgcgctgcacaacgacttccaggcgctcaagtatgtccaccctcggagccagacccgggataccacctatgtcccaaacttcctcagcgagcccggcctccacacccgggcccgggtctctctaaaggacctggccctgcagctgctgcacaagaagatccaggtgggccagcacgggcactcatcagtagaagatgccacgacagccatggagctctaccggctggtggaggtgcagtgggaacagcaggaggcccgcagcctctggacctgccccgaggacagagaacctgacagcagcacagacatggaacagtacatggaggaccagtactgggctcttaagcaaaagtctgagaaacaagacagtggtttgaattctggggcctttgtgtaggattgtgcctgacctttatttatttattaacagcagggccactcgtctagggcagtggagtctgcgtgtctcctggggctggggcagggcattggcagttacgcagtggccctgaacctggtctggtgcccccgaacctggtctgatgccccctcagctctttgacaatcactgtggctgttgggttttctcctatttctaaaaatgttctcttctttcctaagtgacagttttgaagtattggataaccaagagctcaggtcacacagaccttggagccccatctttgcttgcagcttagctttgagatactaagcaagcgagggacttcactcttgagcctgttttttcctcatctgtaaagtggggatagtggtacggcctacctcatagggttgtaatgagcactaaatgtgaagtgcttggcacagtgcctggcacatggtgagccacagctactgtgagtttctgtttatcccccttttttttttttaagcccattgtttattctttgagaatttgttgtaacttcttcaggataacacctgagtccacaggctgagcagctgtggcccagacagaactgctccggcttggctgttccagcaggtggggcgctggcctcggtgagggcacagcagcaaggttcacggatatccgtgtgtcttgtctgtggccaccaggcacaggtttggcttccggtcagtgtcccgacactgtgcgggaggtgacaacagagcaaagcagcgcaggggtcagggaggtggagacactgctgaaatcacactaccccaccctcagctgaagccccacgttccacaaacttggggtcatagattgtccagtcactggctccctccctgtcagcacagcacagaggaaggggctaactgaatcttttaccacttctggcctggctccagaactttgttctagattccttaaaagtcggtagctgatgtcaaactcaattgagcagtagctttgatcccttggtctgggggtcgaaggaagatggcgctgttatcagcggggaaatgtactatttaagatcagctttgttgtaaaaccatttgttctagaataaaactcaattggaaacgtgaaaaaaaaaac

SEQ ID NO: 31142 - DNA, 1527 bp, Homo sapiens
aaaataggataggtacgagatcgggtgtgactcaggccgagaataaacatgccctgaagttaaagaggagttaagtcctaaaggaggcatttcttccccacctccctgacctggaactctggctacagccattgtaggaactccgtgcctggcctgtcagctccctgctaggctacagtggaatagcagagcccacaggcttctcgtggggagttggctccttaacatttcttggcaacagaaagccccaggcacagctcagggaggagggaaggcaggtaagctttggacgagaactggcatatttattttgacccaaatcagggatttccccagtccacccagtactgggctcttaagcaaaagtctgagaaacaagacagtggtttgaattctggggcctttgtgtaggattgtgcctgacctttatttatttattaacagcagggccactcgtctagggcagtggagtctgcgtgtctcctggggctggggcagggcattggcagttacgcagtggccctgaacctggtctggtgcccccgaacctggtctgatgccccctcagctctttgacaatcactgtggctgttgggttttctcctatttctaaaaatgttctcttctttcctaagtgacagttttgaagtattggataaccaagagctcaggtcacacagaccttggagccccatctttgcttgcagcttagctttgagatactaagcaagcgagggacttcactcttgagcctgttttttcctcatctgtaaagtggggatagtggtacggcctacctcatagggttgtaatgagcactaaatgtgaagtgcttggcacagtgcctggcacatggtgagccacagctactgtgagtttctgtttatcccccttttttttttttaagcccattgtttattctttgagaatttgttgtaacttcttcaggataacacctgagtccacaggctgagcagctgtggcccagacagaactgctccggcttggctgttccagcaggtggggcgctggcctcggtgagggcacagcagcaaggttcacggatatccgtgtgtcttgtctgtggccaccaggcacaggtttggcttccggtcagtgtcccgacactgtgcgggaggtgacaacagagcaaagcagcgcaggggtcagggaggtggagacactgctgaaatcacactaccccaccctcagctgaagccccacgttccacaaacttggggtcatagattgtccagtcactggctccctccctgtcagcacagcacagaggaaggggctaactgaatcttttaccacttctggcctggctccagaactttgttctagattccttaaaagtcggtagctgatgtcaaactcaattgagcagtagctttgatcccttggtctgggggtcgaaggaagatggcgctgttatcagcggggaaatgtactatttaagatcagctttgttgtaaaaccatttgttctagaataaaactcaattggaaacgtgaaaaaaaaaac

SEQ ID NO: 31143 - DNA, 1984 bp, Homo sapiens
agcggagtcggagccgggcttgcccgggcatgtgggagctgccggctttccggacgccacgtgcagaccggaagagacacgcggggcttcaggctgctgccccattggaagattactccccaggcttcccttgccccaagcagtgagctgactggaatggtaccccgggaggcccctgagtctgctcagtgcctgtgcccttccctcaccatcccaaatgccaaggatgtgcttcggaagaggcacaagagaaggagccgacagcaccagcggttcatggcccggaaggccttgctgcaggagcaggggctgctgagcatgcctccagaaccagggtcctccccactgcccacccctttcggggcagcgacagcaactgaagctgccagcagtgggaagcagtgtctgagggctggatctggcagtgccccatgcagcagaaggcctgctcccgggaaagcctcagggcccttgcccagcaagtgtgtggctatcgactgtgagatggtgggcacgggaccccgagggcgggtaagcgagctggcccgctgttccattgtgagctaccatggcgatgtcctctatgacaagtacatcaggcctgagatgcccatcgctgactaccgtacccgctggagtggcatcactcggcagcacatgcgcaaggctgtccccttccaggtggcccagaaagagatccttaagctcctgaagggcaaggtggtggtggggcacgcgctgcacaacgacttccaggcgctcaagtatgtccaccctcggagccagacccgggataccaccgtactgggctcttaagcaaaagtctgagaaacaagacagtggtttgaattctggggcctttgtgtaggattgtgcctgacctttatttatttattaacagcagggccactcgtctagggcagtggagtctgcgtgtctcctggggctggggcagggcattggcagttacgcagtggccctgaacctggtctggtgcccccgaacctggtctgatgccccctcagctctttgacaatcactgtggctgttgggttttctcctatttctaaaaatgttctcttctttcctaagtgacagttttgaagtattggataaccaagagctcaggtcacacagaccttggagccccatctttgcttgcagcttagctttgagatactaagcaagcgagggacttcactcttgagcctgttttttcctcatctgtaaagtggggatagtggtacggcctacctcatagggttgtaatgagcactaaatgtgaagtgcttggcacagtgcctggcacatggtgagccacagctactgtgagtttctgtttatcccccttttttttttttaagcccattgtttattctttgagaatttgttgtaacttcttcaggataacacctgagtccacaggctgagcagctgtggcccagacagaactgctccggcttggctgttccagcaggtggggcgctggcctcggtgagggcacagcagcaaggttcacggatatccgtgtgtcttgtctgtggccaccaggcacaggtttggcttccggtcagtgtcccgacactgtgcgggaggtgacaacagagcaaagcagcgcaggggtcagggaggtggagacactgctgaaatcacactaccccaccctcagctgaagccccacgttccacaaacttggggtcatagattgtccagtcactggctccctccctgtcagcacagcacagaggaaggggctaactgaatcttttaccacttctggcctggctccagaactttgttctagattccttaaaagtcggtagctgatgtcaaactcaattgagcagtagctttgatcccttggtctgggggtcgaaggaagatggcgctgttatcagcggggaaatgtactatttaagatcagctttgttgtaaaaccatttgttctagaataaaactcaattggaaacgtgaaaaaaaaaac

SEQ ID NO: 31144 - DNA, 1367 bp, Homo sapiens
aaagttccctgtgagcagttgcaaggaagcccccacaggcttctcgtggggagttggctccttaacatttcttggcaacagaaagccccaggcacagctcagggaggagggaaggcaggtaagctttggacgagaactggcatatttattttgacccaaatcagggatttccccagtccacccagtactgggctcttaagcaaaagtctgagaaacaagacagtggtttgaattctggggcctttgtgtaggattgtgcctgacctttatttatttattaacagcagggccactcgtctagggcagtggagtctgcgtgtctcctggggctggggcagggcattggcagttacgcagtggccctgaacctggtctggtgcccccgaacctggtctgatgccccctcagctctttgacaatcactgtggctgttgggttttctcctatttctaaaaatgttctcttctttcctaagtgacagttttgaagtattggataaccaagagctcaggtcacacagaccttggagccccatctttgcttgcagcttagctttgagatactaagcaagcgagggacttcactcttgagcctgttttttcctcatctgtaaagtggggatagtggtacggcctacctcatagggttgtaatgagcactaaatgtgaagtgcttggcacagtgcctggcacatggtgagccacagctactgtgagtttctgtttatcccccttttttttttttaagcccattgtttattctttgagaatttgttgtaacttcttcaggataacacctgagtccacaggctgagcagctgtggcccagacagaactgctccggcttggctgttccagcaggtggggcgctggcctcggtgagggcacagcagcaaggttcacggatatccgtgtgtcttgtctgtggccaccaggcacaggtttggcttccggtcagtgtcccgacactgtgcgggaggtgacaacagagcaaagcagcgcaggggtcagggaggtggagacactgctgaaatcacactaccccaccctcagctgaagccccacgttccacaaacttggggtcatagattgtccagtcactggctccctccctgtcagcacagcacagaggaaggggctaactgaatcttttaccacttctggcctggctccagaactttgttctagattccttaaaagtcggtagctgatgtcaaactcaattgagcagtagctttgatcccttggtctgggggtcgaaggaagatggcgctgttatcagcggggaaatgtactatttaagatcagctttgttgtaaaaccatttgttctagaataaaactcaattggaaacgtgaaaaaaaaaac

SEQ ID NO: 31145 - DNA, 1655 bp, Homo sapiens
agcggagtcggagccgggcttgcccgggcatgtgggagctgccggctttccggacgccacgtgcagaccggaagagacacgcggggcttcaggctgctgccccattggaagattactccccaggcttcccttgccccaagcagtgagctgactggaatggtaccccgggaggcccctgagtctgctcagtgcctgtgcccttccctcaccatcccaaatgccaaggatgtgcttcggaagaggcacaagagaaggagccgacagcaccagcggttcatggcccggaaggccttgctgcaggagcaggggctgctgagcatgcctccagaaccagggtcctccccactgcccacccctttcggggcagcgacagcaactgaagctgccagcagtgggaagcagtgtctgagggctggatctggcagtgccccatgcagcagaaggcctgctcccgggaaagcctcagggcccttgcccagcaagtgtgtggctatcgactgtgagatggtgggcacgggaccccgagggcgggtaagcgagctggcccgctgttccattgtgagctaccatggcgatgtcctctatgacaagtacatcaggcctgagatgcccatcgctgactaccgtacccgctggagtggcatcactcggcagcacatgcgcaaggctgtccccttccaggtggcccagaaagagatccttaagctcctgaagggcaaggtggtggtggggcacgcgctgcacaacgacttccaggcgctcaagtatgtccaccctcggagccagacccgggataccacctatgtcccaaacttcctcagcgagcccggcctccacacccgggcccgggtctctctaaaggacctggccctgcagctgctgcacaagaagatccaggtgggccagcacgggcactcatcagtagaagatgccacgacagccatggagctctaccggctggtggaggtgcagtgggaacagcaggaggcccgcagcctctggacctgccccgaggacagagaacctgacagcagcacagacatggaacagtacatggaggaccagtactggcccgatgacctggcccacggcagcagaggaggagccagggaggcacaggacagaaggaattgagaagggggcggggctccctggctgggcttccggtgtggccggtaggaagtgggggccaggagagcagcgggcactccttcctgggcagggtggggcaggatgcagtgagccagccccagggccagaggagttggggtcatctgttaccttgacaccctctgcacacagcatagccctctctctctccagggctgttggttctttctcctgactcctgtggttttgctaatggcactttacagactccatggagatgtcaggtggaccatcttctagggcccagcaggagtagggaatgtgccaacagactgcccaggttgccgtggccttccccaccccccagatctcctgagtcatcatgctgtgctaatgaaagggatcatatcatcctctctgcgtttgcaaacgcagagaggaccatagtctaataaaaaacaccctgaacctaataattcaagcgctgctcattacaatcctactgcagctctattagaccctcctacaagccttaaagaacttcg

SEQ ID NO: 31146 - DNA, 1104 bp, Homo sapiens
agcggagtcggagccgggcttgcccgggcatgtgggagctgccggctttccggacgccacgtgcagaccggaagagacacgcggggcttcaggctgctgccccattggaagattactccccaggcttcccttgccccaagcagtgagctgactggaatggtaccccgggaggcccctgagtctgctcagtgcctgtgcccttccctcaccatcccaaatgccaaggatgtgcttcggaagaggcacaagagaaggagccgacagcaccagcggttcatggcccggaaggccttgctgcaggagcaggggctgctgagcatgcctccagaaccagggtcctccccactgcccacccctttcggggcagcgacagcaactgaagctgccagcagtgggaagcagtgtctgagggctggatctggcagtgccccatgcagcagaaggcctgctcccgggaaagcctcagggcccttgcccagcaagtgtgtggctatcgactgtgagatggtgggcacgggaccccgagggcgggtaagcgagctggcccgctgttccattgtgagctaccatggcgatgtcctctatgacaagtacatcaggcctgagatgcccatcgctgactaccgtacccgctggagtggcatcactcggcagcacatgcgcaaggctgtccccttccaggtggcccagaaagagatccttaagctcctgaagggcaaggtggtggtggggcacgcgctgcacaacgacttccaggcgctcaagtatgtccaccctcggagccagacccgggataccaccgttccacaaacttggggtcatagattgtccagtcactggctccctccctgtcagcacagcacagaggaaggggctaactgaatcttttaccacttctggcctggctccagaactttgttctagattccttaaaagtcggtagctgatgtcaaactcaattgagcagtagctttgatcccttggtctgggggtcgaaggaagatggcgctgttatcagcggggaaatgtactatttaagatcagctttgttgtaaaaccatttgttctagaataaaactcaattggaaacgtgaaaaaaaaaac

SEQ ID NO: 31147 - DNA, 6662 bp, Homo sapiens
agccggtccaaggcggtgcgctgggggccggggcgcgtcgcaggaaaggacttagaagccttacaaatacatctgtgcattcttgcttcagactttacaactgagggccagcccagtctggaagcatctcttattaatgttacaaggaaaccgctacctcagcaaacaaaaggaatggaggaggagacttacaacaaacgccatttaaaaaaaaaagaaaaacttgttttcaggaaacattagaggaaatttggagaatttcagcattgcatagaagcagccttacaggtaaacggatttgacgggcaggctctgtcaaaattctgcagaagtttgatcttccttcttaaggactttgtgtgaagtaattctttactgcttttaaattgctgttgatcagcttctgggtttttgggttctaacttttttgggtatattgaagacacagtgtattacattatattacatttttaaacgttaagttatttttctgccattgtaaatacaagtatcaaaatattcttgcaaagaagtaaacatttttctcagcaagcatatccttttagtaagagagtggaatgctaaacagttcttatccagcattttggacatcttttattttttgtcagagatcctgtctacactgaaaatattaattatataaacctgttgtctctcacctctacattggatcacatggtcacctgcctcatggaaatgccttttttaaaacttcgatttgcagaactccactatttttatacctagctacagttttgagaaagaagaatcagaaccctgacccacttacggttgctgggacaattccccctcccgcatgtattgctgcagtgcccaggacagtaaaatggactacaagcggcgcttcctgcttggcgggtccaagcagaaggtgcagcagcaccagcaatacccgatgcctgagctgggccgagcactgagtgctcccctggcatccacggccaccactgcccccctgggcagtctgaccgctgcaggcagctgccaccatgccatgccccacactactcctatcgccgacatccagcagggcatctccaagtatctggatgccctgaacgtcttctgccgtgccagtactttcctcacagatctcttcagcactgtgttcaggaactctcactactcaaaggcagccacacagctcaaagatgtgcaggagcatgtcatggaagcagccagtcggctgacctcggccataaagcctgagatcgccaagatgctaatggaacttagtgctggggctgcaaattttacggatcagaaggaattcagtctccaggacattgaggtgttggggcgatgtttcctgactgtggtgcaagtccatttccagtttttgactcatgcgttacagaaggtccagccggtggctcactcttgctttgctgaggtcatcgtgccagaaaaaaagaacagcggcagtggcggcggcttatctggcatgggccacacacctgaagtagaggaagctgtgcggtcctggcggggggctgctgaggcgacatctagactaagagaaagaggctgtgatggttgcctggcaggaattgaagttcaacaactcttttgttctcaaagtgcagcaattcctgagcaccagctaaaagaactgaacataaaaatcgacagtgctttgcaagcatataagatagctctggaaagcttaggacactgtgaatatgcaatgaaagccggcttccacctgaatccaaaggcgattgaagcaagtttgcagggctgctgcagcgaggcggaagcccagcagacggggcggaggcagacacccccgcagcccatgcagtgtgagctccccaccgtccctgtgcagataggatcgcacttcctgaagggcgtctcctttaatgagtcggccgccgacaatctgaaacttaagacgcatacaatgttacagctgatgaaggaggcaggctgctataatggaatcacatccagggatgattttcctgtgactgaagtgctgaaccaggtttgcccttccacatggcgaggtgcctgcaagacggcggtgcagctgctgtttggccaggctggactggtggtggttgacacagcacagattgagaataaagaagcctatgccccccagatcagtttagaaggctctagaatcgtggttcaagtcccatccacatggtgcctgaaagaagaccctgctaccatgtccctgctgcagagaagccttgatcctgagaagaccctgggtctagtggacgtgctctacacagctgtgctggacctaaaccgctggagggctggaagggagcaagctttaccctgcatacagatccagctgcaaagggagatctgtgattttggcaaccaggctgacctgccttctggaaatggaaacaaatcttcaggtggcctgcagaagacattctccaaactgacatcccggttcaccaagaaagcttcatgtaccagctccagcagcagcacaaattattccatccaaaataccccttccaaaaacatcttcatagctggatgttccgaagagaaggccaaaatgcctggcaatattgatacaaggttacaaagcattttgaacattggtaatttccccaggactacagacccttcacagtcagctcagaattccagtaatacagtggccaatggctttctcatggagaggcgtgagaacttcctgcatggagatgacggcaaggatgagaagggtatgaacttaccaactgatcaggaaatgcaagaggtgatagattttctctcgggctttaacatgggccagtcacatcagggctctccgttggtgacaaggcataattctgctgccacagccatggtgactgagcagaaggcaggagccatgcaaccacagcagccgtcactgcctgtgccccctccaccacgggcaccccaggctggggcacacacacctctgacaccccagccgggactggcacctcagcagcagtccccaaagcagcaacaacctcaagtccaatactaccaacacctactccagcccattggaccgcagcagcccccgccccagcctcgggcacctgggaaatgggtacatggctcatcccagcagccagcgcaggctgttggagcaggtctgtctcctcttggtcagtggcctggcatatctgatctcagttctgacttgtacagcttgggtctggtgagcagctatatggataatgtgatgtcagaggttctgggacagaagccgcagggacctagaaataacacctggcccaaccgtgaccaaagtgatggagtctttggaatgctgggagagattctgccttttgatcctgcagtgggctcagacccagagtttgcacgctatgtggcaggagtgagccaggcgatgcagcagaagcggcaggcccagcacggtcgccggccaggcaacccccggggcaactggccgcctatggatgacgcgcatcggacctggcccttccccgagttcttcacagaaggggatggcctgcacggtggctggtcgggtgctcagggagactctgccagctcgagtgatgagacatcctcagccaacggggacagcttgttctccatgttttcagggcctgacctcgttgctgctgtcaagcagagaaggaaacacagcagtggagagcaagacaccagcacgctgccctcaccacctctcctcaccacggtggaggatgtgaaccaggataacaaaaccaaaacgtggccacccaaagcaccctggcagcacccttccccgcttcccagcacgctgcccagccccagcgcaccactctatgcagtcaccagccctggcagccagtggaacgacaccatgcagatgctgcagtccccagtgtgggccgcaaccaacgactgcagtgccgctgccttctcctatgtgcagaccccaccccagcccccacccccaccagcacacaaggcagcacccaagggcttcaaggccttccctgggaagggtgagcgcaggccagcctatctgccccagtactgaccccaggccagccagcctgcctgcctgcctgcctgcccgcccagagctgtggggatgagtgtccccaccccagggccacttagctgacaccagcccctcagaggaccagtgcgccccatcccagggagggttccttggggacaagggtggttggcagctccaagcctttaaacctggcttctgaaacgatggcatcagagccctggagagccagctggagacacaggcgtctggccttcaggggcttgctagggaacctgcatgcctagtaagcgccacaggtgactctgatgcaggcgccacagccacacttgaagaaacacagctcttgggtttttagtcctgctgtgtgttgggaagacatcaggcctgaaagctgagggcataactgaccattttttggaaaccctctcctccctcctccacaccttgagtgatgaccacaccaatcactgtattttatagctttttttttcatgtaggtttttagttaaaacatctcctgcctaaaatgcattgaatattttaagataacagatatactggctggaggtttgtttaacactatctatatttaagcttatacaaaatgggcaaaatatagaatatttgtgattggaagcagtcacctggggtttctgggggtggacagttcctcgccacccagcagcaccctgggactgcggcctttcccagctttattgaagcagaatggtggaacttgtgccggaggtacactgctgaaggtgcgtggcggtggaccagccagctgctgtccatgtgcagagcaaggctgcacctgctgcccttcgatccttccacacatggccaggacactgccacaatcctcggggtgtggtcaaggggcactcagagacacctgcactagaaattgcattgacattgtgagctggctcagaagacaaaccaattaagatgtagatagaaattaatttaaggtcttttcttaaaaaaaaaatccacctcattttcagttaacatgtgccattaaatagataacatcctgtggatttagggatattttccagccagaatggatccagaagaattgaatggtgcttaaattgagaaataataataaatatatctatatagaatagacatatcccactgtatattaattgaggttacagaaagttctttatataaaacttatttaaatttttcatatttcatctttgaaaaagtctgagaaaaatccataatattttctggtatgaaagtttgacagtattaatattttttttatattttcttaaatcattaaaccattttaatatatgttaactactaataaatggtttattctttctaactccatataagcttttccagcaaagattgtaataacacatttatgttctcgtttttctacagatataagtaaatttatatataaaaataccaaaaagaggctgggcgtggtggctcacgcctgtaatcccagcactttgggaggccgaggcaggtggatcacctaaggtcaggagttcgagaccagcctggccaatatggtgaaaccccatctctactaaaaatacaaaaattagccgggtgtggtggcgtgcgcctgtagtcccagctactcgggaggctgaagcagaagaatcgcttgaacccgggaggcggaggttacagtgagctgagattgtgccactgcactccagcctgggtgacagagtgagattccgtctcaacaagaaaaaaaaaaaagaatatatatatatgtatgtatgtatgtatgtaaacacacacactaatttgagaggacccgtagggtgtctgagcccagccacctgagtttttagtactgtgttgtcaggctcttcccaggcctcaggtgttgtcttttgtgctgtgtggggatgcattgctgcctgtatttatgatcttttgccgtggttctgagcattcacctcaccatgtttacaaagaactgttttgtatatagacattttcaggcacgtgctttgcaccaaccctgcgtggctcttgtctgtgttagctgtcacggtgtgcacactaatctctgttaaagttgtctatggctgttctacttgtaagatagttttctatttccttcagtaatgtgtccacagtaccctgtatttcgagttccattatactgaagtactcatgttttaatagtgcctctccaaaggcctcaccttggacagaggtcaatccttgatgctccagcacaggtgacgtcactaattgtcactttccagtttgtttttctctattaaggaagacattttctaattgcatctccatgggctgtgagactgtgtgaagccgtttgtgtggtctccatgtaggtgctgtgttcccggcaccgccttgctctgaacactggtaattccaggtgctgcgcttggcagaggggtctcgccaaagcgcatgtgtgtgcatgtgtgaacgtgtgtgtcctttgcatggttgggcgtgggtgccttgctagggcatcagcaggacattgtgtgtatagttacaatgcttccaaactggaactctacattttgtatcttttaaagctcctataagtaaaataactattggctttattaaaaatatacatttaataata

SEQ ID NO: 31148 - DNA, 533 bp, Homo sapiens
agtttgtccccaaacccggtttattcctttgtcccaatgcagtgggctcagacccagagtttgcacgctatgtggcaggagtgagccaggcgatgcagcagaagcggcaggcccagcacggtcgccggccaggcaacccccggggcaactggccgcctatggatgacgcgcatcggacctggccgtgtcccccgaggggcctgtgagaagagaggctccttgcctgtgtgcattcttttcaggcagttcaattccaagcccccatgtgagagagtgacatgggatgaaatctttaggggtcagagtcatgtggctgactgttagatgccaagtagtgtgatgtatccctgtgaacgtgccattggtatacattcatgattttcaaaacagactcttcagccctagacaaggctcttacatgatggtgcttgtgaggtgaaggcatgtttcacacggcctttatactgaactgagtgtggctgcgaagcccacgtgatttatggaacgctgtcattatagcctatgaaaagcaa

SEQ ID NO: 31149 - DNA, 4616 bp, Homo sapiens
tctagccatgctttcccctcctgtgccaccattagaggatttcactgaatcacactcctcaggccagaatcctagcagaacttccagtcctgcgttagacactgtagatttcatactctccaaacccctgggtgttcatttatatataaaataagtgaacccgataccaacctgagaggtttttcttgctctcaacgccattcttaaatacaaagaggtccattttattattttatatatttgtcttttttttttttaaacaaatttctgtttaaatagggagcaagctttaccctgcatacagatccagctgcaaagggagatctgtgattttggcaaccaggctgacctgccttctggaaatggaaacaaatcttcaggtggcctgcagaagacattctccaaactgacatcccggttcaccaagaaagcttcatgtaccagctccagcagcagcacaaattattccatccaaaataccccttccaaaaacatcttcatagctggatgttccgaagagaaggccaaaatgcctggcaatattgatacaaggttacaaagcattttgaacattggtaatttccccaggactacagacccttcacagtcagctcagaattccagtaatacagtggccaatggctttctcatggagaggcgtgagaacttcctgcatggagatgacggcaaggatgagaagggtatgaacttaccaactgatcaggaaatgcaagaggtgatagattttctctcgggctttaacatgggccagtcacatcagggctctccgttggtgacaaggcataattctgctgccacagccatggtgactgagcagaaggcaggagccatgcaaccacagcagccgtcactgcctgtgccccctccaccacgggcaccccaggctggggcacacacacctctgacaccccagccgggactggcacctcagcagcagtccccaaagcagcaacaacctcaagtccaatactaccaacacctactccagcccattggaccgcagcagcccccgccccagcctcgggcacctgggaaatgggtacatggctcatcccagcagccagcgcaggctgttggagcaggtctgtctcctcttggtcagtggcctggcatatctgatctcagttctgacttgtacagcttgggtctggtgagcagctatatggataatgtgatgtcagaggttctgggacagaagccgcagggacctagaaataacacctggcccaaccgtgaccaaagtgatggagtctttggaatgctgggagagattctgccttttgatcctgcagtgggctcagacccagagtttgcacgctatgtggcaggagtgagccaggcgatgcagcagaagcggcaggcccagcacggtcgccggccaggcaacccccggggcaactggccgcctatggatgacgcgcatcggacctggcccttccccgagttcttcacagaaggggatggcctgcacggtggctggtcgggtgctcagggagactctgccagctcgagtgatgagacatcctcagccaacggggacagcttgttctccatgttttcagggcctgacctcgttgctgctgtcaagcagagaaggaaacacagcagtggagagcaagacaccagcacgctgccctcaccacctctcctcaccacggtggaggatgtgaaccaggataacaaaaccaaaacgtggccacccaaagcaccctggcagcacccttccccgcttcccagcacgctgcccagccccagcgcaccactctatgcagtcaccagccctggcagccagtggaacgacaccatgcagatgctgcagtccccagtgtgggccgcaaccaacgactgcagtgccgctgccttctcctatgtgcagaccccaccccagcccccacccccaccagcacacaaggcagcacccaagggcttcaaggccttccctgggaagggtgagcgcaggccagcctatctgccccagtactgaccccaggccagccagcctgcctgcctgcctgcctgcccgcccagagctgtggggatgagtgtccccaccccagggccacttagctgacaccagcccctcagaggaccagtgcgccccatcccagggagggttccttggggacaagggtggttggcagctccaagcctttaaacctggcttctgaaacgatggcatcagagccctggagagccagctggagacacaggcgtctggccttcaggggcttgctagggaacctgcatgcctagtaagcgccacaggtgactctgatgcaggcgccacagccacacttgaagaaacacagctcttgggtttttagtcctgctgtgtgttgggaagacatcaggcctgaaagctgagggcataactgaccattttttggaaaccctctcctccctcctccacaccttgagtgatgaccacaccaatcactgtattttatagctttttttttcatgtaggtttttagttaaaacatctcctgcctaaaatgcattgaatattttaagataacagatatactggctggaggtttgtttaacactatctatatttaagcttatacaaaatgggcaaaatatagaatatttgtgattggaagcagtcacctggggtttctgggggtggacagttcctcgccacccagcagcaccctgggactgcggcctttcccagctttattgaagcagaatggtggaacttgtgccggaggtacactgctgaaggtgcgtggcggtggaccagccagctgctgtccatgtgcagagcaaggctgcacctgctgcccttcgatccttccacacatggccaggacactgccacaatcctcggggtgtggtcaaggggcactcagagacacctgcactagaaattgcattgacattgtgagctggctcagaagacaaaccaattaagatgtagatagaaattaatttaaggtcttttcttaaaaaaaaaatccacctcattttcagttaacatgtgccattaaatagataacatcctgtggatttagggatattttccagccagaatggatccagaagaattgaatggtgcttaaattgagaaataataataaatatatctatatagaatagacatatcccactgtatattaattgaggttacagaaagttctttatataaaacttatttaaatttttcatatttcatctttgaaaaagtctgagaaaaatccataatattttctggtatgaaagtttgacagtattaatattttttttatattttcttaaatcattaaaccattttaatatatgttaactactaataaatggtttattctttctaactccatataagcttttccagcaaagattgtaataacacatttatgttctcgtttttctacagatataagtaaatttatatataaaaataccaaaaagaggctgggcgtggtggctcacgcctgtaatcccagcactttgggaggccgaggcaggtggatcacctaaggtcaggagttcgagaccagcctggccaatatggtgaaaccccatctctactaaaaatacaaaaattagccgggtgtggtggcgtgcgcctgtagtcccagctactcgggaggctgaagcagaagaatcgcttgaacccgggaggcggaggttacagtgagctgagattgtgccactgcactccagcctgggtgacagagtgagattccgtctcaacaagaaaaaaaaaaaagaatatatatatatgtatgtatgtatgtatgtaaacacacacactaatttgagaggacccgtagggtgtctgagcccagccacctgagtttttagtactgtgttgtcaggctcttcccaggcctcaggtgttgtcttttgtgctgtgtggggatgcattgctgcctgtatttatgatcttttgccgtggttctgagcattcacctcaccatgtttacaaagaactgttttgtatatagacattttcaggcacgtgctttgcaccaaccctgcgtggctcttgtctgtgttagctgtcacggtgtgcacactaatctctgttaaagttgtctatggctgttctacttgtaagatagttttctatttccttcagtaatgtgtccacagtaccctgtatttcgagttccattatactgaagtactcatgttttaatagtgcctctccaaaggcctcaccttggacagaggtcaatccttgatgctccagcacaggtgacgtcactaattgtcactttccagtttgtttttctctattaaggaagacattttctaattgcatctccatgggctgtgagactgtgtgaagccgtttgtgtggtctccatgtaggtgctgtgttcccggcaccgccttgctctgaacactggtaattccaggtgctgcgcttggcagaggggtctcgccaaagcgcatgtgtgtgcatgtgtgaacgtgtgtgtcctttgcatggttgggcgtgggtgccttgctagggcatcagcaggacattgtgtgtatagttacaatgcttccaaactggaactctacattttgtatcttttaaagctcctataagtaaaataactattggctttattaaaaatatacatttaataata

SEQ ID NO: 31150 - DNA, 2643 bp, Homo sapiens
gcggcggcggcggcgggctggcctggggtcagtactggggcagatagcctgcctgcctgcctgcctgcccgcccagagctgtggggatgagtgtccccaccccagggccacttagctgacaccagcccctcagaggaccagtgcgccccatcccagggagggttccttggggacaagggtggttggcagctccaagcctttaaacctggcttctgaaacgatggcatcagagccctggagagccagctggagacacaggcgtctggccttcaggggcttgctagggaacctgcatgcctagtaagcgccacaggtgactctgatgcaggcgccacagccacacttgaagaaacacagctcttgggtttttagtcctgctgtgtgttgggaagacatcaggcctgaaagctgagggcataactgaccattttttggaaaccctctcctccctcctccacaccttgagtgatgaccacaccaatcactgtattttatagctttttttttcatgtaggtttttagttaaaacatctcctgcctaaaatgcattgaatattttaagataacagatatactggctggaggtttgtttaacactatctatatttaagcttatacaaaatgggcaaaatatagaatatttgtgattggaagcagtcacctggggtttctgggggtggacagttcctcgccacccagcagcaccctgggactgcggcctttcccagctttattgaagcagaatggtggaacttgtgccggaggtacactgctgaaggtgcgtggcggtggaccagccagctgctgtccatgtgcagagcaaggctgcacctgctgcccttcgatccttccacacatggccaggacactgccacaatcctcggggtgtggtcaaggggcactcagagacacctgcactagaaattgcattgacattgtgagctggctcagaagacaaaccaattaagatgtagatagaaattaatttaaggtcttttcttaaaaaaaaaatccacctcattttcagttaacatgtgccattaaatagataacatcctgtggatttagggatattttccagccagaatggatccagaagaattgaatggtgcttaaattgagaaataataataaatatatctatatagaatagacatatcccactgtatattaattgaggttacagaaagttctttatataaaacttatttaaatttttcatatttcatctttgaaaaagtctgagaaaaatccataatattttctggtatgaaagtttgacagtattaatattttttttatattttcttaaatcattaaaccattttaatatatgttaactactaataaatggtttattctttctaactccatataagcttttccagcaaagattgtaataacacatttatgttctcgtttttctacagatataagtaaatttatatataaaaataccaaaaagaggctgggcgtggtggctcacgcctgtaatcccagcactttgggaggccgaggcaggtggatcacctaaggtcaggagttcgagaccagcctggccaatatggtgaaaccccatctctactaaaaatacaaaaattagccgggtgtggtggcgtgcgcctgtagtcccagctactcgggaggctgaagcagaagaatcgcttgaacccgggaggcggaggttacagtgagctgagattgtgccactgcactccagcctgggtgacagagtgagattccgtctcaacaagaaaaaaaaaaaagaatatatatatatgtatgtatgtatgtatgtaaacacacacactaatttgagaggacccgtagggtgtctgagcccagccacctgagtttttagtactgtgttgtcaggctcttcccaggcctcaggtgttgtcttttgtgctgtgtggggatgcattgctgcctgtatttatgatcttttgccgtggttctgagcattcacctcaccatgtttacaaagaactgttttgtatatagacattttcaggcacgtgctttgcaccaaccctgcgtggctcttgtctgtgttagctgtcacggtgtgcacactaatctctgttaaagttgtctatggctgttctacttgtaagatagttttctatttccttcagtaatgtgtccacagtaccctgtatttcgagttccattatactgaagtactcatgttttaatagtgcctctccaaaggcctcaccttggacagaggtcaatccttgatgctccagcacaggtgacgtcactaattgtcactttccagtttgtttttctctattaaggaagacattttctaattgcatctccatgggctgtgagactgtgtgaagccgtttgtgtggtctccatgtaggtgctgtgttcccggcaccgccttgctctgaacactggtaattccaggtgctgcgcttggcagaggggtctcgccaaagcgcatgtgtgtgcatgtgtgaacgtgtgtgtcctttgcatggttgggcgtgggtgccttgctagggcatcagcaggacattgtgtgtatagttacaatgcttccaaactggaactctacattttgtatcttttaaagctcctataagtaaaataactattggctttattaaaaatatacatttaataata

SEQ ID NO: 31151 - DNA, 7198 bp, Homo sapiens
agccggtccaaggcggtgcgctgggggccggggcgcgtcgcaggaaaggacttagaagccttacaaatacatctgtgcattcttgcttcagactttacaactgagggccagcccagtctggaagcatctcttattaatgttacaaggaaaccgctacctcagcaaacaaaaggaatggaggaggagacttacaacaaacgccatttaaaaaaaaaagaaaaacttgttttcaggaaacattagaggaaatttggagaatttcagcattgcatagaagcagccttacaggtaaacggatttgacgggcaggctctgtcaaaattctgcagaagtttgatcttccttcttaaggactttgtgtgaagtaattctttactgcttttaaattgctgttgatcagcttctgggtttttgggttctaacttttttgggtatattgaagacacagtgtattacattatattacatttttaaacgttaagttatttttctgccattgtaaatacaagtatcaaaatattcttgcaaagaagtaaacatttttctcagcaagcatatccttttagtaagagagtggaatgctaaacagttcttatccagcattttggacatcttttattttttgtcagagatcctgtctacactgaaaatattaattatataaacctgttgtctctcacctctacattggatcacatggtcacctgcctcatggaaatgccttttttaaaacttcgatttgcagaactccactatttttatacctagctacagttttgagaaagaagaatcagaaccctgacccacttacggttgctgggacaattccccctcccgcatgtattgctgcagtgcccaggacagtaaaatggactacaagcggcgcttcctgcttggcgggtccaagcagaaggtgcagcagcaccagcaatacccgatgcctgagctgggccgagcactgagtgctcccctggcatccacggccaccactgcccccctgggcagtctgaccgctgcaggcagctgccaccatgccatgccccacactactcctatcgccgacatccagcagggcatctccaagtatctggatgccctgaacgtcttctgccgtgccagtactttcctcacagatctcttcagcactgtgttcaggaactctcactactcaaaggcagccacacagctcaaagatgtgcaggagcatgtcatggaagcagccagtcggctgacctcggccataaagcctgagatcgccaagatgctaatggaacttagtgctggggctgcaaattttacggatcagaaggaattcagtctccaggacattgaggtgttggggcgatgtttcctgactgtggtgcaagtccatttccagtttttgactcatgcgttacagaaggtccagccggtggctcactcttgctttgctgaggtcatcgtgccagaaaaaaagaacagcggcagtggcggcggcttatctggcatgggccacacacctgaagtagaggaagctgtgcggtcctggcggggggctgctgaggcgacatctagactaagagaaagaggctgtgatggttgcctggcaggaattgaagttcaacaactcttttgttctcaaagtgcagcaattcctgagcaccagctaaaagaactgaacataaaaatcgacagtgctttgcaagcatataagatagctctggaaagcttaggacactgtgaatatgcaatgaaagccggcttccacctgaatccaaaggcgattgaagcaagtttgcagggctgctgcagcgaggcggaagcccagcagacggggcggaggcagacacccccgcagcccatgcagtgtgagctccccaccgtccctgtgcagataggatcgcacttcctgaagggcgtctcctttaatgagtcggccgccgacaatctgaaacttaagacgcatacaatgttacagctgatgaaggaggcaggctgctataatggaatcacatccagggatgattttcctgtgactgaagtgctgaaccaggtttgcccttccacatggcgaggtgcctgcaagacggcggtgcagctgctgtttggccaggctggactggtggtggttgacacagcacagattgagaataaagaagcctatgccccccagatcagtttagaaggctctagaatcgtggttcaagtcccatccacatggtgcctgaaagaagaccctgctaccatgtccctgctgcagagaagccttgatcctgagaagaccctgggtctagtggacgtgctctacacagctgtgctggacctaaaccgctggagggctggaagggagcaagctttaccctgcatacagatccagctgcaaagggagatctgtgattttggcaaccaggctgacctgccttctggaaatggaaacaaatcttcaggtggcctgcagaagacattctccaaactgacatcccggttcaccaagaaagcttcatgtaccagctccagcagcagcacaaattattccatccaaaataccccttccaaaaacatcttcatagctggatgttccgaagagaaggccaaaatgcctggcaatattgatacaaggttacaaagcattttgaacattggtaatttccccaggactacagacccttcacagtcagctcagaattccagtaatacagtggccaatggctttctcatggagaggcgtgagaacttcctgcatggagatgacggcaaggatgagaagggtatgaacttaccaactgatcaggaaatgcaagaggtgatagattttctctcgggctttaacatgggccagtcacatcagggctctccgttggtgacaaggcataattctgctgccacagccatggtgactgagcagaaggcaggagccatgcaaccacagcagccgtcactgcctgtgccccctccaccacgggcaccccaggctggggcacacacacctctgacaccccagccgggactggcacctcagcagcagtccccaaagcagcaacaacctcaagtccaatactaccaacacctactccagcccattggaccgcagcagcccccgccccagcctcgggcacctgggaaatgggtacatggctcatcccagcagccagcgcaggctgttggagcaggtctgtctcctcttggtcagtggcctggcatatctgatctcagttctgacttgtacagcttgggtctggtgagcagctatatggataatgtgatgtcagaggttctgggacagaagccgcagggacctagaaataacacctggcccaaccgtgaccaaagtgatggagtctttggaatgctgggagagattctgccttttgatcctgcagtgggctcagacccagagtttgcacgctatgtggcaggagtgagccaggcgatgcagcagaagcggcaggcccagcacggtcgccggccaggcaacccccggggcaactggccgcctatggatgacgcgcatcggacctggcccttccccgagttcttcacagaaggggatggcctgcacggtggctggtcgggtgctcagggagactctgccagctcgagtgatgagacatcctcagccaacggggacagcttgttctccatgttttcagggcctgacctcgttgctgctgtcaagcagagaaggaaacacagcagtggagagcaagacaccagcacgctgccctcaccacctctcctcaccacggtggaggatgtgaaccaggataacaaaaccaaaacgtggccacccaaagcaccctggcagcacccttccccgcttcccagcacgctgcccagccccagcgcaccactctatgcagtcaccagccctggcagccagtggaacgacaccatgcagatgctgcagtccccagtgtgggccgcaaccaacgactgcagtgccgctgccttctcctatgtgcagaccccaccccagcccccacccccaccagcacacaaggcagcacccaagggcttcaaggccttccctgggaagggtgagcgcaggccagcctatctgccccagtactgaccccaggccagccagcctgcctgcctgcctgcctgcccgcccagagctgtggggatgagtgtccccaccccagggccacttagctgacaccagcccctcagaggaccagtgcgccccatcccagggagggttccttggggacaagggtggttggcagctccaagcctttaaacctggcttctgaaacgatggcatcagagccctggagagccagctggagacacaggcgtctggccttcaggggcttgctagggaacctgcatgcctagtaagcgccacaggtgactctgatgcaggcgccacagccacacttgaagaaacacagctcttgggtttttagtcctgctgtgtgttgggaagacatcaggcctgaaagctgagggcataactgaccattttttggaaaccctctcctccctcctccacaccttgagtgatgaccacaccaatcactgtattttatagctttttttttcatgtaggtttttagttaaaacatctcctgcctaaaatgcattgaatattttaagataacagatatactggctggaggtttgtttaacactatctatatttaagcttatacaaaatgggcaaaatatagaatatttgtgattggaagcagtcacctggggtttctgggggtggacagttcctcgccacccagcagcaccctgggactgcggcctttcccagctttattgaagcagaatggtggaacttgtgccggaggtacactgctgaaggtgcgtggcggtggaccagccagctgctgtccatgtgcagagcaaggctgcacctgctgcccttcgatccttccacacatggccaggacactgccacaatcctcggggtgtggtcaaggggcactcagagacacctgcactagaaattgcattgacattgtgagctggctcagaagacaaaccaattaagatgtagatagaaattaatttaaggtcttttcttaaaaaaaaaatccacctcattttcagttaacatgtgccattaaatagataacatcctgtggatttagggatattttccagccagaatggatccagaagaattgaatggtgcttaaattgagaaataataataaatatatctatatagaatagacatatcccactgtatattaattgaggttacagaaagttctttatataaaacttatttaaatttttcatatttcatctttgaaaaagtctgagaaaaatccataatattttctggtatgaaagtttgacagtattaatattttttttatattttcttaaatcattaaaccattttaatatatgttaactactaataaatggtttattctttctaactccatataagcttttccagcaaagattgtaataacacatttatgttctcgtttttctacagatataagtaaatttatatataaaaataccaaaaagaggctgggcgtggtggctcacgcctgtaatcccagcactttgggaggccgaggcaggtggatcacctaaggtcaggagttcgagaccagcctggccaatatggtgaaaccccatctctactaaaaatacaaaaattagccgggtgtggtggcgtgcgcctgtagtcccagctactcgggaggctgaagcagaagaatcgcttgaacccgggaggcggaggttacagtgagctgagattgtgccactgcactccagcctgggtgacagagtgagattccgtctcaacaagaaaaaaaaaaaagaatatatatatatgtatgtatgtatgtatgtaaacacacacactaatttgagaggacccgtagggtgtctgagcccagccacctgagtttttagtactgtgttgtcaggctcttcccaggcctcaggtgttgtcttttgtgctgtgtggggatgcattgctgcctgtatttatgatcttttgccgtggttctgagcattcacctcaccatgtttacaaagaactgttttgtatatagacattttcaggcacgtgctttgcaccaaccctgcgtggctcttgtctgtgttagctgtcacggtgtgcacactaatctctgttaaagttgtctatggctgttctacttgtaagatagttttctatttccttcagtaatgtgtccacagtaccctgtatttcgagttccattatactgaagtactcatgttttaatagtgcctctccaaaggcctcaccttggacagaggtcaatccttgatgctccagcacaggtgacgtcactaattgtcactttccagtttgtttttctctattaaggaagacattttctaattgcatctccatgggctgtgagactgtgtgaagccgtttgtgtggtctccatgtaggtgctgtgttcccggcaccgccttgctctgaacactggtaattccaggtgctgcgcttggcagaggggtctcgccaaagcgcatgtgtgtgcatgtgtgaacgtgtgtgtcctttgcatggttgggcgtgggtgccttgctagggcatcagcaggacattgtgtgtatagttacaatgcttccaaactggaactctacattttgtatcttttaaagctcctataagtaaaataactattggctttattaaaaatatacatttaataataaaaaaaaaaaaaaaaaaaaaaaaaaaaaaaaaaaaaaaaacaaaaaaaaaaaaaaaaaaacaaaaaaaaaacaagatgtctgtgcgcgcggcgccgcgcgccgccgccccgacaaagaaacttgttcaaaaacacaactcgtggtgggagggcgcggcggcgcgccccacaagacgagtaggagcgagaacgagggtgacaacaagagcgtcctcccagagagagagaagcccgcggagagacagaaacaacacagggcggcgggcgttctcctcaccacaacaaaaataaaaaacccgccccgcggggggaggacccccgcgagggcttcttagaaaaaacacccccaagagcggagggtagctcgaagggagcacaatcaggggggagatcatccaaaacaaggagggggagaataccacaagacgcgcggcgcactaaagaataaaaaaaaatcgaccccgcccctcttgcttgcggtggcataaaaacacaagaaaacaataaagaccaaaacaaacagacgaagcaagagc

SEQ ID NO: 31152 - DNA, 6682 bp, Homo sapiens
agccggtccaaggcggtgcgctgggggccggggcgcgtcgcaggaaaggacttagaagccttacaaatacatctgtgcattcttgcttcagactttacaactgagggccagcccagtctggaagcatctcttattaatgttacaaggaaaccgctacctcagcaaacaaaaggaatggaggaggagacttacaacaaacgccatttaaaaaaaaaagaaaaacttgttttcaggaaacattagaggaaatttggagaatttcagcattgcatagaagcagccttacaggtaaacggatttgacgggcaggctctgtcaaaattctgcagaagtttgatcttccttcttaaggactttgtgtgaagtaattctttactgcttttaaattgctgttgatcagcttctgggtttttgggttctaacttttttgggtatattgaagacacagtgtattacattatattacatttttaaacgttaagttatttttctgccattgtaaatacaagtatcaaaatattcttgcaaagaagtaaacatttttctcagcaagcatatccttttagtaagagagtggaatgctaaacagttcttatccagcattttggacatcttttattttttgtcagagatcctgtctacactgaaaatattaattatataaacctgttgtctctcacctctacattggatcacatggtcacctgcctcatggaaatgccttttttaaaacttcgatttgcagaactccactatttttatacctagctacagttttgagaaagaagaatcagaaccctgacccacttacggttgctgggacaattccccctcccgcatgtattgctgcagtgcccaggacagtaaaatggactacaagcggcgcttcctgcttggcgggtccaagcagaaggtgcagcagcaccagcaatacccgatgcctgagctgggccgagcactgagtgctcccctggcatccacggccaccactgcccccctgggcagtctgaccgctgcaggcagctgccaccatgccatgccccacactactcctatcgccgacatccagcagggcatctccaagtatctggatgccctgaacgtcttctgccgtgccagtactttcctcacagatctcttcagcactgtgttcaggaactctcactactcaaaggcagccacacagctcaaagatgtgcaggagcatgtcatggaagcagccagtcggctgacctcggccataaagcctgagatcgccaagatgctaatggaacttagtgctggggctgcaaattttacggatcagaaggaattcagtctccaggacattgaggtgttggggcgatgtttcctgactgtggtgcaagtccatttccagtttttgactcatgcgttacagaaggtccagccggtggctcactcttgctttgctgaggtcatcgtgccagaaaaaaagaacagcggcagtggcggcggcttatctggcatgggccacacacctgaagtagaggaagctgtgcggtcctggcggggggctgctgaggcgacatctagactaagagaaagaggctgtgatggttgcctggcaggaattgaagttcaacaactcttttgttctcaaagtgcagcaattcctgagcaccagctaaaagaactgaacataaaaatcgacagtgctttgcaagcatataagatagctctggaaagcttaggacactgtgaatatgcaatgaaagccggcttccacctgaatccaaaggcgattgaagcaagtttgcagggctgctgcagcgaggcggaagcccagcagacggggcggaggcagacacccccgcagcccatgcagtgtgagctccccaccgtccctgtgcagataggatcgcacttcctgaagggcgtctcctttaatgagtcggccgccgacaatctgaaacttaagacgcatacaatgttacagctgatgaaggaggcaggctgctataatggaatcacatccagggatgattttcctgtgactgaagtgctgaaccaggtttgcccttccacatggcgaggtgcctgcaagacggcggtgcagctgctgtttggccaggctggactggtggtggttgacacagcacagattgagaataaagaagcctatgccccccagatcagtttagaaggctctagaatcgtggttcaagtcccatccacatggtgcctgaaagaagaccctgctaccatgtccctgctgcagagaagccttgatcctgagaagaccctgggtctagtggacgtgctctacacagctgtgctggacctaaaccgctggagggctggaagggagcaagctttaccctgcatacagatccagctgcaaagggagatctgtgattttggcaaccaggctgacctgccttctggaaatggaaacaaatcttcaggtggcctgcagaagacattctccaaactgacatcccggttcaccaagaaagcttcatgtaccagctccagcagcagcacaaattattccatccaaaataccccttccaaaaacatcttcatagctggatgttccgaagagaaggccaaaatgcctggcaatattgatacaaggttacaaagcattttgaacattggtaatttccccaggactacagacccttcacagtcagctcagaattccagtaatacagtggccaatggctttctcatggagaggcgtgagaacttcctgcatggagatgacggcaaggatgagaagggtatgaacttaccaactgatcaggaaatgcaagaggtgatagattttctctcgggctttaacatgggccagtcacatcagggctctccgttggtgacaaggcataattctgctgccacagccatggtgactgagcagaaggcaggagccatgcaaccacagcagccgtcactgcctgtgccccctccaccacgggcaccccaggctggggcacacacacctctgacaccccagccgggactggcacctcagcagcagtccccaaagcagcaacaacctcaagtccaatactaccaacacctactccagcccattggaccgcagcagcccccgccccagcctcgggcacctgggaaatgggtacatggctcatcccagcagccagcgcaggctgttggagcaggtctgtctcctcttggtcagtggcctggcatatctgatctcagttctgacttgtacagcttgggtctggtgagcagctatatggataatgtgatgtcagaggttctgggacagaagccgcagggacctagaaataacacctggcccaaccgtgaccaaagtgatggagtctttggaatgctgggagagattctgccttttgatcctgcagtgggctcagacccagagtttgcacgctatgtggcaggagtgagccaggcgatgcagcagaagcggcaggcccagcacggtcgccggccaggcaacccccggggcaactggccgcctatggatgacgcgcatcggacctggcccttccccgagttcttcacagaaggggatggcctgcacggtggctggtcgggtgctcagggagactctgccagctcgagtgatgagacatcctcagccaacggggacagcttgttctccatgttttcagggcctgacctcgttgctgctgtcaagcagagaaggaaacacagcagtggagagcaagacaccagcacgctgccctcaccacctctcctcaccacggtggaggatgtgaaccaggataacaaaaccaaaacgtggccacccaaagcaccctggcagcacccttccccgcttcccagcacgctgcccagccccagcgcaccactctatgcagtcaccagccctggcagccagtggaacgacaccatgcagatgctgcagtccccagtgtgggccgcaaccaacgactgcagtgccgctgccttctcctatgtgcagaccccaccccagcccccacccccaccagcacacaaggcagcacccaagggcttcaaggccttccctgggaagggtgagcgcaggccagcctatctgccccagtactgaccccaggccagccagcctgcctgcctgcctgcctgcccgcccagagctgtggggatgagtgtccccaccccagggccacttagctgacaccagcccctcagaggaccagtgcgccccatcccagggagggttccttggggacaagggtggttggcagctccaagcctttaaacctggcttctgaaacgatggcatcagagccctggagagccagctggagacacaggcgtctggccttcaggggcttgctagggaacctgcatgcctagtaagcgccacaggtgactctgatgcaggcgccacagccacacttgaagaaacacagctcttgggtttttagtcctgctgtgtgttgggaagacatcaggcctgaaagctgagggcataactgaccattttttggaaaccctctcctccctcctccacaccttgagtgatgaccacaccaatcactgtattttatagctttttttttcatgtaggtttttagttaaaacatctcctgcctaaaatgcattgaatattttaagataacagatatactggctggaggtttgtttaacactatctatatttaagcttatacaaaatgggcaaaatatagaatatttgtgattggaagcagtcacctggggtttctgggggtggacagttcctcgccacccagcagcaccctgggactgcggcctttcccagctttattgaagcagaatggtggaacttgtgccggaggtacactgctgaaggtgcgtggcggtggaccagccagctgctgtccatgtgcagagcaaggctgcacctgctgcccttcgatccttccacacatggccaggacactgccacaatcctcggggtgtggtcaaggggcactcagagacacctgcactagaaattgcattgacattgtgagctggctcagaagacaaaccaattaagatgtagatagaaattaatttaaggtcttttcttaaaaaaaaaatccacctcattttcagttaacatgtgccattaaatagataacatcctgtggatttagggatattttccagccagaatggatccagaagaattgaatggtgcttaaattgagaaataataataaatatatctatatagaatagacatatcccactgtatattaattgaggttacagaaagttctttatataaaacttatttaaatttttcatatttcatctttgaaaaagtctgagaaaaatccataatattttctggtatgaaagtttgacagtattaatattttttttatattttcttaaatcattaaaccattttaatatatgttaactactaataaatggtttattctttctaactccatataagcttttccagcaaagattgtaataacacatttatgttctcgtttttctacagatataagtaaatttatatataaaaataccaaaaagaggctgggcgtggtggctcacgcctgtaatcccagcactttgggaggccgaggcaggtggatcacctaaggtcaggagttcgagaccagcctggccaatatggtgaaaccccatctctactaaaaatacaaaaattagccgggtgtggtggcgtgcgcctgtagtcccagctactcgggaggctgaagcagaagaatcgcttgaacccgggaggcggaggttacagtgagctgagattgtgccactgcactccagcctgggtgacagagtgagattccgtctcaacaagaaaaaaaaaaaagaatatatatatatgtatgtatgtatgtatgtaaacacacacactaatttgagaggacccgtagggtgtctgagcccagccacctgagtttttagtactgtgttgtcaggctcttcccaggcctcaggtgttgtcttttgtgctgtgtggggatgcattgctgcctgtatttatgatcttttgccgtggttctgagcattcacctcaccatgtttacaaagaactgttttgtatatagacattttcaggcacgtgctttgcaccaaccctgcgtggctcttgtctgtgttagctgtcacggtgtgcacactaatctctgttaaagttgtctatggctgttctacttgtaagatagttttctatttccttcagtaatgtgtccacagtaccctgtatttcgagttccattatactgaagtactcatgttttaatagtgcctctccaaaggcctcaccttggacagaggtcaatccttgatgctccagcacaggtgacgtcactaattgtcactttccagtttgtttttctctattaaggaagacattttctaattgcatctccatgggctgtgagactgtgtgaagccgtttgtgtggtctccatgtaggtgctgtgttcccggcaccgccttgctctgaacactggtaattccaggtgctgcgcttggcagaggggtctcgccaaagcgcatgtgtgtgcatgtgtgaacgtgtgtgtcctttgcatggttgggcgtgggtgccttgctagggcatcagcaggacattgtgtgtatagttacaatgcttccaaactggaactctacattttgtatcttttaaagctcctataagtaaaataactattggctttattaaaaatatacatttaataatactttgtatccttgtttaaaa

SEQ ID NO: 31153 - DNA, 1593 bp, Homo sapiens
ccgaccgccatactcggggttaaactaagtgatcatcaatgtctatttcagctaattaaacattatgatttcaaataataataaatatatctatatagaatagacatatcccactgtatattaattgaggttacagaaagttctttatataaaacttatttaaatttttcatatttcatctttgaaaaagtctgagaaaaatccataatattttctggtatgaaagtttgacagtattaatattttttttatattttcttaaatcattaaaccattttaatatatgttaactactaataaatggtttattctttctaactccatataagcttttccagcaaagattgtaataacacatttatgttctcgtttttctacagatataagtaaatttatatataaaaataccaaaaagaggctgggcgtggtggctcacgcctgtaatcccagcactttgggaggccgaggcaggtggatcacctaaggtcaggagttcgagaccagcctggccaatatggtgaaaccccatctctactaaaaatacaaaaattagccgggtgtggtggcgtgcgcctgtagtcccagctactcgggaggctgaagcagaagaatcgcttgaacccgggaggcggaggttacagtgagctgagattgtgccactgcactccagcctgggtgacagagtgagattccgtctcaacaagaaaaaaaaaaaagaatatatatatatgtatgtatgtatgtatgtaaacacacacactaatttgagaggacccgtagggtgtctgagcccagccacctgagtttttagtactgtgttgtcaggctcttcccaggcctcaggtgttgtcttttgtgctgtgtggggatgcattgctgcctgtatttatgatcttttgccgtggttctgagcattcacctcaccatgtttacaaagaactgttttgtatatagacattttcaggcacgtgctttgcaccaaccctgcgtggctcttgtctgtgttagctgtcacggtgtgcacactaatctctgttaaagttgtctatggctgttctacttgtaagatagttttctatttccttcagtaatgtgtccacagtaccctgtatttcgagttccattatactgaagtactcatgttttaatagtgcctctccaaaggcctcaccttggacagaggtcaatccttgatgctccagcacaggtgacgtcactaattgtcactttccagtttgtttttctctattaaggaagacattttctaattgcatctccatgggctgtgagactgtgtgaagccgtttgtgtggtctccatgtaggtgctgtgttcccggcaccgccttgctctgaacactggtaattccaggtgctgcgcttggcagaggggtctcgccaaagcgcatgtgtgtgcatgtgtgaacgtgtgtgtcctttgcatggttgggcgtgggtgccttgctagggcatcagcaggacattgtgtgtatagttacaatgcttccaaactggaactctacattttgtatcttttaaagctcctataagtaaaataactattggctttattaaaaatatacatttaataata

SEQ ID NO: 31154 - DNA, 1369 bp, Homo sapiens
ccatatgttttttttgacactttctgtaaacgccatctgtgcttttctcccatttgtactgccctgtatatccccgttcagcattgccagtgtttccagccacctcttaaagcattctgaagtttcattttattctttgccacacttaagatgttcagatggaatgagcaaatctcctgtcaatagccaggaaaatactagatcaaactttagcttaagtgggatcagcatataacctctatctggctgaccccaatgctttgatgctttgttaacgttcaggttatcagttggccaaagtcatcatctgattttcgaagttgttagctaatgactctaggctacatacagagcaccaagacaatggactttttttgagttggagttttgctcttgtcacccaggcggaggttacagtgagctgagattgtgccactgcactccagcctgggtgacagagtgagattccgtctcaacaagaaaaaaaaaaaagaatatatatatatgtatgtatgtatgtatgtaaacacacacactaatttgagaggacccgtagggtgtctgagcccagccacctgagtttttagtactgtgttgtcaggctcttcccaggcctcaggtgttgtcttttgtgctgtgtggggatgcattgctgcctgtatttatgatcttttgccgtggttctgagcattcacctcaccatgtttacaaagaactgttttgtatatagacattttcaggcacgtgctttgcaccaaccctgcgtggctcttgtctgtgttagctgtcacggtgtgcacactaatctctgttaaagttgtctatggctgttctacttgtaagatagttttctatttccttcagtaatgtgtccacagtaccctgtatttcgagttccattatactgaagtactcatgttttaatagtgcctctccaaaggcctcaccttggacagaggtcaatccttgatgctccagcacaggtgacgtcactaattgtcactttccagtttgtttttctctattaaggaagacattttctaattgcatctccatgggctgtgagactgtgtgaagccgtttgtgtggtctccatgtaggtgctgtgttcccggcaccgccttgctctgaacactggtaattccaggtgctgcgcttggcagaggggtctcgccaaagcgcatgtgtgtgcatgtgtgaacgtgtgtgtcctttgcatggttgggcgtgggtgccttgctagggcatcagcaggacattgtgtgtatagttacaatgcttccaaactggaactctacattttgtatcttttaaagctcctataagtaaaataactattggctttattaaaaatatacatttaataata

SEQ ID NO: 31155 - DNA, 954 bp, Homo sapiens
ttttgagacagagtctcactctttcgcccagcctgggtgacagagtgagattccgtctcaacaagaaaaaaaaaaaagaatatatatatatgtatgtatgtatgtatgtaaacacacacactaatttgagaggacccgtagggtgtctgagcccagccacctgagtttttagtactgtgttgtcaggctcttcccaggcctcaggtgttgtcttttgtgctgtgtggggatgcattgctgcctgtatttatgatcttttgccgtggttctgagcattcacctcaccatgtttacaaagaactgttttgtatatagacattttcaggcacgtgctttgcaccaaccctgcgtggctcttgtctgtgttagctgtcacggtgtgcacactaatctctgttaaagttgtctatggctgttctacttgtaagatagttttctatttccttcagtaatgtgtccacagtaccctgtatttcgagttccattatactgaagtactcatgttttaatagtgcctctccaaaggcctcaccttggacagaggtcaatccttgatgctccagcacaggtgacgtcactaattgtcactttccagtttgtttttctctattaaggaagacattttctaattgcatctccatgggctgtgagactgtgtgaagccgtttgtgtggtctccatgtaggtgctgtgttcccggcaccgccttgctctgaacactggtaattccaggtgctgcgcttggcagaggggtctcgccaaagcgcatgtgtgtgcatgtgtgaacgtgtgtgtcctttgcatggttgggcgtgggtgccttgctagggcatcagcaggacattgtgtgtatagttacaatgcttccaaactggaactctacattttgtatcttttaaagctcctataagtaaaataactattggctttattaaaaatatacatttaataata

SEQ ID NO: 31156 - DNA, 5578 bp, Homo sapiens
agccggtccaaggcggtgcgctgggggccggggcgcgtcgcaggaaaggacttagaagccttacaaatacatctgtgcattcttgcttcagactttacaactgagggccagcccagtctggaagcatctcttattaatgttacaaggaaaccgctacctcagcaaacaaaaggaatggaggaggagacttacaacaaacgccatttaaaaaaaaaagaaaaacttgttttcaggaaacattagaggaaatttggagaatttcagcattgcatagaagcagccttacaggtaaacggatttgacgggcaggctctgtcaaaattctgcagaagtttgatcttccttcttaaggactttgtgtgaagtaattctttactgcttttaaattgctgttgatcagcttctgggtttttgggttctaacttttttgggtatattgaagacacagtgtattacattatattacatttttaaacgttaagttatttttctgccattgtaaatacaagtatcaaaatattcttgcaaagaagtaaacatttttctcagcaagcatatccttttagtaagagagtggaatgctaaacagttcttatccagcattttggacatcttttattttttgtcagagatcctgtctacactgaaaatattaattatataaacctgttgtctctcacctctacattggatcacatggtcacctgcctcatggaaatgccttttttaaaacttcgatttgcagaactccactatttttatacctagctacagttttgagaaagaagaatcagaaccctgacccacttacggttgctgggacaattccccctcccgcatgtattgctgcagtgcccaggacagtaaaatggactacaagcggcgcttcctgcttggcgggtccaagcagaaggtgcagcagcaccagcaatacccgatgcctgagctgggccgagcactgagtgctcccctggcatccacggccaccactgcccccctgggcagtctgaccgctgcaggcagctgccaccatgccatgccccacactactcctatcgccgacatccagcagggcatctccaagtatctggatgccctgaacgtcttctgccgtgccagtactttcctcacagatctcttcagcactgtgttcaggaactctcactactcaaaggcagccacacagctcaaagatgtgcaggagcatgtcatggaagcagccagtcggctgacctcggccataaagcctgagatcgccaagatgctaatggaacttagtgctggggctgcaaattttacggatcagaaggaattcagtctccaggacattgaggtgttggggcgatgtttcctgactgtggtgcaagtccatttccagtttttgactcatgcgttacagaaggtccagccggtggctcactcttgctttgctgaggtcatcgtgccagaaaaaaagaacagcggcagtggcggcggcttatctggcatgggccacacacctgaagtagaggaagctgtgcggtcctggcggggggctgctgaggcgacatctagactaagagaaagaggctgtgatggttgcctggcaggaattgaagttcaacaactcttttgttctcaaagtgcagcaattcctgagcaccagctaaaagaactgaacataaaaatcgacagtgctttgcaagcatataagatagctctggaaagcttaggacactgtgaatatgcaatgaaagccggcttccacctgaatccaaaggcgattgaagcaagtttgcagggctgctgcagcgaggcggaagcccagcagacggggcggaggcagacacccccgcagcccatgcagtgtgagctccccaccgtccctgtgcagataggatcgcacttcctgaagggcgtctcctttaatgagtcggccgccgacaatctgaaacttaagacgcatacaatgttacagctgatgaaggaggcaggctgctataatggaatcacatccagggatgattttcctgtgactgaagtgctgaaccaggtttgcccttccacatggcgaggtgcctgcaagacggcggtgcagctgctgtttggccaggctggactggtggtggttgacacagcacagattgagaataaagaagcctatgccccccagatcagtttagaaggctctagaatcgtggttcaagtcccatccacatggtgcctgaaagaagaccctgctaccatgtccctgctgcagagaagccttgatcctgagaagaccctgggtctagtggacgtgctctacacagctgtgctggacctaaaccgctggagggctggaagggagcaagctttaccctgcatacagatccagctgcaaagggagatctgtgattttggcaaccaggctgacctgccttctggaaatggaaacaaatcttcaggtggcctgcagaagacattctccaaactgacatcccggttcaccaagaaagcttcatgtaccagctccagcagcagcacaaattattccatccaaaataccccttccaaaaacatcttcatagctggatgttccgaagagaaggccaaaatgcctggcaatattgatacaaggttacaaagcattttgaacattggtaatttccccaggactacagacccttcacagtcagctcagaattccagtaatacagtggccaatggctttctcatggagaggcgtgagaacttcctgcatggagatgacggcaaggatgagaagggtatgaacttaccaactgatcaggaaatgcaagaggtgatagattttctctcgggctttaacatgggccagtcacatcagggctctccgttggtgacaaggcataattctgctgccacagccatggtgactgagcagaaggcaggagccatgcaaccacagcagccgtcactgcctgtgccccctccaccacgggcaccccaggctggggcacacacacctctgacaccccagccgggactggcacctcagcagcagtccccaaagcagcaacaacctcaagtccaatactaccaacacctactccagcccattggaccgcagcagcccccgccccagcctcgggcacctgggaaatgggtacatggctcatcccagcagccagcgcaggctgttggagcaggtctgtctcctcttggtcagtggcctggcatatctgatctcagttctgacttgtacagcttgggtctggtgagcagctatatggataatgtgatgtcagaggttctgggacagaagccgcagggacctagaaataacacctggcccaaccgtgaccaaagtgatggagtctttggaatgctgggagagattctgccttttgatcctgcagtgggctcagacccagagtttgcacgctatgtggcaggagtgagccaggcgatgcagcagaagcggcaggcccagcacggtcgccggccaggcaacccccggggcaactggccgcctatggatgacgcgcatcggacctggcccttccccgagttcttcacagaaggggatggcctgcacggtggctggtcgggtgctcagggagactctgccagctcgagtgatgagacatcctcagccaacggggacagcttgttctccatgttttcagggcctgacctcgttgctgctgtcaagcagagaaggaaacacagcagtggagagcaagacaccagcacgctgccctcaccacctctcctcaccacggtggaggatgtgaaccaggataacaaaaccaaaacgtggccacccaaagcaccctggcagcacccttccccgcttcccagcacgctgcccagccccagcgcaccactctatgcagtcaccagccctggcagccagtggaacgacaccatgcagatgctgcagtccccagtgtgggccgcaaccaacgactgcagtgccgctgccttctcctatgtgcagaccccaccccagcccccacccccaccagcacacaaggcagcacccaagggcttcaaggccttccctgggaagggtgagcgcaggccagcctatctgccccagtactgaccccaggccagccagcctgcctgcctgcctgcctgcccgcccagagctgtggggatgagtgtccccaccccagggccacttagctgacaccagcccctcagaggaccagtgcgccccatcccagggagggttccttggggacaagggtggttggcagctccaagcctttaaacctggcttctgaaacgatggcatcagagccctggagagccagctggagacacaggcgtctggccttcaggggcttgctagggaacctgcatgcctagtaagcgccacaggtgactctgatgcaggcgccacagccacacttgaagaaacacagctcttgggtttttagtcctgctgtgtgttgggaagacatcaggcctgaaagctgagggcataactgaccattttttggaaaccctctcctccctcctccacaccttgagtgatgaccacaccaatcactgtattttatagctttttttttcatgtaggtttttagttaaaacatctcctgcctaaaatgcattgaatattttaagataacagatatactggctggaggtttgtttaacactatctatatttaagcttatacaaaatgggcaaaatatagaatatttgtgattggaagcagtcacctggggtttctgggggtggacagttcctcgccacccagcagcaccctgggactgcggcctttcccagctttattgaagcagaatggtggaacttgtgccggaggtacactgctgaaggtgcgtggcggtggaccagccagctgctgtccatgtgcagagcaaggctgcacctgctgcccttcgatccttccacacatggccaggacactgccacaatcctcggggtgtggtcaaggggcactcagagacacctgcactagaaattgcattgacattgtgagctggctcagaagacaaaccaattaagatgtagatagaaattaatttaaggtcttttcttaaaaaaaaaatccacctcattttcagttaacatgtgccattaaatagataacatcctgtggatttagggatattttccagccagaatggatccagaagaattgaatggtgcttaaattgagaaataataataaatatatctatatagaatagacatatcccactgtatattaattgaggttacagaaagttctttatataaaacttatttaaatttttcatatttcatctttgaaaaagtctgagaaaaatccataatattttctggtatgaaagtttgacagtattaatattttttttatattttcttaaatcattaaaccattttaatatatgttaactactaataaatggtttattctttctaactccatataagcttttccagcaaagattgtaataacacatttatgttctcgtttttctacagatataagtaaatttatatataaaaataccaaaaagaggctgggcgtggtggctcacgcctgtaatcccaaagtgctgagattacaggcatgagccacacaccggcctatttcctccatatttttaaaaa

SEQ ID NO: 31157 - DNA, 4008 bp, Homo sapiens
agccggtccaaggcggtgcgctgggggccggggcgcgtcgcaggaaaggacttagaagccttacaaatacatctgtgcattcttgcttcagactttacaactgagggccagcccagtctggaagcatctcttattaatgttacaaggaaaccgctacctcagcaaacaaaaggaatggaggaggagacttacaacaaacgccatttaaaaaaaaaagaaaaacttgttttcaggaaacattagaggaaatttggagaatttcagcattgcatagaagcagccttacaggtaaacggatttgacgggcaggctctgtcaaaattctgcagaagtttgatcttccttcttaaggactttgtgtgaagtaattctttactgcttttaaattgctgttgatcagcttctgggtttttgggttctaacttttttgggtatattgaagacacagtgtattacattatattacatttttaaacgttaagttatttttctgccattgtaaatacaagtatcaaaatattcttgcaaagaagtaaacatttttctcagcaagcatatccttttagtaagagagtggaatgctaaacagttcttatccagcattttggacatcttttattttttgtcagagatcctgtctacactgaaaatattaattatataaacctgttgtctctcacctctacattggatcacatggtcacctgcctcatggaaatgccttttttaaaacttcgatttgcagaactccactatttttatacctagctacagttttgagaaagaagaatcagaaccctgacccacttacggttgctgggacaattccccctcccgcatgtattgctgcagtgcccaggacagtaaaatggactacaagcggcgcttcctgcttggcgggtccaagcagaaggtgcagcagcaccagcaatacccgatgcctgagctgggccgagcactgagtgctcccctggcatccacggccaccactgcccccctgggcagtctgaccgctgcaggcagctgccaccatgccatgccccacactactcctatcgccgacatccagcagggcatctccaagtatctggatgccctgaacgtcttctgccgtgccagtactttcctcacagatctcttcagcactgtgttcaggaactctcactactcaaaggcagccacacagctcaaagatgtgcaggagcatgtcatggaagcagccagtcggctgacctcggccataaagcctgagatcgccaagatgctaatggaacttagtgctggggctgcaaattttacggatcagaaggaattcagtctccaggacattgaggtgttggggcgatgtttcctgactgtggtgcaagtccatttccagtttttgactcatgcgttacagaaggtccagccggtggctcactcttgctttgctgaggtcatcgtgccagaaaaaaagaacagcggcagtggcggcggcttatctggcatgggccacacacctgaagtagaggaagctgtgcggtcctggcggggggctgctgaggcgacatctagactaagagaaagaggctgtgatggttgcctggcaggaattgaagttcaacaactcttttgttctcaaagtgcagcaattcctgagcaccagctaaaagaactgaacataaaaatcgacagtgctttgcaagcatataagatagctctggaaagcttaggacactgtgaatatgcaatgaaagccggcttccacctgaatccaaaggcgattgaagcaagtttgcagggctgctgcagcgaggcggaagcccagcagacggggcggaggcagacacccccgcagcccatgcagtgtgagctccccaccgtccctgtgcagataggatcgcacttcctgaagggcgtctcctttaatgagtcggccgccgacaatctgaaacttaagacgcatacaatgttacagctgatgaaggaggcaggctgctataatggaatcacatccagggatgattttcctgtgactgaagtgctgaaccaggtttgcccttccacatggcgaggtgcctgcaagacggcggtgcagctgctgtttggccaggctggactggtggtggttgacacagcacagattgagaataaagaagcctatgccccccagatcagtttagaaggctctagaatcgtggttcaagtcccatccacatggtgcctgaaagaagaccctgctaccatgtccctgctgcagagaagccttgatcctgagaagaccctgggtctagtggacgtgctctacacagctgtgctggacctaaaccgctggagggctggaagggagcaagctttaccctgcatacagatccagctgcaaagggagatctgtgattttggcaaccaggctgacctgccttctggaaatggaaacaaatcttcaggtggcctgcagaagacattctccaaactgacatcccggttcaccaagaaagcttcatgtaccagctccagcagcagcacaaattattccatccaaaataccccttccaaaaacatcttcatagctggatgttccgaagagaaggccaaaatgcctggcaatattgatacaaggttacaaagcattttgaacattggtaatttccccaggactacagacccttcacagtcagctcagaattccagtaatacagtggccaatggctttctcatggagaggcgtgagaacttcctgcatggagatgacggcaaggatgagaagggtatgaacttaccaactgatcaggaaatgcaagaggtgatagattttctctcgggctttaacatgggccagtcacatcagggctctccgttggtgacaaggcataattctgctgccacagccatggtgactgagcagaaggcaggagccatgcaaccacagcagccgtcactgcctgtgccccctccaccacgggcaccccaggctggggcacacacacctctgacaccccagccgggactggcacctcagcagcagtccccaaagcagcaacaacctcaagtccaatactaccaacacctactccagcccattggaccgcagcagcccccgccccagcctcgggcacctgggaaatgggtacatggctcatcccagcagccagcgcaggctgttggagcaggtctgtctcctcttggtcagtggcctggcatatctgatctcagttctgacttgtacagcttgggtctggtgagcagctatatggataatgtgatgtcagaggttctgggacagaagccgcagggacctagaaataacacctggcccaaccgtgaccaaagtgatggagtctttggaatgctgggagagattctgccttttgatcctgcaggtatgtgaggcctcccatccctcgcccagtgtcaacagcaaatgcaactgccgaggtcttcccagggcctgtctgctgcagccttacttgtgaaggtgaaatcatttaatccccctttacgaccctttctcactgtggaggcaagtatggggcagatctaccaagatgggaaacagtggtgagaaaggggctgagaacatgagtggactatttttcttactttatagagaacagaactgaggctaagagaggttacttgaacagctcaaagtcccatagttcaagtaggctccagtctaggcctgcctactcccggcagccaaggtcagcagccctttgtggggtgcttttttcctgattatataacctgttctttgcgatgctttttttttttgcctaaactctaggacctatgacaggtgacagacaccctcctgccttcatagaatacagcttctcctgggctagacaatgaaaataccaccagagtcatcttaaaaaattagagaaggaatttacaaacaagaacaaactaggaggaggaattaagggggaaaagccaaaaataagtaaattagaaagaaaaatagagtagaaattgcaaataactctaaaggatctttggaagaccaataaaatgtataagcca

SEQ ID NO: 31158 - DNA, 447 bp, Homo sapiens
ccagggttccacctcccccttgtgttgctgaagcagggcctgcccttaaggtccccactgagggcgcctggtgggcctggagcgtgggaggagggtcaccagtgccccttgcacagcagcgcatgggggaaacagcatggctcattcactaagaaccacggggtggaggcggtgctcaggcctgtaatcccagcactgtgggaggctgaggcaggactagcacttgagcccaagagttcgagaccagcctggcaacattggaaaccccaccttactaaaaatacaaaacattagctcggcgtggtggtacacgcccgtggtcacagcgtcttgggaggctgaaatgggggaattgcttgaggcgggaggtcgaggctgcagtgagctgacattgcaccactttgggtgcacaccagcctcggtgacagaccgagaccctgcctcaaa

SEQ ID NO: 31159 - DNA, 262 bp, Homo sapiens
ttaatgtcagtgaagaatgctcatactcagatccctcagagtctcagacagaattaagtgagttcgttcatgaaaaggaagttgtagatttgtcccaagagttgaaggaacgggtctctgaagatgacgaaacccagccagaaaaagggactgagttacaatttgagcatcttaattgggatccagaggaagttgcagagtggattagccagctaggcttccctcaatacaaggtatacaaaaataagatgttttgaaatca

SEQ ID NO: 31160 - DNA, 347 bp, Homo sapiens
tggccaggcctgggcatgggacatggtggtcagctggcaagtggggacctgtagggcccaggaagacagagtacatgcctcaggcaaattggccaaggccaagatccagcctcctgtgacaaaaagccaagccttcggcctcagtctgagggtaaggagatcacatgctcttgttctctgatctgtcccccaggtggcagtgacgaaagaagagactctcccggccgaggccccagtgcatggagagaaggaagaaatcaatttcctaattggtaccatatacatcaggtcaaataatttcttattttctagcctgggcaacacagcaagactctatctcaaaagaa

SEQ ID NO: 31161 - DNA, 423 bp, Homo sapiens
ttttttcttgagacggagtcttgctctgacgcccaggctggagtgcggcggcgcgatcttggctcactgcaagctccgcctcccgggttcacgccattctcctgcctcagcctcctgagtagctgggactacgggcggcccgccactgcgcccagctaattttttgtattttttactagagacagggtttcacttggtctcgatctcctgaccttgtgatccgcccacctcagcctcccataatgctgggattacaggcatgagccacagcgcccagccaataatatgctttttaaagaatactttgaggcaggagagtgagtagttatattgtaaagatcccacatataaaccagtaagaaaaactatcctaatgttatgtagatcagtatgcatggcttgagataaaacttccagtgactt

SEQ ID NO: 31162 - DNA, 478 bp, Homo sapiens
tttggggctaagacttgagtgaggggagggaatgaaccatgtggacatctgggggaagagtattctaggcagagggaacagcaagtgccaaggcccagaggtgggtcggaacagctgttggaggccagtgtagctggagcaggatgagctgggggagagtggaagggaggatggggagaggggaagggtggcaaggagatggctcaggatcttatgagccactgtagggacataggcttttactcagagggagatgggagccatggagggttctgggcaggggagggataatctgacttcattttttattttttttcgagatggagtctcgctctgtcgcccaggctggagtgtagtgatgccatctgggctcactgcaacctccgcctcccaggttcaagcgattctcctgcctcagcctcctgagtagctggaattacaggcatgtgccaccaggcccagctaatttttatatttt

SEQ ID NO: 31163 - DNA, 472 bp, Homo sapiens
tcatgttgtctcaatttttatttgacatccatgacataatctgcagactgcccagtgcctttgggtgattgaattagttttgtaagtccccagcagttgtggataaatcaaaaagacaaggaaagtgcaagatacagcagagatatcctgaagcaggcaacttcaaacagaaggaaaccacttcacatccagaggacagaggacggggtcaaactcgaaagcattttcccacccgcgttcactctactccttgaatattagttctccacatggccacagacacatctaagagagtaactccagcaaactgtctacattactagagtgttcccctcgttgaggctccccagcccctttctcccaccccagaagtttcttcatggtccccttcacatccttgttcctcaaagtgtagatgagggggttgatgctgggaatgacgatggtgtagaagagagtcaggaacttcccc

SEQ ID NO: 31164 - DNA, 433 bp, Homo sapiens
cagaatttaaaaatagatgaagcaaaatctgatagaacttaaaggagaaatagggaattcaataattataatagaaaatttccacattcttctcttacgaatagaactagtagacagaaattactaatggtatagaatgcttgaaggtggtctgggcgttgtagctcatgcctgtaatcccagcactttgggaggcctaggcaggtggatcacttgaggtcaggagttctagaccagcctggacaacatggtgaaaccccctctttactaaaaatacaaaaattagctgggtgtggtggcacgtggttgtagtcccagctactagggaagctgaggcacgagaattgcttgaacccaggaggtggagactgcagtgagccgagattgtgccactgcactccagccttggtgacaggggtgaaactctgtctca

SEQ ID NO: 31165 - DNA, 405 bp, Homo sapiens
tattgttggccataagaatacgttttttggaaagtggtatatggcagtatgtataaggtacaactgttcaacctggaaatcataggatagaaaattacaacattaaaactctgaaaattagtagattacatggatgatgtcacttaattttaaaatggaaagaacaagtgttcaaccacaggaatttgtatgaagtgcatttattaatataaaaacacaaagccagtaaaatgatgacatagatgtacaataaaaagagaagagcataatgtatgccttagggaaatcctattgtagccttcataacaaactaagtgtctttgtgtttctgggtttgtttatttggttatttttagtgtgtatgtacatcatttgtggatgaatattctgacattttccctggca

SEQ ID NO: 31166 - DNA, 1337 bp, Homo sapiens
actcagccaagtttaccataaacagaaggcagaattgtctatttttaactttacagcccttgggtgattaaaattttgagccataataaacaacttttttcttctttgcaacataatttctcatttgaaattgcagtctttttagttgtttaggagatatggattgagcacttcatgtttttaaattctttcttaaatggaaatttcttgcagagactaaatgcatgcattagcatgccaaaagcacaattttttttttttaaggaaagaaaaggaaaaaaaactcactaaggcccaaaactgaattgccttctcttctttctattttaactgtttaccaattagcacctttggccagctgcattttaggagaacatagtaacagatccgccattctgttcctgtaagtagaatggccgcaaacacctcaccatcacgggggcagattattgggcaatttggcatgtttgcatacctattatgtcagcagaaactgtatcttcccaccaggaaagacagttgcatatgcaataaaccaatagcctttgacatgtcagttaattacatcagttagccactatctcctgagcatgatcgctgtgttaatgaaactattttggtgtggaaatgaaacaggtcaagacaagtagatcaggaaatagaagggatttagggtcatatagaaagtcaatgtgctgagtcacacagaacttaaccttggccttcagaaaggatataaaatttttccctctgctgtgagtaatgttagtattcctttttcttggcatcacttcgtgctaaatagctcaaaactctttagaaattatcaagtttaacagtattgcctccccttcaagggctgttaacaatcgagttattggagataaaccaaagaccagtattataggcgctgactttaaaagacatggtttttttttccccctgagtaaaggggaccagtcaaagatgatgcccggtttctggtttggacgacagagttaagaatggtgacagctacttgttttgaaacaagatgagcagatgtattggaaaaacagatcagatattgcaaggagatgttaactcgggtttctgttggttttttcatgctgagcaggggtttgaggctctagagaaggacttaactccttcttcgatcttgtagcacatcagagactatcccacccctactttcaccagacacttaaatatttaagcttgttactgaggtcattctaagaaatctcttcttcaattttacagacatgccttcttcaactgcccgtcacataatatgatttcccaattcattggcatcgagtctccattctgttggc

SEQ ID NO: 31167 - DNA, 1400 bp, Homo sapiens
catggcttcagccagtccctccgtttggggtccctgacttcccgcaacagacaacttgagttgcatcaaactaaaaagcatctgcactgcaaagggtacagttaacagaatgaagacacgggttttgagaaaccattttcaaatcatatatctgataaggggctaatatccaaaatgtattaagaaacccaagcccaatagcaagaaaacaactgtctttaaaagggggaaaaggacctcaacttaaatttttcagaggaagacatgagtggccaattgattgatacatgaaaaaaatgctcaacatctctaatcattagtgagttgcaaatcaaaactgcaagatattaccttacaccttttagaatggctattattaaaaggatgaaagacaggtgctggcaaggatgtggataaaaggaagtcccaacattctgttagtgggaatataaattagtatagccaatttaggaaactatatggtggttccttaagaaactaaaagtacaattactatatgatctagcaatctctacttaggtatatatccaaaggaattgaagcagtatgttgagatcttgcactcccttattttgaaattatttacaaagctaataaatggaaaagacttaagttttcataacagatgaatggacatagaagatgtgttgtatatacatattggaatattttttatccttggaaaagaaggaaaattgtcatttgtgacaacatggatgaatctgtagtatactatgctaagtgttgtaagacaggcacagagaggcaaatactacattatatttgtatgtggaatctaagaaaggctaactcatacaagtagaaagttggatgttatggtttccaggatgtgggtgttggagagatgggcaaaggcaagacgttggtcaaagagtaccaattttctgttaggaggaataagttttagacatatttcacagcatggtgaccattgtcactgactgtatattttaaaattgttataagtagatattaaagttgtcacaacaaaagtaggtgaagttatggatatgttaatgtgcttgatttagttattacactatgtatacatacaaaaacatcagatagttccctggaattatatacaattattacttgtcaattataaaaaaaagccctactgcaaccactaaaaaggattttcatataatagagggaaaaatcgttaaagataataatacattattttagaaaatattaacttataaaaagtagtataggagggattctgtaaaagaagatagacatagaattttaaaatgtataatggaaaatttaaatccagctgtactgatggatcaagcaatccaaaccagtctgattgaccaagtggatatttaaaaaacaatcaaactata

SEQ ID NO: 31168 - DNA, 427 bp, Homo sapiens
aatgatgttgccattattttgattatcaaaatatcatgacaatggcaatacattgtaagtatttccatgtgccagatacgtctcctctgttatcttgatgctattttatactattttacaataaggaagcagaggctttgggggaggggacagacaatatcttgccttcattcatagagccaggaaaaacattcgggtcagattggaagacatctctgtctacattccaaaacacatattaaggaatgtcctggagctggctaccacaggcttctgagaaccaactgtggtttcccactctgccaatggtgacatcttgttggtgttttgaaattggacatggtggggatatttataccatggaaatagcaaacactacaaattggggttttttccctagagcgccagtttatcttccagtacatca

SEQ ID NO: 31169 - DNA, 442 bp, Homo sapiens
cgggctcaggccattcccccacctcagccttctgagtagctgggactacaggtgcatccaccacacctggccaacttttaaatttttagtagagacagggtcttgctatgttgcccaggctggtctcaaactcctgcccccaagcaatcctcctgccttggcctctcaaagacgtgggattataggtgtgagctattgtgcccagccagttacctctaattttttgggtgtttttttttctggcctccgatagtttcctcatgtgcatctgccgatcagtccttagctgaacacttgagtgggaaccctctgcaaacctcaggaatgtcctagcagccttggtctccccagattctctgctctgtattctcaactcatggagtttggttctacccaggttcccctttctttgtggtgtggcttgcaaactctctcaaggcag

SEQ ID NO: 31170 - DNA, 276 bp, Homo sapiens
agtcattagaatatgaagggctaatcctgaaggatacaggaccagagaaagagatcgccagattctatgtgtaaactcttctcaaacctctggttgaaaccagaaatgcacaaaggtgagacaaattgctagcaaccatattaaatccgaattactaaatgcaaatcctttgtatccaaaagctgaggttttcaaattgaatcaaacattattgattgtgtaccacaagacaaataccaacattctcaaggaataatatggaatctagagtcttaa

SEQ ID NO: 31171 - DNA, 925 bp, Homo sapiens
tttgattcttgacctgggctcttttctgaatgcagtatttaccactcatgttgccaaacaactaaacaaacaaacagacaaaaactcagttgttcaatgagtgttacaggagattttgttcttcttagttgctctggatccttctgttggccacccttgtggggctgctgctccagcggcttgcagctagactgggagtggttactgggctgcatcttgctgaagtatgtcaccgtcagtatcccaaggtgagcaatgtattgtcctgtttgtctctcacccatgccataggaatctgtgtgtctggcggtatgtgctggcctcattctatagtgagacagtcaaggacttgggggtcagtggccctgaagacagacggtaccaacggaaatactgtagctcctcctgctgccaggccatgttttccccctctttcaaaatctaacttgagactcgcatttcctagaaggttttcttagaaaaactgtgttaccattcactctggcttccagtatctagcaatgcccagcccaaggggaggaggatgctctctctaagcacttttattcatacctccatgttactccatcagtttgcattttatatatgttctttttttgtttgactttgccatcactttgaaaaagtaattttttttctttttagtacaaactatatgtggcaagatctttggatttgctaataattatttttcagtttcccctcccaccgggggctacactgtcctctgcagcttcttctggacattttgggcctttcttaccgttcctaaggcaagaatgaacactatgtctggaagatatttttaacttagttttgtctcttgttttgtttcttttcctgggtgtgagcaaaaagtatccttatctgcttttcaaaaaaataaaaaaatcttgataatatc

SEQ ID NO: 31172 - DNA, 704 bp, Homo sapiens
taaaatagtatggacaaactttgttgaggaaggcagctgattttttgaagggggagtggggttgagagaatgacttgtgcaacccttggtggtagaagatgggcacagctggatgttcaaggaagggagcaggtttgcatttgagaagtgctgtgtgagcagtcatggctcttcaaagagcctggtgagtgatgaccatgttttgtctttcagggttggcaatgtttgattgcactgggcatgtccttcctggactgtgggcatacggtaagcatctctaaaggcctgctgacagaagaagccacccgtggctacgttaaataacactggattagtctgtcttctgcaggtagccatcagagccagtgtgtttctatggtttactgtgtgaacatagccaaaagtatgtgccgttgcacagactgtgtttatgactcaaccgttggttggaaaagactttgtttcatgtgtatttgaaagatggaattattttttccttcctgacctaaccttagaactggattagggtgggatctttgaaaagctgacatttgctgctatcattccaacactaaattcttaagtagttgcccaagggccagctcagtttatccttcggagagacaaggatatgcatgattcttaaccaggctatatgttaaaaaaaaattggaaaatgcaatacattttttattatacaaact

SEQ ID NO: 31173 - DNA, 653 bp, Homo sapiens
tgggaacgttaataaaatggctcattgcgtttctaggccttgttgcatctctagggacttaaatattagggattatttgttggtgtcttttcccccctctttctccctgtctaccagtatctaactttgggtgatttaacttagacttatgaagaatcattttttttcaaattaagaacaatttttccattcattttgaactgcctctaattcccatcctgtttccttttctgtctgtggccaagttggattattccatcagtgactgtgctgatttcttttacagaggctggcggattgcaggaggaatcttggtccttatcatctgttccatcaatatgtactttgtagtggtttatgtccgggacctagggcatgtggcattatatgtggtggctgctgtggtcagcgtggcttatctgggctttgtgttctacttggtaagtctagcctggaagagcaggggcataggtatcagggatggttgaggtggggttcactgacattcagaaatgaacagacccaggctgggcacagtggctcatgcctataatcccagtactttgggaggctgaggcgggaggattgcttgaatccaggagttagagaccaatctgggcaacatagtaagactccatctctacaaaaaaaga

SEQ ID NO: 31174 - DNA, 499 bp, Homo sapiens
ggaccccgacgcttaagggctacctcatttagtctctgttccctatttggggaatgtacagttcaacgaaagggcatgaagttcttttttctccccccatatgaagttcttaattgctcagtgaactaggatgtaggtgagtgttggatctctcacttttcgtctggtcaacttttgtcccctaaatctctcagctgactccaaactcctgaaatgtcacaaggaaacttgttctaactggtcaaaaagtgactgctgttgttatctttctagtctagacaggtaaaccggaacaataagcaggaagttcgagaagccaataagtactttttcattgaatcctgcattgcactctttgtttccttcatcatcaatgtctttgttgtctcagtctttgctgaagcattttttgggaaaaccaacgagcaggtggtgagtaagccagggttatgggtggtagtgaatgtgagggtaaagtgaagactgcaatgggatgggg

SEQ ID NO: 31175 - DNA, 4143 bp, Homo sapiens
cggacgcgtgggtcgacccacgcgtctcccggaatatggagccctgggcgcgggggcggcgtgtcaggtggttgcggagctggtaagaatcatattctaagaactcagccactcaggtatccaccatggtgctgggtcctgaacagaagatgtcagatgacagtgtttctggagatcatggggagtctgccagtcttggtaacatcaaccctgcctatagtaatccctctctttcacagtcccctggggactcagaggagtacttcgccacttactttaatgagaagatctccattcctgaggaggagtactcttgttttagctttcgtaaactctgggctttcaccggaccaggttttcttatgagcattgcctacctggatccaggaaatattgaatccgatttgcagtctggagcagtggctggatttaagttgctctggatccttctgttggccacccttgtggggctgctgctccagcggcttgcagctagactgggagtggttactgggctgcatcttgctgaagtatgtcaccgtcagtatcccaaggtcccacgagtcatcctgtggctgatggtggagttggctatcatcggctcagacatgcaagaagtcattggctcagccattgctatcaatcttctgtctgtaggaagaattcctctgtggggtggcgttctcatcaccattgcagatacttttgtatttctcttcttggacaaatatggcttgcggaagctagaagcattttttggctttctcatcactattatggccctcacatttggatatgagtatgttacagtgaaacccagccagagccaggtactcaagggcatgttcgtaccatcctgttcaggctgtcgcactccacagattgaacaggctgtgggcatcgtgggagctgtcatcatgccacacaacatgtacctgcattctgccttagtcaagtctagacaggtaaaccggaacaataagcaggaagttcgagaagccaataagtactttttcattgaatcctgcattgcactctttgtttccttcatcatcaatgtctttgttgtctcagtctttgctgaagcattttttgggaaaaccaacgagcaggtggttgaagtctgtacaaataccagcagtcctcatgctggcctctttcctaaagataactcgacactggctgtggacatctacaaagggggtgttgtgctgggatgttactttgggcctgctgcactctacatttgggcagtggggatcctggctgcaggacagagctccaccatgacaggaacctattctggccagtttgtcatggagggattcctgaacctaaagtggtcacgctttgcccgagtggttctgactcgctctattgccatcatccccactctgcttgttgctgtcttccaagatgtagagcatctaacagggatgaatgactttctgaatgttctacagagcttacagcttccctttgctctcatacccatcctcacatttacgagcttgcggccagtaatgagtgactttgccaatggactaggctggcggattgcaggaggaatcttggtccttatcatctgttccatcaatatgtactttgtagtggtttatgtccgggacctagggcatgtggcattatatgtggtggctgctgtggtcagcgtggcttatctgggctttgtgttctacttgggttggcaatgtttgattgcactgggcatgtccttcctggactgtgggcatacggtaagcatctctaaaggcctgctgacagaagaagccacccgtggctacgttaaataacactggattagtctgtcttctgcaggtagccatcagagccagtgtgtttctatggtttactgtgtgaacatagccaaaagtatgtgccgttgcacagactgtgtttatgactcaaccgttggttggaaaagactttgtttcatgtgtatttgaaagatggaattattttttccttcctgacctaaccttagaactggattagggtgggatctttgaaaagctgacatttgctgctatcattccaacactaaattcttaagtagttgcccaagggccagctcagtttatccttcggagagacaaggatatgcatgattcttaaccaggctatatgttaaaaaaaaattggaaaatgcaatacattttttattatacaaactacagaatgagtatgcaagttttatttatcaaaatgtaatggatttttaaaggctgagaaattttccttatacctaccttttcagttattttaattataccaaattatcaactagaatagcttcatccatatgaaatataaaatgaagagacacctagctctatcaggcttaggattctttgaacttatttccactttaatttctcagtggaagttaagaggggtgagaaaacaaagaaggggaaaaactgacaactaacaaaaccagcaccacatcgctaggtggtgcttactaattaccttctcaggattttcctcagattgaaaagcttatgaggatttcttgggagtcttaataacctgcctgttagtacagagctttcctgatgatatttactcttgagcacatgtggttgtaaaaccttaactttctttctccaggagggtggtgatagaaacagatggtagtatttatgaactgatgttctcgtgaaatgttgagggtggggagaaaagactttaagggaggagagccatctattttgttcctaaagccacctctcagcagaatcgtcatgtttttctgatgcaccgctctgcttcatgcccaagatgacttgcgaggcaatctcaggagctgtggacttaaccattgcaaagcacactgtctttctcagcgttctctgcaagtcagtaggtgttagtatggttgcaaagttcactgtctcagcaaagttgaactgggctacctctctacagctgtttcctcagagggaaaaatcttgagaccagatggtggagctctggagtcagaggaaatgggtgtcttcagcacaaagctgctgcttttacttcagccacttctgacatttttacataccgagcctgagattgtgtgattatctcaaatcaaatcactttgatggagataaataatcaaaactgttttatagtcattgatttggtgagaacagtaatggaaaatggtgttgaaggacttctcatttttggagctttccttccagagtcctggctgattggtgttcgctgttcatctgagcccccaaaagcattattactgatacttgcacacagtcaaaagcgcagactggatggatggtcttttataaggcatttaagggtacactactgtgtttcactgaccatacatttttcttagcccctcaagtaatatagcacagagttatgaatgacaattcccctaaccattcctcttcatatctgcctcttccccttaccatcgtaattctccaaactggtcataaaggcactctgtgaagatattggggactgacatcttaagctctcacctggctgcagtaggaaaggccaaactgacgacaaaaaaaaaattctttataaagatgatatggtaacatgtatctttgccctgggtctgggtgggtccagtcagtctcagatttacaagcatttaggagcctaggtaaaagctgctagtattcttttaaaagttatatttatgacttgcaatgatagaaaactccttccaattaaatggcattttataatattatgtgtgtacttcacagtgttaaaaataccctcatacgttattgcatttgatcttcacagaaagtgcattttaaccagtactctgggtgcaataaataatatgtagaaatttaagtcctccaattccagcatatccagtgagttttgacagtgtgtttatgtggaatgtttaaggatatacaattgtactttatataaattggttcttgttcttcttaaatgtgacatgaaataattgtgctgctacattatactggaaattaacaggggaaaagggaagagctcttggctcccttgaggttctgctagtggtgttaggagtggttacaactgagcttttagtaaccatttaaccgtatgtaaacttggtttctaattaaaaaaaaatttctttttcca
